United States Patent Application Publication US 2014/0057251 A1 - sequence listing, part 139

SEQ ID NO: 261243 - DNA, 802 bp, Cannabis indica
atttttaattcttgggtcaattttgctaaaaaatcaaatttgaaaaaaaaaattattcatcttgttatgtgaaataaatattttgttacaataatttttccaaaattcacataataatttgatgaatagattttagatttagaatttaaaatatattttcaaagcaagattgactattgaattaattagataagcttaatttttattcatattttatataagctattttcaatgtgcaatttttgaggacatttttgatatcaccaaaataaaaataaaaaaaaaatgtgtgtttttaatttttcttttgcttgaggactagcaaaattttaagtttggggttgtgatatcaccatttcacatttttttaaactaagattggtttagttcttaagtttttaattgtttttgaatttattagctttattgtattttatatgtttttgtgtgtttttataattactttgttataattttttatgtggtatttattttttaattttattttagttttctaattaattttatgtatttttaggtgtgtttggaagaaaaagattggaattaaattgaagaaatattggagaaattgagccaaaagtgtaatttttaaaagaaaatcagatgaggccctttgacaaagctcactctcggtcagctctttgacccaatcagagcagtccgcctacagatctaacggctcagacgcgtgcctgaggcacaccccaaacagccgagagtggcactctgcttcctcctgctgcctttcttccacgcgtgtcccactggtccccaactcgcc

SEQ ID NO: 261244 - DNA, 839 bp, Cannabis indica
tagaaggtgatatcgctccgggtcttcaagatagcttcctctccactttcatccactttttaggtctattcttgcttaatttgaccttctgaatcgtgttccttatataggaatgaaatgtgtgcctccaatttggaaaaaatctgaattaggtcaaaaactgcgttttccgtacttggtcgcgaccaacttaaaggctggtcgcgactacaggcaaacctcgaaaatcataggttctgccaaaatctcccagtcccgaccatggtcgcgaccaaagaaaagggtcgcgaccagagtccttggtagtcgcgactactgacactcgaagaacaaatttttccgctttttcaccaatttgtcctgtcttttcatcaattgacttaatttgaactttgataccccgggaacccgaaacaaggaaaatcaagcgtaaaaccgctccaaaagataccaatagacgagaaaattacttttcagacccgaaacataggctaaatataacctaacacgtatcagagtcgtagcggaagagaataagtaattagatttcataaaaaaaattattgaatgtgatatgaaccataaatttcggatcttaacacaattatacataacacaaacctaactattagtttaggaatttttacctcctgttacctatcaggattttctcactatcttttcatattacacaatcaaacatccaatttagaagaacttgttgaagatttcttgccagagtcttccaagctaacctcaacacttcaggaatagagtggactattagatttaatttggatgaatgtaatttttctgaattaagatagaaaacaacacac

SEQ ID NO: 261245 - DNA, 664 bp, Cannabis indica
taatcaacaatcaatgtacacttttgtatatactttctaggtttatactatttttaacctaattcaataataaatttttttagaagtgaatagaatgtatcattttattaatattaattttccaattattggatactctattcacgaataaccttataaaaaaaatcaagttccaatttgggaaagttataaataagaataacctctaaaatgtaattagttatacattttctaagtctcgtattaacaaagtatacctctatataatataatatatatacatatattttgtaaatttatttatgtaaaattaataattttatttcaaattataatacatatatgaacattatatttactctaaaataatattaatataatatagtattaatgattatttattgttgttattattacattgatattttttagtttttaattttttttttctagtgtaactttattgagttataacttctcaattagaatataatttatttagtctcaagtgtattcttggatagagattctacggtattatcaaaggataccaaatgaatatgttccaagaattataaacattatgtatttaaatttatttttataattaagcaactaagttcgcggtgtagtctaattttttgtaaattatatatatatatat

SEQ ID NO: 261246 - DNA, 762 bp, Cannabis indica
aaaattgtgggatttgattacaattcaacccaaataaatgaggttttaacacaactatgaatatctcgcctttattgcgccgagatgagcgcataattaaagatatacggtaagccttatctcatagggatgcctcgccaaggagggagccaagatcactttgatagcgagcagctgcttgtcattttagcttctcgagactaatattgtcttaaccctgatggttatactctctggagttgagaagaccttcatcgcatgcaaaacatcttttagcgagataaacgcctcgctgtctgttatcttggctcgccatactatctatactcaatttgtatatcgtataatatacgctaagtatttttagtattttcgctttccctttcacagaacgaggttaaggcctcgtcatgagcgtatgcactcacatggtttctcgtcaatacataaattagcagtttgtatgtttctgtctcgcagaaggctattcagccaactgagttataaacctaccctgcgaattatatttccaacaagttattccatgcttagcgtacttgtcgtttgtgtgtttgagtttgtcccaactcgacacgtgtcctcctctaatgtgcttatcgaacttcgggtataacaattgccccttagaaagttctttttaataaataagagctttttaatgattacaaagggtattttcgtcacactcctatgtttttgaaaagacgcattccctctcattttggcagttgtgtggtttcg

SEQ ID NO: 261247 - DNA, 515 bp, Cannabis indica
gagtattattgtcacaatatatatccatatatttataaataaatattttattttgattacaatttatggtttttttttttaggaatttatgagcaaagttgaaaagaaatgaagaaaaaaattagcattttttgttgaagtccaaagcaaccgaacccaaaaaggtcaatattagcccatgaagcccctcatcaattttatctcttctaaagcatgtgatgcaatgagagtaagtctaagtcatcatcaaccctattttcctcttccacactcaaccttcatccaaagagtagaaaacaaatcacaatgaaaacaaaaattaatattaattttatttttgatttcaaatgtcaaattcaatattaatatttattttataatctcaaactttcatttatttatttttggtcctttaatggctctataaataggagctcattttagtaatgaatggtgtaatagaaactatagcaaaatttctctccacttttcttctcatcttttttctttagaaa

SEQ ID NO: 261248 - DNA, 774 bp, Cannabis indica
attgtcttggtgtaaattattcataaacccgaaaaaaaataaaggcattggcaatgttcaaacaaaactttgcaaatttaactttcataagaaaaaagtttctcattcgtataatcaataaaaaatacttttatgatgagatgatcttggtatagaaaaaatatgttattgtgtatttttcacttaaaactcaaggtcatgctcccataagaatgacacgtggactcactttctttagggattactgagctgtcagaaggagaccactcgaataaaaacctcgcctgaaccagactcagcgagatgatgtgaccctgacagagtctaatcacattattacgcctcacatgatgcaggaccaaaaaggtcgtgtttaaggctcgcatataccaagatatatgcgatgtccataaaggtttctcctgcaaattggtaaagatcgattccttacttagcgagctggtccggatgacctaacgcgctcgatgacccaaaaaggactcgcacatcctaagttatcgacttttacaagatatccgtatgcgcaacccggatgaaacgcagatattttaacacaaagactatgcaagtaaatgaatagacaactcgcaccattaaagtcgcgtacgttgttgtatttagtatattgagtcgaaactgttcttcatttattccatttacgttttttttttatttaatgttgatattcaatgtaatatagtttaataattaattaagtttttgtgtaatgaaaggacacttgcttatatattt

SEQ ID NO: 261249 - DNA, 1053 bp, Cannabis indica
aagtaagcaataacaatctctttaaaagccttaaatttttggtattaaccaaatgttcgtttgcacgagtgatttacttaggaactttaagcttttcttgttggagtcagtgtcaaacttatctagtatatgaaatcaagggggttagtgtacaaaggagaaaaaaaagtaacttaaatgtataaatattagacgaatgtaggaaagtaagtagctgggtaattatgtcattttttatattatttatttatttatttttgtaatataaggcctatattggaattaaatgcctcttaaggtagagtgagagtgagagttattaccattttttttttttgaaaaataagtgtttatagattaataaaagaaagtagagttagacttcacggtcattacataagatgttgcttggtatggaagatagctccacaatgccagtaatatttttggcaaaagcacatttagccacattatgggctgcaaaattacagattttggaaattaacgaaaaattacaacttaacaaaacgttagatagatgtttacaattatgcacatagttagttactaataccccaattggagcaggttcccttcagtgtcttgataactgtctcaaagtcactctcaatcatcacaaatggatgtttcaacgaaacaattatctccacagctaacagactgaccgcaacttctccaatgaaagggtcagagaagttgagcatgtttatggccacccacaaaatagaccttgagtgatccctagccaaggccaccacgcacattgaactgtcacaacctttaacatcatagttgattttgatccaatcatacggaggaggggactaaacaggagactcaacaaccttcgatgaggcaaacaaataagacccataatcgtaacaaatacagatagagtcaatataatgtttgatgttactcagagaagtattatataccttgtcgttgtgggccctcaagattgtatctaccacaattgaagcatagaggaacaacttctcaacatcaacccccttagacttcagattctaa

SEQ ID NO: 261250 - DNA, 540 bp, Cannabis indica
gtaattgtcttagtcttttattcatctaatattccattgtaatctctctattatttctaacaccatcaatgttacataagtgaagtaaatataaaattactttatttcaagtttaatttttttaaaaaaaaatatatgtaataataaattatgctatataaatttgttgctatttcatattaatttattataattacaaccaaataaatatattatattattaaacatatatatatacaacaataattgatatatcataacatataaaataaatatagtgtagtaataaattatatactacaaaaaaataccaacaaaaataaaattagtatattaatgcttagaaagtatatgctaacaaaagagtaatttgcgacataaatacttaagtttaactttcagttgcaaataaatacctaagtttaatatttgacggtaataatatataagttatatttttggaaccttcgtaggtacctggttattaaatgtcaagttattatctaagtgtcattttcttattggtacatttaaattaat

SEQ ID NO: 261251 - DNA, 1222 bp, Cannabis indica
tttttttttttttaattaattgattttctaagatagtgggatgtgacgagtaagaatgtggagatgaagggatgatactggtcagccgtaaacctctactaccaagaaaggtgggtggcaaaccataaaagtttgttgattattttttttttatatatatatatatatgtaatattttttaatctttaataaaagaaaataaaaaatttattaaaatttttaataattttctttattatttaaataatttattttatgatgtggacaaataaaattttgacacttcgctattttaagaactacaaacgaaattgttaaattgggtacctacagatagggtcggcccaagcattgggcaacttgggccattgcacaaggcccctatttttttaaggcccaatttttttttttaaaaaaaaaaaaagaaaaggcctatgtttatctcttttctcttattatatatacataaataaaaaatttataattgaaaatatatgaacgtatcttaaaaaaaaaaaaaactagtaatagaattgtaattttaatgtacacgatttttttttctaaagagccaaattttaaaattttacacaaaactctcaaaatacttaggacggctctgcctacagactaaggagaattttgaatttggaactattactacaattttttgaaattaggaacttatctacatcaaagtaaattttttagagattatgcctcaatttaatatcatcaacacgtgacattttggagcaactaccaaattttttaaaatgagcaccaataaacttacaaaaatttcaaactaaacttatctactatttttaaagttgagaacttatctacatcaaaataaacttattaaaaaaatttactctaattttccctatataaaatacataaacgtttggatttatgtttgaacaagattgtagttttacaaaggggacaacaattattaaaaaaatgaataaatatgtgatcctccaatttttttcttataaataataaaataatttttgctccaacacaaaaatttaaaacctaaaagaaaaaaaaaactaacaactcttcgaatatagagaagagaccaagccaacagccaaagccaaaggcagtgaataagaatcaacaatggctctcttattcacttctgctcactcttccctctctccacaaacctaacagccattctcattacgctcctactctctccact

SEQ ID NO: 261252 - DNA, 1037 bp, Cannabis indica
tgacatccaataaccgatccaatcaaattagaatccaacttttaacatccaatccaatccaattgtaattggatatccaactttttgtaattggattggatttgatcggttcggtttaattggattggattagatgatgcccacccctatcatataagaatataagagtgagaatttcctctaaccaaacatagtcttcatcaagctctaaagcatgattagctaaatcatgagcggctttattaatatttctccgaacataagagacaataactctagaaaaaatgaataagaaaccaataacatctataataatatctatgaacgaggatagagcagatttaggatcattcacttgtggcaactcgaagagtatatgtttctacatccgagataggttgagaagcccaaagtaaactataaaatagagatatatcctacatttcatgagatttgaaccatcctggtagtggctttgaaagtgcaacaaggacttggcatgatgtatctcggataatcagtaatataagcagatattacagattatccgagatacatcacgccaagtctttaagcagatagcagtaatatcttgtgaggcatagtggtcttgaacattgcaaacggagactagcgcgtcaaatgggttatggtgatttaggattgtgatttgagttacaatttaggttgtgacttgaatttttatttggaaaatcattggtagcgagaccagggggagtggacttgaacgccgtggatggagagtatgctgggaatattttaccaagatctaaagttactaacaagtatgttgaattaacatcttaaatatgaatatctctaaaataatgaaattaaacacataagggattagaaaaccttacattggttgcagcggaataaaatgactcattccgctcagatctctaacccttgttcctttctatcgcaattatcaagatctgagtttggatctctttctctccttcggatttggttaccactgtcttacctactatgattgagcacttgactta

SEQ ID NO: 261253 - DNA, 825 bp, Cannabis indica
gagagagagagatggggttgagttatgagaggggtatttttgggttttagataaagtggtcatatgttttcaatggtgatatgtattagtttagggataaaatattaaggtatttgatgtatattttttcaaatttatttttttttaaaaaaatattttctaatatattattaaaaacgagataagttgaagaatatctttttttgtatcaattaatcaaaaatactatcatattatatttcattaaaaagtaactacttttatgagtgagttgttcaatatatcttcacccttcacttaagtttagcacataatttacattcacctaagagtataatggaaacattatctataaaattaggtgtatcttaaaaaatataaaaataaaagtaaaaattaaaacaaataaaataaagtgggtatataatgaaattttctggctaaaaataaattaaaattttttggactatgaaaaattataaggaaaaagactatacttttataatttagaatgtttattcattcttgatatttttagaaaacatataatattcgtattagtgtaatgttttatttattttcgggagcagcctcctctttggttggagaaatatttctttttttaaaaaatacatataatatttgtgttagtataattaaaacataataaaatataaacaaatttagcgttagtgttgaaatagtctattttgtattactttatgtttacacaattaaattttttctaaactttacatttatattttgacaagaaaacttttacatttatactttttttacctaatttttttcttcttttaatat

SEQ ID NO: 261254 - DNA, 608 bp, Cannabis indica
gcgggtgtggcttagaagtctagcgcagatttttgagtcatcattttggtgcttttattagagcaacacttcaagaaagttactattcaagatggtttcaacacgttctacaagtgttgacagatatactccagcaactggccaatcaactggggccacgccagttgatggagttgtttccaggactactcctatgtcccaagcactaggagcacgccttggaaccagctccttaactcgtcctccaaggccacaaccactatctccctggactggcttcagtgactagatccaacttgaagagccacacgtggaggtagaagaccctaaggaggccaatcctcatgtagctcatctcaactatactgcggctgacctgcaacaacaattgtgagactctttcgataagaaacacgaacagtttcaacactggttcttggaaaattagaagaacattgaaagccaatgcattaagtaagaacaacagagagctaacctgtctcaacggattagagaggcttatcgctttaatcgcgaaactgcttcccaaagggatatttcggagttagtgagagagataccctgtcaactagttggtcatgtgtgaa

SEQ ID NO: 261255 - DNA, 4971 bp, Cannabis indica
ttttatattgtattatttggacgaaatattacaatgattcactatgactctattacacgttttatttttcttgcaatataaagaagctattattatatatatgaaaaattttatagtgtatattttttaaaagattattttggtagattttttgattgtttctgatattaaaaaaaattaatttttttttttataattatgtacattataattatttaaaacgacttataaattatgttaaataaagttcaaacaattatttatcttgcgtaaaagaaaaatagtcgtgcgtacaataaaatatttaaactttattttttataatataaactactcaaaaatttttaaaaaatagtagttctaaataattataatgtacatgatcatgaaaaaaattaaactaaaaaactctcttaaatatcaaataccaaaacaaatggagagtctacagaaacaacgagttatgttatttattaacttttttgaagcaaaaaaaaaaaaagtaaaaaaaaaaatctagaactaaaaattcaattcaaataatcaaatattgatggtaaaattttttaaaaattcttccaaataccgaaataaataaaagcttataggcgcatgtgcatttcttttaaaagggtacattatgaaaaaaaaatttttatacatattgaagataaaagatatttagtagccaaaaacaaaaatccccataatattttttaagtttttttttgtactagagtaatatatgttataattataatatcatttttataaatgttttaaaaaatttgaatagtctacgccacttaaaattttgtaatttagcacgtatgttacaaaaaattttaaatttatttttattattgaaaattattcgaaattttttaaaaaacaattatacagataatattgtaactttgaaaagaaaattacatatatatttgaatattaaaatggattaatattttataataagtgattgatggtagagtttaattaacctaatttgtataatttttttgctaagactattttatataattgctaacaaaaataatcttataaaatggggtaataaaggctaagatattgcatttccccaccgtttctttccttgcaaacacccacacacgatcacatcctcactcgtttacaattctctttctctctcttcccctgtaagcaaatttctccttttctctctccctctgcttcgagaaaatcacatctccaatcagacccttcagaaaagaaaaaaaaaaatcagagtaagttcccagtaagctcctctgcattgttctgtctacccaaaaaaaaaaaactaaaactaaaacagaatttttattcataatttaatctaaaggctttgtctttgttttgtcaaaattatgttcaggatcttgacgtatctgaaggtgttgaaaatttcaccaaaccaaccgagaaattttggagagataatcccatcaaggtttttctttttcattttttctttaatttattcaatttgattttcttcttatttcttcgttgttctctcacgagagatttgtctcatacggtattagtttattcacgctcaactatagctctgactaattctcatttttcaatatttttcttggggtggatcaggctcaggtggttgatagctatttgccccattgggtacgcaatttctgacgctgtacataaatatcatcccatctctgtttcgttttttattttcctgggaaactgacggaaatggcggaaaatacgaagctggttagtattggttttcaataccttatattattattttattgtcaatctttccaactgtttcaatggccctcaattatcgattgttctccttgcccataaatttttttgtttaattcaaaactaattcagaaaagaatttcgttttcaggctcatggattagaagaaaagcttcagaaaatctctgtttcggatcatttaaatggtttccattacgcaacagataaatccgatagctttgtaattgacatggaaactttctctaatggcaacgataaagataccgcatcagcaaattcaagaaccaaagttagttttttttcttattcctttttcccgattttcattatttattcaggttgcaaattctaaaacaaattttttagctgttgtatttatttatttatttttcatataagtcgccttcagtattttcaattagtagtctcataattaataatgattttgttgaaacagaggaaatattatatttgttttacacgcaagtaatatcaatgggcctctttctcgagcattattatttattacctctctttgtttccttgactttgaatttcttttttcttcattaatgaaatttcaatttataagtattgatgctcatcttcttttcatttccattcttatttttctaccttttttaggctaagttgcagagaagtcagtctaggaaaggttctcagcgtggttcaactacaaatactaatgaaagagatgctggaccatcaccaagaggttggtatataactaatacagtttttgtgtaattctcttttcattaacattttcactatttcatatgaacaaaattcttcacagtttactactaccctccaattattccaccttggctatactcatttaattggtttgtcatttacttaatggggtccaactttaacttattaaccatttgttcatatatatgacttattgagattaatacggatacaacgatcgaccacacaattaaaagataaaaatattaaaattgaacccgcaaattggatatatatgctacatattttgtttaaaaacaaaattcaccaacttcacttaaggtgggtgactcattacttaggagggattaccgtcatgattagtcatactaacttatctttccacttccgtaacttattttagttggctgaggttatacaattcaacttgttagttgaagtctagccaaaaaacaattgttagttgaataagttttcaaaatataaatggtagttgaaaatttgttaagatatatatcgttttcaagtttaataatgtgaaacagtgacttttgtacaaacatgtcaattatagattgcagtagataaatttgatttggggattttggttctgggtttccataagtcggtacaggaagagatggtttaatatcttttagtctttttgttggtatttcagtatcatattttggggccattatcctcttttgagtattaacagtattccaacattgggttgacaagtttcttttcttttctttttttcttttgttttcttttaggcaatagaaatctgatttttctagttaaaccgtcataatcttaagtatggaaatcaaggaatggtattatttattttgcagcttacttggttttgtagggtcatgcacgccagaaaaggcctcaggggtgacactagggaccactgaaaactcgagtaacccacaagtccatcatcagatcaccatcacagccggcaacattagcaccgtcactgatggtagatccgttcttagaagaaatagcttcaagcgttcttcttcttgggcttttgatcccaagaaaattcttttcttttttgccactttgtaagttttttatttctgtttttttttctttaccatctcagccttttactactaatcccatttcctttttatttgtacgtacgataaataaatagacttgttttcaagtgtttattcaaatgctgtgattttggatgacaggtcaagtgtgggaacaatcttgctgatatacctaacactgtcaatgagcaagtacaacacagatgacaacggtcttgatttgcagtagtagtcatacatgagttgtcttaccctttgggattggaattgggatttccaatgcacaaaaggcaaatagggaagggtccaaaattgtttaataaagaaaataattaaagggagatacctttcttaaaccaattggccaaattctaaacagagctttctgagaaaaagtaaacaaggagaaaagaggcataaatgaggaagtgagcttgatttggatcgaagacccgtgccttttaaccaaaatactccatagaaatgagagacaaagacacaatacactagtgacaaagagagggaatcttttttttaagttagatggatgagattgaaacacatgatgtgctcttctttttttgtaaagatttggtggctccagacagccttaatggaagatcggtggaagatcagagagttaaataatactttctcttttattgactcatttctccctctccaagcttttgccacttttcttcactattttggcaaatccaagttcaagttactccttttgttgtatatgggttccatgtgggagagtgggcaagtgaggctagtttgcccagcaataaagtattcatctttgcacgcgcgcacttgaagcttatgctttaagccaatataaataaataagtatataccattccttttcaacgtctttttgttttttcaagttaaagacaaagtatgcttgtcctgtttcaacaggctctggcactgaattttagagactatgtttgtggatctctgcaatgagcccaaaaattaatactaacaagtttggcagatggggttattagttttttaaattgctgacaacaatatataaatatgtgtgtgtgtgtgttacatgtgatttccaaatggttggtctctagattaagaataaatgcataacatatagccattaaactaccaaggaaaaggtactaataagaaatcatttcgtgattagcttgtgccaacagtgatatttaatttatacctaacccaatcccaagcattttctaaacatggaatctcttaccagcccttgggtaggggtaggtgtcgaatattgaaggcaccactgcgttgcgtgtgtttgatttctggcctattaatttgtttttgtttttaggccagagct

SEQ ID NO: 261256 - DNA, 3010 bp, Cannabis indica
ctcctgccaacttgctgaaaatgtccttctctaggacttgtataatttcggctctcagcagtttctgcagagtacattgtctcaccctcactgctataaccgttttgttgcgcccttaaattttcaacaggcgacgagctagactggacttcactcagagcgccgttaacagaacctgttgaagaaacttcagcatctgcatcaggactggctagtcctctagtcttaatttgatctgttcttaatggattctctagtggaggatccttgataaaattctcacccgaatttgggggcagttgattagctgcccgctgtggaagggcaggtttaaccatttttggagggaaattgatatccaaaagctgaactggagaagactgttttttccgaagaggaacagaatttaacttcggggtttcataaatttctggagtaggaattccctgtacatgcatagtatgagaatctgttatgatttcatcttcaacattgtttgctgcaggagaacagctcggtccagcctgatccctggcttttgagacggtgttagatgaagatggcgtgccttcgtgatctgcatctgttgacttgaaaaccggcctcaaagtgaatgaagcacacgaatgttcactcttctggcccgaagacatcagtcttatgattggtaatttcggtttgttaagatcatcaaggctaccttcccaatgctgattcaaccaatcacaaatgatgggaatggggataccaaattgcataggaagatcctttttccacgatgaagaagacgacgaagatgtggatgaggatttattggttggagatgttgctattttcatgggatcacagatcatgaaagcaagattgccttgtacatcaaaaccagctgaacccgggctccacattatcccatcagtagacaattttatgagattatcagtggctatcaccaccttcccttcaccaactgttaactcctctttgtctgtatgtcctaaaaggtatactgcatttccaagatccagacttggtttaaaacaagtcttcaagaagtgaagatgttgcccttgagaatttgaatctccatccatggtatctaaaccaactattgtaagatctaaaacagagctggtaatgaaaaacctacaacaagaacaaattgtgctagtacatatcaaattatgactaactaaagaagccaataccaaataccattccacaagttaagcaacaaacaattaatcctcaatcacaaccaaccaggaatggagattaaatttgggtaggtggttcacctcacttgtttcattcaaatcaacaaatcatgattagccccactatgattagcatcactactacaattccattccaagtaatcattctcacattagatctttaagcaattcaaattttcccaaacacaaaaataacagcaagcatcaaacactgagctaaactttccattaatagaggtgaaaattgtacttgaatgaacaaactaaaagtatcaaaaacactctttgaaaaccatcatttgggacccacgaaagggaacaagattgtccctttaacgaacccaatgcaacttagctagcctactcaaattaaattgcttctattcctaaaagaaaacccatatctaagaacaacaaaacaaaacccagaaaccattttaaacaaaagaaatataaaaaccccttttacctgtgaggaacaagactcgaagctacaccattctgtagccagatctcagcgttttcagcagcactaactgaaggaatattgacatgggtagtcaaaagaaggttcctatgaatcaaaaaaaccagtaccggagatctcatttccggtacctgagattctagccatagccggagccttactagtaaaaatggcacctttcattctctcagacttactcactcccttacaaaaacaccacgattctctcagacccaccattattttaaactaaagcttgaaactttaagtaaagattcggcaggttcaagtaatttggttatgagaaatggcattatagtttggttatctgaaatgggtttccatggctcttttatttttgttgtggagtagaagaaaatgacagaagggaatagagtgtgttagtagaagaaccgtcgaggtggtcgtgaaatgagtaaagaaggtttttgggtttcaaatgagctggaattttggcctacaaggaaaatttgtacaactccaagaaaaaaataataattaaagagtattttttattttgaaaaattaagagtaaaagaaaaattgagaatgaaagaaagaaaaaggataaagctttgcttgagagaagtggcaaatttgggagacagaatctcttcatttactgtcggtaaacattcatactatttatggataattatacagatacaataacttattatttcagattttttgtttcattttagttaaaagattttgaaaaattctatggtgcacctatacattaatagagttacatatagttttttgcaccgataaataacctttgcctagaataaataaaaatataaaaatggaataaaattaaatataaaatgtataaaaaaataattattttttcttaattttgtattggaatggtttttatagtcattcactaacatgattggaaagtcattccattaaaatagcattctaatatttaaaatgtaattaaacaaaaaaataaaataaaaattaatttatttccattccataacgccacctaaaattttttggttgcaaatttccaaaaaattcttaaaattttaacatgtggaaaataatgttcaaataatttattggatgtgttactgcatgtatgaaataatctgtttagattctgtttctatactgtaaattattctgattttattaaaacaaaaattaaagttataactattcaaatattaaaattatagtgggagcagcgacagagctacttattaagataaggggttgtagtcctcttaatttttttttttattat

SEQ ID NO: 261257 - DNA, 871 bp, Cannabis indica
tttttcgtccctttttctgtataatctgcccctatttattgtaacataggttggcagttgattaaatttaaattcgaatcccgtaacaatatttcccaaaattgtgggccttaattatgctccacgtaaataaatacaattattatttgaaaatcatacagctgtgatttaaaccgctttcaaagagtcaacgctaacgtggattaagacacgctacaaagtgtatcttgccgggtatctcgcttggcataatagcaacaataaccctggcagcgagctagagcttttcccatacctttccaaggtaaataatgtaaatcctatcgtttctgcgcttgaagacataatgctccatctggaaatcacagttcttagtgacaagatgaactccagcagtcagggacggacccacttgtattaatgtgggggctatagcccccacaaccaaatatactgccttttaaaaaaaatagatgtaatttttttaatttgataattatagattaaaataatagaaaaagactccacaaaattaaataaatctaataagagtgattataatataagtataaatattttttaattataaataagcccccacaaaataaaaattctgggttcgtcactgccagcaaccaacatcttttgaatgtcagcttctttttgagacagctgacgtgacggagcagtggagctcattgaaagatgtctagagctaattagtgaaggtaccaagagtatgccttcccaaggcgagatggatgtctcgttattctttatccatgtacttcaagctactacacttagttagtataatgtatattatacactaagtgttctaacagcctatttgcctcgtcaataccttttt

SEQ ID NO: 261258 - DNA, 2694 bp, Cannabis indica
gaataactatatgttcaggattttaatagaatttatacattaaacatataatcatgtgaaccatgcaacataaaattatttttgatcttttattaattagtaaatctgattatattgaaatgggttttatttagcgcataaaatcccaacatcgagatcttgtcccaagtgtagatggggctcaccaattcctggccctatctctctagcacaatagttgtgggccgaggggttgctccacgtgggtccttcctttagtaggaggtgctagtggagagtcctccctaggaggcatgggtcgactatttagaccacgggaatggctgtgtcgacctggccagttgtggtggccaggtttgtggtgcctgccgaggtggcaggagtggccacattagttgggtttgtggagattccagttgtgactagaatatgaacattaagatcagctgccatagattcttgaggaaaacctaaggaggtagatgttgcagctggagttctctttgtgttaaccatgatgtttgattagataaattaacaactctctctctctatgaaagcaccaaactgttaacctcagatttggccaaccaacagcatagtcgtatttaaggctaatgcttaccacgtgtgacacaattagaatagaaaattaaataaatacgagattttatagaggttcgacccccttaattatcgtgtaattgtaatgacctacttcccttttggctgtattgataccagagataataccacttagatcctaatagtagtgtgatataaagtggctctcttaagattacaatgtgagaacaaaagtcagcaaatctcaagtgatagagacaagcctatgcctgtgagagagagataaagagatgagatgagcatcagacttggagcttaagacttagggtttgagacctagagagttagggtttgactaatgccctttatatagtagagcttacatccccaatatcccttgaaataggtaaataaagctattatttacataataaattaataaagttcaaacgactaaattggccctcaaaaatagggaagttattgatattttccctctattttcgtgggttgttaaggcccaattttttgcttgacttgttgtccacggaagaaagttgcacaccaaaaacatgctaggtaaaaagcaggccagccatatagtacttgtaagctgaccaacctatgctggccatagggtcgcccatgggtcgccgaccagcccccttgaggtggttggttcatcattttgtcgtccctcctatgtactcaaacccctaatcggttgaagtgttgagtagatagtttggccttcttgttggcaagctgtactcccacatggcatttatgttggccatgtggacatgccacgtcaggtgggcaaaaatcgagatagtaacaacaaacaaaatgttaattacgaatcaagttgagaactaatattaagatattgcatttatgttgaactagtacagataatgttgtaggaactacactacaaccttgaaacaactcaaatacagttgaaataccaactgaaggaatgttgccaaccactccaaagcaaggatgataaaaatccgctattttacataaatctactaagcaaggaaactgtcacacggtatccattgtttgtgaacacattcaacaatacagaaacaatagaaacataatcctttttggtagctacccaagcaatgttgtgcaacaatatgatagtggctggatgttgttatccgtatttctgatattggacacgtggactctaggttagaaaccaagacccatcagtgggaccctcaacaaagaaaaaatgggccaagcccatctacatatgtccttccaggagcgtaccttagttttgcacgcgcaaagccttctgcccttaccaagctgtacctgaaagacatcttcggtactgcaagaccgaagaggcaagacagtgcgttcctaaaagacccttccgttttccctttatattcctgcacacaaataaggaatctccaattgtcagatcacaatagagtatcgtatcaagattaaagggggaactttctagaacaaatactgtgcaattattttagattaattgtccacaatcagtgtacacgttgttgacaagatcaatccaaatccaatcagcctagttagtagatcatcttctccatggactggacttcatgagaaagcccacgagtattgcttactataaactcctcagtagagggaaatgggaaacctaatgtaattctcaaactactataaataccccacaaaccctatggattcagggttgaactctcttgcaaactttgctcaggcaaacatgagaacatacattttgtgtatttcctaaggcatttacaagcaaaagacttattgaataatactgacttgtggactaaggctagttaacgccccaaccaccttaaagattgtttatctcattttatactttctctattaattatttaaccttccgttcttattatttttattctgttttcaaaaatctcaataacattttggtgctttcattgagagctaaagaaagcagtgagaccacttgcagattatgtctgagtaatcatggccctcaccagaacctaatctagcctttatttcactggtcctagctagtgctagagctggagattctagtgaccc

SEQ ID NO: 261259 - DNA, 488 bp, Cannabis indica
aagcactgtagcgtgccttagtattagggcgttacacatactgtggataccacctgatgaacaaccttcaaaacacatgatgccaagtacaacctgccattctttggggcagtgaaagcatataaagaaaaactagtttgagtaccacatggcagaactagacgggttggacaaacgcataagaccatacttgaaaaaagtcagttacgagaaatggtcaaggattcatagcaaaaacaaaagatatagcaccatgacctctaacatagtggaatcactaaactcagcaaatttagcagcaagggaactttcaattacaacacttctggaatgctggagagcattagtgcaacaatggacacatatactaatagaacaaacgcacaaaacacattcactacattggcaccacttgcaaaacagatgttactggacagctacacatactcgttgaacctagaggtcagatatgtaatagtgcatttttt

SEQ ID NO: 261260 - DNA, 892 bp, Cannabis indica
gggtttcaattttgtatgaaagaattttctgtagatgaaaaagatttttgggtaagagtgtacgagataaacactttaagatgatccaaaagataatcgatctcgactgcactcaatcaataaagaagattcagtggtgttctagaactggagtagagtcatagatcacatcgattgataggatttgaactagtatatatcttagtgttgattttattgttttactactttaattgtttctaattttaatactatgttcatccttattttaatatctaattattgattgtgacttattaatcttgtcataattaattgtttgttgattaaattttagttaatttgattctatatattaattgtaattttcccacatataataattggcaaatcgtttatttattttaatatcaggtctcacacattttgatttaataaataatattaaaaacgataatcaatagtataaggcgtgtagtatttaaaataccaaataacaatgcacatatttattcacaaaaatttatatatatatatatattaatatatatagcaaaaggtacagacgtatacagtttcgttcaggctagttcatcacgaattctttaattgcatttttgttttttgtggaagagattacgattgttgagcttcaacttttcacgggctctaaacgagtcacacacattattactagtccaaaaataataaagagccgctcaataaatacgtcttaggtatacttgtagctttttatttattaattgaagccggaaataaaaaacaatatgtgcatattataaataggtgcagatgtccctgaacaaactcaactaaataaagatctgtaaagataatagagaagattgaaaatgaagagaagagaatacat

SEQ ID NO: 261261 - DNA, 2250 bp, Cannabis indica
cttaatgtagagcaacgctatacatccctttccggtggaaataaccatcgcggtccaattagttacagtcctccggatcaatccctagccgatggatgtttccaccggaatgaaaagcttttagcatttctcaaatattactatgcatttataatgcatattagacatttgattgagtaattaatgaataataggacactttcttttatgacagttaaaacggggccatcagtgtcaggagcagcttgggggaagatgaacttgacagcaaaggcattaacaggaggaggatatgaaagtctttacaagcaaagcttttctacttttcctaatgagaaactaaagaagacatgggcttgttacctctccacatcaactggtcctgttgctggaactctttacttgtcaaatgttcatgtagctttctgtagtgatcgacctttgtctttcaccgctccttctggccaacaaacttggagctattacaaggtatgattcattaataataactctcaaacttttcacttatttacattctcatattgtcatacatattaagatatgttgtgttttattgcataatattttgttcaaactttttttagtcctatccttaaaaattgtcctttctaatcacgataagttatctttcttaactctaacaattgtgatcagatttctaatttaatcataattttttagaagttagaattgaaatcggatttcggtattatgtaaaatacatcgtatgaattatcatttaacaaactgattagtaatttgtgaagaacataagatttaaattagtatgtacacaatataattttatgtataaacaaaagtggtaagttttgaaaagattttagagtttattttgtacttggatattatttgataattgttcaacctgaaaagtttagactgaatattatcaatttgctattttgtagaagctatttttacaaaatattatcaaatttgctatgaaaattgacttgaaaaagataagccatattactaaggtgtatacttaatggttttcatgtttgtgttttgattgttgaaaaaaaacaggttatggtacctttggggaacattgggacaatcaatccggttgttatgagggaaaatccatcagagaagtacatgcaggttgtgacaatcgacggtcatgatttctggtttatgggatttgtaaattatgagaaagcatcaaagcatttgactgaaagtatatccacttttgtggcttctggatatactgttccaccagtcattgctaatcaaaaatagtctttcttactagttactataataatttctattaatttatgagagtgagagcatatattgttttgttttttatcatattcgtcagattgtaatattctttcatttttgatgtgaatgatcactttttctttttgcttaaatatgatgtgaatgatcactttttttttgcttaaagatgatgtgaatgatcaaatagcacataacactgaccctttattaggtgctgtcaaacaaagtgaactaaactaattcatagaatagttgaagatgtcatcacataatcttttgaggaaaaaaataaccaatttatctaaaaatgttgttttcttcaatatttatttgtatgattttgtggattttacgtatggctattaaaagaagattcacattcttaatattatttttcctttttcaataacatgaaagagcctaacatgagaattagattagttcatatacaaaataataatccaactgtctgcatcacttggcttttttattattaatttttctttctattagctcaaaaaatcccaaaataaaaactctgttttatgttctatcttcttgaacaagatggtaatggttgtaacaccaagcccacttacaagtccatcaataaaaaaatgaaataaaaacttccttataatatcattagaggcaaaacatataataatgtctctaccaaaattgatagcaagtcaatgattccggatgtctctagcattaacaactattctcaataagtctatatcatcaactaacaaaaggtgtaaattaaaatggcatagaaagccatatcattgcatcaagtgacgcccaattgggaagccattagatttttgtgtttagtaaattaacgcttcttcttgcttccctttccggcacctgatttcgaaggactggccaccaagtagataaacataaccacaatagagatcactgaaattagggatc

SEQ ID NO: 261262 - DNA, 2061 bp, Cannabis indica
ctttgactttctcactctttcaaatcacataaatttctctactagtaaccactctttgtatgtatgtgtctatatataaagagagagagagtagatttgttgaccaaaccacgcaaatgcagggaatgggatcataaagacccgcaatttaatcgctcaaggctcaaacaaagacttcaatctcacgtaagcctttttttcctttcttggttatataaaaaagaaaaactcttaagtaaactagacgaaggttcttcacttaaacttaaaggtcatatttcattactactaaataagaaagaagagagaaaaaagattaggctcaaatggtaagccccgttggtgagggtgactcgctcccgactcaatcccacgaccctctgagtcgactcgtccaaagcattttctcttacaacagcaatgtcatgctggcagctctagtctccttgctcttagtaatcgtcttcgtcttgcttctccatgtatacgccaaatggttcttggcccaggcccaccaccatcaccggcggcggaacaggcccatcaccaccgtttcccgcgttctcggcccatctcgttttcacagctttcctcctttcaattttgatctctcttccacaacattccaacattccaaaggtctcgacccttctataatttcctccatacccttgttcgtccacaaggtcaatcccaactccaccgcctccgttgatctcgatggtcttgagctcgagtgcgtcatctgtctgagcggcttcgaagacggagaagtcggccgtaaattacccaaatgcagccatgaattccacttggaatgcatcgacatgtggttaggatctcactcgaattgcccaatttgcagagctccggtagtctgcgaagaaaaggccgctgccgctgcggcaactgtcaattccagcaacggccaagctaattcaacggaagcttcgccgaatccagcaacggcagattcagtcgtggttgatgtattggttactccggttgattctgaaatgcccgattgttcttcgccatcttcgtcttctccatcttcatttggatgttctctaaagagaatgctgagcaggaataggtcggagaacaaggtttttccggcatccacagtgaatgagagtaatcaagtataactagctatgaaaaaattgctctgtttcaatgtaatgttcatatgtagcttcttctttttctatttttttagtaaaccatttaatttatgtacaaaatagtttttcttttctttcttgtgggtttctcgtgattgagtaacattttcaatattacttatctaaaatcattgtcattagccaaattataagaaaaaccttagttagtgaacaaaggtgcaatgccatagtcactattcagtttaatcctataaactaacttaagctatcaatatcattagtcacaagttaacattttgtcttattagaaagctttttagattttcggtttttgttttttttcttttaataataatagtgtttggttttgagtttatccccaaaagccagatctgagctacatgagtgagttgagttgagggtagctatggccaatgcttggtcgactaccaagcaaacagtacacaactcaaatggggctatcagcaattaagcattgaatatggtacactgtgtgtccataactttttcaatttctttttttcgtttttcaagtttttggggttcagtctaattatgcaactggtcccaatcggtcagtatactaagttttacaataattgtattcgtaaattacaaactcattaaattatgatctccatgtcttctcaacttcgatttttaattgtaggaccctttaaacttacaatataccaaacaaacccacaaatattatcagcctaaatcaatagggtttaggtactaataataataaatacatggtcattaaaatggtgattatggtagtagcagagcatggttttgtataatagaaatgtttgactggtgtgaattgtcttcttcagtcttcatcttaacatgtattgtggtcaatgttttgaagacttgcgtc

SEQ ID NO: 261263 - DNA, 403 bp, Cannabis indica
ttatattttattttgaagaaagaaacttgatcaacaaatatatagaattttctttaatgtgagcatttatatgtcacccttaattaacgttttgatatttaattatagacaaatgatcaacaacaaggtacgcaaatgaagattactagctatatcattcttgttttgctttgttttggttttttatttatttttttttatttaaaaaaaagagatataatatattatatatagattccaaaggaaagcttcccccgaaaccccgagtggtacaaaaactagtcatagcacagagacaattaattaaatcgatctaacaactgaaatttccagctgccctgtgtgatcactcggtcatctcactgatccacagcattactcaacattcagaagaatatttact

SEQ ID NO: 261264 - DNA, 690 bp, Cannabis indica
ctagttccatttgcgattctgagttcaagttttggtttagttcggtcggaattcgagtcctggtctgagtttgggttccggtccagatgaggctacgggtgtgggttcgcatcttgggtcttgttctaggttaggtcccagtcccaagttccaattccaatctgagtctggattcaattctggatctaagttcttggttctgatccaggtttgggttcgagtttgggtccgggtccgggtctagctttgggtctgattctaggtgtgggtgtttgagttccggtccgagtctgtgtccgggtttgtgtccatgcctggaccccgatctgggtctaggttcgggtctaggtccaagtttgggtcccgagtgcgggtccaagtttgggtctgggtctggatctcggtccagatctaggtccagtatttcgatcctagtttgggtctttgtgcgagtcaaagttcgtatccagatccatatctaggtccaagtcaatgtttgggatcgggtcccagattgaggtccaggtctgggtgttattttcgttctggttacacgaccgtgtccgggctcgtgttccagtgtcagtttgggtctaaggctaggtctgtgttcggttctaggtctgggtccgagtcctggtcattgtcctactctggaaagaacatggcatttctccaaatgcaagtaaa

SEQ ID NO: 261265 - DNA, 563 bp, Cannabis indica
gttgttttcttgttgattttatgttgttttcgtgttattttttggaaaaccgtaaaaatgtaaaaaaacattatttgaacgtaaaaatgtaaatattttacaaataatggtgtcttatgtaattattctaaaaacaaaaaccatctaatggcaatcctattgggaaatttacaatgaaaaaaccgttttccatatctcaattacaaaactaatgtgccaatctcaattaaatattaataacgttgcataaatttttctttaaatttttttttttaattactgaatttaaatctattagccctgccacgtttttccttctttttttttttaaaaaaaaattattgttcaacttttttatctttattctcttaaactttaaaaattatttttgatcacatcgctattcggttgagtttaaaaaatatatcgtgataatttatttttcaatgtgatcatttcaaaatgtggaaaccatatatttttttttacaaccattaaaatcaaaagaactatttagttgctcataaaaggaattgttcactaattagttaccattatatata

SEQ ID NO: 261266 - DNA, 903 bp, Cannabis indica
actaggatcgatacagaaattcttcttcaccaaagtcacaaacaagggaataaattcatctggcttctttgcaagcatagagaaaaataaccttagatgcttatcatttctaataacttcagggcgatacattaaccctttcatgaacttgtaattcacttccaattttaagtcatactgcactttgtcaacatcgagttcttcatacaaaagatcaaccaaacgtgagtaggttacgttcgtatcaatctcgaatgttaaatttttagctcggttataaactcaatctctaccctcaagctcccaaacaccattatacataacgaacgcaaaaatagttgaatctgtcatccacaaaaacaaaacacaattaaatattttaaaataagaatctaaaagaaaagtgaataaaaaaattcttaaaaagccataaatcagtcaaacatcggacctcatcgaacctatattagacccaaaattcaacaaaaaaaccattggaccatacaatcgaaccaccatcagacgtaacatcggaaccgaccactaaagtcacaaagcaaaatggccatcggaccacccatcagacctatatcggaccctatatcggaccctataaaaccaacctcaacaataaacaatcgaattaacattagacaccctatcagactgatatatacatcatccctaacctcaaatctgaactaatcatcggacccctagtaggcaccatcagactaagcgaaaaaaaccagaaatcagaaaaatgcagaaaacttaaagaacaaccattttcacaccaaaaaatagcataaaatagtcataaccaacagatcaagcatcaaaacaacaatataaactaaatataacaaccaacaaatatgattaaacaaagaaaattcatta

SEQ ID NO: 261267 - DNA, 647 bp, Cannabis indica
aaaaggtgtattaatataatattaagaataaaaagtaatttaataatatattaaataatagagtgtgggtccattctcatgatttttaaaattgtttaacattggagtaattttaagagtaaagtggtcaaaaataatgtggatgaaaaaaaaatatatagtatttaaaatgatgtaaaaattgttagctatttttttaaatgcttgcattggagttgctcttagggccttttcaaaaaaaataaataaataataataatacttttagggtgactgtttaggagcaacaaattgcccctaataagcaaatttatcgtagtgagattatttactttaagctccatgaagattcacttgccctatcttctcctttttgatcttttatatcaaaaatagacaaaaagtatcataacataagttggaaatagactattcttcaactggtgaaccacttaattagaggtgtcatttaatattttttaatatttttagatttattcagatccaatccaatccaatcatatattaaatgttagattttactatctgattcaattcaattaatttcaatcatccaattaattcaacatctaataaatgttaaattagattagttctatccaataaatatatttcatgtatatcta

SEQ ID NO: 261268 - DNA, 631 bp, Cannabis indica
gtgatttcttcttatgagcaggttttcctttgcctcttaggaggaaccacctcagcggcagtagggactccagggttggttgtccttttcttcccctttcggtccatgatatcttcataacccatttctgcaaaataagataaggcgttacagttattaaaaaggccgatgaaaaagggaggaatataatttttcacataagggatataccaaagtcactaaaaggagagctattactagataaaggggtagagggaccataacatccactaaaatccctacattctataattttgaatatatcaaaaggctcgatcagttctaaatcccagctcgcatcttccatagtaccatattgcccagctataccaaaatatgactcgtgatagttaacctggacgtgaaatctagcataccaactgtcaaatttatgggtaatgcggtccacgagaagagcattccaaatataaaaattaagatgggagtcttagaaggtgactaatgtattacgcttagccctaagtatagtaggagaccaaccacattgattacctcgggatgctccttcaccgaattcctgtggggcagtattttgaaggtattgtgcgtgagccaagcgatcccaagcctg

SEQ ID NO: 261269 - DNA, 1515 bp, Cannabis indica
agctaatattagaaacagatcaaatcacataaacttattaaaacaagataagtctctaaataataccttcccctccataacagaaacacaagagttggtagtacccaagtcaataccaataacatcttgtcccgcaggttttgtactgtagtgaaaagaatcaacatttaaccatcatacatttgagaaaaggaaaaccacgatcttccacagaacacaattgaacaaagtgcatcaggaaaatccatcatacctaaaaggcctcaccaaggttgaccacttctggcccagatgagatggcttcgagatgctagtgaactggagaaagaacaaacaaataaagtatataagcaatgtccgaacagataaaattattcatttggcgaactagaatattcatcctttgcctcacaaattacaatatatatatacatatatatatatatattaataataaatcttagatattcatagacatcgacccaaatcagcccaaagacaaaaaactattaacccgagcactacaatacacatcgagcttttactttacgcaaataccatgaattttctattccctgaaaaaaagaaagcaaatatacaaatcatttccatcagattatcataatctaatccagactgcgaacccaagttaagacaatactacgaatccctcttaagcaattcatcaaacactttgtgacccatcaacccaattatcaaagctcaagcactgaaatacacatcgagctcaaatatttctccaaaattcaaaaacaaacataaaaaaatggaaatgaaaccaaagacacaaaatttccgtcataatctaaaacaaagattgtgaatttgatcatggaggaagagaaatgatgcttaaaacaacgaaatcttcgtaacagctgaagccataaacaaaaagaaaaaagagaaattgggggaatcggacatacggatctgtatgctgagagaggcactgaagcaaaatcacggcgtcgaatggatcgaagcaaagcagcggtggccattgatgagttgaaggagaagacaaaatggttagggtttagggttttgagaagagaaggtgtggagttgggactgaagagatgattcgaaggttttagaaggtttttagctatatgagctaacagttcatttcacaacacactaaaatctatttatagcacacaaaacggcatcgtttcgtttacattttctttgttgggggtttctagtctaagggtgtgtttggatgacgagaaggatatgataatggtttttaattagggattatttcacagaaacacaaaaattatataaaaaaaaatattgtatgaaattttaaatatttttaatatttttgtaattttatttatagaaaatacgagcaaaacaaaattagaattagagaaattttaccacaacatttttttaatagggatttattgtgccaaactccaaaattcagaaaatttggccgcaaattaactaaaaattaatcatttcatattataatat

SEQ ID NO: 261270 - DNA, 748 bp, Cannabis indica
tttaatacctccactaaggacaaaaactaatggataacttaaatagtaaaaagactacattacccctttcttcattcttaagtactaacttctcacactagggataaaatagtcataaccagatactccaaaataacatgataaaactaataccaactagaacttctcggcactacaaacacccaaactaataccgccatgacttttctagccattaaattgagtttctactgttgtcagacataaaaaatattttatttcacaaataacatatattttacctacatagtctaataaaatttttcgtaattaataaattacgtctaattttctcattttataaaataagtctattttctcatattaacttagtaagattataatcttattcaatttattctcttaatactcatgttaattcatatttcaaaaaatatactaattataatttattactagaatattatatttggggtgtaagccagaagccctaagagatcatcactgaataactaacaactgacatatctaaccgagatgtacatatctaactgagacataaaaaatagttaaaatctgaataataaaaaaaaaaagaatctccaaaaatagactaaagataaaaaattgttaatttcaagatctttgaaagattggggaattttttatttttggccaaaatagtttttgtcctcacttgtaaaaatattttctatgtgtgtggatttgttgtaatgtgaaggtacac

SEQ ID NO: 261271 - DNA, 719 bp, Cannabis indica
catatatttgtattaaagatgatattatagatataatagtaaccttggtgtaatggttaaggtagttggtaaataggttagagggtaaaggttcaaacccactaactacactttattattttcttttaaatttatttacgcccccctcactttaaattctgggtccgccactgattgtatccaactaatatatatatatatgtgtgtgtgtgtgcatattacataatgtatataatagtatatgatctacaattttctattgagtgaaaaacataatttacaataaaaatttaaagaaaaataatataaaaatatgatacttacctcctatacccaaagctatatgaatgaatatattatcaaatattacataacaatagaatctctctaattttatagaagcatatatatatataggtatatataataggtatgagattagttattaagtaaatatgttataataataataataggagttataaaaaatgaaaagtccatcgataataaataattattaattaaaaaaaataaaaagtcacaattgataataatagtagactaaatatataattaaatttttaaaaatatgagtaaatctaaaaaattgagagaagagagattgaaaaaaaaaaatatcatataagatgccacgtcaactccactaaaattctcatttatatatatactagataactaagccgcgcttcgcgcgggtt

SEQ ID NO: 261272 - DNA, 823 bp, Cannabis indica
gatctgagtcgaaggagccattattattcggctgcaccaactgtcaagtttctgaaactttatatgtgtttatttacattgttttagagattcatatttaggatgttaaataacacacatggtagtaagtctagatcctggtaaaacatattccaaaaactggcctcagagccatggtaatgatttactttcatgaaatatgaattaaaacgatgtttgtgttgatttggatggtttcatgatggtttatgtgcttctttgatgattgtatgaaaatcgcaatgtatgttgtaaaatattttttatttagttctagaaatatgtatactggaaattagacaaaaacttaatgaatttaggcttttacaaaacccaatttggattttgtatgaattagttatgattttttgaatttggatcaaaatatctaaaatcgggtgcacacgtgtgcgtgcgcggaccctaggcgtcactcggtcaacacgcctcttcagacacgagctgacccagttttctcagacactgccctgtctgaagggctgctcacgccgagcatcctcggcatcagaggctgcatacagccttgtttctcggtcaagactccccttccgcgcgcgtaggggtttgcattgcatacccctatgcaccaattttgttttcatcatatttttttatttaaaaatcgtttttcattgaaataaaattcaaattttggtaaaattttgtgtagaatctaaatttttaattaaaaatctaattattagaataaaattaatttttattaataattaattaaaattagttttagatgttagtaggcttt

SEQ ID NO: 261273 - DNA, 601 bp, Cannabis indica
tatagttatttaagacattatgcgaaattttaaaattttgaaaaatttgaaataatttacaatatataaaacaacgttgaaatagtatatttcacacacgcaagtcatgtgtatatcaaattgtttgaaccttattttcagcgtgtttatttttttaaaaaaaaacaaaaaattcaaaatttttgtaggacgtcttaattaattacaatgtatacgatcatgaaacaaaattaaattaaaagtttcttccaaatacgcaaaataaggatgcatcatgatacaaggatggctcattatattgtagaatttttctaaaattataatagtaatggatagtgcatagtacaaaaactacaatgtaaaactaccttatatcttatcaattaactaaggtatatcggcgataaaattatatgatttatacaatttgtaacatttaactctataaaatgattttttaatggtaaaatccttcaaatttcacttttattatgttatttactatttcatttaaaaaactctgttaagtaccaagttagataagtcacaatgtacgcacataataaattagattttaaattttctaattcaatctaattca

SEQ ID NO: 261274 - DNA, 1462 bp, Cannabis indica
tttaattaacttagaccttaataaaaattaaaaaaaaaatacagagaaaaggagaaaaattacaggagaaacttgaatagattgagtttttttttttaattcattgataataatcaaaatgtcattcatcccttctctactaaaaaaaaaaaaaaatagttattcatccctaataatctaaatgtgtctaaaatattaaatagttatattcacatctttttagtttttttttttttaaagcaataatcaatatttttgataaaggaatccgaaagaagggaatgtcacgaaagaaccttgcactctcaaaacgttttgtgccagtggatgtggtgaagcaaaaataataggtatttatacttgtctactaaagaaattggttcaagaagataataagaatcaaatgattatttttggtggtcctttttacatttggtaataattttttttttgttgggaaaacataaattgattttacattttgcagtcctttcctcaatattggttgattttatatatgagagcattcaacaatgataaggttgtcaatttgaccatttctatattgagcactcattcatacatatcatctagccaccttttggcttttgagtgtcttcgataagtatggataccataggcatcacctttttctttgttttctttgattattgttttctttttcagatgtgtgtgtgtaatattatatacatatacacacttatataggttaaccatttcttattcttctgtattgatgattctatatatgataggacttagtgaaactcattagtattctattctttaattaagcaccttgccaaactaacatctggttcctagaaattagcttaaacttgagattaagaaagaatgctcacatcagcatatataaagctacaaatgagggcacatattatagtttatacaagtggtaactccgtccagtttttccttgatatgtttaaagagaggctttaatttggacgtcagcacaaggttggtcctaaaatttagtggccattaaaatatttttgagctcttatataaaaaattatgatatttttcaaaatgagttaaaaagtgtaatattttttttgagtccatgaactaagtaagccttaagcacagacttagccggtgtatgcttggtcgggtctgcatgtaaagttaatcattctcctattttgtaaatactatggattataagagattccctaattctagatatttatatgtactaccaataacaatatagatattgagcaccctagcatttctctaattctatgctctataattacttgatgccataccaaatagatctcattctatctccttatctctgctgtaactgtatggctaaatccagttgtttacattacctattttgtaggattttaagtactcatgtatgattgccaatggatctctcctgtctgttgactcccattttcat

SEQ ID NO: 261275 - DNA, 916 bp, Cannabis indica
tgtataaagttttaatcgtataccagcagttctatcgtaatagtatacaccttacatcataataaccacatgatctaaaatcaatggttaaaaaaaagttccccacgtaccggtagggaacttttactaggttctaccatagtcttgccctatatatatatttatatatatatataaagtatttattattttttaggtatttctgaaatagtccaatttttcatttcaaaaaaagaagaaaatatatagtcccatttttcaaagttctgaatattttgtacatcaaataaattgaataaaataaaatcatgtttgctaattttatacaataaactaaattaaaaactggagttgaacaaatataaattaatagattactaattaattaattaattttatttgcgaagaataaattttttgttagcaatctattaatatttgtttaattaaataattaaatatattagttttttttttgaagaaatatattattttaaaaataatttgtgacataaatatttaagtttaaatctcggttgcaatacttaaattttatttttggtgttaataatatttaaattatacttttggaattttattggtacatggtcgttaaatatcagattattatctacgtgttattttgttattggtacatttaaattattttttataaaaattaaaatttaatgacttgaacgattaccacttgtcaatttacttaatatctttatatattaaaagtgcctatctaacggcatttcttggtttaacattcttgggttaacagaatatacttaaaaataaaagaatattctgttaaatttaacgattaggtttgatctcccgttaaaaaataaacacaataattaaacccaaaaattaaacaatcttttaaataaacaatcttttaaat

SEQ ID NO: 261276 - DNA, 2076 bp, Cannabis indica
atatctaaaaggcaccattaaagatggcttatgtctgcgaccaacatctacaatgactcttcaagcttactctaatgttgactgggcaagttgtatcgattatcatacgggaggatatttggtgttccttggggataatttgatcagctatagtctgggaaaaaatagcaagtggttgctcgatccagcactaaaagtgagtttagagcattagcaaatgttacagctgaactgaagtggattcattatctattgcaagagctgcaagtctctctagttcaagttcctatactttgggtcgataatcaaagcgccacagccttagctgcaaatctattgtttcatgctcgttctaaacatatagagatagatctttattttatgagagatcaaatgttggacatacaagtttcagtttgttatgtcccatccttagatcaagctgcagacatcttgactaaggcactatctattgagaggtttctatatttaaaattcaaacttcaaatggtgtctacaccatttagtttgaggggaatgttataaatatttaagtttgttatcacacttagttagtctaactttttcataacaaaatgtgcttatgtgtgctgtatcatttaccactttattcttcttgtgtatataagcataattgaatcaataaagaaattaatttttaagttttatgttttatctctcagaattctctctttctttcctttatcttactctcaattcttgaatttcatattctgaaattctacagcatgatttgtaactcttttagttgattacaatttaatgtgtaattaaaaaagttgttacataattatattccttttagaattgaaaattatatcattatatagttattggagggtagtacaatcatctaagtaattagagtggcgacactagaagacatgtcacctgaagtgattttcagcatatataaaacctcccaaacattttggtattctaatggagtttcgcaactgtatttctcaatgtttatataaccctcattttgcccatatttatgtgatgatgaagtgacattattaaagttcattgacatcttaactaaatgaaagagatagaaagaggaagagtagaggacaaagattgagaaagatgcagtcattcagctcttgccctttagcatttaataatttcccatccaaagaggacttataattaattaagtacactcgggtcaaagcagccttctacgtagatttagaattcgatcgaatattaccagcagtagttaagggtcctatgaatatgaatatataatgtgtaaaattaatatatataatattatatattaatcttatttttccttctttttatgtatgcgtacgtgtgctaaccccatctctttcactggctctttatttggtcactatatttatatatagggttcaactccccctataggtctttcaatatatatataaaaatcatcaactatagtcttcaaaggatactccactagctttataatagattacaattgtgactataacaaaaccagtacatgaaggtatctctttcagaatttttttttccgacctgtctaaaataagatatctatagtgtactatctatttacatgtttgttctttcatatatgcaacgcaaaataataatagtattaattagatatacataataaattgatataactactttgctttggatcattataatatttagtgtgtgttttggatacgtacgcaatactaatgatctatatttatctctaccaaccaaaagacacatatataaacttgttcataacttataataattaagtctctttcatataaatatatataagccacggtatttatccatatgatgactttgtaatactttaagtcattactatagagacctttcttttcatatatagatgtacacaattcttttaatacagaatagttgagcatatattgctgtttagttttatagtactttaggctatattattcaagcatttatattgtgattactcatcaaataaccaattgaccgtattgtctgtaaaggaaagatacgggcatg

SEQ ID NO: 261277 - DNA, 718 bp, Cannabis indica
caatcagattcgataatattaacattctgaaaatcacgcttcaaccatgataacacttccttgagagtcacgacttcaacaatctttagaagaacttgccaatccgcagtcccaaaatcccagccacaacctacccttgtgatcccaaacaaccccaccaaaatcattccttccctcctcgtcaaacaatgcatcattaatattcaccttaagtttttcataacttagtttagaccatagatcaaccctatccaaaagataccatgtatcaaatgcaggaaacaaacttttttcttgattttttctccactactcaagagtgacacgagtcaaactgacaacgaactccacccaacttttcttacccttctacaagagttgatttcgtgcgaaccaaattgcccaaaccaacatcactgcctgaacactttgttcttcacccagttgttagaacaaaagaagaaaccaatccacaaacgaccttgcatcaactggaatcataggtaaacccgctatccgccaacaattctgcgcaaaattacaagcaactaaacagtgcaaaatttattcacctgccccatgacaaatcagacataacaaagagacatccacatgtttagtcaactggactctcgtaggaagaccccccacaccctccatacacaattttttgcctttggaggaagttttaattgccaaaacttcttccaaaacgcca

SEQ ID NO: 261278 - DNA, 1297 bp, Cannabis indica
  modified_base (1249)..(1249): a, c, t, g, unknown or other
aaggtggaaaggtgggtatgagcttggcggagggaggagtatatttggagaaggtgggtggggttggcggtgacggggagctgtttggctgcgaggagagcttgctccatggaaagtatgaggtctggtaaagatggttgggcttcttcctccatggttgagtccgattacgagttagattgatggtgattcgagttcggacattcaatacataaattaaatcaactttttctttttctttctttttttttcatcagaaaaaaatcaacttcaacgatttttttttttcacttttatttttttttttttattgagcaaaaaaataaaaaatcaactttttttatttttatttatttatttgttatgagtaatgttgctttgtgcacttgcttttttatattattttttccaagattatgtttctcacaaaaatattcatgtaaaattatgctgaaaatgatgttaaaagtggaaatggtaataagcttcataaacgtgaagttatttgtaaatttggaaatgatttgtgtgatgtgagaatttgtgatggtttataattaaaatgcatttcgtgtgtgttggtgttatattatgcttttaaaagtaattagatccaaagaacttggtcaacattcagagttaaagttcttggtagctccgggctcccctttctgggtatcaaaatccactctcgaaaaatataatatatatatgaccctaattaaatataaatctagattatgataatcttttcgaagttattatataaatctagatcatgatatttaaagttattgtaaataacatttgaatattgagattctgttataaatatatgaataatttagtagtaaaataattttgtgttaattttttacacatttaaacctcttatttttttgatgataaaatctcttacatttaatttaatgatatctagctgttacttcaaatttacaaagaaaaataaatataagtgtatacaaaaatttcaccccaaataatcctaaatatatttatcaaatggctgtttttttgccattaaaaaccatttttgttaatcaatttaacattttaaccaaaggcaataatgcaacaaaacaaagttcaacctaacgtagttaaatactaatttgacaagcaacatcatatagatacaatatacattgaaattgtacttggtcaccaaaaaaagagaaaaaaggaggaaagtctaaggcttttagaatccgtagatagtcatctattntaggcaatggcagagaacgatagccagaccaaaaagatgtaatgattc

SEQ ID NO: 261279 - DNA, 763 bp, Cannabis indica
ttttttaattatttttctctattattttatattcacattaactcatagtattgtcttatcattgacatatgaaaaattattattattaaaaaaagagtatcctcatatggttcaaatttatacccaaatgtaattattatgattttgaatattaatattattcagttacaagacaaataagaggagtaaataatgaaaaatattctatacagataagttacgtatagatattgtaatatatcagttacaacttataataaatgagaaagttgaaaagacatattaaaaaagaagagtgtgctcatatggttcacatttatacccaaatgtaattattataattttaaatattaatattattcaattacaaaacaaataagagaagtaaataatgaaaaatattatgtacatataagttacctatagattagggatggcaattatacccgcaggtacgggggttgactttcggggttgggggcgggtatgggtttaaagattcatacccgagttagaaacggggcggggtgggggaatagatacccgcctcgaacccaccccgatatgatatatgtatatatttaagttttaaaatcataactactataattaaaataacttaatgcttaaagctttttattgattatactttttttttattgtacacaacattctacttaagtttattgttttactaagttttttaattctctttgaaacatcatttttttttcaaaaatatatatgaaatgggtacccgatg

SEQ ID NO: 261280 - DNA, 656 bp, Cannabis indica
aaagagttttatttagggcataaaacccaacatcatcttcaaagaaatctgattcagaggatattgatttgatgaaatctaagttggagatggtcattttgaatcaagcatcattggctgaagacttcatatccttgaggtgttttgttgatcttaatttcaagtctgtaatgactgtaattaaggatattcaagagaaggttaatgccattcatcgtcgtccttctgatgaggtatttaatcatagtttattgtttctgttttttcatgctttgtttttagtttctttactgttttatttaagttgcatttgtgttgtatgaatcagggaaagtcatttgatgagttagtaactgaagattctgatgatgatgatgatgatgatgctgaggatgacgagaaggaactgcctgatcctgaaaatattgattccaactccgatgatgatgatgagttggttaaagatggtggtgatgctgatgaagctgataaggttgttaatgatgttcctacttctgatgtgaatccatctgaggctgttgcaggcagtgatgagaggactaaagatgttgagaaccttaaggccaatgagtccagtttaaaggggattgatttttttgatggttaagctagcttgaaattgatgatgatcaagt

SEQ ID NO: 261281 - DNA, 553 bp, Cannabis indica
aaggataaaatacattgacaggtagaacggtaaatttatcgctattcagtgtagatcatctatagaggatctttgactattaagattgtaataatggataatcataacgtatctgttgaccgaggttttcggcaaccaattaaataatatatataagaaagctgtaggaggtttaatgcatggaatttttacgtggttggagcattaacgagccttagtccacgagtttttgttatttatgagagtatttattacagagaatgttcttggtgaatatctctcctatttactctctttaattcctatgaacccagaaatctccccccccccccccgtcctcagtgtgtttgtggggtatttatagtatttttctggggtgatccctagaactgaatcacttgtctttctgtgcaggttcgataggggcacatactcctagcagatacaaaataggaaatacatgacctataccgtaggtatcttaggggttaggcagatataatcttttatcctctcttgattgatgtgattcctcataaagtagtcgtcacta

SEQ ID NO: 261282 - DNA, 492 bp, Cannabis indica
caatgtaaggttttcttgaactcttatgtgtttattttcattgtttaaaaatcaaaattaggatgttaataaaacatacttggtagtaaatctagatcctggtaaaatatttccaacacctcttacccatctccctttcgatagcaaagggctttcgttatgggaccgttccctgagtagccatgaagatggcctcaagcttttctattaggagggtgaagcaagtacacttctcctccttgttcttctatggcgtggggggaacgttaaacttcccctttttttccattgttcctcctagagttgttggtaatgcacttgtttttagtgttattaccattagaggtctgtgcagcattgttgttgtctgtgttgggttttgtgccctaaataaatccatttcaatataatcagtatttacttactaataaagatcagaaataacattttatgttgcatggttcgcatgattatatatataatgtatgaatt

SEQ ID NO: 261283 - DNA, 3592 bp, Cannabis indica
tagagagtttatgcatctccaggtcagcatgtgggataatttcaagttggaatttgaaaaaagaaaacatgtaaattatgttattagtagaaactgatgtaaacttttattacctcctgaagaaccctagtcgccacctcctcaggagtatcattaggaagcacaggaacaacactttgagcaagaatacgtcctgtgtcatagtgctcatcaacgaagtgtattgtaggacctgagaatctaacaatatatgaaaacaatgagtactcatttttgtaacaaggacacaatatgagaaatttctgaaaaactttaaaagagtatgattggaaaggtacgcagagaaaatgtatagcataccttgccccagaagcaacaactgctttgtgcaccttcatgccataataacctttgcctccaaaggctggaagaagagatggatggatattaagaatggatttgggataagcccgtatcaactctgctggtaagagtttcaaatatcctgctaggaggacaaagtcaacctcaaatcccctgattagaaaacatacgtatattaattataaaagaaaaacaggcaggactccactagttataaagttattaaaaacatcataatttacttcatataaatcttgtcattttggaaatagaacataaatattatgtagcaatatgcaatagcttattggacaaagaagacaatatattattggattaatagatgagagcaatatataagttactatgaatttatcacagaccttttcaaatgaagtagctaatatcaaatattttttcctaatagattgtgctcaatattatacaaataaaccgaagtgacacatttttatatgcaacactgcatagtgcataccacttaaattagaccttagttggagcacagtgaatttacaaagaaaaataatgttaaatggtagttatcatctacttatcagttcctagtttcaattggaaaaaaaaaattaatgtcttacaagttccttgctaaaataaaaacctaaagaaacaaaaagtgaaaataagtataatgaagctcaaccaacaatgtggaagaggatactgacctaagggaagctacaagatcagcaggagatatcccctcagactcatctttcgttttggggaataagacaatagggatacccttctctcttgcaaattcagcacctccacatcctgcaatgaaataagaaatgtaaaactaagtatcaataatttcaaaactccttttgagaaagtgaaactaatattgaacctttcatttcatcaagttgcattcaatcaataacttatagttacaaccgtgtcaataaaaaataaaagagctaaacatattaagagaaagatagtttaaaagcaacaaaaaaagaaggctctgaaatcttgaacaattataaataggaaagttttccctccgtattatctagcccagtagccatcatgagactagactaagacacaaattttaccaacatagcataatctaaacacttacatttctcctaaacgagcaaaactattaaagagaattgactgaacgaatactactgatgcaggacttgacacaacagacttattttacattcatagacatgaaattttagacaaaattgaatcattcttattcttaacaggatatctattcaaaattatattcactaagttaattcaaaatgtgtgaaataatcaatacataaagaaaaatgtaaaactggggtttaaacagcacaattagaatgcaattcatttccagcaactacaaacaaaacaaacaaaatccatagtaagaaaaagtacctctcttgttggtgaccagaacaacaatgtcgccgagaatcgatccctgaacagatgcctcataaatggaacggaaattggatcctccgccagatacaaaaacagcgagcttttttcttctggtaccactcctcaaatcttcaccggaagaaccaccccctgcttccactacactattacgacaagctcttatcgtccggctacaagggctgactctgaaaatgacccacttgtgcgattgaggaaaagaacatgtggaagaaatagtaggaggagacacggttgcagagaatgggattttggcactgtgaagggatgggattgtcgtattggagcaaaacccagatagcatcatactagtagctcccattgaaaaaaaaaaacaactccttgggtttcttctctacgttgagtgaacttgttagcacttagaaggaggctacacccacctgagctgagacacgaaagacaatcgaaagaagaagaagaagagaattccaagctataaagcagaggactggaagcataaaaaaatgttgtatattgtattattgagtgaaattgataattacacttgtatacaaacaaagataataaagcaaaaaagaaggaaaaagagaaacttcaactagaaatggtggcggccgaatgtcgagctccggtcaggtggaagaataagaatatgaaaaaaaagagaagcaaaaattcgttactttgctttgaaagagggctttagattggggggtttttcggaaacgacgacaagtgtgtgaaaacgacaattcggcaacaacaaaaagagtcaaatgacaattaaattaaagaaggacaggttggacccgaactgctaccgaacccgatcctataactggatgcaccgatccaaaaaaagaaaactaattactaacagatatcttcagtcatatatacaatatttgaattggactggaaaaaaaaaattaatctactgaactaccaaaatgactaacaacattacaaaagaaatgaagtaaacttgtatatgtgaatatcaccaaaaaaataagcagttttgctcaactcaactgcaacaaatatcaagaattgacctcaatggacgcatttaactctaataacatgaacacaaacaaatcatgtttagagttggtaggttctgaattttcaaatgaaagaaatatgcctaacgaatttaatactgacctgattggataaaaaaaattagattaatctaaataggaaaaatgtatttcagttcttgaacaaatacagaaaatcaaaacattactattcaatcaacagaaaattcttttaaaaaaaaaaaaaaaaaaaaattacaaaactttaatactcataacattcacctccataaaaatacaggaaagcaaaaaacttgaaaagtaaaagggattagcatcattcaataataataaaaagaaaaaagtaaaggaataaatcgtataaataagaaaagaaaaagatattcaaatacaaacaaccactggaaaaaccaaaagtgtggtcgatgtgtgtacagatatatatttagtgacttaccaccagcaacggagagaccaccggaggagggaggaggagaagataaatgccactgctgccgactgggagatcgagttaggctactgagaattagggcttcctttaaaaaattagaattttgcttttgcaaacagggcaaaagattagcgcgtcgggtcgggttagaaccgggagaaacagccaaagctagtaactaattttccaattttttaac

SEQ ID NO: 261284 - DNA, 1241 bp, Cannabis indica
gttactgacttttcttacgtttatttgtaaaaccttgcaacaaaaaattatgaatgtggaatagcaatctaaaataatccactatgtgttaatattacattgaatatattaaaataaagtcatacaaaataaattgaaattttattggtgataatgaaatgtgatttattttttttatttatacagtcaaaaatatgttcatataaaaatatttaagtcaaacttaactttttcttattttgttttgctaattctttttattctttgttcaactgatggaacaaccgcggtccatataatttaaaaatgaaaaatttttgtaattaaataaaaaaaatttaacataaaaatatgaattattctaattttctccattcagacgtaatactcattcaaagtatatataaatatatatatatatatttatatacataatattataatgaaattttcacgtgttgcaattaataagtccatttaaataaaataacacgaacaaataaacatacagagattacataaattaaaaacaactaaagattttatctaaaaaaacaattaaaaaagaaaaaaagggacattttattaccaacaccacaaaatgtggtcacctaattaaatatataatattataaatataaaatctttaatcagtttgatggaagagcacttcattaatcaaatcatccaaatttgtatacgagctcccacttggagcagtggcttaaaaaaatattaggaataaattaattatatataccataaaaaatatatatgaataaaaaaataaccgttcaacaaaaaaacaaattataaaaaccacttaaaaataacataagaatagaaaaacaaaatgcacataaacgttgtctagaataaactaaaaatatacacaataaaaaatgcacataaactaaacaacaactattcaaaagaaatacataaaaaaaatagaaaaataactataaatcaactatagaacacctaaataacaacgtaaaaataattataaaataacaaaaagacaactctaaatcaatagaaaaataacaagacatcaatcatgttaaaatatgcaaatcattcataaattaactctaaataaattagaaaatatccaaaaagatatactactttttattactcatataaaaatatagaaaaatataagagcagtgctcttaattttttttgtaagagagagagaaagagtattaaaaaaatatgagaaaatgatgaaa

SEQ ID NO: 261285 - DNA, 969 bp, Cannabis indica
atataattatataaatatgtataataaaaatatataaatatatataaaaaaccctcttaatcgggtatagtcgagttagtttgggttgattattatgcgggttggtattattttcaacctgcccaatataaagattggacagggttgtatttttctcgggtttttcgatttgttttcgtcgggttatctcgatttagtttggacgaattgttcggtttagacgatttacaaaaatttatgtacactcctaactagtaccctttagcatttctccatcaataattatatattcaacctcaacggtagtctcaaattgcagattattatttaatgcttcttcaaataatgtatcttgacaaattaatctttatatatattttttaataatattttatagttgatagagaaggatatacatgaaacatgtatatttatatacacatatacactatttatagttacaaaagagagtttaaggtcacatttatttgtgtagggtttagggcactagaaaaggataacataacacatgggtgtagagtagggcactgaatactattttagctaaatatatataaacttagactttatacccacgttgatatgcatactgaacgaggccctccaactctttatcatcattaatatcaacgtagccattgtgatcagagtcagcacggtgcatagctctgttagctctgtaaaatccagaagaagagccaagatccttaaacaccttcttgatttcattcttggacagtttcccatctccattcatgtcttggcttttgaacttactcctcagctcttctttgctcctacaatggactacaaatggtttcatggtaaaagttgtttctgggcgtgtctacatgtataaacccattaaatgtatggattattaatttactagctacttgaagtaggaaactagatttattatgtgcaagatagatagggttctctccc

SEQ ID NO: 261286 - DNA, 794 bp, Cannabis indica
tttttttcaaaccttttatatttgtttcttatcacttttttgttctattggaatcaataacaatttttataaatagttggagttttttggtgttttataaaatgtataactgaatgataatatttaaaaatattatttataaattttatatttttcgtaggggcccaaattttaaatataagagggcctctaaaatgtttaagatgaccctgatatttaacaccatagtacacaaatacggtgcttgtaagacatctgtcccaggttgggtggtccccagacatacgaaggctttcgcttcccgagctagaattctgccagtgggcctaaagtcatgtattttatgtatttactccaatagtgggcctagttttgcacgaaaatcctagcgggtcacgggtgtacttggatccagatcctaacctataaatacccctttataccttcatgcaaggggggattcacataacttcttttaggttttcttctttgagaagtttgaaaagcctaattgacaaaattagaagacaaataatatagcaagaagttagggttcttgaacttgtaagatcccattataatacctcaatgacatttgacataatacattgactcgtggagtagagttaattaacacctgaaccacgtaaaaatctccatatccattttatatttacttatattatttttaagctcttatttaaattgatttttaaaaatctcaataaacaatatgataataaatttaatgcaaaatttctataatttacaattaatgataaatattttaaaaa

SEQ ID NO: 261287 - DNA, 1472 bp, Cannabis indica
tatacaagcatagaatgtaggacagtttaactcatagaaagattcagatttatactgtgcggtgacgaacttaattaataaaagataccttgatcatactgacaccagaaccaatattaacaagtagatatgggtataaatcatcttggtcaatctgtacaaattcctttcgaccatttgtgtaagtaaaagcttcttcatgaactgcctactcaaggtagaaaattcctcatcagtcaaacaacatcaaatatgtacaatatacatcacaatatctagtatgtgtagcaggatctaccttaagtagaaaatttgctccagccacaagacaatccatttcatcttctttgtcaaggcaaacaccaagcttttctttaatgaggtctgcatatttgtatgcccctccacctgtggccttctcattaaaagaaaagacactagtttaattgatttgcaaacaagaaatttccatgaaaccaagtgggctgttgtaaaggaaacagagagattgatgtttacatgctcatacataaaaggcttttgatatacttgtatactcaaaatcataattttgaaagcacaatttttttttaccttaacagtgtaattgtcaggggatcccccatgctggcaacctgcaatgaaccacaactataagcactaaacaaacactagtagactttactatatacaaataaagcaagttcatttgaaagcatctgaatcagagtaagagaagctaatatgagtacgagccatatttgaaaggggacgaaaacacactaaattgaactacttacagaccaagaaattcaataagtacctgtaaagactaaagaattacaacttctccaaatataaagaaattgcagtggcctatattcatttactaagagccaaggaaacatggggaaacactgtgtttggaggaacggttcaccaccaacctataacccgagacacatgcaccaaattgaactacttacagaccaagaaattcaacaattacctgaagcttgattgtataaacaatgcattagtctaattaatgacgacacagaataatagaatatgcatgcatgcagcgtgaaactttaatacatagcttagaaaacaatcattcagctcccaattgagctcaatacaaattcaatcaaaccatagagcaattaaactgatcatggctataaataatcattactgttcaaataagagattccacgtaccaccaagatgaagtttattgcgcattataaactctaaacaatcattaatcttgctcgtttcaaattttgcaaaatgaagtgtcccctgaagaacaggacactttttagaaaccaccagactctcattcgaagaattgccctcgttatcatcgatcaaacactcatcacttctcgagaaataaaccaacttaattaaagaacctgtcaaaaacagtacagaattttactcaatgcatggcctctatt

SEQ ID NO: 261288 - DNA, 523 bp, Cannabis indica
gaagtaattaggtaaagattacacaaagttatgtctcaatatattatgtgttattgctttgttgtgttttttgcaggatacaaatttctggggttcagcttatacaactcattttgcaattccacaccttaaacaaagcaaagggaagatagtagtgctttcttcctctgcttcttggttaccaattccaagaatgagcttatataatgtatatatatagatacaataaattatggttttttattactttcccatttctattttttctttactgaaatatttaatcacattggttttgaattaggcaagcaaagctgcattgtttgcattgtttgagacattgagagttgagctaggacaagacattaaaataacccttgtcactcctggtttcatagagtcagaactcacacaaggcaaattcctagacaaagaaggcaaaatgatctttgatcctgatttgagggatgtaagaatcttttctttttttttttttctcttatgtgggcattttattactctt

SEQ ID NO: 261289 - DNA, 1886 bp, Cannabis indica
acagaataaagcttacaaggttagattgtatactaacttttgacatttttttacaaaaatactgtcaggcggtattttttacttttttactgtgtttttttataagtttcatactgcagtatactgtgttaagttttcactagtgttctactggtgttttactagtgttttactgttgttttgagttatactgctttgtattttactggtattttataaaaatacagtattttgaaaaaaattccgtgtgacagaatttttataaaagttaactcaaattctagtattttcgtaaattttcccaaggttataaatggaggattggttcaaggagattggtttatcttatatattttctaagttcgagctattgaatgtaactcgcctaaatttaaaaaaaaaaaatctgtatggattaacctgtccaattgggccaaattttttttatatcacctccaccaaattacaacacaatatattaactttgaaacacaatatattaactttaaaattaataattaagtatataaatttatattattatacatttaattatttcattatttattttatatataataaaaagtaaaaaaagttgaaaaaaaaaaaaatctaaaaatcgaagttggtcggtttaattaggcggattagacttattttcaacccatctaattaacatattaagcggtttgtaattttttcgagttatttcggtttgtaatttttatcggttttttcaatttagtttggacagattattcgatttaagtggtttacaaatttttttgtatagccctacttcgaattatggaagatccttgagttcttagcctaaatccttttctttctatgataatttgaccttacatgtattaaggctatttttgatgaagagatgcgagtgagaagcgaggggtctttgattcctggagactttacatgtatgatatgattaactatttcactaatttttcttttttattttgactcaagctaataaactaatatattcacacattattctatcaaattaatccaacaatcctaaattctaatcctctactacgtgcagatttcgagcgtgaaacatatagtgagtttaaaaaattaaacgatacttttgaaaaagacgagaagtaaatttatataataggcaatttatgaaacaactctttaacatgtaaatgatgaatatatatacaaaaatttcacaattgaacatggaagttgaaacacatggggcaaaattttcattcaattataggaatattcaagctcagataggcaaaattttaattaattttagtatattaaaggggttcctacaaatacattgaaaagaaactcaaagcttcagctactcgctcatgccttcaagatcactaagatcaccaaacgctccttcaagagcctccttgtcattgtcgctgttggcgttgtcactgttgtcgtcatcgtcggtttccatggcgtcttcagactcctcttcgctttcatctctgtcctcgtaaataaatggcacgttcatttcaccttcatcttgttcctcgtctagaacctgttcagggaaaagctccaataagttataaaactaaaagctttctaagtgaagccattacatactttatcgatcacacttaccccggaataaagaacgtccaagacgcttgacactttaacagctgactggagagtagaaactctcgattctatgagctgcacatgaaataagatgattgagttttcaatttcatcattttcaaaagttatcatggttaccttttctatcaaaaataaaactgggatcccccatttcccacctaactctaaatagttggggaacagaaaactaaagcaattgctatgtcgatacccagaaaggactc

SEQ ID NO: 261290 - DNA, 522 bp, Cannabis indica
agttgactataggtgtcatccacatggccaagctatcatttatctcgacatcttccttttcacatatacttggttcgtttaacatctccatcggaaccaagttcagttcatcctattcattttgcgaggccagttttgccaaggcatcggcattagagatttgttactcttggtatttgctcgattttgaaataatcaaacatttccaagttctttcgaactttctctaggtacttcgccttttttaagcccttagcctagtattccctgagaatttgatttacaatcaattgtgaatcactatggcatatgagatttttaaccttcaatacttcagctatcttcaaaccagcgatcaaggcttcatactcagtcttgttattttatgtgtcgaaattaaatctcacagcatagtgaaactttaaagccttctgacgaaattaatattacccttgcacccgagccatgctcattggatgcacatccacgtataatttctaagtatccgcgtctcgctgaaca

SEQ ID NO: 261291 - DNA, 764 bp, Cannabis indica
attttctctaggggtctgtttggttttgattgcgaactttcccttttttccattgccttctctaccgttgttgttggatctcttgccgctcgtatttgaactgttagggtattgggggtttagagcagatgctcctaccgagggggtctgtggttagcccaatctgggctcgacatccgcccgttggatttcctgttcaagtttaatgaaaccatatgctcggtcaagaaaatccaccatagagtctacatgatcactcttcttcatttctttcaacagttctctgagcacttcgatgccccccaatattgcggccatcctcccctctttagttaatcatgctacatttgtagcctctatcatgaatatgcttatgtaggctcagagaggctctcctagtctttgcttcactttgaccaggtcttctaaatgcaatgggagttggcgagaaaaagagaaccgtgcatgaaactctgaggagaaagctttccagcaattgaaccttctttgtggtaacttgaaataccactgctgtgcagattttgaaagtgtggtagggaatactctgcaccgcaaatctcctcgtaccccttacaaatccatttgtatttcaaaatatttaagatgtgactaggaatcttctttccctatgtacatcttcgaggtcatcattttgaacttgaggggtagctctagaacattgatctacggagtgaagggtgatctgcgtgctcgatccaactcgagattagtgagtttttggc

SEQ ID NO: 261292 - DNA, 632 bp, Cannabis indica
gccttagagaaggaggtggataagctcctaacaaacggcatgatccgcgacgtttactactcgaaatggctagccaatccagtcctggtgctgaagcctaacggaacctggcgagtttgtatagacttcactaatctatacaaggcttctccaaaggattgtttccctctgcccaggatcgacttgatggtagacgccacctccggattcaagctactgtccttcatggacgcgtacgccagttacaaccaaataatgatgcacacggtagatcaagagtgcacaagcttcaggaccgataagggggtatactgctacatagtaatgccttttggattgaagaacgctggtgcaacctatcaaagaatggtcaaccggatgttcaaaggcgtccccaaacaaaacatggaggtgtacatagacgacatgttagtcaaatctaaagcgtgcaatagccacgcagacgacttagaagaatgtttcaaggtagtccgaagatacggaatgaagctcaacccaaagaaatgtacctttggggtcaaatcaggaaagttcctgggcttcatcgttagccagagagggattgaggcaaacccagagaaaattcaagctctcctgagcatgcaatcccc

SEQ ID NO: 261293 - DNA, 1196 bp, Cannabis indica
ataactatctctgataatgaaactttccatttcactggtttttatggttctcctgatgcttctaaacgtatgtttacttgggaattacttgacaagctctattataatgctcctactcttccttggcttattatgggggactttaatagttacctttttcatagtgataaatatggtagtaatcgttttaatgctgttaatatggatactttttctaagtttctaaataaattccacctatttcctcttccttttataggaaataaatatacttggaataataatactatctttgagagacttgattgggccattgtttcagactcttggtgtaatttattcccttctgttgccctctatcacttaccctattacggctctgatcatcgtgctttgaaagtgatagtcacgcagaatgttcctaattatcaccctcatagtattaagcgattccattttgaaaatgtatggcttgagaaccctgatttctataccactcttaataatgcctggggttccaattctcataatgtgtccactgtaggggcttattctaggtttcttcattcccaaagagattctatcaattcccttacttcttggggtaggtctgttgggaattcttttaagcctaggattgcttatcttcaaaaagaaattgagaggctccaatccattcatcctagggatagtgacacactttctcacattaaacatattcagtcacaacttgatgctcttttgtatagagaggaggtttattggcgtcaaagggctagggttaattggcttagggctggggataggaatacaacgttcttccatcgttatgcctctaagaggaaacgtaacaacaccatttcacttcttagggatgacaatggtaatattgctaacagtgtggaggacatgtgtaattttgtgctctcgtattttgaggatctttttcattgtgatgggtgtgatacggatgctgtgaatcacatccttgattgccttggtccccctcttgaggatttggagattgatttcttgaatcagccttttacgtttgatgaagttcaaaaggctgtgtttcagctttcgggtgataaggcccctggtcttgatggtcttaatgcctatttttatcaaaggaattgggacattgtaggtatggatgttgctaaatttattaattactacgcaagtgcacg

SEQ ID NO: 261294 - DNA, 598 bp, Cannabis indica
ccagtcaatagtcccaaggtcatcaattaacattatatatcatatattaattttcttttcttttatatcttacaacgtttactattttacaaacaattttaatttttgtgctgatttatttatttgtgtgtttttcttatttatatatatatatataataaatatacatgacatatttaattaggttggtgatctgaaacgggcgattgatatgaaaaacaaacacgcgggtgatcattttcttgagaacaattctctggtaattattcttacctatgaaaagaaaataaaacaacgattttatttatgtatagtttaattgagctttttaattatataactgatcttttaatttggttcgtgtgtggaattaataatatttgttcgtagggtaaaagaggtggtacgttagagtactattcagaaatgcagggatcagaagaaaggagtgtagtggatttcaatgaaccaattaatgagtgtatagacttaaagaaaagagggttatgtttggttcccatgtccatgttagtgaattatcttggttaattgatttttgtttatatatatatatattaattaactccaatatgtagaa

SEQ ID NO: 261295 - DNA, 645 bp, Cannabis indica
actatataataatatagtccacaagcacaatatatcacaaattacaatttcaccttctctggttaaattacgaaaatgcccccgacacaccaacggggtcttaaaatgtaatttatctatatagtttcacatattaaattataaaataatataatttctcatcaataaataattaatctagttaggattgctaatccggttattaaaccttagggtattacaattaaacacaacatgaggaacaaaagagagatgttccaggggtagcacccccgattgaagtaccatcactgtaacaaatatatccaacactctctcgaaggttttcaaatctcacataaaactcaaagatggttacaaactcacgaaaatagctagatatttccattattgttggaatttaacctcctccaaaaaccaaagaggcagttgagatattttcgcaacaaggacgtgtctcctgaagagagacataccatccattctcctatataaggggtcatacatgacttgggaaggagattcaaaaattatcactcaaagaacagaaactctgtcatttttacttctttcattcaagagcttgttcttgatgttcaactaagaacaataatacatgggcttgtttggaacgccgtattaggt

SEQ ID NO: 261296 - DNA, 253 bp, Cannabis indica
tagttcaaactgtcaactgaaggagaatcccgatttagatcatgatcatactatgcaacagaaaggatcaagggttaaacggaacgagtcatattattttgctgccataaatgtaaagttttctataacttttagggtaaatagcggcataagtacccaaagttttatgtttgtaagcgacataaacctaatgtttatttttagcggtataagtacccaatgtttataaaactgtaatttttctctaattttt

SEQ ID NO: 261297 - DNA, 1456 bp, Cannabis indica
cagttagcttcgaaaggtcaataacctccccggcgggtgccttttccttggaaggggtcgcctcaccgcccttggatttcttggccggaggagatgagcttgagcttcatccaactctcttcttcagagcatcgagcatcttttgagacatgtctgcacggaacaaaaacagcatggttagaggaaaaagacatcagaagcataaagcatagagctactttttgttgatgggctatcaactttaagtttgcagtggctcatttttcttcgatttcatcaagtgattctgctaggagtttgtgattggtaccttgattgtacgtcaatcttctgtgggataatggctcaagtttgacgggcagcatagcttcatatccgtacgccattgcgaatggtgtctgtccggttgccgttttctcggttgtagggtatgaccatagaacttcaggaagctcttctggccagtttcctttggcatcttcaagttttttcttcagtatatccttcaaggttttgttgactgcttcaacttgaccatttgcttgaggatgcgccactgcggagaaacttttagatgataccatggtttgcacagaaatcactaagtattggctgtcgaattgcttgccattgtctgaaactatcttgtgcggtagtccgaatatccttctggcaaattatgttcttcacaataaagtcttgaactttctttgatgtaatggttgcgagttgttcagcttcagtccacttagtgaagtaatcagccgctaccactacatactgcactccacctttacctttgggtaactgtccgatcaggtcaatcccccaattggcaaagggccacggactttccatctgtgttaacttattgggtggagctgttggtatctttgaaaatctctggcatttgtcacacttcttaacatgggcttttgaatcttcaatcatcgtaggccagaagtaaccttgccttagaattttcttggataagctctgtctggcagcatgatttccacagaatccgtcgtgaacttcagataagagtcgtgcagcttcgtcttgagtgacacatttgagcaatggcatcgagaatcctcttttgtacataattccctctacaatgatatactgtgcagctttcctcctcattttccgagcttcgtatttgttatctgggagtttcctagagtcgaggtaggctgctattggtgtcatccagtatggggatgtatcaatcattttgatttcttctgtgcctgtgatgttaggctcttcaaggaattagataggaaccaagtttgctatgtcacttactttgctgcttgccaatcgagctaacgcatttgcagttgtattttcttctcttggatttgacgagcatatcatccatatttcgcccgatttgatctttaaacattttgtttaccaatctttggtatgtagctccagcgtt

SEQ ID NO: 261298 - DNA, 1007 bp, Cannabis indica
gatgatgaaatttcttgccttctcattgaccatctctccttctattttcgaaccagccaccttcttctcttcatattttctgttgacctcgcttttagccaacgacaacgagtcgaatttagtaagcaataagtgatttatagcaatcgatatataataaaacaatgtaaagacacaggaatttttatagaggttcagccccgagcagttcggtaatagcctaatcctcattatttgtattgactttagatcaaggagaaaggttccttttcttatagctcttacaaaagtatctctgaatgtataattattagataatatattagggtatagtctcagctaaacttttttcgacctcttggccagtgaacatgcatcactatttatagggctagtaagcttggagaggaagagtttcccctcttgtcacaatgcgtttaaatagaaagatcgtgggattaatgctgaatacaaagattgtggtattaatgttggatacactgatagtgggatcgtgtgtatgccatatccctgtaatctaatccctgagttatagggatttcgttaatgactcacaatgtgaaaattgaattcgcaaagtgtcagtttctctacgcggattgctgattgctttactctgggcatgccagcgaggcatcatgctcggactatgcctcccgagcagatgctccgagtaaattccacgtgtcaccaatcatgcaatgccacgtcatagtgcaaaaattgggataaaatttgccccccaagtctgtacgggacttctgaagttgcgtgtagacttcatccgagctgcttctgcctttggatggggacatgtgtcaagcgcgaccatccgagactcgatgtcaggctgactgggcgtcccttcggtctttggctaataaatgctctgaaaattaatatttcgaaatccgattttctctctccacggctaacggctgcacttgattattttttatttcccatattcacttttaaggagggaa

SEQ ID NO: 261299 - DNA, 568 bp, Cannabis indica
ggaaaccaaacaaataattaattaaataaataaaaagtttacctaaaaacaaactctaacaaaaaaaaaaaaagaaaataccctaacaaaaaaaaataaaggaaacacaataaataaaatgcaataaaaacatgtttctataaatgaaaaaataaaagaaaaaatagcccaaaagatcgaaaattatgaccccctttttcttgaattttttgaaactaagcccccattttatttgcaaagaacaaacaagacaacacacaagaaatacataaagcaccaatcaacacttaagagcaaaaatagtgtctaagaagataatgaaacataacaagaatttttaagaaagctcacatgacaatattggtcaaacatatattttttttaaaacaacagaaaaaaataaaatagctttgatatttttgccaacaaaaagtacagaatgtcctcttgtctttgtccctgatgacaaaatcaaattcataagaataggcagaaattattttatcaagctaatgaactagtagaatgaggtcatactcgttacgcaggaaaaagttgactcagtcac

SEQ ID NO: 261300 - DNA, 885 bp, Cannabis indica
gattcttcacagtcttacatactatgattgaggactcacttgttacgtgtgaacatgcacgcaatcactaatgcctgaattttgttttgtgaagaagagtaaggattcgaaaataagagaagaaaagaagaagaagtctcaaaaacctagagagaaagaaacttggttaattgccttttaagcattttttggataatgagactttctattccttttatactacttctcttagggttggggttgatttatttggaataaaaaaatgataaaaatggagcaaaaatagggatctagtggccggccatgggcccaatactagttagatttttaccatttttcccaactatttatctatttttcgcaaataccacttttgcaatttcaaccgtataaattccaaaactatttatttaataattaaaataattatcaaataaaattatcatttataatatttattaattagactccacaaagtctcttaattaataaattaaccctgaaatcctatttcttcacaatcaaggcattacatagtgaaaaataacaaactagactagaataattttaaaattataattgattaactaaaatcaattaactgaatcttacaagcagtttgtctcaactagtataggaccatgagcctatataaccgagcttccaataagcagatctagaatttaccaagtaaactcactaacttattaattcctcattgcaccactatagaacttggaatttcactctcagttatatagaacgtctatatgttccacgatatagataagctattagttatccattgttattatcctaataatcaatgatcttatatagatgatttacattgcatagggattaatttaccgttacacccttcaa

SEQ ID NO: 261301 - DNA, 681 bp, Cannabis indica
cctgttatctgggtcgataaccaaggtgcagcatcattggctgcaaatcctatctttcatgcaaggtgtaaacatattgagatcgaccagcattttgtctgtgatcagttgttaaacaaggagcttgatgtccgatacgtgcctactgtcgatcaagttgcagatttctttacgaagtgtcttcctaaggagcgtttttcctatctcaaaaccaaacataaagtggtttctaccccttttcgttcgaggggggatgataactaaaaccaagaatagttagttaagttgttttggtctgttattttctgttaaaaatagtttcctaactaattcttgtaacggttttgtttttgtaattcttagctctgttgagctatatatacttcaataaagtccctgaatgggataagctttgcttttcaagctttctcttcttctctgttcagattgtttcaagatcttctttattatttttaatttagtcaaccagcaacttagaatctgtttccacgatggcgagaggaaccttaatgttataacacaatagaatgcttgatttcaaagctaaaccttcgaccataagggaattagcacaacttgctgttggaatggacaaaccaacaacaaagttgtccttcaatctttgaaaacagtcctaaagcctagcttccttttcctatt

SEQ ID NO: 261302 - DNA, 1153 bp, Cannabis indica
tcgcagacctagtatgtcgcgtgaaacttagacattttctgaattacttttgagatcctttgcttactcgctctttcttgctctcgcagatagaccagttcgaccggcacttgacgcgactcgcagagagacagctgaaatcctcgggagccttccggtacaagatcgcgactggcgattactgtgtacaactgcgaagttgcgagaacaccagctgattcctgagaacgcaagtcttcaaagggagccagtatacaaagaaccatccgagaggcaacaagagcggatagacaaacgcctctccaagcaaacttctcgaccaatctcaggtaatttatctcttgttataaactagtagatggagttttatttatacttatctttcatttatcttcgcagatatgacttttttgaagtccgcacctgtccttaagatcaagccgaagggtggagcaacgacgacctcgcccgttgtcgcccaaaagaggaagagcgatgcgatggctacccttgccacagactcttccaagaagctggccaagaccgcacaggacaaggggaagaaagtcgtaatcgatccacctgttcgagctcgcgacttcttagccatgcaggagaagttcctggccgagatcccttctgaggagcttgttacgcgctctgctgagttggcctcgcagtcgatgactctgttcataaaagctgctgccgcaggttcgaaggaagccgactcgctgaagaggcaaaatgcccagtttcaggagaacataaaaaggctgaagcaagaagcggctaggaaggagaaggagctcgaagagcttagcaaggctaaggagcaggcggagcttgaggtcaagaactcgcgggcgacgatcgaggagatgacccgcgatttggagactgagaaagagaatgggaagaaacaatatgatcaggcagtgtctgattacatttataccactctttccaaagttccagacttcgacttctctctcctcggagcagaagccgctgagatggccgaggcttttcgtgctatgtcgcctactcagacccaaggcggtggagggaaccttcctgatgaggtcgagggtgcggatactgaagaagtcgagaacgaggtcatcagcaaagttgcggatgagactgctcc

SEQ ID NO: 261303 - DNA, 739 bp, Cannabis indica
taatagttatgattttaaaacttaaatatatacatatatcatatcagggcgggtatctattcccctagcccgtttctgactcaggtatgaatctttaaacccatacccgcccctgtctccaaaagtcaacccccgtatccaccccataggccccgaaccagccggtataattgccatcccaacacataattatgtgatttatataatatatatacatatatatgtatatgtgtgtgtgcagagagagaagtacaataatttaatctctcacctttctccaattagattgaacattctgatgataagtgattcctcgtcttcagagaattcaacctcaactacttcacgcctaattgattcctcactcatcacttcttctatataccatacatcaaatacaatatttaaatatctatattggaccaattaaatttggagaatcagagagagttgagattatgagtctaatatatataaataaaaatagggaaaataaactaattaataacaaaaaattgaagtagtcaccttcttcagcttgagagtgagcaaaattgtcatcacaagaagagtgttctgagtcagccatttagaacaagtattcctgggaatgggaagccaaccagtgccaaaaatattcttatctatatatatttattatatatactcaaatctatactatatatactgaatgaaaatatttttccctaaaaaataataataaaatatataatttttt

SEQ ID NO: 261304 - DNA, 673 bp, Cannabis indica
ataaatatataaatattaaaaaattttacacaaaaaaaatataaaagccaacttttattataaatatatcttaacatggctaaataaattttgagaattgttaaaaaataccattggtacctaatatcgtgatgtcaaattattattgttgtaattaggtagcggattttatatgacttaagaaaattacttttgagaaatatcactaaccaacagtagagtgatacttatggaaaatattatgcatcactagtgccaaataacaatgcttataaacttttgtatctttttaatgttttatttaccaaaatacatttgcacacatcactacttatatcattcattttgatttatttcagcacatcaaaacaatgatttttgctcaaaaactactaaaataacacaaaaataaatgaaaaataatgaagcaaatataacaactaaaataacaaaaaaacaaccacttacctcccaactctttgccaagaagatcgtcaaatacatcatcaaatggaatattaagaactggggagtttacccttgccctacgtgtaaatagaaacaataaaaaataatacttatacaactattaaaaaatgtataagatattcaaacaaatcaaatacataaacaaaataagacactgtataaaataaaattgaatatagagaaa

SEQ ID NO: 261305 - DNA, 641 bp, Cannabis indica
gtccttgtgactcacaggtgctatgtgtgcaggtaaaggcaaagaaaagctagatcaaccatgaggttgcagtcttttccagcaatgtacatattgacctcaacggcttgcgtgccgagttgccaggagttgttttggactggctatatctgctgtgtattttgattttatgtttaaatggttgtcgtatatatttctttagcaaaactttttataatagggattcccagaacacactttttatgccattataatgtccgtttttagcgttttattttaatcaaaattttaatattatcacggtttttaataattaattattctattagtattaaaatagtttataaattcatacacgtggtgttcctatagattagggcgttacacctgccttccagctggtttcagttgggttttatgccctaaataaaattccatttcaatgtaatccttattattcaaatatcaataaagaaacagaagtattttcatcacttattgtgtcattttgttcatgttatcatttatttgtttatttgatttataaattcatccaaatccttatcacatttatattcttgtttattgtgtcttcaaaatagtggaaagtaatcaagattatgtgattaaatatatattcc

SEQ ID NO: 261306 - DNA, 912 bp, Cannabis indica
acagaatacctaaataagcattgtcaatagttcgagggaaatttctaacgtcaaaaatagtttagggggcacgatttaacaagtgtcatagttcggggggaaaaaattacaaattagcctttatataatttatcaattagaccatacaaagtctcttaattaataaattgaccccaaaacctcttttcttcataattaagctcttgcttagtgaaaattcataaataagacatcgtctaattttagaattataattgattaattaaaatcaattaactgagtcagcaagcagtatcatctcaactagtgaggggaccatgggcctatataaccgagctttcaataagtagatctagaattcaccaaataaattccctaacttattaattctgccttgtgccactatagattgggaattgaatagcacctttaattatatagaacactctatatgtaccacgatatagattatccattacgttatgattatccattgttacaatcttaatagtcaaagatcctctatagatgatctacactgaatagggacaaatttaccgttctacccttcaatgtattttatccttaaaatacttaggtacctataaatgatatttcagtaaactaatatgattactgaaatgagagctcaatcatttatctcaagcaaagctcaaagaaaattattgtttcacttctaaatacttatagaagctatagattccatatatatgatcagtgctctcattcaattgaactaccatgttcccaagatgtaaatatccgccagaaccattagttagcttccacgaacacctctaagaacataaataatacaactaagctgaacctaaccatattaggattaagatccatagaccgaagatcaaccattgatattgacttagaaag

SEQ ID NO: 261307 - DNA, 593 bp, Cannabis indica
cggataatattactaatttcatcagctcgaatagttaccatgaatatttcttaatttttttttctttcaaactaaaaaaaaaataatccttgtagtagaaggactaatccgttatttctttcatcattccaatcgaaacatgtcaatattagtactgatggtacgtaaatgttactcgttgttcaaacaactatttagagttcttagagctccttgtaaggcttgttagaaaatctgttgtcgaatttggttaatcgctctttgttgttgaaaacgaatagtttcatttttgtaattttttaattgttccaaagtgtaataccattgaatttcaaagtagcacgatttaattattcacttaattgcgcatgtttagcatattttttcacaataatagaatcattataactgattctattgagtttaccgccataaaattcaacagttacacttctcatgaatttatcttgaatcctgatcttttggctcaattttattccaatttcactgaataagttgagtgggtcctatacgcaggcttttacgccgatccggccgtagaggaaagaaagggtcaaagtcaaaataaagga

SEQ ID NO: 261308 - DNA, 693 bp, Cannabis indica
cttggaccttgtgacctagactcgaacttcgaccccaatcctggactcagaccacaaccccaaccccaaactcggacctggacccgatttaaataaaatcaaaaaataaaatataaaaataaaaataaaaataaatagaacacacttttatttttctggttttaaaattaaaaaataaaagtaaattatagaatacatttttattttttaaaaacacaaattttactttcttttttttgcgattaaaaaaataagaaacaaaaatgtcaccaaatgctattgtactatcacaagtgcggatatccataaaatgaattagattggatcgtgtagattgaattgaatcaactattttatgaagggaaattctatttacaccctataaaatgataaatacaccccattattaagaaaatataaatttaaataatttttaaaaattactcccaatatttttcttaaattttttcctcacattattttatattaatttcaatacttattttgatttcaatttcataatttttttataactcatgtatatatatatatatatttttttttatttttctaagaaattttatataattttttattttagtttttttgtcataatatttaaaatatagtttatttttatttgataggtatatttttaagaatatgaatgggaaagaaaaaaattaaaaaaaa

SEQ ID NO: 261309 - DNA, 828 bp, Cannabis indica
atttttctcacctagaaactcgagaccagactcctgtttgaaggacacgtgtactcaatttccccaaggaaagatgagatgtcaatgagagactcctcgagttcaaacctcgcttgaactagactcaacgagatgatgcggatatgaccaagtctaatcgcattcgtatgaatcgcattatgtaggaccaaggaacggatgtaacccgcatatacaaagatatatgcgagtatctccacgatcctcctgcaaaaacatagagatcgattctctatgttgcaagctggtcccgatgacccaacagcctcgataaaccgatgtagactcgcatgtcttggttctatcagctcgttatatcatgttcgtaaaagcgattgtacaagaccgcagacatcttagactcaactagtctcgaatgcattctaagcctgcgaagcttgtgcaagaatgtgaacagccaactcgcattatagaagttgcgtacgttgctatatttagtgaatgaaactggaaactgttcttcatttattaatgtttacgtttttagcttaattattgtaaatcaatgtataaactggttgacaatgaatgcaattcttatgtaaatgatacgacacttgctttgtatataaaggagtgatccaccgtgaaatacaaggacagaatctttgcaacagtggactaagcagaccgtgattgaaccactataattctcttatgtttattattctttccagcctttttgttaagtatttgtgttcccggttccagtactcgccattctaggttgaatatactcgcacttgttcatcagttttttttattatt

SEQ ID NO: 261310 - DNA, 1720 bp, Cannabis indica
taaagaaaaagaaaaaattgatgtgtgtatatatataaatatatatttatatacgacggtccggtccgagtgtggttgtcgggccatgtttgtagtatacttcgattccttcacctcatgcttgtttggtctagtctttaatttgacaacaatagccttggtttcagagacttaattaattcagagacactaaacacaaaaagggtattttggagatatcacatgataatcgatatgactatttagagtaatatggtcgcagaggatcagagcctggagagagatcactgaatattaattattacgatttgaaaagccacgacatgcatatataggcatgcaaatatatatatatgaccatacactactactactactactggtctactatattaactagaagaagaagaggatatatggtcaaactaatcccacggctgaaatcaaatcattaaaatctgacggttggggttaattaagtcttacagtagtacgtagtactgtactttttttaaaataaaaaattattcttggaactctaatttatactttttttttattattattatttaacttctcatcaaactcaatccatgtatttatacaggctaacctaacatgcacttatacttaaacaagttctcttctctttactttttttttttttttattatcttttctgcaaaagataataatttattttctaattattatacatataattaatcaaaattctggtcgtacgagttttcatagtactctttatataaatgcattgctcactcttttgaattttttctcaattagggtgaaacaagctgaagcaaacagtgaaagagtgcactaaaaatatccccacaaaggaaataaattaatatacgaccctttgattttcttttactttttctcattcataaaaacaataaacaaaagcgtggttttttttttaaaaaaaacatatattttcagtactgaccaagaaaaataatataacaagagaaaaaaaaaacctttgttgttcactgatgaacacatgaaaatgctgtaaatctcatttcatctttatgttgttattgtatttgtcggtgcatgagtctttaatatatgttcaatgtatatataatataattaattaagatggatattaataataaataaaatcaaagtgtaattaattaattaattaaatagaattagaacatgtcgtggagaaaagccggtgacactgtagtggtctgctgactccatatcgcggttaaaaatcataagccatgcatttcatgtcggctattttttttaatttaatattaaatagtaatattaataaatttattttctttaaaaaaataattaaattatattaattaattaggatttttgatgagcgttattgaaataatatgtgacttcggaaagtgagaattaatatatttatcttatatatatatatagtttaataagtcgatcataaccgtgtgacaaatcagtagtcaatatatttttactatattatataatatttatatagtggccggcagaccctattataatgtccataaaattaattacatattgtttgtacctttttatatatacacactaaattttagttcagagtaaactgggacatgtttgtattcaccattctcatttgtccgtcgtgctaaaaatatatatatgtttttaattaattttttaaccaatattgggctcgtttgga

SEQ ID NO: 261311 - DNA, 602 bp, Cannabis indica
ccggttcagtgcaggaattttcagaaactcatactcattcaattcaaacccaaaccacatgcaaccttccagacctgttctaaataccccaaagaacattcccaaagcatcaaaacaacccagaaagtacagatacagaaaatgtcgttaaatctccaagctttgagttcaaactcaagcttggttaaatctacataacatgcattacaacctgctaaaatctattcaaatatgcataactaagcttctgcaaacaacaaaaatcaaccccaacaagcacagcaataaaactcatcaatttaccatagaaatcatagtttttgagttaaaaagatccaaactttgttaatccatctagcatgcatcaaacccactttaatccattcaatttaaacatataagaactacagcaaacatcccttaaaccctgcagcaacaacaacaaaatcaagcatgcaactatccatttttcctaataacaaaaaaactcaagaaacttagaagaaatttataagaaccttaccaacaattagagattactaaaacttgagaaaatagcttgaattagcaaagaaaacaccaagattccttgctgctcaagg

SEQ ID NO: 261312 - DNA, 151 bp, Cannabis indica
aactcgaatctaaccatgtcaggattaagatccatggacctaatatcaaccattgatattgacttagaaagatataacggtaagtttaggatatcttatctaagatcaatgttctggacttaatagaatttatacattaagtatagtcatg

SEQ ID NO: 261313 - DNA, 1255 bp, Cannabis indica
ttacgcttatttttcaaaaaaaatatattgagattcatatagaagctagaagagaatgtttatattaatatatattatatatgcaatgtactaacctgttggcgaaagccaagaggatatatatcaccataggtgatattccaatcaaagaatctgtatggatcttcagcacaaacaagacccaataccaaaacaatcaaaccaaagttccttacagtagctttagctaagcttagaaccatacttagataattataatgaataaactctatcaaataatgtggcccagaataagaggtgaaagaataatagttcgatatatatagataccaagtacttagtttggaaagaatggttagagagaaagagacatattttgtttatgtttagttggttgtaagagctgatttgctgtggcttatataaaggctatagctacacagtataggagggaagtcaagcttgcaaaacaatacagtgtcaaaataatgccccacaaagaaaatattagaaaaataatgaataaaaataataataagataatgatttttttttttttgctagaaaaggaaaatgaagtgtgggttggttggacaatgccatatgagtgtgttcatgctggggccttaaatgcggtgatgagggtccaattcaccagaacattgttggaattcatagtttcaaccaatgaaattatgccacgtcgataaaactattacgtaaatgacctgaatgcccttgcttcagtaggtacacaagtaggggaataaaacttggttgaaccgcgtttgatgttcagatgcttggctggatgggttgtataatgtccgtgattagggacgcgacacacggtattttcatgttactaataagttatcatagccaaacacggcactcctttccctatatttgacctataatcaatccaacggttcacgttgcctctcatgtggggtccataccaagtaacggtgaagatacattaagtgagacgaatacaccaagaaatggatgtcgtttacgatctctttaatcttttttatctttcttcttctctaataataaacttaaaagataaaaatatgtgaacgcggaaactatgacattcttatgctctttcctttctatatagacaaaaagctaatattttttttaaaagaaaattagtcaaaggatagtaaattagtaatatagtatgtgattatgagtgcgattggggctttattatttttaaaagagcataatctaacatttt

SEQ ID NO: 261314 - DNA, 905 bp, Cannabis indica
tttaaatcatcaagctttcttaaacactattatattacattcgatatcacttttaattgacaaaattataaagtctaatatttagatacacataataataatctcacctaataactaataatatatatatttttttaatttttaattgtatcacttttaaataacatagaaaaaaactagcataaaatttagtatacgtgcctcgcacgtaactttttgctagtatatatatatatttgtagtagtgtaaagtatttagttggttattcaatagtacaatactaatttggtatttattttctgtttttaaaaatgagaaaagaaaataatttttgtagtttttaaaataaaaaatgtgtttaactaatgttttctaaaaacttttttttaagatttttttcttgacacgaacccaaccctcactcgagtataacacggatttcggaggttgaccatagacatgatcctggactttggccctggacctggattcgaaccccacatcgaccctcaatcttggactctgacctagacttagagtcaaactcaaactccaaaccttcactcggaccgatggagcctagacctcggaccgacggagcctagaccttggcccgaaccacgccattggacctcaaacccagcagtcccagaccctggccctagactacagctgtaatatcacagaaaatattataatattttattgaacatacttgattaaatatgtgattatgttgatattggagtaagattataatcttacttaagctaatggtgtgataattagtataaatgtaataaatgattaaataaaacataatatattaattatagagattttattggattatgtgagtatagtagatactatttgtgaaataaaatattttcatgttcggcga

SEQ ID NO: 261315 - DNA, 2693 bp, Cannabis indica
tacttcttcccgttgatctattaagtactcaattcttgtaagaagacacacactagctaataattctcctgtgctgttataagcacattgagaacatggataattataacttaaatatatattttttcttttttctttcgtttgaggaaagatttattaacctgttgttcaggtactggttgtatgcagctataaagttcaaaagcttactggtgacaaatgatgagatgcgagatcacacatttcaactccttggaaatgatttcttccccagatggaaagaaaggcatcaagtgagtaataaaagctctattgagccaaaagaaaaattgttaagtatggtagttgtatgtttgagcttgtactcaatgaacagaattatgtggaattggatgacatgttctagtttcactttcttctttttgccaaaaataatgctgtttaggatatcatattctattgcaattgttctcattaaggtgcctatctgtccaaaatcataggtgcgcttcactttttctgatgctggtccagaatttcacatgccgcctccttgctctgttgtaatccaggtacaatagaactccaattttgtccatattattatatatcttagaaaaagaatcacatacgaaaataataatattaaattatcttaagaaaaggttgcttctgtgtctatctttgcgtatactttacaaaccatggtaatgggatttagattcacgtggtgaaatatattttcaggaatcagaaaaaggccattggcatatacctatatcaaccgaacacgaatatgaagaagagagaccttggctatgtattatgcgtgctaagtcacgcaagatcagagaagataataaaattaaacaaaaaggtgaacatagttttaagtgaaattgtttgctaaattagtttgacatgttaacacaattgatttttgcatcaactcattgacatcccctaaattagttatgagctgcatgtgcaaactggtttcttagttgttatttcatatcttaataaaatcaaatatgttattcatgaaagcttctaaaatccttcatgacccttcatcattacaacaattggtgatttgcatggccagctctccaatctaaaatcaagtcaaaatcactgaccaatggcaaagacaaagacaaacatactaatggtgaacctatgaagatataccagaatctcaaagatattttggctggatcaacaatcgctaatagccaatcaatccttgctaaaatagagcaagcagagaagctcggtagatgcaccattgatttcgatatatgattcagtatctgcagtaaattttgtcaaggccctttcttctacaatccttgcaatgtttgggaaatcacattgatctgttgtagcttctgttctccagattccccaaactggctcgctccaatgtgggagcgccaactattggcagagtcttaattctttttttggagttagaacttagctaggcctctcatcttgtaacccaacactagtgtaattgatatcattttttgtggaaagaaaaaaaaggttcaatgctttaaacaaagctaacaaaaacaagcaaattatgctatcattattgttactaattagttgtgaattaatgtagtctgttaaatttgttgtgttcatgattgtttcatctacatatttatatttgtccacaccacgtaatgtacatatataatttttttaagagaaagtgaaaaaaggtgagggacacaaactcacggggctgaaacttgatttgtcgtttatagaatatatcactttttagagttttggtttttccatgctatacatagtgagtgtattatcacgagcctagctccaattccgaatcaccgacttctctgtctcatcactctcaaactcattacaatccaaaaagcttacgctccccccacttatcttcatatcaaattatttactttaaaaaaactcaaaaggataaggcaaaaccagctcaaccgttgttgccgttacttacatcctaaaactattattattatcacttctttctgttcttaccaaaaaaacaacaagaagaagaagaggatgcagaactccaagttgtggccgcagaaagatttcgtcggcgagtttaatgacgctgaacactttgacaagtctctgaaggtagacattaacgattgttatccttttttacttatgtttttttaaatatttatatgtttggtctgttatatatgaacatgtttgaaggaattgagagatttacgttctcaactacaccatgcggcagactactgtgaatcctcgttcttgaataccaaagagaaaagaatgtgagctttctactttctactctctacttttttttgaaaagaaaaagaaaagtagtattttacataaaaacaaaaagactgttaacctttatattttcctgttattattattcccatcttttgtttatatctaaccaaatatcagttcatataggttcgtttttcaactttgtagccttcccctacagtagtcaatgaacttttattttattttaaagagttagatattcgttaatatttactagtatcattgtaaaactgatttcaaatataaaatggagttggagagaagaagaattttctttatctatatttggattaaaggtagatgcaattttttttctctttctatgatat

SEQ ID NO: 261316 - DNA, 1521 bp, Cannabis indica
gttgcatcctgacgtcaacctggacgccgagtgagtgttaaaatgtcccagactatttttttgatgcctaagtgatgtgttgacaccacttagtcagattctgcattctggtgaagatgttcaccaattttcggagatgtcatttttttgtgaaattaggaaggctcgaaactcaccgatttttctgatattccaccttgttgaaagagtgaaatatcaatgtgtgaatttgacctgtcacaagttgtagctctcgtttactacgaaaaaatagttgaatgctcaaaacgaaatcgaattttgacaagcagaacccaacgcaccaggttaggtgtcaacttaggcgctgggtgcgtcctaaatgccttcccggggctcgttttgatacctctatggcatttgagattgcaaaagatttaattattgatgaaaacaaagaatatgcctgaaagacttcatctgaattgttgatggaagtggcccaggttgacaaagtgtcaacctaggcactgggcctagtgcctaggttaacctgggcggtggatcctcattttggcctctcaatcgattcacttttccccaatagcacttgtttcctcgttttggatgaagacgaataaagtactcgagatacttctttaatattgtagttggaagtgccccaggttgataatatgtcaacctgggtgctaggtgtctggtgcctagggtgctcaaaactgaaagtgctttgattctaattttgttgccttaaatatgttcgtaaaatgtctagttcatctcctagtacaaattttgagccattttcactaaggcagactcgaaaaccaaaaccctagttgggtagtcaccttgggcactgggcacccaagttgacttttggggtgctgtttcgtgtattttcagcttctaagtcttggatttggattcttcttgtcttcattgtacaaaatattaaaagatggtgagttggaaacaacttagtgagatctaaacacccattttggagttcctggagtcaacctgagggcaggactaagaacccttcctaggtcgactaccatgactcgggattactcaactctaggatgtattctttcttgccacatgttaaacattaatttcgacgtcaccagggtcagtttttgggtaaacattagtccctcaagttaactttacacttgtgtgaggttaacttaatgatgtgaactaagcatgtttctctcgaagctaccaggtgggcgtcaattttggcaatctcaagtaattgtttctgttcttcaatgtcctttagtgagacaaggaattttgaattcctattccttttggaacaattgaattcaaaatttaaagataaaaagaaaggagagaaaagagaaaagatagtttattttctctctcttctctctctaaatttaaattcactccttgttggcttaagaataaaggagattaatagttataaatacagaattcccccgcctggtgtctacccactgactgctaagttacctaacggta

SEQ ID NO: 261317 - DNA, 695 bp, Cannabis indica
tcctttgctacagtggactaagcagattacaatctgactgaaccactataattctctgtcttacggatattttccagttttgttgattgttttcccgattcccagtcgagttctcgccattctaggttgaatactcgcacttgtcatttctcttaaaattctctttcgtattaacaaaataacataatctggtgttgcaaaattcactcgacaacaatatacttctaaattataaataaaatattcttacattcattttaattcgtacatggctaatttatcacttgatattgctcaattagttatatatatttttttaatattttgagttctcaaatcaactacatatatttatctaatatatttatatactcatttaataaaaaaaatacttaatatatgaatttctaaaataaaaaaaaatgcaaaaaaaataatcataaattagatttgattttcaatgattataatgattgtacgatgcactatataattataacgatcacgtgattgcacaaccaacttcatacagtattcatcattttaattattacaaaacagtaagacaaatatacatttcataatagaagcaattagtcatatgaatcatgacctctcttttcatcattataatttaaggcatatattttacctccacataatttattaaagttaattctcttattaaacatttc

SEQ ID NO: 261318 - DNA, 1108 bp, Cannabis indica
atagcgatattgacacgtagaaatgtattaggcactactagtaccctttagcatttctcttaaagaggaggaagaagggtcatgcatgcatgtttaagtagcactaaattaggcgtgagatgtgtcggtgggtctctaattttcaatgtttttgtctcttttttccatagagaagttaatgtgtatgttggagaacccacatgccacttccattctcatgccgtgatttgctctataaactcctctttacaagttactcaatatgtacgtatgaacatagaaatgtattcaattaatgatatgtgctcacataaattttatatacacatagttacttagtctctttaataagtaggacatatctaaaataaaaatatgttgcatttacttgttatataagtatatatgtgtcgaattaatatgttcacatatcattactctattacgtaatgttaaacaaggtaaaagtaatattaaatactcatttgaattgcatacttattacaacttttttttcgtgcgagtaaggttaaaataccctaaaaaaattcgtgttgatttaaaaagtcagtcattattatttcagaaagtaactaaagtgacataccaaatatatatactaagtagatacaaataaagaaggggcattatagtattatgcatgttgattaaagtttcatgtaatataaactcaatttggtgtatttgtacccttaattattaataatctatcaattcaactataaatttagaaaaaataaatagtaatataatatctaaaattttgagtttataaacggtataaaattttataattgtttagtagcataagtatctaatgttagtagtagtaaaattttcatctaattttgtgaaaattaaatagactatgttagtatcttgaacaagacacgtgtaattgtaaaattcaaattctaaataattgggtctgaacaaaaacgtagtataatttacttctaaatctttttttataaatttaaaacggagcatatattaatcaaaccggacaaaaattataacaacgcaaatttatactactaaaaaaatcattaaattatttatgcatactataaatacaaaactttga

SEQ ID NO: 261319 - DNA, 568 bp, Cannabis indica
tttattacgtaaagactaataatatagttaacaaaaatatacattaacggtaagattatataaataaatacaatatataaatgctattccataatatatgtatactatttagtgtaaaaattaatacaataatatattttttttccatatatacaaaatctaatgaacataataatagaaaaatttatagcaatataataataaaaaatttaattagcattacagtagttatagatttttgtaaatgattcttgttattgtatatccgtacaattcattattataattattattattttatgaaaactgtatagaatttaaagatggaccaatcaatatttctttcaattattttagaaaagttctgataaaattaagcgaaattagcttatatactgttttttatttatttatttattttaaatttacggtttgggtttctaaaatggttgcaacgttagttgcaatagaagtttctatacgattttttgttataatttaggttgcagcgctagttgcaataaggatttttatgtagaattccgtaaaaatgtaaaaaaaaatatat

SEQ ID NO: 261320 - DNA, 704 bp, Cannabis indica
tttttttggtatattctgttaaatacataataatctgttaagtgcacaacaaaatcagttagataggcattttatatattagggaagatatatttgtaagaatagggttacataggtataaacaactgacaaattttttatttaatatcttttttcatcttcatttttttttgttttcttcttatctattttatattatttcatattattttataatacgttctgagcacgagtttctgtccaagccctaaagtaaatattttcttaaagttcttgatttttttcaaggtcatgatacactaaatatgtatttttatgtatacttatgtgacaaacaatttaaagaactcttttatctttttctttttatctatatatctatatattatatatgtatatatatgttcttatttttatatgtttgttattgaatttttatatatatatatatatattatgttgttattatttatttataatattgttgggaatgatggatagtaattcaattcccgttcaagatcaatatttgcaggataatacaatgagaactctgaaattcctttcctggtgtgaaaaatcagccacatatggtattatagaacatattcagaatttttggataccttccgaacactaaagacacgccaagaaattatctcgtgtcaaataaaaccacgataaaccttccactataacaataa

SEQ ID NO: 261321 - DNA, 1366 bp, Cannabis indica
gttgctgcctcagcatcctcttcctcctttttagtcttctcgcagaaagaaaggatttcctcctcagaatcttccaagaaactcgtattcatctcggattttccatccaagcttgataaatggtacgaaggccaacaacgttgcatcgttcaatggtttcagcctctttcccatcaagcgttaccttagctacatcgagttcccctttgagtttctggcattcatcggtcttgtcctttgcctccttcttggcagcttcaagcttgggctcaaggctcttcttcaacttttcagcatctttagtaaggcgattaatctccacttgggcatcattccactgcttagtcacaacctcgcgctagcctatcaagttctggatctcaccctccaggtacttgatcttgtccatgcctcgttgctgggccacaaaagaaataaaagatgtctagaaaccaaccaacaaaaatacataagtattttgacggaaagaaaagaaaaaagaagagaagtgagcaaataaaggtaaggaaatttaccgaaagactgtgagacaaactccttgtaagcatattccccaaatccccatgattgattaaattccattcatgggggaggaaagacttgaagtgacgccagcatattgcaccaaactctgcagtgtactctgggccagtttttccagcctcgacaggtaaagttttgagggcttggctcgaagaggcgaaggcttgggttgcattgggaataggctcgccagtacttgcaggggcagaaggagggattggatcctgattctcagtctcaagaacctctaggttagcaggttgggaggctcgcttcttgttagtcgtagtcttcttggacctctttgggggctccacttctgcgtctgatgggacctccgagatggtcagcctcttctttcccttcttatggacaagattctcaaaattcatttctgcgggacaaaacaaagtgttaagcattaattgaaagacaagtaaaaaggaagattggggcataatttcctgccgaaggaatttaccataatcactagaagacgaggtagagaggcttaatattatccacaaataactaaaatccctacaacccgtgatcctgaatatatcataaggactaattagaggggctataatatccactagaagaatcgatctgtaatctgatttactcactgtaagaagctccactatagtattagggaacataattctccaataggtagaggccatagctctatcaagctgagctcacttaaccgaggtaccactatgggtactcgaagacttttgaaaccaagtgaacttatcccctaacatccaagattaattagttcagttctagt

SEQ ID NO: 261322 - DNA, 733 bp, Cannabis indica
ccaaccatttttcttctccattcgttcccaaggacttcaaacctcaattggaacaagaaacgacagattctaagactcaggagcttccgaccaatccaaaccgagggaaccccgttgattgttataggcgatcttcacaagtgatgcttgagggtaagtattgtcccttgtgggtggtggtttcagtcggatcattattattttttgttgctccattgacccccttcttttttatccctgtctctgcagaaatagacatagatcttgtgaacgatcttagaggtcctcctcaggctgagaaggaatcccgaaggaaagttggcatggttttggatgaatctggagggaaagttggcgtggtttctatcagagaatcaaacaaaaccaagacccaaacttgcactagaaggccttcgcgccaacctctctctggtattgaggaatttcctgaggctgtgaataaggtctcggctggaggaaatgggatcttctgatgaggggaatgaggttgagaccttctacatgtagatggtctttctcgagctacgtgtagccagtctttttccaagctatgtgtagacggtctttctcgagtttaccgaccctcccatcacattctttgtttaggaagacaacttaatggtttgcccctagtggcatttttgtaaagacaagttcataacccaacttgggtttttcttatcttaaatgccttgtactattttcattcgaa

SEQ ID NO: 261323 - DNA, 683 bp, Cannabis indica
gtttgttgctcgaagtaaaatcagaattgataaaaatttttagagcaaacctagacatttttgcctggtcacatgcggatatggttggaattgatccttctattatttcgcacgtcctgaatgttgatcccagtttctggccagtccaacaaaaactaaggttactggacaaagaacaacaagtagccctgaaggaagaagtagaaaagatgcgcaacaataattttataattgaagctttctacccagcttgggtcgcaaatcccgtattggtatgcaagccgaacaagaaatggcgagtctgtattgactttagagacctcaacaaagcatgccccaaagattgttttccactaccaaggatcgatcagctcgtagatgcaacaacagggcatgaaatattaagcttcatggacgcctactcagcctacaatcaaatcaaaatgcatccactagaccaagaacatacaagttttcgaacagatatgggtctatattgctacaaagtaatttcatttggtctcaaaagcactggagctacataccaaagattggtaaacaaaatgtttaaagaccagatcagacgaaatatggaagtgaatgtggatgatatgctcgtcaaatccagaaaggctggggggcacataaacgacttggacaaatacttcaaagtcctcagaaaa

SEQ ID NO: 261324 - DNA, 785 bp, Cannabis indica
aatcattctttgaatcgttgtcaattcactctcttatcaggttaagaaattaagtagtttttatgtgttaactgtataattttaattatttgtgtattgaaatattattgtatgtattattatgaatgtgtatatagtactgagaatgtgtggtatggacacaatatgagttatgaatcaatgtacattatggtttgtatgatttgtatgtcgtatgttgtatttggtatgttgtatgctaacgtctcaggtacaaatgaggggccatggtggggtatgatacggggtaaggccgttgaatgtagagataccctaccctgcatttgtctgattcgtgtatgacattgttatagtgaggtatgatacagcgatgttgctgttgaatgtagagatacctttctctatagcaatggtagggctaagtgtgcccaggttatcgtagggccaagttaggcccaggttatgtatgtaatggctatgatatatatgcctatgttatggtaatgacatattttatagtattgatatgattatgcgctatgagtatgatattggagttatgagttcaacttatgtatgttatgaatagttagcgtggacatatatgataaaggtctcatgtgtgcaattacttagtaagggttataaactaaggtatatgatattgttaaaacttaattagtatattataatgatatatgttattgtatggtattgcatgataagcatttccttactgggcttttagctcaccccccttactttccccctacaggcaatagaca

SEQ ID NO: 261325 - DNA, 318 bp, Cannabis indica
accgtaggtttacaaaataattaatctctattatttttattttgggatttatatatttttgagatttttgtatttcacagatcgtcaggtatgtggttttggcagagccgtggcccaaatatcagctctttggggctcttaaggccaaatgaaactatctgttgtgtataaatacagatttattgtgtgtgtgtatataggcttgagattttttgtatttgtattgtatattgttcttattgttcatattgtaaagatttgaagattttttttcttatataatgatatagccagctgtgcaaaacagtcggcaataat

SEQ ID NO: 261326 - DNA, 1232 bp, Cannabis indica
aatatgctactatatataattttgatatgatcacttcctgttagtctgagttatttttgtatatatctgcagatggcactgaacttattttagtgaacaactgcaaggaaagcatatggccgggactactagccacggagggccacccaactccaaacggcggcggattcctcctcaagagcggtgaagagcaagcccttcaactcccggacaactggtcaggtagaatctggccaagacaaggctgttgtttcgacccaacaactggaagaggtgaatgccaaacaggagactgcgccggcctcctccaatgctccggcaccggcggcaaacctccgacgacagtcattgaaatgacgttggggacaccgagttcagatctgcactactatgacgttagtcttgtggatggtttcaacgtgccggtgtcgatgaggccggtaggaggtggcggcggaagttgcggggttgctggttgcgaggctgacctgaatgagtgttgtccgaaggctctgagggtggcgcgtggagggaaagtggtggcgtgcaagagtgcttgcgtggcggcgaattggtcggacaggtactgttgtagaggggagtttgggaatgcggagcgttgtaagccgacggtttataaccgtttgtttaaggctatttgcccgagagcttacagttatccgtatgatgagtcaacgggtcttaattcttgtacggcttctccttatgtcattacattttgcccacctataactactccttcctaattaatatgaagcttttcttttttttttacttttttaagttttggttatattttggattaattatattttcatattttaatttgaaaattttattttgattattattttttttggcaaagtattgcttttttcttaaactagaaaattttattttgtgagaaatttcagaaaaaaatcagaaaatgtaagaaaatcagtttaaacttattagttatttcctaagagtaattaattaattattttataatgttttttctatatcttttaacttttattttttatttatttttttataagaaaaaaaataatttacaccatattttaaaaatttaaacgggctgatttctaactgattgcaatgttatttactttctctaatggatatttgtaactctataatttgtaagaactgaataaaaatacatatggttttatggatatgggataattaagaaaattatttag

SEQ ID NO: 261327 - DNA, 627 bp, Cannabis indica
ctaaaagttaagaaattaaccaaccaaggctcagaaaacaacacaaatcaaagaaatggattgctcaggaaacctgtcccagaaccggttaaccagttttataggacttggcaaaccggttaaccggtttacaccaggtttccccaagcaatgcaaattttgttcaaaatgtggcaaacctcaccaaaacttccagaacacctataacaacatcacccaacataatccaagcaataaaacccaaaaattcacacaaaaccaaaaagagcgatggatgaacaaagcttgagttttcaaactcaaacttgtgcatccaccacaccacaaccctaaaccagctgcaacaactcaattctaacttaaattaaacttagaaactgaatcatcaacaaattgaaccataacaaccacaaattcagaaatttgcatattcaaatcaaaatcaaagcttcaataacacaaggattagagttctagggttacctttgcttaaaacaacttgaattcagctaacacttcttcaattacaccaggaaaatttaaggtcttggatggttcttctggtggtcgagcaaggaagaaagagaaaggggaaaatcttgatttttttctttatttttctaaaat

SEQ ID NO: 261328 - DNA, 722 bp, Cannabis indica
tattactttcagtttagtttttttttttttgtttttttttttttttttttttatcaaagaacaaggtagggccggtcctaaaatatatgtggacgaaaacaaaattaaattttgagcccttatatgaataatttgattaatataaaaataatagttctagtgtgttttgatgtaatggtaaaaaaaattaaaaaatttaagagtttcaaagttcaatccttcatagctacacattaaatatgtctaagaaaataaaaaattaaatattgggaattaatctcttaacctcttaacttaaaataaccctctttaccactactaacgagtttttgttatattttcttattatttaatattttatccatatgttaataattttttttacgtataatttcggggcactcagagttcgtgaacccgaggcgcacgttttatttgcctactctcagggctggccctggagcaaggatatcattatactagaaaagagtttttgacaactaaaccctccaaactatcgtttcacttacacttaaccctccaagtttaaattttggcggtaaaactctcaaaactgttaaactgttagtaaatttaaaagtgtcatccgcttaactgtcactatatgcgtatactcttgtacacgtttatattggtatacctaatatcattattcaaaaattatttcaaaatttattctaaaattaaataaaattataaaa

SEQ ID NO: 261329 - DNA, 740 bp, Cannabis indica
aaaaaaatagaccatctgtgtgcacactatgcaggagatttttatataaattttaacataaattgcttttctttaattttttttttttggttttatgtatgcatacatttcaaatgtacatttagtatattttctcataactataagatttgtgatagttagggccacaatggcacttgtgggaaaaagttgtgctgtaataggactatagaaaaagttgaacgggtaaattataaattttaaattgttaagagatttattttaatgataatgataaagttataattaaatttattataatcacaaatatataaaaaatttatttgatataatattttatttcctaatatattttttattttgtaaatataaatttaaatgtatttgataaaaataatttatattatttttatattatgttttatcaaatctaaaaaaaaaaatagaaattaagtatataagaaaaattttaagttaatattaattgttaatattaaaataaaatataaatttttttttttaaaaaaataaaagatttaataattatttattttattatataattaatatattaaatatttatatattttttaatatataataaataagtaaatatggttttagtacaaaaattaaattggagcagctttagtttttagttgtttctccaaaaattctccaaaaaagttgttttttgattacttaccaaaaacacaattttatcacagttttttcaaaaa

SEQ ID NO: 261330 - DNA, 522 bp, Cannabis indica
actaaggattaacatgtcaaccacatataagcaaacaataatcacataatttttacaagtttttgaatacaaaccttgtctccattgttatacctaaagccatttgaaagaatagcattgtcaaactttacatgccattatttcggagcttgctttaatccatataaggatttcttcaacttacacactttatgttcattgtttggtaggacaaaccccttgggttgttccatatagacctcctcatcaaggtcatcatttaggaatgtcgtttttacgtccatttggtgaacatacaagttgtgtaatgaaaccaatgcaaacaacaccctttatggtagttgttctggcaatgggagcataagtatcaaaacaatcaagaccctccttttgcctaaaacctttagctactaacctagctttaaaggtttgtacagaaccattagtgtgatatttcttcttaaatatccacttacacccaattgctttacatccttgcagaagattcataacatcataggt

SEQ ID NO: 261331 - DNA, 708 bp, Cannabis indica
  modified_base (529)..(529): a, c, t, g, unknown or other
ttttttttttgaaattgataattctaaaatttaaattatatggtcacgttttgtccttttttttttttttttatatggccacctttttgtcttttttttttttttaaattaaactttttaaaaataattttttatcaaaattaacatattcaaaataatattttggccacgttttggctttctcttttttttttaaaaaaaaaataaaaaataaaaaattaatttttaaaaatgatataccatcacttaattttaaaatctgtacatatatatgttaagttaaaaaaaaaaaattcatacgtttttttaaatgctttttattttattttttatcatttttttctatcccgattctttatatatatcctatattatttctctaaattatttttaaacttttatttatctaaaatatttgtaaacctacttatctatttttgtatttttatatcctaaattatttctctaaattatttttaaacttttatttatttaaaatatttgtaaaatctatttatctatttttgtnttttttttaaaaaaaaataaattaaaactctatatacactaccttaaatcctaaaactcttctaaagcaaaaaataaaaaaaaaaaataaaaaaaaatacaaaatatatatatataatgaaatacttaagtaaccctaaacctaattaatatatatatatatatatatatatatatata

SEQ ID NO: 261332 - DNA, 528 bp, Cannabis indica
caagacttagggttttctaattttctctcttgatgggggaagatgagaatagaaattggctcttatttcttggggatcactaccaatttataacctcatagctaggttattaattttaagtatgtctaatttagcccctcaataaataaaaaataccgcttagggtatatttagcccatgacactttaatatccaatgacccacaattactaaaatgatcactttatttgggtcaaactttatatagcaatacacacaaatacatatgagctcacattagagatttgaatccaacatataatacatcatacgagatgtatcctcaaaacgataaatgactctgacttctataatagaaataacaattgagcctctccacaacacaacttattggtaatcttaaggacgtaatcaaatattgatttacgtgaatcaatataaccagtgaaattagaatgtaagcggttaactttatttctagaatatcaatttattttaataaaggtaatatttaatgtatctcaaaga

SEQ ID NO: 261333 - DNA, 3606 bp, Cannabis indica
aatgatatgatttaacaaaataacaatattaaattgaaaatgataaattttttagttaaaagataaacacatagaaaagattagccttggccaataaggcaataactattgcttggtcggtgggtgagcgacccacaggaatggggtatggtatggacccatttgccttcttcacccattatgcagacgtgtcgtactcgaagggcataatagtaatttcacatgggagctacgcagaagcatccattacaatacaaaagaacataatagttgacctttgacttccttgtacagcaagcaatccaacagctcctcatatttgaccagttcaaaacccttttcatattatcactctctatctaatgacgtaacatccactgtctcaaaaccaatgcataagctattaaggtaataatgttcagtttctttactcattttctgtaatttgtcgtatgaaaagtgaaaatattttcctgttttaaacacaaaaacctcaagattgtgatgtacagaatttttgtggttagttaatagtcgtctaattgacttaatttatgtactatttttggatatatgactataaataaataaacaagacaagagaaaattaaacatcggattttgttttccctaaatataattaaattaaaatcaacttaatttctttgttttacatataactcccaaaaatgagaagaaaaaaacagactaccaccacgtcatgtgtggtaaaaaaaaaaaaaaaagagagatttaaggcttttatctcatcctaagaaaaaatatataataataaattaagatatataagaacacctatatcatacaacgtttgatatacacaaaccaatcccctgtaattgtaatccttcttttctttttttcttttatcctaagagaaaacaatatacaacacaatacaaaaacaaaatctaatgaattgaatggacttgatcagctagctgctacaagatgccttcttatttttgatgtttttctttctttggtattgtttgttttaattcatttcaacacagtaaagattcgaggaacgtgttgtcatctctgggctcttctttggttttagaatacacagcattgtctgtgagttgagactgagtcatgtaagaactcgttcccgagttcccaccaaagccagagaagccgaaattccctggactattatgcaacatctcaagagtgaaaggcacttgcccttctgaagaagatgtgggcagcctcagattctgaagatgattatgattgttgttagtgatattatggttagtgatgctgtgtggagccatagccgatggcctaatggcagccacagcattgttgttgttgttacttggtaaaggcctgttgattgagtggccgccactgccacgagcggcggggacatcgtggttgtgctttccttcgtaggtggtgatcactgctctaagatcatgggaagctcgctccacgtgctttctcactggacatcctggatttgtgcacttgtagtagctcctaataaataacaaaggaaaaggtgtgagagactatatatatgttgaaagttgtaacacaaattcttatgaagtgaatcttgatgagtttataagtactaaaacaagaggcaaagtccttgcactttttagaaagaatatagcttagctcaagctaccactttgtgtatataaaagaaaaaaagaccaaaaaagatcaataatgtgtttattccaatggaaatggtccccatttaaaaagataagagtggatgatgataagaacaaaggtagggtgtgaaagtcagagacacaatggagaaaaaccagtactgcaataatagttgtaatgatacatcatgataacaatatgggaactttaagaataaactactatattatatttccaagttttgtaagagtaaatatataaaaagaaaagttgaggtttacctaggattggggtttcctttgacaactttctgcccatattttctccatctgtaaccatcatctagtatatcaatatcactagttgtttgaactacaactcttggttctctcactgttctactaccaggagctgaaataccttcattttcagcttctcttttcctgaaattaagaataaataaacaaacaaatcaggactaaaccaagcaaatcccagaaaataatttcactagaaaaaaaacttaccatcttttggcatcaggttcatcttcatcaaattcatctccccctgatttggtcttctgagaactttgctcaaaatcttcatccccaattgatatagaagaattctcaggcgtggcagctgaatccatttggccattgccttgtgagacataagattgatctgggatttcagagtttgataaattcgaagattggattaaagctgaagaagctggtggtgctgctgctgcagaagatgacctccttgtagcctgaggcttaggatggttatggctacccttgtaaactatctcagtaatctgcccatctaaagatctttcgacctttttcttagttggacaattggggtatgtgcacttgtaataactcctcggattttcacttcctttaacttgtttttgaccatatttcctccaattataaccatcatctgatcttcggctcaaggcctgagcctgctgctgaggatgattattattactgtaatctgactgaaacccaccaccgtttgtttgaacattattattggccgtactctttcctgatgaatactcatctcgttgcttggtttgttcttggaagctattagtccatgcctgtaaaaaaaaaaaagttagttgaattcatgaaaatggaaaaggcaaacatcaagagcagaggaatgagattaaaaaaaaaacaaagaaaaccccaataacttacagtctgagcagaagtgtttgaagattgaaacatggaagatgatgaagtgggaggctttgtttgagtttggaaagagaaatcggagtagcttttctgttcttgtttgacactttgctggttatccccataactgttcttccaactagaaacctgagatgcaaaccttccagtagttggagacggcagaatctgtattgaaaaaaaccaaaacaacaaactttattaggatcgatttcaaaacttgggttgatcaaattaaaagaaaactgatcttaatactgagaaaacccaattggaatctactaacgttggatgagttaagaagaacaggggagtcgaggagctcagctgggcttaacccaggtgggatagcaaagtaagaagaaggagaaacagaaggtggagatatgggaagtgaaggaggtggaagagacttgaacttagggacaccccacccagtacgctcggcgattcgatccgacaacccacgtcggccttcttctccggcggcgtcgttgatgggttcctcatcggtaccggaggacaacaggtcggaaaaggaggtggtcataaatggatgagaggaaaaagtaaagttggaaaatgaatttgcagaggtatctaagctcccagaagaagaagccatcagaagctaaaataaaaataaaagctttgagtttcggtatcagagagacagagagggagagagaaa

SEQ ID NO: 261334 - DNA, 663 bp, Cannabis indica
aaaaaaaaaaaaaaaccttacaccattggcacacgcttggagacaaacatataaagactcggaacacaacacaactttatttgaccatcccatcaacagctggaacacaaacaaagaacaatatagtttaatcaaagaaaatcaagaatcttattcaaaaaaaaattctaaaatcacacgaggacaaatctacatataagtaaatgaacagaaaatcacacaagaccattgacttcaaactaataaaatgtattgagagttgactggaaatttattctgttagagatagaagcagatatattagtaagaagaagccatgaaactcaggatagatagcgccaccagctagaaccagcttctattaaagcccttttttcattgtaacaatatatatgttacgtactcacggcggcgctatccctcctgagctttaaagattctaatttactttttgaatcatcacaccaagaactctccaaccaagcaaattgtagaattataaaaagtttcattttaggggttaaaattagaaagtaaaaagaagaagaagaagaaactttgtatatattatatttataatattaatgagtgaaagagctaagctcaaatggtgggtggagatagaaaagtaagagaagggtcatatttataaggctgagggga

SEQ ID NO: 261335 - DNA, 719 bp, Cannabis indica
gaggaaaatggttgagcttaaagacaaaatcagaaattatgctcaacaaagtgacttctcggcacatgaatatcaaatcggggagggtcaagcatggtttgctcaagagttcgaaaaggtatcttggtgtaatgaagtgtggtctagattgaatacaccgaaatatagttttgtgctatggttagctatgatgaataggctcaagaccaaagataggctatacaaacatggagtgattgaaactgataattgcatactatgcaatgcagctgttgaaacaacagaccatctattcttttgctgtgtttttgctactgcttctcttacacaggtcttgtgttggttcggctggaatacaagggagacatcccttcaaagtctcatgaagaaggtgaggaaggctaaatgtactaggttcaggaaaagggtgctggctgctggtttagcagccctagtgtacctgatatggcagacccgaaatgagcatcattggggggaaaaaaatctggtgtagatgaggtttgcaagcaagttaagtggtttgttaagagtagaattgtgtctatatggcctaaaaaaattaaacaaaaagatagagaatggtttgagatgttataaagtttgtatagaagatggtatagaaaatttaaggcctttttttgtaaggtgcttataggatgtaaaaatttatgttgtggtgcaatgaatttctgatttat

SEQ ID NO: 261336 - DNA, 563 bp, Cannabis indica
ttttgaattgagatcatagaacatgtaaaaggtgatcaatcttaaacatgtaattaaacacaaatatggataaatttcacaatcaagaaaggagaaataacaattatcatttactaaatataatattaatcaaccttcatcatctccctaaataggagtttagttcataacatccataattgaaattgacacaaaaaatagcatagaaaaattaagagaagagaaaagaactagttgaagcaattgatccgagtaactacaagccactattcaagtctcctcctctgtttctaaggctccaaatctgaatgaatctgagttttcacgaactcccctttatttaaaccaagtctaatctttaaaattcgtgaaattacaaaattatccaaaaatcacatcactgaagcttcaccgcggcgaaggaattgcccgtcgcagtgacggttattttccgcaatttccaaaactctctgccaatccccgttgcggcgaaggtttttccccatcgcggggggactaggcagcaaagtgtcttgttttttttttcttctcaattctttcac

SEQ ID NO: 261337 - DNA, 1121 bp, Cannabis indica
gtgtggattttgagttgagttgttctggaaatgtgagtagattaattgtaaagggagaaaattgtaaaaaagaaaagaaaagaaaaagttatgttagtgaagtgatttgtttgtactgttttcatgagctttcttatgttgttttcaaatgaagagcctaaccaaggccatttttgtcttaaaaaaggaaaagggttactttttgaaattctatgttaattccttaaggtcttgtgttgtacttctgattaagaaaaattaacacgattagtaaactcaataactacttatttgaaatgctatagcgggtgaagctgaatttagaccaagacaaagaaagtgctcaattgaaaggaatacttgccaaagttcattgagttggctgatcaatatcagaaattttatcggtccacaaatcaaagacaaacaatgtagcttcacaccaaactaattcgattgaaaaaaggaaactttcgatcgcgagaaattgaccaagaattcgtatctcttactgattgacccttcatactcaatttattaaggtcagaggtggatggaaacaatcagaagtgcaaaaaaattgagaaatgaactgcagcgtaacgattagggcacgtgtcggaggagttacgagtgtagggtcgtcacttagggttcatgaatgatttgatctagtctataggccttcttcgactagctcttaaagagaaaagactatctcagtgtatgcctcacgacttatgggacttacctatttgaaacgaatactcttgtctgcctacactgcgctttcatctccctacccaaccagacattaccaaacatttatatataattaaatctaatcaaattttgagatttaatgcaaggtccaaagaagaccttaaaaaaaacaaagctagagtgaaacataataaaaagaattattttgaaaatattaaattaattttcgtacgttcatattcatataaagattttaaaggaaataatatatcaacaagaggttccatggtctagtggtcaggacattggactctgaatccagtaacccgagttcaagtctcggtggaacctaatatttttgaaatttaatcctatttttcaaacatacacaaatactt

SEQ ID NO: 261338 - DNA, 557 bp, Cannabis indica
atatcacgcacactcaatggagaattgttcactaccaatggaatgagatgtgaaacagtgtctgataaaccataaagttatgtatgctatgatttagtcgatagtaaagaagagatagatattttttgggtttaattattgggtttctttttaaattttaatgaaaaaaatataatggttagctgtatggtttctaaattatataaataatacaaattttttttaaaaaaaaaataacaaaaaaatgtcaaaaattggggatatgcggctaagatgattttttttaatttaaaaaaatggattgtttaatattttaacattttgaaatttgaaatcttacacgattaaatttggaaatatataagctgtaagcctaaagtctaatcgtgcaagagtaattcatctaaaaaaaatcgtgtaagagtaattctattaagttaatcgtgtaacaaatattaatatttgttattttttatttatttgttaacgtttaatgttagcattctgttaagctaatcgtgtaaggctaaataataataaaaaaagaatcgttaaaa

SEQ ID NO: 261339 - DNA, 924 bp, Cannabis indica
gaagatacaattttttgtgaatttctataaaagagagaaccttgctagaaattataagcttgataaatccagaaagctattttcatttctttcttccctaagtgcttgtggtagggggaaataagcttttggacaaaggtgtaaaaccttgttcaagttttgtgattcccctacttgacacttggtgttagtggtgttgagatttatctcacatctctctctctctctatatatatactactatttatattgtgttttgtaatcttctcttcatcttattttctatacttatgtgtatattttgtcttgagttgtaacattattttatcaatattattattcttgtattttttattttgagttgtattttgacattggtttttctattgaagcacctataaatttctaacattagttatacagaccatgtcatgcttctgttataaaaaataaattttgtaaatacaagtcaggtccagtcgtttgtacacttaatttctcctattattcaaaaaataattgtagataaaattagtaagttaaaatcttatacaattttaagacatagttataattaaataaaaaataatttatttcatgtaaataattatttttaagcaactgttggaaagtgtgaattatttactaactatctatatcaatctatctatatatgtataccaagatgattctaatgtttagtatgtatttagggtgataattttgtaacttagcacttgagtaatctatactttctattttgtggtttctctaataaaattttacatgtttttctttctattttattttcccatactattgatataatattagtaacttgattatacataagttactttgtaaaagagtcacttacaaaagttattagcaacaattagcccttatgaaatcatttatattaaa

SEQ ID NO: 261340 - DNA, 873 bp, Cannabis indica
aattttactatttcaatgattatttatgtactaaatcatgctctccagactttgatatctaccaaatcatatccctcgaactttaacatgtactaaatcatgtctcctgaactttcatccatgttagactttttttttattaaaattgaataaaagtccttaaattcaacaatcttaatagttcagggaacatttttaacgaccttaaaagtttaaagagcataatttacatgtcaaaatttagggagtaaaaatcataattagccaaaataagatattgagttttggagttttcacactacggaaatatcaacaactttaatttaccactgctagtttgataattaacaatttcttatatacagaaagaaagaaaaaaatggtcacattggaaaggctggaaatagtgaccaataaaaaatgcacatgagttttagaggtattgcaagcaagaggcaaatggtcaaaggtagaataatgcttaactccatgtgcttggaattcggagtaatggagaacaaaataacaaaatgataattttcttatttttttggaagaaatgataattttcttattgttgttatttttctagttgtattattttttctttcttttctattattttttttttcttttaatggatttctagttgtattcacttggctgttattatgtaatttgtctaatactagttgtatatataaaatataaccagtacattttggcatgttaatggctgtcaaaatcgttaaaatgttaatttctttttcccggaaaatcttatcgagaagtgagaaaatttttgggactttgtaacatttgtttgatgaatattctatctagtaaagctggtatgagttttctcaaaccccc

SEQ ID NO: 261341 - DNA, 871 bp, Cannabis indica
tgcagtgatagcacggtcttctatgacccttagcttcttagtaagctcaaccactttcttctgctcattatccatggtgtaggcataacaaacacgagcctaaagacaagaaaatagtgctaggggataataaaagaagagaaagttaagctagaaggagatatgataaaacaattaccccaaaaatgtcagtaaagcatctttgggcagtgacgtgcggaggcttggtgctaaccagccgctgcaatgggatgttcttagccttggcacaattcaaggcatcactatgtggaaggagacaagagccttgctcacgtaattactctattaagtctgaccccaagattagagcactgtgctcagtttcatccgaagagagatcaatcggagatctctcatcagcaccagcaatgttagacctctccctaccagagtcttaaacaggaagagcgacatatggaattttgcacaggtttatttaggttctctgttatgaggatgctatttgtttgtacaaatcagtttagtgagaaatacaacaccttgaatcataaaaaatatggaattgaactcttagtaattatagaattatatttattgagtttaactatagtttccattgatcagccctccttacattagttcgtaattagttttggtcaaattatcattttaaccttctaattacttctttatcctttagttccaaaattcacagtaagtataattcaagatctcatctaaatttgtgtgtaactttccaaaaccaaaattaacacataaagggaaccaacattcgatcagttaggaaagtcaggtgtaaagatcacttagtttaacatttggaattagcacataattagggtttaat

SEQ ID NO: 261342 - DNA, 640 bp, Cannabis indica
ttaagttagccaactaattaactaatagcaaattagcctattccaaatctcttctcaaattaatgcaaaaactagctgctaattattgatatttcttccttgctacaataatttgctagttatatatatcattctcttttttgaaaattaattttcagataatcacattcacatggtaggtgtgtgatcaataatggaacgagactttaatttacagccaaattttcataagtatctctacccagatccgtacgtatattatgctaataaatcaaagttgtatataaactctctctctctctctctttgatatacaccacatacataatttaaacaaataattatcactaaacatatttaccctcagtgatacgacaacgacagtgcaaaagacaaataacaattaatgtctattagtacaaatatatgagatactgtatatttaaatttagagtaattaattggtgggaatccttcatatttaatttttatacattatatatctctttatttttttttaagtaaaatctcttaatttttttttttataattttgagttttaattaaatattattgcataaagtttatacaacaataatctaattagtatttaatcgtgatattcactaccatttcaaat

SEQ ID NO: 261343 - DNA, 586 bp, Cannabis indica
aaaaaaaaaatctaaaaaaatatgcaaaaaaaatgagaaagcaaagaaataaaaagaaaactcacaccatcttgtgtcatatgtcacctcacttagtatcacaattataataatatatttttaaaatatgtgaaataataataatacaatttttatatatatacatatatttacgtgtacatatataaaaaacaaaactacgaacaaaaccgaaactacatttataataagaaataagagttgatgtttagatcaaagggtacatttgaggagagatttcaatggagaaaagattaacttgtgattgtagatgcatgtcaccttgcagtcatttactgagactctattttgagttatttaatcttcaatacagataaaagaattgtctttcttaaaagatgtagcaaaaataaaaaatatataagagccataaaataagattataaaccttttattataaaatcagaaaaaaaaaatcaaagatatgatgatgagttgagaaaagaaagagagaaaaagaatagattgagttagagcacttactctgtttgagtttttttttctgtagttatagtatgtgttatat

SEQ ID NO: 261344 - DNA, 931 bp, Cannabis indica
gtagcgtgccttagcattagggcgttacaattaagcactgtaatatgtcttaatattaaggcgttacagtataaaaataaatcttattaattttataaaagaaaagtttagaaaataatttgtctacaattttagccgatagaaaatttttgttagatctactataatcttaccttatatttatagggaatatttaaagtaggacgccctattttgtccgtatagcataggatagtaaatcaaaccatttatctgataaagaaaataaataaaaacaaccgtaaaataacaaaatataacaattaaaaacaacagtagaacaaccaaaaaataatcgtggaataacaataaaaacttaacaaagtacacagtctaaaatttacacaatatttttgaaaaaaaaaaatccgccttacaataaaaagaaaaaagttaaatttcagtatgtagtataaaactcctttttatttttaattttggacttcattctttttaaagagggttagttaatattttttaaattagagcattgttgggaggtatgaaggtgtctaacactattatgatgcagtgttttaaaaattgctaatgttttatattgttatataaatagtactttttttttaaagaaaatttaaagaataattaatactatattattattattattattatctaatatagtattaagtattctttagattttaaaaaatatttatctactttctattattattattattattattattattattattattattattattatatgtgttcaattacaattaatatattattttaaatgtttattgttcattattaaaaatatatgtgtattattgggtgactattcaatggttatattttattgtaaccatatagttacattttttaacctataatagcaggttatgaataggtaaaa

SEQ ID NO: 261345 - DNA, 1206 bp, Cannabis indica
aataaaccacaaacttttccttatctgaaggaagagttagtactggagcaataatcaagtactgctttaactttagaaaacttttctcacatcgatcagtccaaacaactttaggttctttcgggtcagtttctgttaagggtacaacaatctttgaaaaaccctcagcgaaccgacgataatacccagctaaacccagaaagcttctaactttagtagctgattttggtgttggccaatcccgaacagcttcaagtttggcggatccaccctgatcccatccttatctactatgtgccccaagaaggagacacgagataaccagaattcacactttttgaatttagcatatagcttatggtctcgtaaccgttgcaaaaatgctctgagatgcaactcatgctcttcttctgattcaaaatacaccaagatgtcatcgataaacacgatcacacatctcttcaggtaatcctggaacatccgattcatataatccatatcaaatataatacgtagccttggctcgacattcaccctgttggtgttcttgcatttaatattctagatatgatccgtgaccttgacggccacctcaatttcccaaaactttctaatactccctgatgttccaaaagcctcagccttccgtttgtgatcagggttgccactgtcagtccccttactgacattaccactagcaagagagttgatgtcgtgacgacattctttacaatctgctgttttactacatgttgctcagccttctcaacaattaaggctagctctaccatttttttgcacaaagtgtcacgagtagtggtaactatcaagtcccgactgattgtggcattcagtcctcacacatatttctatgttctggtgaaatctgtgagcaccaaatcatcagcaaacttcaatagccgatcaaactccaaagtgtattcagctactgacattttcccttaagtaaacttcacaaaatcttcctgatgtgaagtccttacagcaacattgtaaaacttttcttcaaacatattcttgaattcctcccaggtcattacactaacatcccgggtttggctcatgatatcccaccagacacgggcatggtcttgcaacatgaaggatgcacagttcactctctctgttcccattactcccatattattgaggatacgggtaacagtgtgttgggttttatgccct

SEQ ID NO: 261346 - DNA, 517 bp, Cannabis indica
aaaacaagtctttaaccgtatttctccccccaaactcaatatcctcaaaaaactttgcagttcccgtttcaaatatattccttactttgggatcataaaacttgaaactcctagatcgctcagaatatccaataaagtagctgctcacaattttttgttccagcttcttttcatttggcctataaggcctagcctcggctggagatccccaaacatgaaagtgcttaaaactaggctttcgccccatccaaagctcataaggtgtttttgcagctgctttagttggtaccctattcaaaatgtaggctgctgtcttaaatgcctctccctagagtgattctggtaaggttgaatgactgatcatactccttatcatatatttaagagtacggttttgcctttccagtaataccattcatgctaggagatccccgcatagtgtactgtaggacaattccacactcctctagatatctggcaaaaggtcctaggatgttgttcacctaatccgtcatat

SEQ ID NO: 261347 - DNA, 427 bp, Cannabis indica
aaagttgagaaaaaatatcatatgataataaatttgtacagaaacaattttttattttacttttcaatgctaatatatatcattacttttaatggcatacgttctttcaaaaaaaaatatatatatatataacattacaaatactctaaaaatattgaaattgaactttgaaaatataggatatatatgttattacaaataatacaatattaatttaaagggtaaatgcgtcattaaaagtatcaccttatatattattacaaatatccttaaaatattaaaattggaccttgaattcaaaaataatacaagatatatatcattacaaataatgtaatattaatttaaagggtatatatgtcattaaaagtatcacatgattaagacacttttaatatagtaagatataataataataataatataa

SEQ ID NO: 261348 - DNA, 536 bp, Cannabis indica
cgcgcacctcggtttcaaacccttaaaccagcaagctaaaacacaaattttagcgagaaaacccaaccatttcatctcaattcacaaccaaactctcaaatcacaaagtagagttgctaacaaacattagagatttgaaattcatacttcatgcatcaaatcccccaataaaacacacctaaattcagattacaaatcaatgaacatcaagctccattcaagaacacaattcaacaaaacttctcatttgaaaccttgaacttccaagcatgatttaaccttattttcaagcaaccacaacatcaaaaatacattgattcaagctagaaaaatgctccaacaatctcaactaaagctcaacctacatacaatcaaaagttcaaaaacaaatatgcttaaatcaacaacagaatatccacatgcaacccaagattatcatctacctatttcatgaattcaaccattaaattcaacaacaacaaccaaattaaagctgtaaaaactactcaatccttcacactcaagctcaagtctcc

SEQ ID NO: 261349 - DNA, 798 bp, Cannabis indica
tggtttaaatctcatttatttcaatttcgcgtcaattgactaaaaatccagtcagtaacttgtattgcatacattatccaataaatacttgcttttaagacataaaccctaacaaagtgttaatgaaactattttaaattatgaattaaagtttatacattatttccatatttgttcttgttacttgtttatgaaattttgtgttaattatcatcttgttaatgtttgatcactattaattttgttttgaaatgaaataccattttgaatacaaaagatgttgaagataaacaaaaatagaaatattagaaatgctacaaccaaattgatactgagaatgtctagtaacatagtgtgctactcagtttgttgatcgtcttatgaaaaataaattaacattagacagattagataataaaatctaacagtccttgatgagtaggccgaagaggagctcatgggttgatggcctcgaatggcttgtaccaaaaccaagttgtcaatctcaatctcgacatgttgccacttgttgctcttaacccaactcagaacctcttaatttccaatggcctcaatgactttacaaaaatacttcaagctgaacaaataaataaatatacagcccaaataaaaaaaattacacaaataccacttacacacactttcgactcaggatacatgcttcctggacaaccatcgcgcaaccacgcaacaacccaacgcaaccgaaacgaaaattcaattcaaaagagaaccactattaattctggcgagatcacatgagaagacaaccagcat

SEQ ID NO: 261350 - DNA, 648 bp, Cannabis indica
acctccactcaaactgcttcagagaaggatagggaatcagtaggtggctgatgctccatgctattcagataacttgttgtttcatttctcttttattgtattttttggtttttattgtccatatcagagttataaaagtggaagcagatttgataaaaatagtttttatcaaatatgaaccatgagccaaaaaatcccaccataatatatatagattaaatttaactaatgaaaagaaaataatacctcttgaagcctatcatagtattcttgctatcttttgtgacaagatcagaatcaagtcgtggtaagagtacattgagaggaagatatgatgatagaagagacatcaatctcgctcattcatgcccatagatcagagggaagtggtgtgctactattgtcacaaaaaaggacatggtaggcggaattataaagtgttgaccaagcatcttaaaacaatattgaggaatcaagaatgcaaagacacgtcaaatttcacaaattaatatttttagtgaaagctttgaaagtgactcttatgttctctctatcatagctgatgaattttttattttttgactattggattctttattcttgttgcgaaaattattaattacaacgcaagtgcacgcaatcaagtag

SEQ ID NO: 261351 - DNA, 818 bp, Cannabis indica
acaaacttccgaacacaatgtctatgaaaggaattcaaaggtatcatatcacctatgatttttatgaatttaatcttcggtttttgctagttatagctagcttctctttttcaactccagttagttgtttctcttactttaacatgatttcgagaagtaatagaataagtattatattctctttcctgatcaaatttttgaatttcaattgaaaagaataacgtgtgtcacatcatactcagtactgccaagattcccaagatggaaaagaagagctaggtggaaggaagcaacaaagtgagtgggagttctgggagctcatattgtctaaaagagatagtaatgaggaagccatacgccaatttcatgtttctgtggataacttgccgctgacctttagacatttgagcgtacaaggatcaccccaatgggcaaatacctcttgtgcttctataagggatgtgattcaggtacaaattatattatttttataggacaaaaaacttgatcattttcaaaagtcgtaggttttcaccgtttccctggtttgtgtcctaccagctttgatagtagttaatcaactgaacgacaagcttaaattacacatatgctgtgtgtaaactccgtggaggaatggactataactaacagatcatttgattgtctgtacaatcgttttaatgaaagcaaattttgaataggggtatattctctttgttgtcctttctaattacatggtagacatcgatgagctgctatgctagctgacgagttttttctatttgttgtggccgactgctctttagagctcctagttc

SEQ ID NO: 261352 - DNA, 500 bp, Cannabis indica
tacagaaaaaagggacgaaaaatctttaagagagagatcactgattgaaaacccataattttatacctagaaatatcttaataagattgactcgtggactatgcagagttaactgcaaaactacgtaaaaaaaaacctggtgttactattgctattattattcttctcaagtttcttatagtttctgtgtttaatttattacgataaaggcttattagttagttaacgaaaatttgtgttaatagtttggtgctttcattgagagagcatacgtgataaaagctcagaaaagtccctcctaaccaactagaagtttatccatggctgatgataatcaaaacaatgatagtcgtcctgaagagactaatcgtcgtcctgggaaagaactaatgggttcacagagaccacccacttcaagaacacgatcaacatgttcaagaaggagccaacatggtcatgatcaaaagccaaaaactgggaacgaggaaaccaatactaat

SEQ ID NO: 261353 - DNA, 1127 bp, Cannabis indica
aaaataatttccaacataaacagcagcatgtttttatctgatgagaaactctatctcatccagcaactgattacacacatttgtgtcatgactgtaattttatggtagcgatagaattttttcatgtccctcttccctaactctttgcaaagaagaggtttacagtatggcactgttgactgtgtcgtcgtataaatctcctcttttggatctaagagaatggagtaggtggtataatctcgcatggtcttcccctagtcttaggcttctttcctccgggggagttactttgcttgccaccattgttggctctctttcctctgctcaaacctcccttcttcccattactctgtgcttcaatagcaagggcttcagtgtttggagacttcttcttgccaccttttgagccctttgttcgggtgacgacttcttcaagtttgataaagccatctgctctatctaagaagtaattcatggcgtatacggccttaatacaaagtttagaccacaaaggacttatctccattaatcccaattacaagtgccataacccttgcgtccttgctaagacttttagtctcaggatacctctaagaacatttggatgtagtccttgaggggctcgtcatcctgttgcttgacatccaccaaatcattgggctaaattaggcattgtcaagaaggagcaaactcgttgccaaaagcaactactagacctttctataagtcgattgatctaggagagagcttaaggtaccaccgttgatctaaagctgtcagcatgacaaggaagattctgcacctgacgttgtctctcacaccatgcagatcagtttgcactttgaagtagtggatcctccttctcagtgtattgatgctaggaagtgtttttgaacttcagaggaatgggaagagctttgattcgtttggagagcggtgagcgccattctctgtcgagctcaaattcaaacaacttaggtgtcgtgatccctttcactaaagtagctaaggtgtcaaattttgcacgatttaccacatgagtggtggtctgtatcccagatggagcttctattatccagataaggtcttctctaaaagtttccacatccaccgttctcttcttggtt

SEQ ID NO: 261354 - DNA, 951 bp, Cannabis indica
ctagtttaagcagatctagcacacctcgtagttgtagagcagctaagttcgacaagaaattctcggtggcgctgggtacgacaaagcgtataacagtggtggacgggtggttcaaggtgtttcagattggtggtgcatgaatttttgaagaggaggctcaatggtgacaagaaattctcgatggcgttaggtgtacgacgaagcatatagtagggatggatgggtggttctagaatattttaccaggatctagatttacgaacaagtattttcattaacatcataaatatgaatatctctcaaacaataaaataaacacataagggtttagaaaaccttacattggttgcaacaaagccaggttaatgatttactttcatgaaatatggatttaaaatgatgaatattacttttgtgttgatttggatgtgttcatgttggtttatgtgttttttgatgaatgtatgtgaattacaaaaattttccatgaaaataatttattttcattcgaaaaaaaattattttgtattccttgtggaaaaattaagcaattttagtttttacggaactcgattctgataaaaattgagaaagttatgtggttttgaaaaccaaagttcaatggtgtcgagaatgggtgcttacacgcaccagcatcttggacaatacaccagtacgtacgcgcatctcagactcaattcgtgtttgaagcccgtgcctcgccctgcctttaaacacgcaaggttgcatccctcacccaactgatgctccacatgcttaggaagctcagtcagggaggctacaatctccgttgtgcgtgcgcggactgggctgtatgtgcagccttctgggaagcaggtcgaatttttcctattttttttttgtaattttcctaattttcaaaccctaatttcaaaataaaatattatttttaatatatttaaacttaaa

SEQ ID NO: 261355 - DNA, 2116 bp, Cannabis indica
tcctattgctactgaaggtactaataattttatcgaagtaaaatttagtaattgttaggaagctttccaatacaattctttttacaagaatgtgaatgccaaaaagtggattgtttggtccaatagttctgatgattatatttggaagcctaagtacgactgtaatctattatatgagtgaaattgtgaaaagaaacattcatggtattctcataactctcaacatctatacaatcgttccctagatgacactattgttgagttacaagcatctatggacaacaaattgcaagatgttgaaagactgacatgctgagttgacacaagttaagcaggttttgagcaaactattttgtcacctggtaagtttgcacgctaattgttctcctctacaactgactgaagaactaattaacctccaatactacctttcacacaattttaacgaggtaagtgtcacctctacctctagtggtaaaatttttgaagatcatccattctaccaagtatatatgacagtggtaatattgatgtggtacccatattattcatagaggagaatgatacaaccattattccgaaagaaaatctttttcattctaccattcttcctctaattatggatgaaaataaatgatatcgtactgacgtgatagaaaatgttgttgaggaaattagaaatttattttcacttagccatttacaatatatttcctctactacttagacaatgatcattttcttaatttatcccaaaaatataactaatgcttcaatttttgagacataggataaaaaaaaattcaatattaagttagtaaactgacctgaggagacttatctcaggtttgccaagagtaatcaggttctatcttaaatttcttttatttttggtatattttaattattgtttttttattttactttgatcatttgttttttatttttttatgaatcaatctcatgttattttctagctcactctcatagtgttctcatttcatgtatatacttttgaacaatgaggacattatcaaattttgattggagttgtgagcatattaaagcacgtttgttaacatttgtcatattaatatttttatagtcaaatttttaaaaaactacttggttattcttgtaaaatattatttttgaggcaatttttgctatattaattacttaattgtcaactggcccagaattgtttgaagatcatcaagagttggctgtcctgaggtgctctttccactgatctggacaagctccttcaatgaataaatcgagcaaaaatcagcaccttcaaaaagaaagtcttggttgttgctatagctggtctggtgtactcggtatggtatgctagaaatgataagacatggaacaacaaggatgaaaatatagatacaattgtagagaaaattcagtacactgttaagtatagaataaattctttttggccaaaaaaagtgagtcaaaaagattgagaaaggtacctaactttgtaatactttagaaatgttcttgaggtctcttaaagaagagatgctcttactttgtaaatgttttgtgaattaatacattgctgattaatttatcaaaaaaattacttagattttttttttcaagtagtacttataaaatgcacatgtcaaatattgtggtaagatggttgttagcacatatttgcttagaaaatgcttgagaaaacacgttgtgcgtgtgactatattgagataaaacacatggactaaattagtatttttcttacactgagccacatgcaaggactaaataacatcaaataacttgcattccataagtgtttgatttataattattattgatgatagatggaatgattagatttgaaatttatagtaactattcaaccaaacttataatggaagttttaataattttccaatgtgcatattgctaggtaggtagctaggtatatcatatagagctagagtttatatatattacgtacgttggaggattacaaaaatagtatgtatatataagaaatgcaagttaattaaaggagaaagtgaaggagactctaataataataaaatgcttacccatgccacccctagctagctagctatagatagat

SEQ ID NO: 261356 - DNA, 1253 bp, Cannabis indica
cactaatatatgcatttcaaaatgttctgcataagattttcagatttttttgccattttttcagatctgaaatgcaaatttttttagaaatttgatagaatttgaaggaaactcaatgcacaactcgacggggccttaaaagtcaagattttcataaaaaaaaaaaaattgttcaatgaagctccataggtactcgatagtgtgctcaatgcaataccataaaataagcctttagaggcggttattttagctgagtaatataaaaagggtagccaaagccttttggtctcataaaaaagcttatggagtcagttatttcatgtcggttattatgaaataactgactccatagaggacacgtgtattttgaagggcctacggagtcagttattatgtaataacttactccataggggacacgtgtatgtgtgcccctatagagtcggttgttacataataacagactccatatggcattaaaatccttcagcaaaccctaatgaatcacttcatctcctcccaaaatacccagttgaaaccctcaccaaccaccgccaaattagccccaaattcccatttctccaccattttttttttttgcaaaatttatcattttcaacagccaaaatgatattactggtattagaataataatatttagtcttgtaagcgcaaagtgagtgtgttggtgcggttgtgttggttgtagctccggcaacaggattttagacataaaaacgttgaatctcaacgtttattaaggtaaaaatttgatctttaataattttattaaggtgcaatgcattataatttattttgtaaatttcattatggtttttcttgttaagattgtgagtcctttgaggttgcggtggttgtcggattaattgtcctttgtagtgtgttggtgcggttttgctacaaatttattatttttctttaataatattaatatgttaaatattgtgattggaagatgaaaagtaaaatagagaacgagataggagagtattaaaacaaattttagaaattagattctaaaaaatatgttagtgagatataatttattataaatgtataggtaatttttttttttctaaaatagatgtaaatataaaatgagaaaaaaaattaactttatctatttttaatgttatattaattattaattttatttcttttttcttattttctattttctattactattcattgcatttttatttttttttacttagttaaatagttagtta

SEQ ID NO: 261357 - DNA, 1707 bp, Cannabis indica
ttagggcacaaaacccaacaccatatagggatctatgcagtgaagaagagatgcccgggtggccccaatctttttgaaaatctgagcaggggcccaagggtgagcaacagagctccaagcgtgagcaaccacaagcttacttctctcatcccgcgtccaaccttcttcaaacttaaagcatcttttaaacttggtatccagcctaccagtaaatagacatagaagtttatgatctgagttactcgtctgataagaacaattaatagctttcagataatactcttatgagtcaaaatttaaaagtctcaccttagacaaaatgggaaggtcaaatttatagatcttgaagtaatatgcgaatgagaccagaaacctacaacaaagtctccttaggaaacataatacatacaaagcatggcaaatggagaagcgtgttaataaaaatgagttcaacgagaagaagaaggttatgctagttgcaagatcgaaggctttcatcacaagaggtacaaaatatacaatatgaagaagtgtgcatataagaattatataagaattatacaaaaattatccaaaacctcatttaagaaaattcttgttgagaagaaggctcaatgaatcattctaattgcgagaagcatcctcatgatgtatgctaaatcatctatgttatttgcgaggaggataaatatcgagtagaaagatggtttgataagtaactgctcaaagatgagatcaaaagtcataattatttgagttaatcaaatttagacaattattattattattcttacatgttcaaataatatgaaacgtggagaatgtccacgtttcatgaaccatcattgagataagataaaaaagaatgactgtcgtagtaaatccttataaatagtggtagaaattattgtaaaggggtggtgagttctttcctaactgagagaatttatgtaagttgtatcttgcaatcagaaaattcaaaaattagagtgattcgtaaactatgtagatttaactacaaaactacgtaaaaaaaaatccttctcaatgtatattattttaattttatattttatttatttatctaacacacaaaaaattttatttattgttaacgaaaatctgagttaatataaacactaatctatctgactagtaatgtatgtacaaacctaaactcatcaagtttagatgacctcaagcaaaagttttagataaacaaaaataaatatacaaacattacatttgattaaacaaatcaatttttatttattctatcaataaacaatagtatataagaaaaatgaagttttataagagcattaaatttaacaatcaacccatccttaattaaaggaggaaatagttggctttgaggtatgctataagtgaaaaagagtgtaaagactgatttttacacaagcttgcaactgacaaaggtggagggttaatgacagatgtggttccattatagaaagagagagatcaagatagtccgagataaaaagagagaatagattgagttagagagagaaatagaaaaataatgagataaattattttagatattgtgtgaaaaaagaagattttatttaatgagtgtctcacatgaagcaaaaaattcaaattttcaaattaaaattacaataatccacaatgaagaatgcacagtattaataagggcattttacaaaatactggatttgg

SEQ ID NO: 261358 - DNA, 993 bp, Cannabis indica
aattcatacacaattcagaaattatcaagcatttagcaagtaagaaagacatgtgaaaatacaaaacaaacatatctaaataattccaaggtttccaacaaactgatacagtgtcccagtaggcgagagtcaaatatatcattcattgaatagagttgtcagctcatctaaaatggaaaccattctagcaaccttttattcgattaaaataagaattcaacgttgtcccggtaggcgagagtcaaggttattcttattttatgagcttccactattgtttcatactttgtaaatttatctccaagtagtcaccgtaggagagagtctaatagagacgaaaatttacaaaatacttatcataagagatgttacggtgttaaatgcttcaacaaataatcatccataagggggatgaattctaacgtctcgaggttatattaaaaataattaaccatgtaagaccaacaatggagatcaaatatccttataactaaagctcattatttgaaagagttgtattttcatttttatcccaatttttgcactctgacgtggcatcacacgatggtgacatgtggaaccaactctgggtatctgcgcgcaggatacaggccaaataggacacctcatatgcatgctctagacgaagcagtaagcaacccgctcagaacgacaaacacttaggaaattcggcttccgcatcgtgagtcattaaggaaatccctataacttggggattagattacagagatatagcaagctgtccaaatcccacgatcaatgtattttggatttactatgcaatctttctgcttatagcaattgtaacgagaagggaaatacttactctccaagctcatagccctataaatagtgatgcatattaagggtcgaaaacattctagttgagagattttgtctaagaatttatattcagagatactattttaagagctataagaaaaggaacctttctccttgttcttaagtcaa

SEQ ID NO: 261359 - DNA, 824 bp, Cannabis indica
aaattcaaaaaattataaaaagtatgatttgaaaatgtataattatatatgctatttaaaaaagaaaaaaaaatattcatatagatcatccctaagaaacgattaataatgtacattacaaaattcaaggttgttctaaagttacttttggtttataaccataaattcattgctaattaggggaatcagccaaataatcaaaaagaacaccaaaaaaacgatttttatgtatttttttagtgttattttactgtttttaattggaaaaaaggtcaagtaaatgaaatattgtgaaaaatgacaggttatggaatctatatcagttttgataaagagcaatggacaatgggaagaagaacatagttatgtcaaatttgaggctagtagagaattcataccaaaagattgcaagtatgaagagccattacagatactacttacttcattggggtgtcaaaacacaagaacaacactgcaaatgcagtaccaataaaaagaaggaataccaccgataaaaatattcaacgatgccatcttcttcttttacttgcaattaaagatcaaagaaacagatttcaccacatatccattatgcgtcaacaaacagaacaacaacacaatacctactgcaatcccaaatatcatacccacaacaacaccatatcaagaaaatgtggcaatacttgaaaacaacacaacaatgcttgaaaacaacacaggaacaacataatcatacacactcgaacaccaatcagaagaaggaggagatcagaaacaagagaatttgagaacgtcaaattcgacatagttgactatgcgaatct

SEQ ID NO: 261360 - DNA, 4406 bp, Cannabis indica
aaaaaaataaaaataaaaagagggttctttacgcagcaaataaacattttaaggtggaaaggaaatttcattatggaaccattgcaaatagttcaaccatgtagaaatacaaaggcaacaataaactacctttatttctttgatctttttagggctagcatttgcataattaaaggtaacaggatgccaatctttattctccattttatttgcagattgattccaaacagtatatgtcaatgttcttcgttcaagttcatcttcaagctgactcatctaacaaaaaattacagaacagaaacaacataaataaactcctcaactactgcaacatatagatatagacaaaccactcaaacccaataaaacacgactatgtttcagcgtaataagatagtttgatacaccaaatacacgaaaatgtgaacaaatgacttactgcaagcaatgttggcacataatgttcatctggaatacagttgtgctgcttctgaagtttctgcattcataataaagcaaaaagttcagcaacaatcactccttgatgaaaatacccattgactcaaaataaacaatcctcttcacataacaatcctcttcacatatagaaatcaagcaagagattttcagaacaaatatatgggtgtcagatagattgcaattatataaaaatttaaaattattacaataacaatactgttaacttactttaaaagatcaaccaactagtactacataaggtatacatgagtgaagtaagtatttggaaagctaagttcttaatttctatacttcaatcaggtgaaactaacacttacaagattcaactttccctttctggtatctagaggtgggcgtcgctgcaaagtgaaagcacttttttagttatatttttatcttcgttttggacaaacagcaggattgaatgagtagaatacaaataaaataaactaagtaaatgtaacctgaatgtcagctattatctaaaactcaaaacaaaaaattccccaatcataccttacaatatttttgaaagactcgaaaaataacttcatcatctataatgacttctgcatgtcttcttatcacggtgatccactgaaattatccacagaaatccagtaagagtggagcccaaagctactcaccagtgaaaagaaaaacctcgaaaatgaatccagaaactaagataatttttttaaaaagaaaaatgggctgtataaacggattgatcacctgtgatccttttcgccattttttcattggtatttttggtgacatcttcggattatatcggccctctttagtatcaagaaagctacaataataaaaaagtgcataaatagctagcaatttattccaaaaagaaatgctaaattaaattgaaaagtgacaatatttcaagctattcaatcatcctaaagagaaacagtagttagtacatcaagaatcaaagacagacccacttacctgtccacgaaactcctaggagaagtcatcaaataattgtatacatagctaaagttgtacagaggaacacagctgcaaacatacaagaaaaaacaaccttaaagataatcacattcaatactgtcattaacaaaaacaaaaaaaaatcaattaaaagaagttaataattcattgaaattgaatataataatttaaataatgctagtcacatgcatgcaggtattttggattggaacaaacctgtcagatagaagaacgaatctctgatttgccggatcttcaagagcttctgcaaatagcaatctttctgcttggatcatactcgactctccccaacctacctatatatacatatatatatatatatattaaacccaaaattcagaaatagcttcataactaaggcattcttgtattgatcattgatgatcgatctctacaaacttctaaatacagtacaagttaagagagagaagctaatatagttttctttcgttttctcagaaaccaaacagaagcgaatgcaaaaaagtcacctgaatactattctgcaattgtcgaccgagaaaaaaaggcgacttcgtcgttgactcatcaaacacatatcccggagccgaatgaatataaattgaaaagttagccgtatcagcattctgaaagaacaaagcaaacaaacaatagattatttagattactttctggagaaagagaacgaaagttaacagttagaagaaggaaaacctcaaagaaactgccccagagaaaatcaagcggaagattacggcgcgcgaggaaaaggaaggcgattttagggggaccggagaagacgttatcgcgagaaatacgagatctcgcaagagtaatagaagtttgagaagaagagaaagggtcaggttgagaatggagtcggaggagagccaagaggcagagcgcgacggagaagaaaatcagaagcttccagcttagccatatgacgtggcgcgtggccaatggcggggtttttttggtcatcgttcttcctgccaacatttgattcgaaaaatatacgatttaaaatccaactttggaaacaaaaacccaaaacacggaggagaagaatgtgtacattgaaaaaaaatactttgtatgtaattgtattttatttaaaatttataatataataaaataaataaataaataaatatgatattgttctgttgggaaggttggctaggcctagggagagagggaaggaatgcaatgggaaagctctttattttcttcctctccctgtgccagccagtgcttcaaatttgaaagacttggcttttaattaaactcaaaacaaagcaaaacgacgtgtcgtttgtataaactcagaaagcggccaggtgggcacggcgctagattggattcttctttcttggtcttattatcattggtccaacgtgtttcggtaaagagtttaatgaacgccaccaccgaccattaaagtgtgaaactttcctttaacgtattattttggttacaagaaagaaatctcttcattctgattttggttcgtggctcattattattaagacacgtctctttgaaaaaatagtgagacagctttagcatagaatgttatgaaatcaattgaatcaggatgaacgaagatctttccaactcttaaagaatttcctataaagtgaaaaatggccaacctctcataaatttcgtatatgaaatgaaacttttcacctactaaagtccctccaaacaatacccccgcaaattgcgtattaataaatcagcacagttcaagattttaaatgtacacgttaaatcataaaagctttgaaagctaattcattgacctgttatatattatgtatgtatatattatatgtatgtatatcttgaaaagaataacaaataagcaatattggtaccctgcccatttcaaacacagaaaaattggcatccttacaaccttttcgggacacaatgtcattttaaacccattgaatgaaacctaaaattgcccctttttaatataagaccacttccacttgcctacctcattggatttggagcagcagcacactaagatctaggatggaccttgtcacctctaacaatttacagttccttacctacaggacagctactcttagtcttgaacaaacacctatatgatcctggaaactattggctgacaccaactttcacattttcgcgatccaagataagattcaagatcttgccagggacaaaaattctcttcttgattgattttccattcaaatacttggatagcttttcatcttgtgatgccaactggaaagcatcttcttctgaacatttttcttcaacctggatggtacctcgtgtcttgccattaatctgaaccggcagaacgatggtggattccttcaagtaagcagaatcggcctgaaataggggaaaaaaacacggttcatgtctaggactatttatctagctgtaattctttgtctacctacttcacaacatcaacaacaaccttttaaaattgacaaactggcaactacaagtaatcatatgatctgctgcacataataggaactagcaagttgtcatatgaataaaagcagaagacaatgtccaaaccttaggaaaaggctcatatgccaatgattctgtatgaccaaggcgaaaccaaagctcctcagccatgtgaggcgcatacggtgaaagcaacaacacaaatgcttcaataataattcttggatgtttatcccactgtaaatgtaaaagtaaaagtcaataagatgaataaattgcaaaagcaccctactgaacataaaattgaaaaattagatctagatgtgtaagagaagggttaacgggcattaagacaatttaaaccaccaaaaacaaaatatttactccatacttataatgaaacaagcatatagcatgcttcaaacgag

SEQ ID NO: 261361 - DNA, 803 bp, Cannabis indica
aaaaaaaaaaagtgtattcaagaaaagtaaaaataaaagtcattttgtgtactttttttaatttagaaaaagagcattctaatgaggacgaggcaaatcaggtacttttagaaaatactttgctattataaattaaaatagtatatcaattaaaatttcagagtatataagtgaaggcacattcttcaattaaaaataacttcattcactcttaaagtaaatttaaccaactcatgacataacatataaataacttgtacgcttacattagagaaaattaataaaagacaaaatatctacaattaagtcattaaaagaagaaataatagagaatggggctctcaaaacatttgaaactatcagggcatctatctcgacttgtgctatcgacaattacaattgaagggcctaattcaaaccgtgaaaaactgcttcgacctccatttcatgagatgcaaatttacattaatcaactttgaaagaatagtaaaaacctggtcataagtgtctcgtataaaaactccgactccaattagtttttgttagcatccaatgttgcatccacattcaactcacttagagctggtggttcccacaacacatttagaattgtaggaggagaaccttagagtggcatttgttagacatttatatgtataaactgaaatatatatgtttatgtataaaatgacggaattaaatcaaacatatatacactatgaataaggatcgaaatacttccagccattgattcttgagtctttagtacccacataagctttgatctgcaaaaaaactggttg

SEQ ID NO: 261362 - DNA, 704 bp, Cannabis indica
acagattgggctttataatgttttatcaagttatattttgtcagctctttgaagattagtctaattcatttgaggtctctattctgaaatagaacacatttatgtcatcattagttatcgaatgagcgaaacatatggcttgctgctttgatttccattttactataatttacatgttctactagtttgaaggtggaaagtgttggacaccacaacacgtcaaaaacgtaattactttattattgtaaaagcaattacaccaagacttgaacactttaacttgaccacaatacacaccaagcactcactctttattttatcactagacacctttactacacacttgtgtataactcacacttttgggatactttgtctttagacacttattaagaactcacacactttagactctttttctcacacttgaactctcttgctcaaacttgcatcttaagcacacacctcacttatatttataggctacaaaggatgtatctaaagatttctagatttttctaatttactagctaattaattacttcttactattttctaaacaactctagaattatctaatcttagttctagtgattctaagttttctctaaaactttctagagtgttcttgatttttcttacaaatttcttagaacattgtaaaacattctaacatattctagatttgataatgatttttaaca

SEQ ID NO: 261363 - DNA, 513 bp, Cannabis indica
accaatcatatcaaaattaaacactaatttagacatgtgactatgtgtaggggtgaacccacatataggcgaggtggggcagttgcccccctgaaaaaaaaattgagaaaaaatatttatgtattttagctagttataacatatatttttgaataaaagtgacatttatttatgaatataatataagctttggtataatggtaaagttattttatgtacatagtggaggtcatgagttctaatcccaataaaagtatgtttactttagtatttaaattttacttgggaaatttcattttttgaccctaataaaatactccatatcaaaatttataccatccattaatttgtacaaatttagcccattaattacatgaacttcccattttacccttgttttttaaaaaataaaataaaattgataaaaactgaaattgcctctttctctctgtcttccctatctctcgtgcaccactctctttctctctaaaaaaaactgaaaaaacttcccaa

SEQ ID NO: 261364 - DNA, 659 bp, Cannabis indica
aatggaaagggatctcgttgggctttagagaactatatctcattttgtactaagtcttctcctttatttaatagttgttgtttctcttatgtcagtagaacatgtaattttgccgctcataatgtggctagatgggccttttcccatcagatgtttggatccctaccggtctgtactataccggaaactctattttgtaatgaccgcgaagtctaactgagtttatttttataatataaacgttttcatcaaaaaaaaaaaaaaagagtacaacactaagtaataataaagcttacataaattaattagtatatattggttaattagtaactcatttcatttgtattccattattagttgatgatataagatgacaggttatatgctttaagtttatattttaagaattaaatttccaatattctctatagctaatataattttgaatgtatagttccatgcctaaatggaacccttaacaatattctatagatatttttgttagtttactttctaattttcctaagacattcctagctagttcatatccatgctcataaactagcaatgcattaaggtagatggtctattagcttggattaagaatttttcatcttttactctgattgttgttaataaaaatttaattaaaaaaatca

SEQ ID NO: 261365 - DNA, 554 bp, Cannabis indica
gtgtacacgtggacattccaccatggcatttaacagataaaaatggacggaaagggctaaatgctaacagaacttgagtttagggagttttgcggcaaaaattttagaattgggggttagttgtaaaaacctccctactttagggggttttaccgcaaataaccctaaattaaataatacaatctatcaaaattaaattgacacacacaacacaacatcacatgcatgtgtgtttttatgtaataattataagtactcttttttatatatatatatagctaataatttttagtacttacctacgcgtatctttttattaatgaggccattttttggtaagaaaaatgaggccatctttaatccagcactattttagtgtaaattttttaaaattaatttggtataaaaaatctattaaatttagtttaataattttaataattcacacccaatattgccataaatatcccacaagataaaaatagtttatttaaaagattttatattatttattttaatagcttacgaataaattatatgatataatttttttt

SEQ ID NO: 261366 - DNA, 7560 bp, Cannabis indica
cttcttatgtgaagattccaacagaagaccgaatccccccaccgtaagaaaatctaaggacaggcattggtcaaggttccatttatcatgacagacgaaaaaacaataaattgctacaaatgttggaattttgttaagaaaatataatctctaatgtaaagatatatgatagatatatctcagaaagctttcattaaaccagcttaataacattcttaatacacacatagttcgtcttattaaaccttattatattgtatagtattatagtaaattaagttttatatcatattttacataatactatgttatattttgatttatgtcaaaagattatatatttatatgcatatacaaatcaataccaaacatgctattaatcaatacaatgtaatacggtgtaccaaacgaacccataaaatattaaaaaacacaattactttagacatgaatttcattgcaacttagcagactcaccacaatatatagtatggctttaagctagtatttaggcacaaaagtgaaaagactaaagacaaacataagacagcatgtagtaaaactagtttcaagcacaaaaacctgaaaaaatttcaagaaagtgttcaaggggttgatagtaaaattcttacatataaaaatgtcaactagtagtgacaacatgatgatacaagaaattaaaaagattcaattgaggcaaaaattgtattgacttgttcttctggatatctaataaagataaaagctcacctttaagcaaaatatataactcagcgtcttttcgaatgaaaattgttgtgcagagccatcaattgttcaagagataccaaagaccaagcttcctcagtttgagcatataatctttgatttagagagtccactataatacttacattcccaaagccaaatatttggtgaccattgtgcattcttccatgttttggtttaaaaagtaagccctgttgttgtgcataggcctcaacaacttctttcatgctcaactcagggccatccatactacttgtgccaccaaagcttgcagcagcagcagcttgttgtgcagcagctttttgctgagcttcaaactgtctttgctcgagagctcggagatagcttagattttcctttaaacctggttggactacttccataccttcaacagccctattcatcatatctagaccacagttaatctgagaccgaatattctcattagataaaagctccttgggaataagttctttccaacccaaaaaccactttgtaacctcttcaaagttcgggtttgaacaaagccaatgatacaaaacctgtagccactgtggaaagaaaaacttctccagcatatcaaccataagatgaataggtataacagaagcccactttatgacccaatcaaactgatcaagctgcttttgattagcagggttcacctggaactcttgtaggataagctgtaatttgggaactatgaatctacgcatcatttgttcccaactaattgaatcaaaaacaaatttccaaggtgatagtaaaattaaagcagaaccatcactaggatgccaagcaccaagaacattactcaatttggagcgtattgtttgataaacatcctccaacttgtgtcccaacagtggcagccatggatgcacccagacatggatacaaacagtctcccggtgtggctcccatgagtccacagcgctccttaatttcggcataactacatcatccaatatggtatctagaaccgatgaaggcaacagcttctcccaagagtcaataaatccaagcattggttcagggtgcctagcttgccaagtattgacagcggagattctcactgcaggcaccacaacctcaaaaatcagctgagaatatggagaagccgagtcccatatatccaatgattctgctccttgaagcaaagccttccaagcagataccatctctaaaccatgagacgggttccgaagagggtcccaaccttgaaacaccctgataaacaaaggcaaagcaaacgagcaagcaatagacgacaaattacacagcttatactcttcagcgtatcttctttgtaaatcactaaagcactgtgcaagtgaatccagagttaagattcccatagaattctcttctccaattctgtccaacacacccatgatctcctccatgctatctaattgtttcttctgtcttgcagcctcaacttctaatctttccttctcatctttcaaagccattgctgtatccctctccatcctcaaatccctatcaatcttctgaatatcaagctcagttaaatccactatcaacctcacattatgctgaagctcaggcatgggaatatcctcttccttagatcgttcttcagcattcaaattctctaaattcgtcacaacacgaacctgaggaccacgcatatccaacaccctctgaacaacaacctcaccaccaccttgctgctcctgctttttagcaagcaattcctcagctgtaatgtaatcaagattcttcttttgtttagctagagcccgtttcgaccaaagcttttccttagagggttgagttgaagaacccaaagacacaacagccataggcttaggcttagtcaattcctctaaagttggaactttctcagcctccttgtaatcattatatcccattcccatattcttaggcctcaatttagcttcaattggtgcaacaataccttgctcattcttcccaagaccacctcctttataccccatcttctcaagtaacttcatcccaatacctttagtatgtttctcaaaaaccccaacattcccaacaccatcagattggcgtttaccactctggtgaaattgttgttgagaattactatcattctgttgaagcaacttaagcctcttctgttcttgtctttctttctctctcctctgagcaccttccattatcttcctcccaaaagcagtgggtaaaaagctctcaccttcatcctccttatcaactccttcaacattagaagacccaaaacccagaccaagaccggctcttggagcaatactatcctcatgattattatcagtatcaatagcttctttagagttattctcaatctcttgggtaggcataactgtaccagtggatacgaaattcacaggctttgagagattattagactgattacgatccttacctcgacgctgctttcttggataatcatcatcatcgtcatcgtcgtcgtcatcggcaaagacaccgtaaagagcatcgtctttggtctgagtacgtttttccttgcgctttcggtagtagaattcgcccccaatccattgagcatcttcgaaatcgttgtccatcccgaatttctccatctcttgatcctcgtccattgcgaatatctgtttgattgtgtagccaaaaccctaaaaccccaaatttaagaatttcaagattagggtttgggggaaagaagaaagaacagtataataatagaagaatcgaaggaatgaagaaaggaacgagtttggaactgagtccagactcgggactcgggaagagttagagagagaaaattaatgatagaaaacattttatttttttattttatttagttttgtaacttattagactttctctaatggaagatttaaaatttgtgctaaatttagcacaaaaaaaattgtgtttatttagctcattattattatattaatgatcatttaatattttattaagaatgtacaaaaattattattttttatttttttattatttaaataataataatatggtaactaaataatgagtattgttattgggcactatctagatgtgacgtcctaagattagttagagatattacctaaaagttattattgaaacctgatacttaattgcacaaatattaatatgataccgagaagtgtgctagggtgctttttacttttagaaaagaatgtaaaatttagtaagtcaatgaatcataataattagtgacattatagtaaataaagaaaagtaacatttattctgggctaaatttgacacaatgcatatatggtgcaaaatttgacacaacttttaacatgtgttaaatttagcacactttttaaaacactattaaagtggcaatgagtgttgagatttaggtgcaagtaaatgtaaaatctaaacctaacttatttatttattgcatcaaaaactaaaactcaaattcaatctatttataatcacaggcttatataaagaatattgcttaaattttgttaatacatcagctcataaatatgtttataccatgtctaacatatttttaaatcatagattattattggttttgtgttttgtggttttctacttttttttttgtgttgattgctttgggtatggttggtcgtataattattttcatttattctgttttgaataataagtttgtaattgcttaacttttgtttgaagattattagcttatagtcacagatgggtataatctattaaatgtgcatttgggaatttaacatttttttatacttgttagaggcttcgtaatcaattatttattagatttttagttggagttgctgttagatttttcttcattattattgtaacagtttgataagtttatttttgataattttacactatgtgagttatcttcatgtaatggactttgttcgatttacctattaatgctttttttctctcaaagaaaataatatatataactattttatgatacaattaagagcaattaaaatttcttttttcttgtaggggacaatttaattatactaaaaattataatttacatgtaatagagtatatatttttaaataagtcactgccgtattatttttcaagttaggtgtgtaaacttaaaaataatcaacttaataagtcatgtcaattcaagaatgactcaaactcatttaaaaaaaaatcaaactcatttatttcatgtgggtttcaagtacagttccgttattatattaaatttgtaacaaaacttagtttttgaatatgttaaaaaaaaatttagaagtaactgatgctacaagtggcacaataatttagaatgtgggaattatatatgtcctaattaagatattaatggaatataactagataaatattacaatttaacttattaactacttatgctgctataaaaaatattagatttatattggttacaaatttaaaattttaagtatttatactgcaaatatttcaaaataaaaataatttgctctctaatagtccttagtgtggctgcacatggacatgtttttcaagttttgggttttcatgcttcgagttttacaaaactctataccaaacccgcccaatttggggaccgagtttcctaatttcaagttcgggtgtgttcgagttcgggtggaacagatgtaggtgggcatggtcaaggtgcgaattaggttaggctaattgaacttttttttcttttttatgtgaaaaattgttaataaggtgatacatgggtcttaaaaatatatgttttgtcaataaaaaccacacttctaaattatggaaatggaaggaaatacttgggaaaatttaatgcagtatttacaaaatagggtcaaaaaacaaatagagaaataacataaaatgtgtctagtcacccaattttgaaaactctccaaccaatcaatagctaaaatttgaagcaataaatacataaatgtacaatgaaatgcactaactcatcttcttcaatccctcacttccttctcttgagctggttctataccttgcacatatggtaaatgccttaaataaataagaaataatatttaatctatacatgtttctcacatcacatatttgaatctaatttctcaagtttatactgttttatacttcgagtaatactaaaaggtaccagtgatatcaaacaccattacaaaatatcatacaattattagtgtaattaaatatcaactttcacatattttaatttattaactattgcaaaacatttaactgatacctaataaaaatgttttttttgtctaaataccaaatattcaacacactttcttataataataaaacccgaatcaagaaatcacatgacaaaattcgagaaaatagtgtgaatacaagtatttgaaataaaaaaagatgtaaaaaaaagtagcaagtttatggtagaaattttccctaagtaatttacaaatctttgtagactcaccagttttgcccttcttggggaaaatttcgattgtagagaggaagctcgaagaggaaaattttcttgaaccacgatggcaagttcccgtaaacttgtggaggcagcggaatcagagggctaaagtgaacaaaaaaagtgtcaagaactcggttttcctaaacacaacaaaagagagtaaaaatgagggtaactaacctcgttgttttcttataagtcgcatatccagcaacatttccaaacttcttatccgacgaggcctatttcgaaatgtacatgacttcacaaacaagttctagaaagtagtaaatagaccatgaaaaaaagagagagtacacaaacctctagcaatggaattccgctaatgaaaagaagcaacaaggtaagaaagataggaccgatgatcacgagccactctgcaccgtctagtatgggagttgacgccacaaaaatcccccaccataagaaaatctaagcataacacctttgtcaatgtcacaaaacacatataccgaaaacaattgcagcaatagtaacaagaactacgagcaatacagtgagtagccttattagcagatcatcgttgtacatccaataatattcccaagtaactattgaagatacataatttgtagcaatttagtggcatgacaatactactaagtactaacctctccaaagtaattcggatggcgagtgtatttccacaacccgacattgcaccacttccctctattttccggggcgtttttgaattgtaatttttgttgatctgctgtggcctcaattaaaaatcctataagccaaatgatccaaccaattatgtctgcagcttcaaaagatggttccctattgctagcattaaccactgtaacgggtaaactcacagtccacacccacacagcctgtaaaaaagacacgagttttagttgcgaaaaaacttagtcagaaggtgaaaagagagaaattttacaaacctgaaatatccagaaaaccgccaatttcccaagattttgacgcatttcatcgaaacgcctatcctcgccccattgtaaaatcctggtcaatgcatttagaatagataacaaaatcaagattgtatttagtatcagaaaatcaacagcctataagctacattataaagataattgacttcaaaacataatgaatcaatagaaaagaaattcttccatatagcagttgacatactaggaagaatcaatgttttggagacgaaaaagaagaagccaaaatggctataaaacatagcacagagtggagggagatccacaaggtctagtttcattcaagtaacggattatagctaattgaaaggatcttctgatcga

SEQ ID NO: 261367 - DNA, 528 bp, Cannabis indica
tttacacataaggtgccttctgtttccaaacatgtcatgaggagagatttcttgatacacttaccgattgtatcaaattgcactcttcgagtcagtgccaaactccaataggaataatcctaattttctctcttttcattccttccctatttgtgtaatagtattacatatttgtactaactagacaatactaacaattactaactagtccctataccctttcatgtagcactccaacccttcaaaatcaccttgtcctcaaggtaatagaaataaaaaaacaactaaaaacaagcacaaatatagaagataaaaactaattatacagcccaaatattcttttaatattcagcccatttctttctaatttcctactaaattctcagcccaagattcatagggcaaagagagtcccatgtcactaatgatgtgctgctcttctacttttcctttgtcttcttcttggttttttttttttttttttgtaaaataacaaccactatccttggagtcgtgacctccatgtat

SEQ ID NO: 261368 - DNA, 1546 bp, Cannabis indica
actagaaacaaagagtgaaaactaacccaaaatatgacccgaaacttagactaattttagcctaacaagcaaccaacgaaacaattaaattgcaacccacatagcaacacacacagtaactaccggagcaacccaaatcgtaaaaaaaaagttaaaaaagtacatagggtgattcccaaaaaaattagttgttgactgaaattttttgcaactattaattagagttgtttgtagtaattaatggaagttaaagaagatgattttttatgtggttggggcattaatgagccttagtctacgagtcactgttattaatgagtatttttctctttcatacattattgggatattcatagactcataatagtggtaaaaaaaagccattattgtcgtgtttatacgaactatgctttgtataattttctagatttaaacatagggcatgattgcatgttctttacggagtatttaggcttgttataggcgtttagtgagactagacttgtctcttgctaatgatttgatagctcataatgtagccctcaaatgatgtatgggatattaagaaatcaaagaattatgggtttaaacccttgattacgtctttttagagtaaggtgtagggtgttcttccccatgctgcattaaatgtgtgtacagtgattcaacctcgagcggcacactgtgctccgcatttcccctatctcttctccgagccgagttcactcgtggagaaggtgagacaaaactattatcctcatggaggccctctctaaggtgactaatctttaggaattctttgcaaattattagcctttggaagtagtttaatgtaacacgtcctgtagtgtgggtcccatttccacatggctcattcatgagcttcaacgtattttgagaaaaattctagacaacatttaccctcaagtcctattttacaattttgtgcaatggggcttgcaacttgcctctgagtactgacatcacattctcgtaggcaacacgtctgatagtatttaatgctattccatatttttgtcaattttggtgaagacaatttgattttcctgttacttgattttgatgctcttattaattgtagggtgtcggattggtgcttgagtagtgtaaccgtctatttacactcatgcttttgacagtcttgccctagccattggatcgtgaaaactttcttcactagtttgaagtgaaaccatcaaatgagtgacgatctgagtcacccttgagggtctataaaattcctttacctctttcttttttaaattttcatcttcatacttcttagaactccagactagccaaaattccagacactctagattttcttttgcactttctccgacggtgttaaggtcagttttatcttcatcacgcaccagtacttacaaccatccaagcttcttcttttcgtaagctgcttgccatatgtttttctttcattgttgttgtattttctttttcctttggtgatctttctacttaaatgcaatatttatactgcatgactatactgcctagggtataa

SEQ ID NO: 261369 - DNA, 609 bp, Cannabis indica
aaatagattaaaataagtatcaaatgaaaatgcaacccttaaaataatgagctttagttataaggatattcgatctccactgttggttctacatagttcttattttactaagattcatccctaatagatggacattcattaacaatttaacgccgtagaatctcaaatagtggctcatgaaacaatggctgctaagtgtttcattcttagtaacttacaaggtataaaataatggtgaaagctcatgaaataggaatgacattggttctcgactaaaatgaagcaacgtcagattctcttttcaatcaaataaaaggttgctggaatggttttcattttagatgagttgactacttgatgtcgcccaattagttacactgcgctcgcattagtaaacgggctatatgtcgtatccacagagagacaaaatactactaaaaattagtataaatagaaaattgtagaatttataatgaagtaaaaataatataatgatgagtgaaagggtgtgatcagataaagagcttgataaggtagaaatgtagttatgcaaatcttattctaataccgatattaatccaaaacacagttacaattctacaccattaa

SEQ ID NO: 261370 - DNA, 3402 bp, Cannabis indica
gtttgctacataaaaaaggggaaaaaagaaaagaaagaggatgaaagagggtgcctacaaaaatctaatatagcttcaaaaaaagaagaaaaacctaaccctcctactgaaaaatatacctccaatatcccaagtgaatccctcggcctctaaagttcgtcccaaattctagccaacaacaaattttcaatgtggatgattctttcaagagagtcgagtaacggaaggaggtactcaaccatgctaaggtagttactttcaatgttgagaaatctaaagtccctctccttgatcctactcttgctctagaccacttagttggggttacagaggacaagcttgtgtttgaatgttaacctcacttttagacaacaatgattagtcaattaaagtgatgagatgatagataataattaatatatttaagcaataaggacactaaaatttaaagaggttcaaccccgtgattatggtaatagcctagttttctttacttatattaaattgaagaattatcaagatcacaaggagttggccaagtgagtttcttaataatcctaaggaaaattttacaattttagacagcataatatctctttaaagaatcagaaatcggatccctcaatagtgaaatgactccactatgtatagaggaagaaatacgttcaattggtttcctaaaaaaatttagaataaaagggaaactaaaatagtctcctattatcattttataatgcgtgttaaccccatcaaagtagggatttaaatgggagatatttatgggaaatatcccttaatattgttttgcaatcgcattcaatatgtgcgcagtacttggcttcactatcatgttggaaactgctcggatggtaacaacttgaatgggtgacacatgtctgaatcccaatgtctaccttgtcttgatgaggtcggatcacgaggtacgaagattcaagtgtcctttcgtatttcgagcatttattacttttcttcaaaaattagtcttaatttgcacactgacggttgtactccccaccgtgtactgattgtacttttgggggaaaacccaaattttaaaacttgggattgccaaattacccctttagtaaactataaaagggggtttgggtctctttccaagtcttttacacattttcaaactcaagaacttgagcgaacatttctttttctctccaaaatttccaagtttttcttctttgaagcttcaaagaaccccaaagtgatttctagaaaccaagccgaatcatcatccagaaacttcgaacaattagtaagttttctaacctttatgcatttttttttttcaatttttgtattttttttgcttaaatttgttctgtgagatctgggcttgaattgaactcttccttgacattaaaaactaggattcttaattttgggctcgaatgtatgcgtgtggcttatgattcttaatttttggttaattccaaattgttttgctgaataacattttaaaatatttgtctggcatttctgggaatttcctgagttcttcctatgttcttgaacttgtttgctctagaatttttgtctttaggacaaaaatttcttcctttgatctttaaatctgtctaattggagcgtcaatgatgttttttctttggagaagatattttatatgtccggttcttacctctctctccttcgttttgaagatgtacccaagcaatttctaagagggtaagtgttggaagttattttattaggatctagattgattaacatgtatattttattatagtctataatctaacatcctaaacatgaattttctaaaacaataaaataaacacataagatattaagaaattcttacattgatggcagcagaatataatgactccttctattcagatctctaacccttaattcctatctgtagcagagcattatcaagatttgaacttggatcttctctccttcaatttggttagacacagtcttcctcactatgctaagtattgctttgacatgagtggccataccctcaattcaccttgggattcgaatatttgagaaagaagaagaagaattttgaatatagaagaagctcttcttagttttctattttatttgacaaaagagtctaataataaactaagaaaacaagagttatcttattctatttataggattccttatagagctaggtaatttagatccataacttgcacatttcttagctatagtctcaatcacaaaggttacaaatgtctagatcctcttgccagattgtacatatctatggatgttatatttgatgactccatcttcccctttgcttctcagaaacagcgaacaaattctagctcctcatccactgtcttcaatatttttccctcagtacagattctcaaagcatcttcatctacttagatgtgtcccctttttcccagccacagatctgttctcactcttcctaagaacacttttactcaatctgagcttacaacatgtgtctcttcgcaggttcctccttagtgtaccgcaacccaaactttgtcactcaacactggtccatcaacttctgctcctccagtgtcaatatttgagcatctatcatctttaccacaacctaatattactcctacgattgtctctaactctgttttgcaggatcctcataatatcaatcctatagcaacatcccaacatgcaccatcaacagatgctcccatactcaactcttattaaatgtatactagggccaaatatggtgtccataagccaaaggtttttcttttaaccatgaattctacctctgttaaataggctctgcaagacgctgtttggtcaaaggtaatggatatagaaatttatgccttgaaaagaaatggcacctatgttcttgtgcctctccctctaagaagaacaactatagggtgtaaatgggtgtaccaaatcaaagaaaatgttgatggcattgtgaacaagttcaagactcgattggttgccaaggggtttcatcaacaactaggattcgactcattgagacattaaaggttggttaattaagcaactagacgtaaacaatactttcttgaatgggaatctttaagaagaagtttacatagctcaacaacctgactataaagatcctcaaaatcctcatctggtgtgcaaattaaaaaaggccatctatgaccttaaaaaggaccaagagcctggtttgaaaaacttcacacccccccatttcacttggcttcatatcatccaagtcagaccatagtctattcattctacatactcccacttcaatcatcatatgtggtgtatgtggatgatatataaatcacagtaaagtgactccccaacctggttttcatatttgattcaggtcctgaatgttcagttttcatt

SEQ ID NO: 261371 - DNA, 514 bp, Cannabis indica
gtgatgcctcgttttgcactttcttagctcgcaagaactgctagtattcagttttatacacgagttataactttcaatttttctttcccgtcagataggtttttaaccaaaaattatagttgtttgatctcttcttcgtcaaaaagatttgatcaagatgttataacaattcgacccctctttcgtcaaaaaagtttggttagggagttataacagttcgactcctcttttgtcaaaggggtttggtcgagaacctttgattttttttaaaaaaaaaattgaaatggcgggttttcattataccatgtatttctagatgaattccggttaatcatacataaatgccctttaagtaatttttaaagaataaaactttgtaattacttaatataaatgattctctttattcataactgaagtttaaggttacatcagtaatgtaagttacatcatttatttattggtagtagggtcacaaatgttccacgttccagtagttctttattagcgagtc

SEQ ID NO: 261372 - DNA, 516 bp, Cannabis indica
ttgaatatcttcaatattcatccgtagtgaagtaggttctgcgaatatatgtgctgcggtgggatggatgaacaaactactgttatatatgtgttatttgtcgttatacaggcatgtttaaaatttttggggtcattcaattacaaccgttatgctgccgaaatttcggtagaatttggataaaatttgatatattatgttccgttttgtttagggtccactcgctcaaccgccctcaagacgtgatgcgtcaaaggggaaagctccgatgctttctccacaaggcggtggtgcacgggaagatgacttgttcacggaagagaagatggcgttgatccctaattcgctaaaatggatgattcgtgaattcctgaggctcaaagataaacgtgatataatcacaattcctgtcccccgaggattcattgcaccgcgtacccagatcacgttatctggagaggatttgcagcaggttgctacgtgtgactacatcggcaaccagggaatgctgtttgg

SEQ ID NO: 261373 - DNA, 1007 bp, Cannabis indica
gccaagatctcattaggaattatggtagaaagggtctaagcctaattgcatgatcaagcttgatctgcaaaaggcctatgacacaatggattgggatttcttggaagaaatgttgtgttatttgaaattcccggagaagtttataaggctaatcatgacatgtatcagaactcctagatttctcttttgattgtttaatggatctatgcattggttttttttttgaagcaagaaggggtttgagacaaggtgatccaatgtctcctttgttatatgtcctcgggatggagtatcttagtaggatcatgagcaagattgggaagaaaggggactttggtttccatgaaaggtgtgctgaatatgaaactaaaccacttgagctatgcggatgatgtacttttattttgtagaggtgactttaagagcatttatctcttgatgcaagggctaaaattgttttctaattcctctagtttaacaccaaccaatacaaaatctgtagtgtattttagtggaatggatgaaaagagattaaaagagtcttggatatgactggatttactagacaggaagagcccttcaattacctcggggtgccaatctgtgcaaggaaaattgcagcaggggattgtatcagccttgcttagaaaattacaaagaaaattagagtatggtctaccggaaatttgtcctttgcgggaagattagtgttggttaactcggttctccttacaatacatatgtattggagtcaaatcatgattctccctaagaaagtgattaaagaaatagaaggagtatgcaggagttttctttggacagggaaaagagtaaagattggggctggatcagttgcgtgggaaagcttatgcaaaccaaaaaaagaaggaggcttaggcttgctgaatattgctcaatggaatactgcagcaatgtttaagcatgtttgggcagtggcaaacaagaaggaaaatctttgggtgaaatgggttcattgcgtatacatc

SEQ ID NO: 261374 - DNA, 764 bp, Cannabis indica
catgattttgctttgtagacatactgccaaatagtaaaccacatcacatagtttttctattccgattgcaccattgtatttgtagacccaaataaatggtgaatacaaagtcttgtctcgttctgaacaatattgaagatatttacgaaaatgccacgctgtacaaactaagcatcaacatgccaccagcatgcaccatcacttggctaacttgtgggcatcacttagcttataacgtgccatcttggcacgcacgttacactaatcatagatatggaatttatagcttctatatatacatagaagtgaaacgatgatttccttagagcttggctaaatgagtttaaatggtggagtactcatttcagtaattatattagtttagtgaaatatcctttacaagtaggtaagcgttttaaggataaaatacattgaagggtaaaacggtaaaattatccctactcgatgtaaataattaataggggatcattgattatttggattgaaataatggataatttatagcgtatctatacttggtatagagcgttttatataattaggagtgcaactctgaatctatagtggagtcaagagaaattaataagataaaaaatttactcggtaaattctaaaactacttattgggagcttgattatataggtgcatggtccacacactagttgagataatattatcttgtagactcaattaattgattttattaatcaaatagaatgttgaataagactatgtcttattt

SEQ ID NO: 261375 - DNA, 717 bp, Cannabis indica
gaaaaaccgaaatgaaagctgctggaattcaaagtgttatacaaaagagtgaaaatgatgataaatatagaattagattatttttgataaaaaagttagtaaggagaataagaggtggattgaattgttgtaaataaattggttttttaaaaccaaagatggataggttgtaaagatatttgatgcaatacaaatttctctgatttatcaaaaaaaaaaaaaaaaaaactaaataacaattaaattagagaaattagttacattagataaattactaaaaccagttatgttaaacaaccaattaaaaagtgacacaaaaatactagttacataaagcaagcaaattacatctgacacagtaaaaccagtttcgtaaaataacaaaagaaagaatgaaacttaaacctcaattacgtaaaacaacaattaaacatgaaaaccagttatctagtataaccaaactaaaaaaataaacataaaataaaacatacataagaagataattttttttaaaaaaaatatatgcttctattaatacataccaaagatgaacccttaaaatttagaccagatttacttttttgtacttgtgattaaaccttcttaagaattttaattttagttagaggaagtttcttctcaaagatagcacttgaatcgttagcaacatctttcatggcatccttattggaggaatcaaattccatctgaacaaaa

SEQ ID NO: 261376 - DNA, 2232 bp, Cannabis indica
ttaaaaattattaaaaatatatgtatattttttaaaaagtatttttttttatttaggcccttaaaatacctagggccggccctaattatatataatttattaatatatatatttatatacatacatttgtacattattgctttccaaaaatccaacttgatagagcttctgaatgcacaaggcttattagctaaaatatggagtggggattgtcctgctccattcacagacattgctaattcttcatacaatgaaattatttgaaatgccaaatctattaaacaaaaacaaaataaaatgatgttaaattttacactacaaataatgtaaggtaacaaaattttaattgacaattaatttttgagtttaatttcaattcaaaattcaatttacaattaagagcatgttcaatgagaatttatttaaaagaagtaataaattctacttagacttaccgaagaactcgccatctatagcacagtgtagaacagtatcaccattatgccttctacaacaagtaatcgcggtttcaggccgagttttcttcaagattgagttaagataaagaaaagcgtccttcttgccatgaagagaagccaagaagagaggagtttcacccatattattctcaatttcaatcaacgaagctgcctgatcagaatagggtttggtgatggcccgacacataggaatgttcccaatcaaagcagccaaatgaagagccgtatttcccacctcgttttttatttcaagaggttttgagtacatctctacaattttctctcccttttccacaaccacaaatccatcatcttcaacaggctccaaccagatatcattcttctcaagaatctggattccattagtcgacttttcttgctcagcctttactatttgattcactagcttctcaacaatctcctcattaccatcggccacggccacatgcaaggcggtgtagccagatctactgatcttggtgatgtgagaaatagggttttctgagtataatttcacgacttcttcccaactccgttgcatggctcctcttatttcaccaaccatctcttgcttcatcttagctacattcttagcaatgtagcaattggccattgttgccttgttaatgttgatgagtttggattttaattcctatatgtatattgtatttgtgtgttaatttgagaattgttctgatcttgcaatttactttttctttaagatatattctagcttattcttacgtgaacaattaactattcatgaaattatactttccttttatgtcaaacttcaggatacactagttagaaatcattaagataatatatattattataaataaataaacatgatgagtaatctttaaagaatgtacgtcttaaatttattcaaccaagtcaaatttttcgtctcatataacttttgtttagttcaaaacatatatttaattagccacaataataaattacttttatgacggttaaaatattatatttaattacaaattattgctattatatttttaaagtaaattataagtcgtgattaattttaagttagttaagatttttgcttctcgaattttggtatataccaaattatgttgctgaacttctttttaagtcattaattaaaaaaaatttctgaactattaagattgttagattcaaggacatatcttcaattcggctcaattgtattactaacacagcgattgcccatgtagtattaaatcatgtcctccaaattttgatatctactaaattgtgtctctcaaacttttacaaaatcgtaccccgtgaaccttcatccacgtcaggcttccattagtaaaattggacaaaatttttaaatccaacaatctcaataattcggcgaaatttttgtctgaaaaaagttcaggatataatttttagtatattattatgtcaaaattcggaggacaaacaccttaatcaaccttatttattttaacgaataaatattgttgtgactaaaaggaaattttaaaacaaaataaattataatttttataattaatattttttttaattacaaactacttagtaattaaatagttacaattatttttttttagtcacaaatgttctatttctaatcaagaattgtgctgcaactaaaaattaaataaagatttttttgtaatgagtacacatttattatacttattataaaaatatttgtatttagtcataataaaacttgtga

SEQ ID NO: 261377 - DNA, 606 bp, Cannabis indica
caattgctgatatgtttccccagtgttcttcagcccaaacgacatgactttgtactagtagagtcccatgtttgttacgaagcttatatgttcctaatctagggcatgcagttttatcaattatatccagaatatgcatccataaatgacataagctcgtgcacagcagttgcatccactaactggttgatcttgggtagtagaaaacagtcttttgggcacgccttatttaaattaaaaaaattaatacaagttctccaagttccattaggctttgggacgagaacaggattggctatccacgagggataaaacacctcgtttataaagtcattgaataataacttatccacttattattttaacgccccttgtttctcggaatcaaagggtctcctttcctgccttttcgctgggtagtttggatcgacatttaaatgatggcagagaatattagggtcagtccctatcatatctccatggctccaggcgaactaatcctagtttgcccttaagaaacttattagcgtctatttcagctgctcgtctaggttcttcccaatgtaaacacactttgtgggatttcctgggtcgagaataacttct

SEQ ID NO: 261378 - DNA, 2897 bp, Cannabis indica
cgcgaatacaatacgaatttttatgagtcgggttaaggttgagaaaattagatgcgggttggcacgcctgcacgaacacgacataataatacgttttactgctccctaaataatacccactaatttctttttggcataatagtttatagcatttctaatctccaataaatagctatttattttcctttatagtttaacacgatgagaaaaattagaataaagtaaactggaggaatcaaggatgaagtgaggtaaaagccattaaaccttttctttcaatgcctttctcttttgctccggtctattcaaactagacacgccgcattgaccagaaggttcatccccgtgaaaaactttattttccccactttggttaatgcctgaacagctttctgtgtctatagtgaaaccatgtattggttatgattctatgagacatatagaggtaaaagataaagtaacaaatacaatttactaattactacctactgatgacaaacaagcttcttgggtgacatcatcttgtgcacgctctaaaggcaagtgacatggaatctgcatgacaagaaaatctcatcattgaaaatcgaagagtaagaaactgtcatatttctaaaattgaattttgttaaggatgacataaagcatgcctatgatgactaatttagccaaacatattctggtcgataagaatggggatgtatcttggtcctagatattatacacttggcttaggatctttgaagttctattgttaattttaagtaatgaagtccactttcctctgccacaaaggccccctaataaatataggagtgaaaaaatcaacacagcaatgaaccacaatttacacttggaattgtttttgagggactttctttcttattttcatggtccgttatatatcagagatgagccgcgtaagttatctttagcagacctcctggaatgctaattgctaagcaatgcaaaccagaaactactccaaatcttccatttgcaatgacttcacaaaaataaaacaacttccactatgaagtcatccactcttctttgtcccactatcagggaccataatatgctcaaaattttttagtatatataaaaaaaaatattgataatcacaagtcattcaaaactatcataacctgttctttctgaatgtcctttctgtggtctagttgatctagataaggcatcttgcccttggtaatggtatcttcaccaggaaaatttatttgctgctgaattaaattaacttcagaactgctttcagtacctgaaaaatggcactattattataagaaacagaaatactaaagattatgaaccaaagtaaagcaaagaagataggaaccacctgaatgtgacggttgatcagcatcttgaacaaaaccatcatgtgattgttttgacaacatggaggatggactttcaccatggaagtatttcatgattgaagatgttccctaatagaagaaatcatttttattgcggcttaggtgcaataaatcaatagttaggataaaattacatttggacaaagcaattcatccttttcctcctcaaattcaatgagcattattgattttaaagataaaatcccttctaagctttatatgtttggtaaacatgaagcttgcagttcttgagttagtagatgatccataaattgaacctcaacaatgtgaggagcaacaaccacaaacctaacagctcaacaaatgtcccaggtcatggtcacttctttctaagttcattattgcattaatttactggttaaaagaataatatttgttgacctcgcttttggccaatgagtctttaaagtgattgaaaataattagattcgaaaagaatatgagtaatacagagcaaaataagaacacgaaagaggttcagattatcaaacaacaattacttaataggtcatttctactgggcggcattccgaagatggtaccctccgcccagatcctggaaacattccccgtgtcacccagagaagtgtcacgtcatccatgcagattttggataacatttgccccccaagtcctcgtgggaacttcagtttgtacgtggacttgcttggtcgacgtactagataaatgaggtgacacgtgtccgacgaggtgggtgaacgtattcgtcttttcggattttcaagatgtcctttcaaatcttgaggcatggattattctgacaagaggaatcatgctcttggggagtgtgctgacgattatacactccaagtgtgttgattacactcctttcttgggggaaatcccatttgaaaaccgaattactaatatacccctcgagcaacctataaaagatgatagaaatcctcatttgcactcttttactcctttacaaactcaagactatcagagcaaaatttcactctcaaatcttcaagaattctcagaattctcaaatcttctgatgctaattccagcttcggttttgtgcattccttccagcaatatctataatgagtaagtatctaacctttcaatgcatttttatcttaaattttttgcattttacattacatgttttttgcaaaatctgggttaatgctacgagtgttcatcactgctaggattagaatctggatcttttaatactgaatatgcttgcactgaccttagttgttagattaatgggcatttgcatgttttcctttaaaaaattccttgaaataactttcatacagcgtttcgacaaattatgggttcgtccctgttcttgagtaccttcaagctgagatcttcgttttttggacatagtttcttttcttcgatccagaaattattctggtcaaattacgggaactgctttccattgattctttccttcttgctcagcatttacctccccttccttcttttgta

SEQ ID NO: 261379 - DNA, 2218 bp, Cannabis indica
aaaaataaaaatatattatataaccacttttgtttttaaaacagaaaaacaaaagtgcgttctgtaaatatcattttattttttatttgttgattttatttaagtcaggtccgaggccaggatccgggtttggagttgggtcagggtccgagtctgggtgcaagtctaggtctagatccagggtgcaggtttgggttcagagtctgggtttaggtgcggggtccggggattcgggtcagggttcaggtctgatgtcccgtgtttgggtctgggtctgggttcaggtttaggttcgagtttggcgtccgtgtccagtgtctgggtttgggttcaaggttcaggtttgggtccaaagatctaagttggggtcggagtccaaaatattaatgaagaaaaaaaaactgttaaaaaaattaaaagtgaccttttcttgtttttaaaattttgactcttaaataaaaaattgaaaaataaaaacaattttataaatatgtttttgaaaaatatttttattttttaattaaaaaataaaaaattaattaaaaaaatattaccaacaacacttttaatgtttatattttctgtaaaatttccttaaaaaaagtctcactgttttataatttgttcattcgataaaaaaatttcaaatccgaactccgaattaactttgaattaaaagaaatggaagaatgtgtgcacataactacaataagaaaaaaataaatagttttagagaaaataagagatgtttgttggggaatggaatctagctgcaatgggaggcatgcagtttgagttgggtccggctaaggagacattagctgcacgtgccaaatgtgggcctgagtgagtgggccggcccaggcgccacgagactcgtgtgttgatgacaagagtgtggtatgtcataacctctgatactttcacgtggtgatcccacacttaacccccatcatttcattttcatgctcctccttccctattcttattcctcctcctctcctcttacctaaccaaccctatctttattctttacacacaaaaattataaccctttatgtatatatatgtataatgtattccactataatcaaaacaatcatttattaattagtcaacaataatttaagctgttagtaccctctcatttagctagctagattattaattaattccaataaaatcaacgtttagtaaaaattaaattgtttcatactaacctaaatttcttcattcaaaaatcgtaggtcacccaaaaaaaaatatcaagttaagttgctagccagccacagtgattttgagatcaggaaatatataaattgatcacaaacattttgggatcaagtacaagtactttgaagactaatgtattaatatgttaaaaaggagtagcagaataaatgttaacataagtagatatgaagaatactattattgacttctactttggaatttaactgatacgcggtgctttgtcttcatttaatttatagatattataaatacatatagaaacaatatttaatttgattgtggaactcttaatttagtaagttctattaataataataataataatttgtagttcttaataattaatacaattctacatacatcatatgttgtacagaaagctccatattagggagtagtgaaaccagctttaatgaaaaccggccatgtacggtagccttagccccacgcactaatatatatatatatataagatgaaacataaagacaataagataatttattaattaaatgtgaattacacgtccgtacgcattagctatatagtttttcaaaatctttcaaacaactataatatatatttaatctttttggcaatttccccttatactgcacactactgcactgcgtgttgaaaaggtaaacaaataagaagcaaatataactatatatataaagggtaggtatactctcttttaatttctacaaaagaatctcagtttacacatatatttatgtcgaatttatttgtctttaacagcttaaaaagttttttattttattgtattctcatcaatcatcatctcatgcctttaacacattttgttctcttaataatacctttattataagtaacggcctgctggaataatatatacaataatgcacaatgtacacttatataacaggtgtattgctccgatctattttggcatcctaatcaaatttttagtttttttttttt

SEQ ID NO: 261380 - DNA, 1201 bp, Cannabis indica
ctggtaaaacatattccaacaaacacatgcccctaattttgcgattgacagttatgtcatgagggaaactatgagagagaagcaggcgagtggttgtcacgagatggtgactctttgttttcttgtcgagggttttgaaaagatgactgtaattattactttatttctccgagatgccatttcatcaaaacctttcgaggtacgtgcaggcgtgttctctggagaccgttgaattagaagaccttaggcattccttttccacgtgtcttcatcccaataaatgagggataccgctatttaaaccccctgatacgaaatgattcttactcatttccctcccattttcatctttctcctctctttacttagaatttcaaaccttcaaaattcttttgaaattttttcgaattctttcctacgaagatcgattctgaaggtttcatcacttgcaagattacccaagacgaactatattttgaggttagcaatttacttttactaccatcgttgtctttcccttgagtatttgtatacattctgtgtttttaggagtagaaaatgcatgaaatgagagaacttatagattattttctatagttttggaaaaatgttgtatttttctagaaaatacgcgtttgaaacttaaatactcgcgagtttaaggaagagctccttaattattcgtgagttttagaaagaactcaatgaatattcacaagttttcatatgaagttctggaatattcgcgtattgtgggagtgtcacgttaacttaatgttcatgcaaccatcacatgccccttgggatactgtgacacacccagccatttcttgagacatgtggttagttttcctttttctcacattttattcatttgtcagaattgactagattctcgaagtggtgggtatctccccatgattcaatgttcatgtaacaacatgacccttaaaatactgggaaacgcctagccacttctagagattcacgactagttccatgattttttactttgaattttataactcgggtgagagcacttaatttgttaaaaccgcactcgcaccacactgaaaagatcttttatctttcagatgggtgacctgtcagacagccagaggtacgactctggatgagtctaaaaagagtgacagttttatactaaccacactgtccgtaggatgagactcccatagcaagg

SEQ ID NO: 261381 - DNA, 884 bp, Cannabis indica
tttattgtgaaccaacgaggaattgaggaaaatcccacaaaaataaaagctttggtggagatgcgatctcccaccaaaccaacgaaagtcaacaacctcacaagtaaagtcactgcactaaatcactttatatcacgttcctctgataagtgtaaagaattttttcagattttaaaaggaactaaaatgtttcagtggattgatcagtgtgaagaggcttttcaggccctaaaaatgcttttggggcaaccctcaatattgtccaacccaatgcctggagaagttttgtcaatttacctagagtgtctgaatacgcaattagttcaatactgattcgcgaagactaagaaacacaacatccagtatactacgtgagcaagcgccttttagatgctgaaacctgttatccacaaatggaacaactagcatttgcacatgtgattgcttcaaggaagttgcgagcttattttcaagcacacaacatggacgttttgacaaactatcccttgcgacaagtgttagcaaaaccagaagcatcaggaaggttactcaagtggtcaatagaattgagtcaattcgacattaggtataagccaagatcggtgatcaaggacaagcccttgattatttcattctcgagttcccaaatgacgaggttgttggaaattattttaccaggatcttagatctactcacaagtatgttgattaacaccctaaatatgaactttctaaaacgatgaaataaacacatatcaagtttaggaaaccttacattcggtgcagcggaataatatgactccatccgttcagatatatagcccttgattcctttctgtagcagatcattatcaatatctgaacctggatctctttctctgattc

SEQ ID NO: 261382 - DNA, 903 bp, Cannabis indica
gtattcattccacaacttattatgtacaaactaatagcaccacttgggcccgaaaagatttttatttatgctaacaattgaacaattcattctctatctataacaaatacttgttttgacaactgaaaatgaattctacttcttatttttaaaaaatcaaataatcctaagatacaaaatttcttttctttttgatttttgtgattcgaggaggaacacttgcactagcactttagatttataaactcgatcgttatattcttgtgtaacactgcttaactcttgttcaactcaatgaacttaacagcacttggactagcatttcaagattaaaacattaattgggataacaatcgtagctaagagcacaaggttgaccaagtccaccacaatcagttattttcacacatctgttatcaacactcagaaatcctttacagtataacccttcacaacatattttatgttgccaaagtaaggcactgcagtactcaccttctatatagcaacgattacttggaacgatagtaacactatgtgctactctactcccatagcacaaccccatattattaaccattgttaatatcacagcaaatactactattgacctcttcatcatcatcatcattgtgattttctagctatatatatgtgtttctatgttttcttttcttgaagatatgcaagtgtatttataggagaaattagctactagctactatagaaataaagaaataatgatacaactactacttcggtgtgtaataatgaagataatacaactagtggatactcatagttaaataatatacaactgctactacaacattaatttttttcattttaactaattaaataataatataccccagtaatgatgatgtgtgtacgagacgtcat

SEQ ID NO: 261383 - DNA, 650 bp, Cannabis indica
ccttgtcagagtagagatactctatttctaagggagtgaggcactcccatttcaagatttcgtacagaaccttcaaacttgcgaggatactgtatgagatgggatttggttgaaatggggcatgtccgagatggtttaggaagtccttgaatagtcttgcagggggattattgctccagccctaatatgtttgttatcccaatttttgcactctgacgtggcatcgcataatggtgacacgtggaatccacttggagtatctactcggagggtacagtccgagcaggatgcctcgctggcatgcccagagcaaagtaatcagcaatccgcgcagggcaaccaacacttaacgaattctgctttcgcactatgagtcatcaacaaaatccctataacacggggatcagattacagagatatggcatacccacaatcccacgatcagtgtattcagcatttatcccacgatcattgtattccacatttatcccacgatcagtgtacacagtatggatcgtgtaatctttctgcatatatccattgtaacgagaggggaaacacttcctctccaagttcacagccctataaatagtgatgcatgtttactaggcaaaaggtcgcaaacaatttagtcgagactataccctaaa

SEQ ID NO: 261384 - DNA, 795 bp, Cannabis indica
gacttttgtctaatgttagtaaaaatattctaacatggataaaagttcaaggggcatgatttagtacatatcaaagtttgaggggcatgatttggtaaatcaaagttggggagcatgatttaatacataaacaatcactgaaatagtaaaattgaatgaaattagacaaaatttcttaaatctaacaatctcaataattcaggagaaatttttaatggcaaaaaaagttcagggagcaaaatttagtatatgtcaaagttcgggaagaaaaattgctaattagcttatctttaaattgtaaataaaattatagaaaatttcttatttgattaaaattatattattttcaggattaattttttttatccctccatataaagggaataaaacatatttttcttcaataaaaaaaattacataaaaaatcatcatgggaagaactttgtagtataagtataaacattactatcagtacccaaaggaaccaaaagtgccaagagtttaaccgaaaggtaacaaacataatggactctttaactaacttggacaactaagcaattaacaacttaaactgttctaacatcctcccacaagctgataattggagtttgaaatggccttggtaagaccatctgtcaattggtgaaaagcaggaacatgcttgacctcaacctgctcatgtagcaccttttcttgaacaaaataaagatggagtttaatatgcttggttctggcatgaagaacaagattgtgagtgggcataatggtgctaagattatcacactagactgttgg

SEQ ID NO: 261385 - DNA, 749 bp, Cannabis indica
ttgtgaattactgtccttaacaatagagcatcaaaaggtgaagtgccctccaatgacggagttaggggacgtaggcccctctccccatttttttttttttaaattacatgtaaaaaataattaaaatatttttatttttatctttatctacatatatatactatagatttttggcctggctgcttctcccgactttatttcttcttaaaaaagataaatgacaaaaaaaaaaaaaaagaaaagttgacttgtagaattaggagtttggggtatttggagaattaggagtttggagaagcactaaaataataattaaagataacacaaaaagtagtagtagtagtagtagtagtggtaaaagactctctctctctctgtccataacagaatctcactactcactacttttgattctgtttggctttgtgttatcacactacttttcaactacacagcatcatccttaaaatttaataatcacttttttatttccatacaatgacatttttttgactttatactttattatgtagacaagccacccaactttcctgtgttatattctaatgtaaaagtattcacatcacatcaccaatattcaatgtccatacctaagcctaaggatacatcacatatgtagacttgtccttttttcatgcatagagtgtgaaaaacattaattaacttgactaactcttaggtcacatttagtgtaaatgaaaatattttaataagaataacaataaaaa

SEQ ID NO: 261386 - DNA, 3806 bp, Cannabis indica
aaaatttaatacttacttaatataacaaaaactaaatactaacgtttgtttaaaagaaaaaaaaaaaaaagagatgcaatactaaattaccataactgagtgaacctgtgcagtatatgaaacataattattgaattgaagtgtcaatatcatgtgaaaattgttatgatagcgttgggtttttttttttttgaataagtaacattttacttctgatattaagaatattaagttttaaaataaaataaaaataaatgtaacgcatctgaaccctccacgtgtctatatttatgaattaacggaaatagtagtaacagtataacaaaattgtaacattaggtatttttgcctccaaaaataaacattaagtatttaagtgtataaaatctaaaacattatgtatttatgctgcaatttatccatcataataataacaaaaagtaaataaatcatagtaaaagagtatatgagggcaggtctttattagcattaatacttcttcaaaatgtctaatttaatgtgatcaagtaaaacatcttcaatcaatgaatttaattaaaataaatttatctttcatactggagaaaaaacccaaatccatatacaggatacaaacctaaaatgattgtttgatttttccccatgatcaaaatataaaactcttttaaaaagagttgcttttactaatgtactttctcaggcctgtaagatagtaaaattaggctttcatcaatgtttgatttgaagcttttaaagtaacctcaggcctgaaaaatggtaaccaatttttgcattctcagtgcacccccagataattaatttctcatatggtactttaaaatgtgaattcaaagctgcataaggtatatgtaatgtcataattagaaagcaaaaaggagctgaatttaataggggcaagccaagtaatgatcaacattcatcaaagaggtatcttggtaccttgtagaaaaattaacaagctattttatatgatatcaaacaaaaaagtgaaaactaatttcataaaattgctacatcctattatagactccaaagaatatcagtatgaacttttacatttgagccctgaagttgctctgaacacaagaaggattactatgcaattatcaaatttctatgatgtcccttttgatatcatcatctgtatgactggggatttacaatgtagacaacaaatctgtttccatggcatctaatgaccgaaaaaataccagaagcaaagacgtgtatcgttgatgattgttttcacacaacttggaaatggggtacaaaaaactaagcttgtaatttttttttcttgcagccatgatcacctgcaagaggaataaaaatgttgtagcagcatgtatggcagagcgcaaaaataaacactcgacttgacaaagaatccaagcatttttaaaagggagcaaagaaccccatcatttgcatctgattaccaaaagaaaaggcagacaactaaaggaatttagaaatccctagagcaaccagtactatctatcagtgaaattttatgtccacaactgatgcaacttagtcacagataaagaattaaataaaaaaaaagtaaccaacttattgtgcataaatttccggaaacaattaaaaagatcatcatttccatcttccaatcagtcaaattttagctcagaaatgaaactgatgtaagatgctggcgtggagggaaatataaggggagtttagagattgttttaggctgtgtggaagttggattttggtgtgcaaagaaaaaggtaaagaaaatgttgggaaaaaaagtgtagagtataaaaaattagtatggaaaattttgttgaatcaactttttttccaaacaattcctctttccataccaaacatgaaaactttttttcctacatttttcttacctatttttttcctcgtcaaaattcaacttccacacatagccttaggggtttggcagattttgggaaatatgaggaaccaggccctcgaagtcctgtgagaattggttgcacattcttgaaagttgaatctttctattcctcaaagtcttgtgggaattagttgcgtattcttgaatctttgtgttcctcagagtcctgtgggaattggttgtgtattcttgaatctttgtgtcttaattcttgtcaataaagttgccctactgttctattcctatgtgtttattgctggtgtttgtgtgtgcctatcagaaactcaaaacaactaagaacctgttctgtaaacttaaaatgtcatatgaaatataactaataggaatgccgcttgccctaagagcaaaggcaagacattgcaaaaacaactcatgttaggcaggttaatttttccaaatgagtattgctataaggtatcttaactcttaggagctgtgtttggtacaagggtttcatttcacgggaataggcttaaacacaggttggacttcatattcccatcactgagtaaggaaaactgtataatgcatttgaaactccctaaacagctgtgttcacttgaactctcaacaaaaactgtgctgaccttacctgaactgaactgaacttctttattagcaacaagagaattccactagaaactttccacaacaggcaaatggaagtcatgagataaccaaataaaacagaataatatttccttcctctccaagcagctaaatgcattgccaaaaacattgataacttaaagcactgagttttccctcagattcatatcatttaactgaaacgcaaactagattgcatatcatttgaatcttacacagaaacttcctcataaaataatttcattcattcaaatcaaaggaaaacatttcagccaaaacttaattcacagttacctccaacgaaccaaatcatatgacaacattcctctggcggaccttagctttctcagcatcaataatggactccatcaacttaaccgcattatccaacttcccttcagcattcacaaccacataatcaaaattcttaacatgcttgatctcctccctagccgtagcaactctcacaagaagtgcttctttagtctcagtcttcctaccaatcaacctctccacgagcttcacttcactctcggccatcacaaacacgaaaatcgcagactgcccaaaaatccccctcaaagtctcagcaccctgaatatcaactctcagcacaatatcataacctttagccatgaactctcttatctgctgtttaggaatacccttataatcaccataaacaagagcatactccaaaagctcatccctttccaccatacccaaaaactcatctttgctaacaaagtagtaatctttcccatgaacctcgccgggtctcatatctcggctcgtcgccgtaaccacaaagtgaagaccttgacgggtttccctcagtttcttgatcacagcgtccttgcccacaccactgggcccgctcacgacgatgatgagagggtttgggttgggccataatgggaaggggctgaaacccgaaccaagagaggtctctaaagcgcgtaaaagctcggtggggtcggctttctcgacttccggaatgggaaccgaaatgggtcttcgggcatcgctcatttgagaggagaaccggcgagtctctgaaaattgcgaaatgggtttgaggctttggattggagaaatgggtttcaacggttttgggcgaaggatttggagttggggatgaagttggagagaattgcagagaactctgcgaaacatttgagagagtgaggaggtgcactatatgcggatgtggaagcgggacatggaatcggaaccc

SEQ ID NO: 261387 - DNA, 610 bp, Cannabis indica
aatctttgcaattactttgtgagaaattgcaaaggcttatcggtctaaattgatccactcttataggaaactctactttaggaattaggcaaatgaaagtagtattcagttttgggtgcatatagccagtggaaaagaattcttttactgttgcacaaagatttggtcccactaactcccaatatctgcgataaaaaactcccgagaacccatccggccccggggcttttagggggtgtaaactgaatacagcttctctaatttctgcctctgagggtgaagcagcaaagcattcattcgaaagtgaatcgagccgagtagtaaacaagtcgtcaaattccccattgatcataggattagaggaagtgaaaagctcctggaagtgcatattgatgacctccgcaatgtgttttctgtccttccacactctcccgtctttatccttgattgaccaaatactatttcttcttttccttatgattgttgcagcgtgaaaaaatcttgtgtttttgtctcccaaggaaagccaagtctttcttgatttttgtctccacatgctctctagttttgaccaagaatctgaaattagagtttgaattcgggcttcctc

SEQ ID NO: 261388 - DNA, 336 bp, Cannabis indica
caaacaaaaactccccctgagaaacacaatcgaaaactgaaataacaaaaaaacaagctaactttaaaaccaaatgttaaccacaagtatcaaacacaactccccctggaaaaagggtccagagttgagaaacaagaaattaaaattaaactattactccccctttttgtttatctaagggccaaagacaaaacatgaaaatatgttcagcaaaaaaaagcaatgaaaataaaagtgaaacttatgccccataaagcttgatcaatgtggacagatgcttggaaatctcttgctgaaattaaacacatataaagttaagaaaaaccttacattggt

SEQ ID NO: 261389 - DNA, 868 bp, Cannabis indica
aaaagttgggggtatatccttgtgattgtagaaaacagaagtaaaaattggggaggatctgattccctttttaacacaatactgattgtcttaatccccatttcttaattaatccaacaattttgaaggcatggctttttttgtgcttaacatgcagcaaaatatatgtctgccattatgattttagtagaaatagtttttctgatattcatagaaatagtaaactggtcattcagtaatcacctttaaaactagagcagtgctgttttgtggttctattaagctaaatggtttcataaggcatatctttgggtcaaacccaattttgacaataaaatattgagtgctgttttatgctctcattgtattactgatcctcaggtggctcaagagattgaatcagaaacaagggttcagaatgatctacttgcagatttggtgagatatatgccattctttttctctatttaaactggaagcttatatatattttttatgtaaaagaaatggtatttttattagttttgttaccacagtctgctttattttgcagcatcacctagctactgcaatttagttatttcttaacgtaataaatgtaaaggatgtactgtagcaaaatgtagaagttcccattttattgggagtgcttgctataagaaaactacatactgcatatgactattctttttaagcattagcaaattatattctcacaaattgctttctggtgcttataatagcaattgaccttgagtcaagctggggctggggtgaaaaatggaatgaggaggctgaacaggactatccagcagagctcaaaccatatcgtgcatgtggttatttttggtattaatattttttcact

SEQ ID NO: 261390 - DNA, 546 bp, Cannabis indica
ttaaaaacttgtgaaagtcataccgtaatgtatgatgtattctaggaaacagaaatataaatttctatttagaatctaaaatttaatgtcaaagacttaaatttataccaaatatttcttgagttattattctctcttcgaccaccaccattcaatttcatataagaaaatagaatgacatcataagcagatgatttataaccattcatccaatgatatactatgtaagcaaattcgatatgagtaagctaagaggaaaagttaggataatttcgatttaaataagaatccaacaatgtgccgataggcgagagtcaaagttattcttattttacacgaaatttacaactacaattattaacaaaaacaacatggttcaatataaattcacacacaattcagaaattattaagcatttacaaaactatcatttcttaaataatttccaaggtttccaacaaactgatacagtgtcccggtaggcaagagtcaaagtatcattcattgaatagagtttttagcccatctaaaatggacaccattcta

SEQ ID NO: 261391 - DNA, 758 bp, Cannabis indica
caataaaaaaagttaaaaaacaactttttagttaaattttgtaaattaatcttatttttacctcttcctctttgatcaacattagagtttgtactcatcctgtacattcatttaaaaattctcattataaaaataaaatcataaattaatctatgcataagcacatcaaagcataaatttgataatttaaaatactcataaattaatattaaaaaacaaaaaaaaagttactaaagcaaacacataagcatatgtctttcatacatcaaatcataattagaattgttaaaatataaatactagtattctaatcatctatttgctagccatgtattctacattttttctgccaaattttgtctccaagtagtccataaatctgaggacttgatattattaatataattattatctgtgatgggatgatttcctaatacactgttcatctcattctccactggatcaatgctcatttctcttcgaataaaattatgcagcatacaacaaacagaaattatacatcgttgtgttttcatgtcataaaaggatggacttctgagaatatcccattgcattttcaataatccaaaataacgctcaattacattcctagcacttgagtgcttcatattaaagaactcttctgctgtgtttggaaggtgtccatcattccaatcattaagataataacgtgtccctctaaaaggtgcaagaaaaccttgaccattggtgtacccagcatcaactaaataataata

SEQ ID NO: 261392 - DNA, 547 bp, Cannabis indica
tctcatgcattatactgcttgcagcaagctatggcagacaatcttttttcaagaattatgggcgcattaacgacaaaaaaagcatgggacacactgcaaaaagagttccaaggaacagtcaaggtatgcacagttagactacaaaagctttgaagagattttgaaaattttaaatgaaagataatgagactgcaaaagattattattctagaattaaagaaatagtaaatcaaaagagagcctacggagaaataatttctgacaagaatatagtacaaaatatactaatttcttgtacagaaaaatatgatcaatagtttttgtgatagaggaaactaaagatttagaaactctatcatcaattgaactaatgggctctcttgaagcttatgaaagtagacgagaaatgcataaggaaagtgaagctgaaaatgtcttttagtctaaaattaatctgcggtctcaaaaatcaaaagctgatgggaaaaagacaaaagaaaaacaaaaagaaaacaacgataagtttttttagatttttatagttaat

SEQ ID NO: 261393 - DNA, 508 bp, Cannabis indica
gaaatgagttttcagggtcggataaagttttctgagtgttctctgtttagtttcttgcacattgaattaagtataactatgttaaaacaactttaaagaaatcaacactgttagacttttgaaaggacataatttaaattagaggagaataatcctaattagctataatattatttactacaaaaaaaaaaccatttttgcaaataaaaatatctaaaataagttcatttataaataaaggcttatccaaaatgacccaattttccaattgactcgagagaatgatgagctcacaggtctcaactctcactactctaaacaacctttcaatctcaacaccgccttcaacttcctccaaattacgtctctcttcgtcgtcatatcattcactttcccagagaacccacattccttttcatgtttacaagcacccttcggccattctcctcgagctctgtacttctttgcaagagctccgccaaattatccctctcatcatcaagaacgg

SEQ ID NO: 261394 - DNA, 501 bp, Cannabis indica
cctcctgtataatttgccttctattatcgggtagtgatacactgaatacaagaattttcgtgcctcatttttgtctgctggaagttgtccgttgagatgatagttaactatcggtgtcatccatgtaggcaaggcgtcaatcatctcaacttcttccttttcacatatacttggttcgttcaacacttcgactagtactaaattcaagttatcaagttcattttgcgaggaaatttttgctaagccctcgacattagagttttgttctcttagaattttttcaattttaaaataatcaaacttttccaagttcttgcgaaccttctccaagtattttgccatttttaaacccttcgcttggtattcccctagaacttgatttactattaacttttgtgagtcactgtagcacataagattcttgaccattaacacttcagctattttcaaaccagctattaaggcttcatactcagcctcattgtttgaagtgtcaaattg

SEQ ID NO: 261395 - DNA, 759 bp, Cannabis indica
ctcgtcctactcatggacctcgtcgtttagtgacttacaattttattggttcccgtgctttctcgatcattagcgcgacgagcactctctccccctcgagttgatcgactgtgattccttgagcaccctaggtcacacttgcttctttgcaccctgttcttcccccctgagcgtggttcgtagtatttcccccactggggtttgtacgagccctctccctatgtgtttaggaagaacgctggtgattcctcactagtgacctacgttccccaggttgtgtccaagggtcttccttgtttccaagagcaatttcctatttgttggttttcggttgcctcccattctaattaaatgtgatgcaactggctgatcattagaattttaggggggaacctcattttccccaggttgtccttcttgagcattttcttgtctcctgggtcatgagccacgaggtctgcctcgtggccttctcactccagggtcaggttaattttgagtgttattcccctgtgccgccctagctgcagttgcatcatgctctaatttagcgttctggcagtttgcctcctccaggcggcacctaaggtggcagttttccatttctatggtaggtatgtgtcttgtagggtcataagcaccctcatccatgggctcaacacctccatgactgggtccttaatctcttactccaagattttggccattcccatgttgagtcttcctcgaacgtgttgttcgtgtgctgggaccgccctc

SEQ ID NO: 261396 - DNA, 1226 bp, Cannabis indica
atagataacaataaactaaaatatcataaaaaaccttcaactaataaatcgtaaactaagaactcacaaaaaatatataagatcataaaaataccttcaaattattctgatcttcaaccaccatgtcttcactatcataatcctaagacacgtcttctacaacttgtttaatcttttttagattctgaacatcccttcttaactttctcaactactctttttctcttagtttacaaagcagattcacaataactatcggttgatccaccagatccatcagaatgagcagattcaccaccatcttcatcatcaaatacatttttcattttttttcttcttattagtagctaatttaatagaatgagaaggagaaattgaagagcaagttttaaccatttcgttaggtatacaggggataagaacactcaaaaatgccaaagaagataatcaagaagatagaagctatttgtagggcttatctgtggaagggccatggcatatcacatggtgcgagtttgattgcttgggattcggtatgtcaatccaaatcaacaggaggaattaggttcaagaaagtggaagattggatcgtggcagccatgactaagtacatttgggcaattgcaaataaagaagataacttgtggatcaaatgggtacacaatgtgtatatcaagaggaagattggtggagttatcaagctccagtacaagcaagttggtattggaaaaagatagtgacagctagccaaggaaaagcttaagcaatctatggaattccaacaattgatgagtgcaaggaatttccaaatctccaaggcctatagctttatcaattgtgaaggagataaagtgtaatgggctcgagttgtttggaatagaatgaacatgcctcgacatagctttttcatgtgaatagctgtgcaaaataggctaagaacaagagatagactaatctaacaattgaggatggatgcttactctgtagggatggcaaggaagacttggaacacttgtttttttgctgcaatattgcagcagaatgtctgcaacagctcaaaaaaatggcttcagtggcaggtggtttcaagctctcatcatgggctggtgcgatggctacaaagaaacaaggtaaacagctttaaaaatagagtattttctgctgcaattgcagcattaacatacaacatttggcaggtgagaaatgggttgttgtgggaagaaaaa

SEQ ID NO: 261397 - DNA, 703 bp, Cannabis indica
tatttaatcatttattttattccatataaaaaaatccaactttatttaaatttcaaaaatggaataaatttaaaaaaatatcttatttaagttgtttagaagaatcttaaatatccaacttaaatatttttcaaacaattatttaattaaatattaacaattaagttgtaattacttaatttaaaagatattccattttaagtttgtccatatttaaagaaataacaacttaagaatcacaaaacccgaacccagacctagacatgggtcccaaaattataacctgaacaagaatcacaaaaccaggaccctagaacaagactaggaccgtgaccaggacccggacccagacctagacctgaacatagacctagcctcagactagaactagggcaatgacacggtcgtgtacccagactggaactgaaactcgaacttggacctaaatcttggaccagatcccaaacacagagttggacctagatagggatccggatacgaacatggactcggaccaagacctagactgggatcgaaatgttggacctagatctagacggagatcctgacccaaacccaaacttggacccgcactcaggacctgaacctggacgtggacccgaacctagacctagatcggggtccagacctagacacaaacccggacacacacttggacccgaactcaaacacccacacctag

SEQ ID NO: 261398 - DNA, 1193 bp, Cannabis indica
atttttctcaaattaaataaaattatggtaataatttgtattcttttgtctatattttagagttgtgagttttgttttatttgcacctactattaatgtttttgtcattttctttttttttttaacctcaaattttttttcttcaaaaatttttactccatttttgcttttaatcttttcagatctcttttacaagttttcatcatttttctcctatttattttttcaattttcttactagtacatatataatagtataaataggactataaaatcatacatatcatattaatcattttgttattattcttttttttttaaaataaagttttgttaattattatatttttttttttctaaacttttgcttaaaacaaataatggtagaacaaatcatatagacttacatttagacagaacgactaatgatcttaactttaataaaagaatctataccacactgtgttatttgttaaacataacttcttttagcaattgtttaaacataattaatgaaactaagatatataattataagcgacaaattttaacaagagttatgtatctctagcacatcctccacacctaaaatatatatatggaacatttttcaataagtattatctattaatggttattaaacaatttaactataaatatttttcttttgagaaatcagtcgtgtttttcattactccaataaacttttacaacccattcagcaccctttttcaaaggcttgaaattagctttcaataaatattaatttaaaaaatattaaactattagattttgatcaaatgacgcataataaaagaaaaattttaatttttatgtttaatttaactacttaatttaaaaaaaaaataaacaaaaatatcattttttagagtatataaaaaatatgcttatatataaaatacttaagtcaaatttaacttttttttgctctgaaaattttttttttcttaattttttgttttagccgatagaataaccccaactcatataatgtaaaaataaaagaattttttaattagataataaaactaagcataaaaactcaaaatttgataatattacccataaaggtaatacctattaaaaatgcagccatatatatataaacgaaggagactaaaataaacttatacaattttcaagattaataattgcttgtaatcaatactttg

SEQ ID NO: 261399 - DNA, 1248 bp, Cannabis indica
aataagatttacaagcaaaagcacgctcggaacaaatgcctaacagcactttccaacactccttcttaccactagataaccttggggttgcatatataggcctaagttcaacaaagcaagtagaaataaagtttaaaattattaaaatatgacaaaacacttaccaaatcttctgtgtagacacccacaacggcataaggtacttttgctgggttcaacatagggcccaatatattaaatacagtttttacttttagttttttcctgacagagcgtacaagcttcatcgctggatgatatgttggagccatcataaatccaatgcctgcttctttgacacagcttgaaactcccttttaataggagataaattgaattatataataattagtttagttacaatcttacaagatgagaagctgctgttaacaaagacattgacaaatttgaaattggtttagcatcttattaatctaccagtttagtcatccgatacagaaaatattaggcaccaaccttaggctccaggtcaataactacccccaactcttctaatacatcggcacttccacatgctgaagaacttgaacgatttccttgcttaaagggaaaaataaaatcaagttagctctaacaatctagtgagatctaacacattcatgtcaagcgatcaataaaatagatttcacctttgcaattttggcaccacaagctgcagcaagtattgaagccccggtcgaaatgttgactgtgtttgctccatcaccacctgttccaacaatgtccactgcatcatctaagccctttacctccaaactatgcttcatcatcgccctcgcaagcccaacaatctgtttaaccactacaatccataagtcattttatcccttaaccaaccccccccccacaaaaaaaaaaaaaaaaaactaaaacctaactccaaggaacctacagcttagcaggatttctctgaattaaacaactgcattgataacagttcattctatccaaacaacataggaatcaaaccttcaatagcctaaaaacaatggctggacaaaactaaagtaatctagtataaacaaatgcacatcgatgtaaatgaaagaaccttacttcctcgaaagtctctcctttggctctcagtagtaccagaaaagcactaatcaaagtctcatcggcaccattcagcaaaaaatccagtgacgattcagcctctgactctgataaatccacacgatttatcaa

SEQ ID NO: 261400 - DNA, 1664 bp, Cannabis indica
acaactggtaaaccggatcccaaccagaaaaccgaaatctatgcgtgtttcttcggggaaccggtagaccgattctacagtgtaaaactgaactggttgaccagttcagtgcaggaatcgccaaaatcttcacacaccacttaattctaccccaaattaattcaaacctttcagaccatctaattaagtcataactaacctatttcaaccaaaaataatagttataattccctgaattcgatttcaccataaaaggtccaagcttgagtttaacaactcaaacatttgttcaacacactcacaaccaacaaaatcaagcacaaacagctcctactaatttaaaatctactcagaaaatgaatcccaagaaacttaaacttaaacaataccataatcacagtttcatttcagaataaagctcaaaacctaaagaacaaagacatggaagaactagggctcttacctttgattcacccaagaaaaatccttcaaatcatgttgaaatcctcaagaacaataatgaaaagggttgagttctgctgtttttctagagaggtcgagagagagaactgcttggaaagaaaacttgcattttttttaattttaattatttgggctaaagaaatcaaaggataagaattaattttttttgaattctcttattcacataacattcaacctaattaactaaggaattaataaaattcatattaaaataacaatttactaacttaagatgaaatgacaatcttgcccttccttcaccataatgcaacctaaaatttaggaataaaatggtcctataccataaccccgagtaatcccaacattctaaatgtctaattatataacccctctatttttaagatactaaaccatttctaagtgactctataggccaaacatcgcattccaatgttactaaacataagacatacaattcataaaaatttacatataacatatataatgcacctaatgttcaactatatctccgtaattgagaaaatattttcctaagacttatttctgacaataagccataatttttgttaagagactcaaaatcacataataataataataattaaatctctttattatgtgctaattctcataatttaactatccgatcatttcataaatactcaagctctcaatttgtaattttgttagtacttatttaaccattacgttaattgctcccaaatatgtcacatgttgatgttaatttgtggcataaatcctcaaattattgagtttgatgcaaataaattctgaagctaaaaaatttgcaacaataaactcaagaacttggaaatttatgctgcaaattaacatcaacacatagcattttttaaagcaacttaaagaattgtcaagtattaatggaattacaataattaaaagcttaagtttttattccattaaaaatcttaaatatttatactgtaatttttaagcttgggagtttatctacatcaaagccaacaattaagaaatttatactgtaaatttctaaataaataatatacatattaagagcactctcaacaatttgtcttttttatcctttaaaatacatcattaaaattttactttatttattttacaataaacttttacattacaccatccatcaacttttctatttttttttcttt

SEQ ID NO: 261401 - DNA, 7168 bp, Cannabis indica
gatccctctttccccatcagtcccctccatctggatgatcagtattaggccgtgcaaaaagagatatctcggatatttctcaagagatataaagatgcctcaaaagagactaagaaaactattggcctgatcgcctagaggtggaaaagggaagtagcagccagaagtccagatagactatgagggataccgagccaaacttagaaatgacatggctccttttgttgttgatcttcttcaatagacggctattaccttcagtcaactgacagcggatcaatgggtcactactgctaatgagaactttatgtttttagccactccctctgccatcaaatcgctggggtaagtattcccatttaacttattaatttcacaccgtattgtagacaacttattagtctcactgactttattctttccatttcccaaggaccctccatgctgaacgttgtgcagatgctgccgccaagacgaccctaaagctagaaagtcttagggctgagtatgaggcaaccaacaacaagaagatggaagccatggacaacttggaaaatgccaaggttgagctggagcggaccaagaaaaagatgaaaggccttattgaccaacaagttaaggctagactggatgtagaggttcaagaggctattgtggattttgaagaggattaccgcaaactggaaaagaaggttgatgacttgtagacaaacattagccatgccataggccatatctgaaaaattggagagaggggagaaggagctccaagaaaagctcaaaaatgtagaggataagctgaaggaggccataggcaaagtgactgagctcaccaaagagcttggggaaaaatagggttagatctatgtcttggagaaagatttaaaactaatgactgacgtcgagaatgtctcaatagctactgagaataacctaaaaacacagctagaaggggccagtacaaaggcagcggagactatgtccaaactggcgaaggctaatgctaaactagtggaggcctagaggaaggcctaggagcaaattgtgaaggcgaagaaaaagagagtgagggacttatgtgatgccttcattacttccctttacgcgctcgggcaaagggacagagatgtctccttaaaggtgaggggcttggcgagggggaagcactcttttgccaaatatttttggtctgggagagaagggaaacactcgccaaagataagataggagattcaatttttaaagaggaggaagtggaagaatcaccgccaacacggaattaaccacccagctaaagagttacctcttgatctcctggatgaagagccgagcacaatgcttttgaactaatgagattccatctcaggtgccatcttcctaaattgatgtggaggcccagccttagttttctaactattgtagttatcctttttttatttttcctttatttttaaccgcatcctcttttttatgtatattttttacattttggtaacaagggttcccctattttatattgcgaagacacttgattatgcttttaccgcgagactcttatgtttgtaattattttagcaatttcttttgtatgaggactaaattgctttttaattactataaaatcttagcaactgattcatcaagtgctgcgacttgtgaattttttgctaagataatttacttttggataccctgggctccatttctaatggcctgaaccttagggtttcatttctgtgctttgtattttgatttaagtttttataaatttttttatttccaagtttcctgcggtcctggttccaaagacttgggccttgggatttcaacaattttaattttaacctgtccatttttaaagatgggaaacttatgaaagcgacttactcctggttccctaaggttccggttctaatggcctggaccttttggacttcaactttttaaagatggaaagcttatgaaagcaacttactcttgattccatggggtttcagttctaatggtctgaacattttggactttagttggtttttttttcaatgtttttattttttgttattttagaagcttggacttcctttaatttttcaacttgatgcaactagtggtttaattatctgtggtaagagataacttgctctcagtttcctgaggttatgtttccaaaggcatggaccttggacttcagtttatcttaaatcataccaagcaaatttttagaggtacatggctgtacataataccctccaagtgagatcctgggttcctggtcacttgttagaaacacacataatgatttaaaaataattcatgtttttcttcatttttctctataattgttacaacattgtctttgccctggggagttactagaggcttacatttcttgaaaaggaaaagagaaataaaacgtgtaaggtgaaacaagatccagctacccccatttactaatagtactggcgtaggtggtccgcattccaagctcgtggaatcttagattcatcatgggtttttaactgctatgttcagtcacacatcttgtgctagatctcatatggttcttaccagttgggtcgccccacttccaactcttgagatgcctaaacccttcttaaatcaagatctccgacgtcaaacctctggcttatgatcttcgagctaaagtgttaggaaattttgccttaatacattttcagttaaacttgtgactgctcccgaagttcttcgattaaatctagtcattcttgaagtaaagtgtggttccaggtagggtcataagtttctttcatattggaatgacgaactgacaaccatatgccatagagtatggagtatgccccattgaagttcttttagttgttcggtatgcctaaataactctgggaagttcttccagccaatgcacttggcaggcttgcaattcttcttcaatgtgttttttaggatcttttcgatgacctccacttgtctgtttgattgtggcctggccacagtcgaaaagcttttgataatttcatgtttagtacaaaaatcggtgaagtgatcactatcaaaatgcttattgttatcggacatgatcttatgtggaaggccaaaatgacatatggtgttcttgattacaatccaaagccttcttagaggtgaccgtgttcattgatttcacttctacacacttggtgaagtagtcaacgacaactatagggtatttaactcatcctttcccagtttgaagagaccctactaagtcaatccctcataccacaaaaggccatggactactaatgagtgctatttcagtaggtggagcctaagggaccttggtgtaacaattacattgctctcatttttggaggtagtcaatgcaatctttttcatcatgggccagaaacaccctcgccggatgatcttcttggatagacttattctagacgtgtgatctccacaaactctatcgtgtatctcgtggataaccacgctgatcttggtcctggctatgcaccataggtatggtacaaacaaccctcttatgtataatttttttctaggattacgtagatgggagcttgatattggatttttctcgcagcttctctatctatcgagagctcttcgaaacttaagagcttgtagattgggcctatccaatagttggggtggtaattgacatttaccccagcatctgggtacttagtacaatgagacgagctatggggaccaatttatgttcctctatttctatatctattgctaacttagccaacatgtcctcaaaggcattatgatccctggagacctactggatagtatatgttttaaaattctagagcagttatcgagctttggagacataagtagccatcttttctcccttagtttgatactcccctaatatttggttcaccactaactgggagttgctgtaaacttcaatgttttcagcactgatttccttagctagatgcaaaccagtaatcactgtttcatgctctacttcgttattggaggcgatgaacttgaattggagggcacttttgagcccttgcagtgagatttgaattattcttgctctgaaacctttcttgttaaaggctctatcaatatagattttctaaatcaccagtcctggaactagttcttttagatcgtcgttgattccgatgcattccacaatgaaatcaatgagggcttgacccttgatggatattcttagctggtactgaatataaaattgactgagctctacggcccacttaagcagtcttcctaaggattctagctgcttcatgacttggcggagagggtggttcctgagtaccttaatggcatgggcctagaagtacggtcttaacttcctttaggctatcactaaatagtaggaaagcttttttatcataggatacttggactctacgccaaataatctctcaattacgtaataaatttgaagttacccttcatttttcttgcactaatgccaactaatgacttgatctgacatgaccaaatataggtacaacgactttttccctcaactggcttcaaaaaaatgggagccctagccaaatgctcttttaatctttagaaggctttttcacactcactggtccatttgaatgttttgcttccgcgtaagatcttgagaaatggaatgcattatctgtttctttagacaaaaatctactgagagatgcaatcctcctggttaagctgcctacatcttcatgctttcttaggaagggcatatctaggagagcccgcatcttctctgggtttgctttgattcctcaaaagttgacaatgaagcctaggaatttccttaaggggactttgaaggtacatttttctggattcagcttcatactatacttttagattattgagaaggcctctaccaaatcattattgtgctccccagtagtcttggacttcactaacatgttgtcttcataaacttccatattcttccccaaattatctttcaacattttattaccaaacactgataggtagttccggcatttttgagcccaaagagcattacaaggtagcagtacacacctttagtttgtttgaaagctggtttactcttagtcttgctacatgaatttttatctgattgtagctggagtatgggtccataatactgtggagttcatacccagaggtagtgtttaacatttagtctattcgcgaaagcagaaagcaatccttcagacatgccttatttaattttgtgaagtcaatgcacattctcaatgtcctatttttcttagggaccagaactagatagcaagacaaactggttatacagtttccctgaggaaatttatcgaggttaacttgttgacttttgccttcacattttttgagcgcacctgatcaagtggtatccactttctttttcctggttgggtcggcatctgaatctatgctcaaggcatgacagattatatggggactaatacatgtcatatatgcatggctccacaccaggatgtcttggttttgcttcactgtggacataatttgttcttttattgttgggggcagaattcgtctcattttaatgactttgtggggtctgcttcactattacatacttattctacatcccccaatggttctatcattatttccacccctataaggggtctgatttatccttttcctgggctgtccctggtgctagctaggcaagtgctctaggaattgtctcttccatattttgtgagggaaatgaacatgcttgacatcttcttctatgaatatgattggaaagttcaaaatttatggcctctatgctggtgttttcactagagcacacacttccccatcctattcgagttcattgagatacctcttctgggaattgttagtacttctggcgatatgtggacctctggaaatagtcacacgtgtccatctaccggggtggagcaacacttagaggttagggattccctggtctagaagcttgtatgtttttgagtgcttgtacatttgggaccccctgagggacctaaactcccagatcttgttagtaaactgctccttgaggagggtttatggctctatgttgtctgggaatgaccagttttccttgggctaccctttgtcttattcataagattgggattctcacccactcgtggaggcgcccattctttatgagattctcgatctcatcctttaagtaatcgcattcattcatagtatttcgaatgttattatgatactcacaccttttactaggatcagttttatgcttgcctccattatacatcagagggggctttctgtaatgaatcgtgttgcacatggttttatagaaattatctcaagtgtcgatccaatttgtatactcagaatattgggcctcatatctctttcttcctttcttcatagcttcactcagactttgaatttttccacttctcttgcttcgagactagcttacacctgattctgaaactttctcttattggttcatctggatctacctagaagccaactacatctgatctgtgccactctaaagccagagaaacttgtctgtggaagcacataccctgaggtagtgggtccatagatggtcggagttgtgtactaagttttaggaggtagaatagatagaaccaggagttgtggtgcaaatactaacattgattgagggtactagagccacccctaaagactcgagtgtaagactcttccagactgataaaaccttgggctattgccaaaaaatcaatagagtgtcggacctttatctttgcatttcattcaaaaatagggaacctacaaaaatccccgactatagggtcactaacttcatgtcatcattaaatttagtctcgactgttgcctccatcatcttctatttttagccaaatttctggtggaatagtctagtttttctcaaaaataatcttttggagatccctatactcttaactttctctgaaaggtgcttcttatagttcaaaggtgggagtgcaaactattttcttgttctcatccaattttgcattaagactaataaggaaaatagtgtagaaatccatcatgttgactacatgtgttcctaatggataaataaagatgtgcctattgctgtgattcttttcctattcatactaaaggatttttttccactcttctagag

SEQ ID NO: 261402 - DNA, 638 bp, Cannabis indica
gaaaaagcgttaatatcataaatcaagagttagacctctcggtcattacaaaatatattgtcaggtaaggaggacaccgggatagtcccaaacacctgatgagcaaaagcccatctagtcacattgtgaccggcaaaattacaagttctacgaatataagagaaattacaactgataaataaaggagaagatttaatacaaaatgagacataattttcaagggcccagtgagtttccaacccatttagcgcattgataaccatcctcgaatcgttctccacaatcacaaacttggttccgatatctaacgccacagacacagctaagcagcaggccgcagcttctccgcacagagcatccgagaagtcttcccgagccgtctgaactctaatcacattgccaaaatgatctcttgcaacaacagcaatgcacaaactatttagacccaccttgacatcacaattcagcttgatccaatccggagggggaggggaccaaacttccttgagatctggagtggggctaggcagcaaagaagcaagagaatctgcataagaggtacaaatattatcaatacacttttttatgtcaggagaacagttattatggaccttttcatttcgcactctccaaatagt

SEQ ID NO: 261403 - DNA, 697 bp, Cannabis indica
ttaaatttttaattataccttgttgatgaaattccttgaggccttgttcactaatatgtccaagtctgtgatgccataatttcataacgattctagtcctttcaccatacttgcttctccagctgggacaatttctccttggagaacatatagaccattgatcttttcacctttcattactaccaaagaaccttcagtgatcctttagcttttgtgcaaacttatgaacgatcattacccattagaactttacctccattaactaacttgtaataaaaaaaatgactctcaatttggacacatgtgataagtgcatctggagtcaaaatccactccctattcattgaagattctgagatagagaacaattcttcatctgtggagcagtcgtcactatattctgcaattgtagcaaaattcttctcgtgatgatggtgccagaagtccttcctatctccattgtgagatttgttaaagccttgttgctccttgtacttcttgcaagatcttttcaggtgtccaaaccttccacaaaagtaacacttccttatttccttctctctagacttcgatcatgattgagagtgatagtgtttattcttcaaactttctttcttgggtgatattcctctttccaaatacacttcttctttcttggattccttctctaactgtaatttaaaatcattagacttaa

SEQ ID NO: 261404 - DNA, 588 bp, Cannabis indica
aggtcaaatatttttaaaaaattaatttaaaaaatatttaatatctaacctttaaatataaaaataagataaaataatcaaatttaaaaataagatataaaatcaagcaaaaagatagatttttacttgttttcaaattcaaattacactaatatctaaaattaaatttaaaaaattcaaattaatttatttctgatattagatttgaaaattaaaaagtaaaaatcaaaacacaaaactacacaaaaaatcgaaagttaattccatgaaatagcatgaaaaatcgaagaaaaacgaaaaatttgcaagtggtacggacagtatgtgtttgcatactgtccacacgcacatgcagccaggcgtgaccaacgtccctcggcgcaggaggctgcttgcagcctcttccgcgtgcacatgggacgttttcagacagccacccgtgtctgaccgaggtagctcggtcgagctagttgtctgcgcgtgtgtggtcgagggtatcaccctcatccgcgcgcgtgaatgggttggacgaccctgatattttttcaaactatccaataaaaataatttcagaaacagatattcaat

SEQ ID NO: 261405 - DNA, 680 bp, Cannabis indica
acttaatgtttgagaaacaaaatcggtcctgttacttagattttggagaatgatagtttagttttattaacaagtttttatatcaatagtataatgcagtgccgatccatttgccaagaatgaccggtatgacatcaaggctccttctctcttcaaccaaagataagttggcaaaactcttctcgggaactaagatttatctactgaaatttcaagctttaatgattttgattattatttctatttttgatatatttttttttatttttgggataggcacttcaagatttaacttagtttctcatggatttacaattttcagactaataaaaaacctttttttattagtatttgtgtggatgtaaagctctatttgtactttattaggtgttttggtggagaaatgtgattcctagctagactaaagccgtcattttttttcatcctttcattttgtgcatataagttttgggtggtttaaatttaagcaggctaccaatggtgaaaactatgtcgatatttaaatttattatgatgataacttcagtgcttaaggagattaggatgacacttcttgctcaagaaccttattttacatcaactagttatttcttttgttaaattttttatatggtattcctttcggtaaagtatttaaattgaagaatgctaagttcaac

SEQ ID NO: 261406 - DNA, 649 bp, Cannabis indica
tctatgtcaaattcctagagtaggagcacccatcaaatcagcgttggttttgcatcttcttggtcataaggtacttaattgctgagtggtccgtgtaaactattaccttatttccaattagataggggcggaacttatcacatgcaaacacaattgccagcatctcttttccgtcgtggcataatttagttgagcatcatagtagattgtatgaaacaccctgtcaacccgttgacccaagaccgctctgattgcgtagtcacttgcatcacacatcaactcgaagggcaactcccaatttggtgaattgactattggtgctgaaatcaatttctccttaagaacttggaatgccttcaaacattcttccccaaactcaaaaggaaccccattaacaagtagattggacaaggatttagagatctttgagaagtccttaataaatctttgatagaaaacagcatcacccaagaaactccttactcctttcacagaaactggagggggaaaattctctattgttgacacctttgctttatccacctcaatacctgcttttgagatcttgtgtcttaaaactatcccttctattaccataaagtgacacttctcaaagtttaagaccaagtttgtgttgggttttgtgccc

SEQ ID NO: 261407 - DNA, 1732 bp, Cannabis indica
ttttaacatcatcttcatcaaaggctactggtgttactgttgggcttctcaaattacctatgaagcctagtcgatcaaagaaaaataagttggcccctaaaagaaaatttattttgggcacatcgtcatctccatcttcttctttatctcatgcaaagaagaaatcaaaggctcatcctccatctccatctccatcaccatcttcttttgaatttgagcccgaggaagaagaatctgagtccaagactgatgagtctgatgaatcgtttcctgatcatgttgactctgcactagaatttgaagaatctgagtctaaagatgttgcagctcctatttcataagcagtgttttcccctgcaccagtccctccaccattgtcttcaaaggtaaaggcaagaaactagttattgaaaatatttcttctccatggatgaaaggtgtgcactttaaaactcattctcctttattttgcttcaatgataatgctcgtgacatggttatttatgcacaaagaaaaattcttgttgaaagaaattatattttgagtgatcattgtccatatggtgttcttaacattcttcaagagagaaaatagcaggttctttggctaattttttttggctatgtggataggattgttaaagagttctatgcaaatctcaataataaaattgttgattctaactctcaagtgttttgtaaagtttctgtgagaggtcattggttctctttttctccacaagatgtatcaaaagcattgcatcttccttctcttgctattccaggtgaagaggagagtgaacttctagacaaggatgaggttctttttgagatggtgtggcctccaaattctatcatctcgatcaccagtctcacttttatgtatgtcgtgcttcacaaatttgctacaaaaaaattggaaactgacttctcacactacatatggcttctttcttatacaaggttgaaactggacatgacattgatttggccactatcatccatgaccaaatcattagtttttggaaaggcaacaagaaaaatctaaatcttccatttcctcaagttatttacaaaattttgagtatgcagaaaagtgatctcaagacagagcaagaagattgtggctcattccactgctgcatcttacaaggcatctgcaccaattcctaatactgttgaagcctcatcgtcaaagaaatccaagcctcaatctctagtgtttgctttagatgattttcctacagaagctattgttctaactactttagcatcaatctctgcagaactctctggtgttcgagcttcccttaataccttaactgatcgagcaatgactcttgaaggactccaacgttcagttctagatgctgtccaagccttggctaaggccccaaaagcttagtttttcttgtcctttattttttctccattcctaagaacattgatactttctttagtcttagatttgatgtatttgtttcttttatgttttcagtacttaggctgctttgaaagacacaaagggagagagtagatactaaaaaacatgttatattttggtgtgtaactctggacctttcttattttgaaggggagttaaattttagtttcgttttcatgtttgttataagttatgcatgcttggagggggagttcttctcttaacctatttctaacatgcgtgttgcaggtttttgtttttatttttgtctatcaaattgccaaaggg

SEQ ID NO: 261408 - DNA, 639 bp, Cannabis indica
aagttcccaatcttcataggaatagtgtcattcaaactattccttgataggttaagttgaaccaattcaacaaggtttggtaaactcttgaggaatcttacctatcaaattattactcgagagatcaatcactcttaataatccaagagtactgctatactcgcgataagcgcctctccacataatcgacgtaacaacttcatacgttaaaacatgtcaccatacatgggaactggtgtccaaatatttatatggctctctttctttccatctaccatagaggtgaaattttttatgcatgaaggaataagtcctgttatgatattcatggaaatgtcaaatatttgaagaaaaggaagatgacacaaactggatggtatgactccattaaaatgatttgatcttattcgaagaataatcaaattcatgagtcttttcccaatccaagatggtatatttccttctaaattattatattcgatatcaagaacttgaagttgtttacacttcttcaaggatgatggaagctttcctgaaaaattattatgccccaaaagcaaatattgaattccatatgacagaccaattgttcttggaattataccagacaaattattgttatctaatttcagaacaatc

SEQ ID NO: 261409 - DNA, 848 bp, Cannabis indica
gtaaaataatttccaacactacgatcttcaatctctgcatggtgagcccttaatgcctccatctctttatctctccattcggcaaacatacgcctttgttcgtcgaacgcgagatttactgcaacacgtagttcgtcttgatcatgatgcagggtgttgttgtgaccctgcatgagtccgagcacgtcacggagattttgtaatttagtggcacctctgatagtcgtttaggcgttgcttccaggcgaaccagttgtattatgaatgccctggttgggtgcaaaactgttattcccagtctcttccacaccaggcgcaattccatccataggaactgtttcaccattccccacgcttgccggctgtccaagattaacagcaggcgaaacccttgtgctccctgggttctgctatgtaggatccagcatctgtgaattttctggatcagtcaggcttctacgagtttgcaccatcgtattggcggttggatgttgaataaagagcgattcgtgatcctcctctcgatgaaagtaccaaaatgttgacttcgcttttagccaacgacaatgagtctattttataagcgataaatgattgataataatagatttacgataaagcaataaaaagacatagaaattttatagaggttcagccccgagcagttcggtaatagcctaatcctcgttatttgtattgacttaagatcaaggagaaagattccttttcttatagctcttacaacagtatctctaaatatataattcttagataataatatagtcttagctcaactacttttcgaccctcctcctgcccattgaacatacatcactatttatagggct

SEQ ID NO: 261410 - DNA, 623 bp, Cannabis indica
atataaaataactattttaatatgtgagaaatatatatttttttttgccttttttttacagaaaatgacgactattattaaagaaacttttttatttcttctttatatttttaggttacatattatgttattttattgtttaagatactttgatgttactttttttttcagtgtaacttatatgatgtttcagatactattcaatttatttacaaattatttataaaactatcaaaatagttttataaaaataaatttatttttatttaattttgtaagatgtaaatataaaaaataataaaaaaaatattttttagtaacttattaagttgtttgatatattaaattttatttaaattttaaatattatttatttatttattaataaaatatataaaaaaaacttaaaatatttaataaaaaaagacaaagaagaaagaaaatatttgataagtttattatcattattaaaaaaaaaaaaacttaactgtacatgttatgagtcaagaacaaaaaaaaaaaaagtaaatacaacaaaaaaaaactaagtaaacaattgaggcctagaagagaaccactaaatatattgatatatgtatcagcctattttaaaaaaaatttaa

SEQ ID NO: 261411 - DNA, 584 bp, Cannabis indica
tcacttcatggttaaagaagggatagtgttggggcataaaatttcaaaaagtggtattgaggtcgacaaagctaaggtatatatctacaattgaaaacttaccccctccagtttcagtcaagggagttcgaagcctcttgggtcatgccgggttttataggagatttattaaagatttctccaaaattgccaaaccattatctaatcttctcgctaatggagtatcttttgagtttgggaaggattgtcttgaagcctttcaaattctcaagaagaagttaatctcagcgccaattgtgactacaccagattgggagttgccttttgaaatcatgtgtgatgccagtgattatgctattggagcagtgttagaacaacaggttgacaaggtattcagaactatctattatgcaagcaaaaccttgaatgatgcccaattgaattatgctactacagtaaaggagatgttggctatagtgtttgcgtgtgataaatttcgaccgtacttgattggcaataaagtgatagtgtatacagaccattcagcaatcaagtacttgatgactaagaaggatgccaaacca

SEQ ID NO: 261412 - DNA, 1037 bp, Cannabis indica
taaaaaaaaattaataattaaaaaaaaaagaggaaattagactcttttttatattatactcttttatttttatcttcttttttaaagtctattatttttatctctttttttaaacattgtactaattttatcctttcacttctccatatgactcccttatgtcaggacatttttggtacaatacatataaaaagaggtacgtttcagttaaaaaaaattaaaggtaaatttagttaattgattaataaaagaggtttttttcaacttacccaaaaaaaacatagtaaatctgataggcccatcaaggttgggccaagtcaaattagaaaggcccaatttgacatacagttcgggcctacggccggactaggcttctcaaacacaagctaaggtgggataacaactttgatttttctttggaaaagaactttatattgagtttctacgtgaccctttgctttttctatttcaacttttgagttattgggttcttttttctacaaaaggattgaactgtcccttcttggctagactgtcatctcagatggtcttatgctctaaccgacatacttttagttttagatcttacaaaccataccaaacccaactaataaacaacattactaaatacagaactataaacaaacatttcttatctgtttaatacctacaaatagatttttatatttctcatcctaaattgtgaatcgtgatcatggtcactactagctagtaactagtcaaagactaataaagaaatagtgaaggtgagagagagggctatagctagctagatcctttgtgttaatgattttcatcacgtgcgatctatacacatacggttgtcactggcacgtgatttcttctttctttccctttttatttttttttttatatatatatcttatgcttaaatgtaaaacataatattttaatatattaattatttaaaaataatatatttcaatttttaatttttttcttaaaaaaaaattacatttaaaaaagaaacttctctcaaacattgagctttaatt

SEQ ID NO: 261413 - DNA, 767 bp, Cannabis indica
ccacatactctcttggttcagagtcttttggtttaaattggaaattattgatcatagcaaaataacccactgtagtcttcaatattttcttgtccttgtaaatctgtcctttttcaattttgaaaaccttatgatctgttattatttctctttcttctttctgtcttttccttttgtgttcttgtgttttctcaatgatacaatcagcaacactatcagctacttgaaatatgtttggtaatgtaagttccttgcttatttctgaagtttcatcatcgtattccatacagtcgtatgttggctggttggttatttgtaaaactagtttctgaacatctgtatcatatctaatagcttcactttctggtttttgttgggcaatgacctggaatcttgtctcatctacagttgtgatacagagtggagactcactaactgcattctgtgtctttctcagttccaagtagaacaacagtgagttatcacttattatttttattgggggtgaatctgggcataactggtaatgcatttctattgctgtgttacatttaatttcatttactgattccaacaaactttttagatcataatttgttagtattagtagtccagtcattatgtagtcttcatactttttatcctctttccattgccctccatatttgatcacacacattattgagtccattcctgtataatatttgaaaacaaatagttaaaaaatatgcattaagaaccatttttttattttgttttcaaattat

SEQ ID NO: 261414 - DNA, 821 bp, Cannabis indica
gttaagcaaaaattttacatttaaaatattaaaaataaatgcaaaacacaatttcacctatgctgaattatagcataagagtttattagtttaagttcgacccatccaagattataagaataacctattaattacaatccttttatttaaaggagataccctttgattccaattaagatgatattaaatgatttgaaataaattagggaaatttggggtaaatttggaattgcaactgaactcaatccatttaattaaccaagcagcctacataccttctttgtgaaggatcaagccacttgtagttcagaatacggtattttggaatttggatataaggattccagtagatgaccactttcaggaatcctttgctatttaaaaatttaggaaaattcctacgtgtatgaccttttatggaattttaagatttgtatttttataccatttttgcggtatcagcgactgcacttagtcttagcaactaagttgcctacgtatccttttataggaatcaagtcaaacgtagttccaagttttaaaagttttaagaggtgaatgacttctctttttttgaatgccatttaatttgctatgactttgaattttaggtaaaattactatttttgagattttttgtgaggttaagacctctttaatattccaagattaattttagtgagctcatttggaattttgtgccattttatatggatttagaaatttaccacattttggtgataaatttgagtttggggatctcttttttatcttttataaactttagaattttaccacttttttttgtgatgaaattcagt

SEQ ID NO: 261415 - DNA, 2482 bp, Cannabis indica
accattaatgtaatcaacattccatttttcttagtttctctttctcttagtttcttaatatttgactcttgtatgtgtataaataggagatcacctattggaataaaacactcagaaaattctcatctcttctctattttctttccctaaattataatattacataatactgatatttcataatatatgcaaattacttcttgttccattattcccccaaaggaaccaacaacagagtttattaatctctttgatgctttgagaaagtaagaaaatgttcatctaatagtttctcaaacccaaaagaataaagtaaatgagggttcagtgcatttaatccagaaattttttacaatttattcaaggtgcttaggacaaatattaaaagtttttagaaaatgttatgggaattttagttgattattacttctaatagaatattttaattgtttaataagtttgataagcttttggtctaaattttagataataaatttcaataaatctattctttgttttttgtcaaatacaaaggaagaaatgaagatacagtttacaaaagccttaaatatgcagactacgaaagctattgaaaaatatttagatttacccatgataggtgggaagaacaaaacagagattttcaaaccaataaaggataaaaaatgggcaaaactacatgattatcaagcaaagcttttctcacaagggggtaaggaagtgctagtaaaagttgttatccaagcaatgccaacctaccaaatgtcttgttttttaaaattccaaagggcattggtgatgagattgaaaaactaattgcaagatacctgtggggatcagttgacaacaaacataaaattcattggagagcttggcataagatttgtaaaccaaagagtgacggaggattaggctttcaacgttttagtcagtataatgaagctcttttggcaaaataggcatagtggatcttaatgaatccctcatcaatactggctcaagttttgaaagcactatatttcaaactcactaacattctagaggaagataagggatcatatccttcaccaacttggcaaggtattttatggggcagagatttgttattaaagggacttagacagagtataaaaaatagtaaagacacaaggacatttagagacccttggttgccaagaccaccttcttctcttcctagctcagctcttgcatatgaggtggcaagagtgtcagatcttattgggtcaactggttgttggaattattgtgtagtacaacaacaattcaacctccttgatgcataatgtatttttttctataccgttgagtccattcaatcatgaagattcatggttttggcattataccagtaatggtaattatacagtgggaagtggatataacactgctatgactttggataaatcattatcctcttcagctaatgtattctcattatggtggaagcaattctggggtttaaaaatgcccagaaattttttacattttgcgtggagaggtttccatgaaatcctgcctactcgtaatgggttgaacaaaagaaatatagtctctaacaattcatgtgagctatgtggttttggaggtgagtccaatgctcatgcaattttctggtgtccctttgcacaagaaatttaaatacttttggattttaatttcctacatgaagtgagagaggtaattaatcttaaaaatgtgttactatatgcacctgaggtggtagaaagggaattgtttgaaaaaaaaaattattattagtgcttgggccatagggacagagagaaataaaatgactcatggtcaacaattaagacaaccacaacagaatgttaattggattgccagttattatgaaactattgtatctgctcgtgatggagccaagcatagtagcattagtcttcaaagaaataggaatggtttggaaattctacctagaatttttcaagaagaatagagccacacaatacttatggttgatgtagcggtattgaataatacaagtttagtcggcttagggactattattttttcagaagataaaagggtgaggtcaactttatgcaagcctctcaaaagttagatagtactttaactttaaggcacacatttctcgatttgtataagcctttaaatttttaagctttaagttttcgacagcattaggctcgatttacatggtgtggatttaagattgaatagtattaggacttgatttacaagttcagctagcataaacactattatattttaattgctaaaagggtgaggtcatttttttactaacctctcaaagattagacactggagtaactttaaagaaaatattttgatgtgtataagattttaaaatattttctagcaagtttgagtagtatttgttattgttttatataatgtggatatgcgtttttagaaagtttagttagcaattggttatacagtgttgagcacttttgta

SEQ ID NO: 261416 - DNA, 1102 bp, Cannabis indica
tgagatgagccgaatttcgagtataacagttttccttttcaactacaacatatgcaggaggaaacatgttgttgtttccatcaataccaatggctacaagcaacatactcctgcaatatcctttcaaaaagcacccatctaacccaatgatgggcctgcagaacttgaaacgagatttacatgctacaaggcatatgtaaacccttttgaaaaaccttatatcattcactaaacttgttctgatgaaagttgtgctaccaggattaagttttactaactgtgcacaataatcatgcagaatagcatattgatctttaacagttccatgtatcttggccatagctttgttcttagctcgataaagagtccatgaggagagtttagagtacttaccctcaggatttactttcttgaaatcactaaatgatatggctggatttgctctgaacttctctacgaactcttttacaatccaatcagcatctaccaacctgttctcccataaaattccacagatgtgttcttccttaaatttgttgattcgcattgtagtgcaatcatctgttatcctctgagcatacattaaccatttacaaccttctcctttgcatacaactctaattctcaacctatcattgttaatatatttgtactgcctgtcaatgctgatgaaatgctcctttaatgcttctctcaagtgcacaatagtagggaattccattcccaattcaaacttgatattttcaagcttgaagtgtggatcaaattcagtgtgtttctttttaagcactggtccatcttcttcatcactaaccaagctgaccaaatcatcatcttcttcatatcctctaccatcatcatcatcttggtaagcttgactacataaatcattgactgacccccaccattggctagggtcagttgttccttcttcaactaattatggatcttgggtttctggagcattccacaaaatttggatcttctactgattggtttttttccctcctggttggtgttttggatggtgtttctcttactctctttttggtttagggtggtctttgggacacactttgagatctggtttggggtggtgttt

SEQ ID NO: 261417 - DNA, 896 bp, Cannabis indica
tcatactatctggaggcctagcatatatatcttggcatctctgtgcaactttatgtacacctcagtaatgccctaatgtgctaatctgatggccattgatttgtctaacatatatctgttggtacatcggtgcaactctatgtacacctcaccggtaccctatatgttattgtgacggcaacaaacatacacactaaacatgtatacatatatgaaaataattctacttatcttaccttaattttgaatgcaagcgtgccggtaactttgagtagaaactgttgctcaacgatttaagaccttaagtcacaatttacgtaaaactagtaagtgatccgctaaatcatttttcggggacttaaacttgaaaataaaagtttccctatcgataaatggcatgactaaatcctacatatcaagaaacttgctgaaaaataagaatttgggaaaagtaccccaaaaaacggtaagccatttttgagcaaacggctggccgttttttctgggttttctgcctggaaaaatggtaggccgttttaccaaaatggtctgccgtttttatagtagattttttgaaaaaaaaatcccaaaaccacctcaaattgaatccaatcgttcccaaactttccaaaaacttaacttaccagaaccatatttcaacaaataaaagcatccacaaaactttgaatcaaaatttgtcataaatgaaccaagtttgagcttgaaagctcaaaccttgtccaagcttaacaacaaccaccaaaaacctcttcaaacaacataaacaacttagtaattataccagaaacaaactctaagcaaaccaagttcagacagaagctaaaactcaaaatcacataatcaaacctaattttcacacttagaaattaaagaga

SEQ ID NO: 261418 - DNA, 556 bp, Cannabis indica
ttgaaaatgtctcaattgcattgcatttatattcatttgtctttatgtaatgtgtggaattataactttgaaatcttgatttgggtctcgagagtcaaattaaaaacaagccagctaatttcaacttcgctagcttcatcattgtgcgtgctgattaggtccccaaataaccaaatttgtttgactgcggggtatttactatattatttatgattacaacttgtaaagttgataagcgatcctttcaggttagacatttttaagctcttttgttttttttttttatttataattttttttttcaatcttgtgtcattaatttgttttcaaatatttataaatctaatattacattcttttcttttacagtgttcattacataatattattttttaaatttgtaaatcttacaaattgtaataaaattatacaactacacaaacatttacacagtcccatacacttacaaattgtaataaaattaaaaggttaagaaaggtcattttttatttatttttacttaatttctaaaacaatcacaaccatttaatagtga

SEQ ID NO: 261419 - DNA, 1027 bp, Cannabis indica
atgatagattttaaaaaaagaaaggtgaaaataaaaggaggacaatataaaaagagtatagagtgtaatttcctcaaaaaaaatatatgcttctcatatattaaaataattaattttgaataaaaaaaaattaaaaaaattataaggaaattagtgtacatcataggattggtcatattactaaaatttgtttaggtaacatcatattttttgtttaaatatttttgtgttatctctttgcagagtaacatattcattacctccaaaatacttttaataaaattagtatacataaaagttttcatgtaactaattctatattatttagatactattttgttactttataatttttaaaatatatatatcaatattgctatattaaataaacttattcatatagtatatgtaacttttaaatataaattaacaaaaatatattttaataacttataaaattatttgatatatattaattttaattacttattcgttaactatatagaaaggttgttacctttttatttcaaagttatttttaattccaatcatcttcttcggtgatgttgacgaaaaaatatatgcttccacatattaaaataattattttaaagaatatttcgctatagtataatttttaaatctaaataattattgacatgactgaaaaaaaaaattaaaattattttaaaaaaacatagaaaaagtaacattgtgttaatatcttgcattcatttttttttttttttatgtaaagcagagaacaaattaaaaagagggggagaatgagaattttgacacacctaacaatcggtacaaatactgagttctttttttttttttttttttgaaactttcattgataaaagacaagttagggtttgagttacaagatttaaacaatactatcttaccctaaagtctttttttgtctagattacaatacagtctctatatggtatacgtgtatatatatatatacatactagaagaaagttacgtgcaaggcacgtatatttagtttatg

SEQ ID NO: 261420 - DNA, 1776 bp, Cannabis indica
aatttaaccacttaaatgccaattctaattttttaataactaaaaattaattattaaataatattatcatttaatatatttgctctgggttgagtacgggcgtatattccctaattattattattattattattattattattactattatttatttttggtgttgtaaaaattccttcaacaatatgatgcattaccaatcagtcatcatcacatccttgagatggatccctataacgatatccgaattcttttcaatcacaagcccaataacatatcaaagaaacaatcagaccaccagtccagtgtatcattctttgtatataaaccttccctttggaaataaaataagaaattaaacagaatggaaaaatgaattgaactaaagggaccgaacaagcaccaccatggactgtttataattgaaatatagttctctatttttttcatctttaatttgaaaaaaaaaaacacctgctcctactcactgtacttctaaactgacgtatgccttggccaccgaaacactcaaggacatggaatcgatatgatgattaaaagaagagccaggttctcaagcgtcctatctgctgcaccaaacaaaaagacactcgttcacgaacaaattcaggaggatagaatacaaataatgaaacaaatgacactggctaatttattgcctccaaccgcttacctggttgtagcattcccaagtgtcagttcaagatcatcagagacacattcctcaattctctcaccttcccaaggtttcaccaaacctgttgtattacttccaaaggcaaactcggctacaatattaccatctgacatgggaatatccgaggtgttatcaagtcccggagcaatggctggggagcaagttccgctttgccctggagtccacattcgtgagcctccattcgacaaggcctcgtccttaaacccaaatggatttcttgacaccaagctaaatgttggggaagatggcccactttggataccagcaagccaatttgaatcaggcaggacctggcgacctgggctttgtgggttggatgagggctggaaaggatagttctggccagctgtcattgggtcatcccactcgtttttgttccgaggagttctgcaagttggggaactcagtggtggagtcactggagcacttattgagccactatggatgaataggtggtggggaaacttggatgtggctgatgatgagcctgaggtaagggttttaagccatgggatgagtgaattaggatcagcattactgttgctgtttacgttggcagtgtaatgagatgaaactgggctgggaaaggaagatgaggccgggcttggattataggaagcacatgggcttggctgatatgatgaacacggacttgctgatgtcgaccctcccattatgtccatccggtccattggtttacatccctgaataaaagcagataatacaaggtcagagtgagacaacaagtactaaggaaattatagataccaaatagaaggtagtaggtttaagttcatgtttgagaaacttaaatttgaaacacaatgatacttgtacatgacaagcaatataatttaaagtacatatattcgtttctatttacttgacatcagcagctcataaccaagtgcatacacaacttgctcccttcgttctactaaatctacatgtttcaaataatatataattataatgtcccctccaacaccagatgattcaatagatattatcctaagaagttaagtgcatgtttggca

SEQ ID NO: 261421 - DNA, 660 bp, Cannabis indica
cgttgtggtcggactctattatgatttctaaccacattctcttttttccgaggtatatatttttcttattgtaataccttgtttggattgtatcgtactatgtatcatttgataacccaataaatctcccactctattttcaattcaaattgaattttaaatggcagaatttcaaggatatctagaactagatagatcttggcaacatgacctcctatacccacttatcttttgggagtatatttatacatttgttcatgatcatggtttaaatagaaataaattaaatttgttggttaatataatttgtaacaactatatttcatgacatttaaatcctatcatcaattttgtgtgacatctcttttattatacaaaaatgtgataaaccaaaagaagttacaaaaataatgaatcttgtaactcttctccatgttacaaagtgcaggttacaattttaagttaaataaatcatatattacataatttatttaccaaactcttaatatatagtattcacataataatatgtttaccatattttaatctacatattatgttgaaaattttatttacaccccaaaaaattttaaagacactcaattttaataatttttattgtatataaaatttatatcttaaattatactaagttttttt

SEQ ID NO: 261422 - DNA, 514 bp, Cannabis indica
caaggcgaacaccactgctgcaagttctaggtcgtgagttggataacgctgctcataatctttcaattgtcgagaagcgtaggctatgactttatctgcttgcattaacacacagcccaatccctgccttgatgcatcaaaatacaccacaaacttttcttgatcagatggcaaagctaaaacatgagctgtaatcaaccgttgtttcagctcttgaaaactcttttcacacttatctgaccaaataaatcgctgattcttcctaattaactcggataccggcattgaaatctttgaaaaaccttccacaaaatgccgataataacttgctaaaccgagaaaacttcggatttcagtgactgttttgggtctaggccaattcttcaccgcttcaatcttccctggatcaaccataatcccgtctttcccaataatatgccccagaaaggacacttgtgacagccagaactcacactttttgaactttgcatagagtttatgatctctaagtcgc

SEQ ID NO: 261423 - DNA, 553 bp, Cannabis indica
tattcacataataatatatattactacattttaatctacacttattatattataaaataatataacaattatttgttaatgtttatttgaactattaactgtaatgtgtgtatatattgtttcggttaatattaataaaaaaaacttattttttcattgctttgtgtatgatttaaaatagtacattgcttgggtaaaattacatttctttgggaaaaataaaaaaaggcattaaaatatttattttctttcctgaaacaaatctcatcaattatttggagctaggttagtgtttagttaattttaattttaaaaagtctctcttacatgtaaatcaactgttcggcctcgtaaaatagattttatgaaaaaatggtgcagaaaagattattaagacgttagaatacacaatatatattaataatttttaatagtttatcgactcccaagttcccttgatagttgagctcaattaaactatcattttttaaaatatatttttcatttaagcacaaagtatttgttgggttttatgccctaaataaaactcttt

SEQ ID NO: 261424 - DNA, 577 bp, Cannabis indica
caaacaatgctcaaaaagctcacaaggtagaattcctccaaagtgtccagaataccttcccacgggagaaccaatagcttagattataatatgataaatgaaaactaataataaacaaaagtggaagcattaataattgcaactcacactgccaaatcctcatcaaacaagggtgtttgtttgactgctggcactggctttgatgtttcccacagctcatgccataaatttcctattgagtaagcacaaacattgttcaaccaaacttcatacaacattcacatgcacactaatatatttcataaactcgtttcaattgactagattaagtggaatggctcaaaatattggatttctcttctggaaaagaaaaaaaaaaataggctgccatattcggacaccttaataattgttagaattttcttgattaaaattggaatcaacccttgaaacctattatcagtctgaaaaaaataggacattaaatcaaagagtttagtttaaattcacacactactatatgtcggtaaatatatggttgtgtttttggtaacaatggagcttttcatgaagaacc

SEQ ID NO: 261425 - DNA, 840 bp, Cannabis indica
gccgttaatcaataactaattagacaagtaattagccaatttgagcactaaattatacattgtcattattttgagtacatatattttgattttatgaggataatttcaacttttgagaagatgtgtgaaattaacaagttatgaaaattattttttttagaaaaaagttatttaagttttgatgattatgaaaaagttgatattatatatatatatagaaataaaacaaaaaaaagaaagttatgtagtagattttttaaaagaattattttgatagatcttttatttgtttcagtatttatgtgatttttttaatttaatgatcataaatggtatagctatttaaaattatttataaatttttaaattttttttttgaatagtttactatgcgaaaatagatattaccaactatatttacagtactaccaactatatatatttgcccttgtttcttctacttcttttccttttttttttaataaaaagaatttatttacattaagtaatcaaaataagtgttattttataattatattttattgaaatgaaattaagttgtgttggagaacataaaaaaggggcacatgaatatatccaaatacaaatgagatatttttcttttaaaaaaattgtataatatataaatctaaatatgaattattttattagtaaagaaatacattttctaaaaaaatacaccacatttacataacatacacccatgatctaccacacagataacacatatgcataatcttgtaatttttttatctgtagataaaattatggaaacatcaaaaaatcatattttttacaaaataaaatcttaaaatatat

SEQ ID NO: 261426 - DNA, 674 bp, Cannabis indica
tcagcaccaccctcaaacactggcgggttctgcttccggaactgctcatacaaaggttccaaacggttccctgcatcccgtggcactaccagaggtgccggaggatcagggttagggtttagagtaggctgagctcgctgctctctcaattctctgatttgctcaccctactgccgaatagtgtcttgcattgcagcatataactcttcccaatttggtggtggtggagggttctcgccctcaccaggagccccgaacccagctagctcgcagttacccctaccagtccgcctcgggtgcataactatacacctgcagtcacattccaggtaataacaatactaataagtatttccataaattatagtattgcccacaccattccgatatcaacacaattcagataatcaggcaatcagaaaattaacaaattatcttttaactaaaacttactgaaccatgagtcgatcaagtcgttgcagccaatgtacgtatcaaaccagtcttcaggatctaaaaaccttggcgctctgataccatgttgtaatgccctgtccaacggggacgccacgtgtgtgcttttataaaattcatgtatagacattatataattataccaaaagtgtgggtaattaattttttttttgtaactaaaatcaagcatgtaaaaactt

SEQ ID NO: 261427 - DNA, 1014 bp, Cannabis indica
catttattttgtacgggttttgagtcgtatcgtgtccgactcaaattgtcacaagaaatgccaaaagacactagtaatacttagcactacctaatgtatcacatcgttattagtgcaattaagtatcagagcctacaaaatttaatttaatattataatgaaatatctctaaccatttataaggtgtcatttcaaggtaaactaatcacttgtacctaataagaatgctttattgtcacctatgtggtgggggagaggtaatgacatcgtttaaaaaggtaggtcttttgtaattattttaatgctaaaaaagacctgcggtgactagcatatttttaaggtgtaatatcactattatagtgcaattaagtattaagtctcatataatttaatgtaataattttcagaggatatcgctgaccaattgtaaggcgtcacttctagaaggtgctaagcacgactaatgtctaagaacatctccaatggtaaaaatttagaaaatgcttgctgaagtggacatatgatatgataaaatattgagatactatactattagagagaaaaagatatcattttaaaaatttacatggatgctatacagtagcattgatactatttatttttttttttaataaaaaatcgaagctaaaaaattattgtaattaaaaattaagatatatattaaataataatatgtgagattataattatagtatttttgaaaagtgatatagattaaaatattttaaaaaataagagtgataaaataatataaaaaaataaaataaaatattatattgtttaaatttttaacatcctttactaccgttcaaaatgcttgctttattttagtttagttggttgtatagggtccacttgtgagtggtgttttagtatatattattttgttgttgttgttgttgttgttgatgttgtagtgaaaattaagggaaatttagatagtatattaacttttgttatttttttataaaaatactgtcaggtggtattttt

SEQ ID NO: 261428 - DNA, 4460 bp, Cannabis indica
agctgtgcagggtttctattggcggtcacctgaaaacaacctggtacgtctatttataaaaataaaacaaatgtgttttgagtgtcccacatagaaaatgcctgtgaaaattgtacaatttattagaggatgagatactctacttatcactaattagttttgagaaagaattcccgtgatttaccattctattacttttgaaatattcgttctactttctcaaaatttccatttttctaaacttttattcttacaaaactacacttatataagtttaataactcgactgtggcacatttacaatctattttgcaatttataacattccaaactttttaatcattatcagtttatatagtttgctgttgaaatgcttgataacttttattctgcattttccatgcaggtcgatggcacggaagccttactgcaggccatactacattcaagaaaatggggtaccttagtgtttgtgatgcttgagattttattctggggtattatcgctggttttcttcacatgaaaggcatatacatgaaattataaacacaaagctttttatgcgtatataacagtttggaagtagtggaaacataaaatctgtatataatgatctttgtctctgaaatacatttttttttccaagtcttttaagtaaatagatcagtttataagggagggaaagggagtcgagtcctcgaggtcttaaatttattatggctgatgcattgtgatttggtcaaaagaatatcaaatcgtacttggtgtgtctagaaaggtgatgacgaaagagatatgacttaagattgtttgtagaataagacaaaaaaaaaaaagaaatgaattggtttccattatgttgcccctttaacatgaaaaaaagggtaatattatctatacgtatttgtgaaaaaagaaagaaaataaaaagattagggtaacaggagagcttttggaattcattcggggacaggaaactaatattgaccaaaagttgagaaaccgttcacactaactatatcatgtgtttattatgttattgcttaatgtaaataaattgaaattaaagcctgtgtgatgagccaagacttgggatttatttatgaaagcagaacctaaaaatgctaaatatacttgtcataacactataagccaaaacgttctttactgacaattcactttgcaggaggattgtggagccaggactaatttattaaaaggagtgagaatgaggggaaaaaaagaagaaaagaagaagaatttgggatttggtatattggtttcttgaagtcaaagataacttgaatgctaaaagaattaaaaatgttcctttactgtttgaacatctaaagattccgttactagggtgaaaccgagaaaacttaaagcaatataaagctttaagtccatttttctttctagttgaatcacttggcaaagagagttttctgagtgttggaaatggctactgaaaaggagactaccgaggtttcagacatccaaaatgatagaagaagcatccatgagaatactgaacgattgtcaaagtgcaaacaatcatcagaagagctgcattttggcaaggcactagcgcaccgagcattgtacggtgcaggcagcggcagtggccaccgaagaaagcccaggatcaatgatgttaaagcacaaccaagtaggttgagtaaggtttctttggctgaggaagaagagaacaagtagatatgacaagcgcagtttgactgcctctgtgatgtatgtttctcaattaactattagccaccatctttgctagtaccaagtatttagaactatatgtattataattatatagatgaatccatcggtcattcttgttttgtttttcattttctaaggtgatcatgtttacaccaattcaattggaattaccaagagcacaattttcaaattcaatttgtcaagttttagaaaaaaggagtaccacttgtaaggttctgtcttagagtgaaaagagaaagagaaagtaattgtatattgaattgaattaagagtgttccaagagagaggtatatatatacaaaatagttacaagaagtaactaacacaaccagctactgaaagtagcttagctaactctctaacaaatctaataacagtcacttggctaacacgggataactaattgttagtatctttgataatcccattcaaactgagtgtagctttgaaaattacataatttgtctcaaatttcagcaaatttggaactggaaattggcttggtaagatagtcagcaagttgagcagaaatagggacatgcttaatataaatttgttactgtaggatcttatctcgaataaaatataaatcaatttcaatatgcttcgtacgagcatggagtactggattagcagcaagaaggaaggacattttgaggaatttgaagttcagcaagtaaagattgaatccatgatatttcagatacaacattagccaaatttcaaaattctgctttagtggaggacatgctaattgttacttgtttttaagacttccaagcaagattgcctccaaaatatatgcagtaccctgaggtggacttcctgtcatcaagatctgatgcccaatcaacattacataaggcttccaatgagtaatcatttgttgttttcagatgaagtccacaatctaaagtgcctactatgtatctgagtatgagtttgactattgtccaatgagcttgcaaagaattttgcatgaattgacacactttattgatagagaaggcaagttcacgtcttgttattgtagcatattgaagggcgcctttatatagggtggcatccttgacttgttcactgccataattggagagtctgaggccactattcattggtgagttccgagtgttaacattctgcatatctactttgcatagaagatcttgcaaatactttgtttgagacagaaggatggcatctaaatttgtggtgacttgaattcctaagaaataatcaaccggaccaagatccttgagagcaaaagtggtgttgagttttgtaaagagtttatttactaagacatcatcactgcccataactatgtatcatctacataaaccaagacatagatacaactagtagatgtaaccctaatgaagagacataagctctagagaaattgaaaccatgttgtagaagaactgttgaaagcatgtcaaaccaagctctaggagtttgcttaagtccatatagggcctttgtaagtttgcagacatgagtaggatatttaggatcaataaaacttggtggttgttgcatgtaaatctattcttgtatgtcccgtttaagaaggcactattgacatcaagctgcctaattgcccaatttttggttacagccatagttagcaccactcgaatagtaataggttttacaacttgactaaaggtttctgagtagtcaaaccccagttgttgatgaaaccctttagccacaagccttgctttgtagcatttgtggctcccatcaacattaaatttctctttgaacacccattgacaccctataggtgttctatctttaggaagcttgcacttcagtttccatagcattgaaccaatgacgctctttgatgcctgtcgtaaaccttatcaaatttattattttttaattctaatactttcaattatttcagtataaaagcaagtacgggtcgatcccacgaggactatgattaatttattattcactatcaagcagaaattaaagggggtgttttgagttgtaattaaatagcataaaaacaaattataattgagattgcgatatgagataaatagttaaaggttattctccacccctaacaatcatccttgatttctattaattaatgtaatttcaatttccaatcaaactattaatcccgcagatgaatctaaagaagtcaattattctaatctccctattgtatgtaatcaaggcgaagcgctcactaattaactcttttacctaaacagtaaatccacatagcatgcaaacttagataaagctttgagatttatggaaatagattaatcttggcaacaaattaatgaagtatataattcatttaacttagggttctattcttcatcacaattaaaaattgcaatttatcacaaacacttagaatcctagactattaggtgaatagtaatcctaagatgacggtagattaaagtaaaacctaaatttagtggccatctaaaaaagattaaaacaataatcatgacattgaacatagaaagatagaagcaatttaatatataatggaaactagaaattaacattcaatataggattaagaactcatgtcttgggttttgaaataacccttaattaaaagaaaactactcaaaactagacattataacgataatgataataattggtaagagtttaaggcctatgtataatattagaaaatatctcactaaaa

SEQ ID NO: 261429 - DNA, 520 bp, Cannabis indica
taacccgtttaataaacgggtcgtgttcgggttgacacggctaatacgaaattaactcgttaattacctatttaaagttattgtagtactttaacatgtgataaatgtgttataaacttgttgaatacttcataaacgtgttattagttgacatgttaaacgaaatatgcttataaattggttacacgggtcatgtcgtgtcaacccatttataaacaggtcgtgttcgggtcaagtatatacttattatacatgggtctcgacacgacacgaacacgacccgcaaacacgaaatgtcacccctaatgataacaaatatttatcgggtaaatggcggcaaaaccccaatactttcgttttggtttcattaaacccccacaacccaaatttctgcgggtaaacccccaaaaccactattctgttagcaatttacccttttcgtccaaatttagctgttaagtgccaggttagcttgtccacgtggacataatagacacgtggcacaattttattggtccac

SEQ ID NO: 261430 - DNA, 510 bp, Cannabis indica
ttaggcaaaaataaaaattagggcccactgaaaatgtgaagttattgggatctaaactctcaacctcttagttgttaatccaatcaaattatcactaggctacaacacatatttagcattaaaatttaatcctatgttaataaaaaaatccaacaaaagaagattcgttttgttaaacacaaaaacttaaaattaaattaaatacaaaattaaattcaaaacctaaaaaatctaagaacataaaattcctaacccctaaaatcatgttctctcccccttcacttctacgaatgagaacagatttcatctcttctcgacaacttgcgaaccagaggcctgttaagaccaatagtgcatcctccttttcttctcttctcgacaacctgcgaaccaaaggctgttgggctttgtgccctaaataaaactctatttcaatgtaatctttatcattcaattatcaataaagagacagaagtattttcatcacttatttagtgtgtcatttggttc

SEQ ID NO: 261431 - DNA, 795 bp, Cannabis indica
gaaaaatatcttgtcgaagttttggactagaacaaggaagtacatgaaatgagacaattccactagttaaaaagtagttgtagaaaacaacaagatagaaatcacaatttgagagtcaaaatcataaatatggggataatatcccaaaatattcaaataaattttgaggacaaaatttctataaggaggggatggttgtaatatctcaataagcctaatggtaaatatttagagtttatatttatattatgggttaatcaagtaataagtgagattatgatcctactaatctatttcagcataaaatttaaatttgttgtaagtgagtaaataagtgtaatttataaattacagagatttatatagcatgtgtgaatgtaatatgggctatatgtggaataaaaatattttcaagttcgtagaccttgaagttttgataagtggataaataatcgtaatttgttagttacggagatttatttaaaatacgtgaatataatatgagttatttgtaaaataaaaatattttaggttcggcgaccttggagacctgattggaggcttaaaatatcacaacagttttagttagaattgttgatgggattattgggataagttgattttagaaataccagggtattttggggtacttagagttggccaaatactgtagaaatagaaattcttagtggctaagaaataatattgtcatttatcatatttattaattgaaccatacaaagtatcagaattaacaaatatgccccgaaaactctttctttacaattttgccct

SEQ ID NO: 261432 - DNA, 1478 bp, Cannabis indica
ccatattcaatttatatgtattacatgttttttagtttgtacagaaaaaaaatgtattacaagttaatattgttctctatttatattattatttttaaattttatggaagattatacatcatacaaataataaaattcaaacccactattatacaaataattaatttatatatataaagtataattgattttttctattttttataactaaatttttactataccaacacctaattttgtgtaaagtttaattaaattatagaaaactaaatacgtgtatataaagatgtgaggaagtggacagttatttcctatatatttttaaaataaataaagaaaatgtcaaatgtaaaattacagtaataactgaaatatcttttttgagagcattgtctgcccttaagtttgctctgtggcagttgagttagtttatgaaggtttattagcagtttattagcagttctcctcccatttcgatattaacttcccctgcgccaccatgttcttccactcatccattccacatctcatctaaatctgaattttccatcctttctcctttttcctttccttctcatattttttcctatggattcttttcaccctgatctctcacatgccctctctgttagagaaagagaggtttataacctatccaacatcaccattcctcctccacgctctgtttcccaccgtatcctttgtagggttttttccaaaaggagtttcaatcctaaacaacttaccaatctgatatctacacaatggaaaggaagatttgaggtgtctgtttcttcttatgaaaatgactcttacatgattacttttggatgtgaaggagacttaaggagagtactttccaaggaaccctggcacttacacaatcaacatctaattttatgcactccaagtgttctgcagaatgccccttttaactcatataccatcacccccttttggatacaagtctacaggcttccttttttgagcaaatctgaatccttggctaaggtgttagggaatttgattggtacttttttagaagtgtatgaagactctctcaatgaaggatggggtccctttcttcgcattcgtgttggtattgatgtctccaaaccactgctgcgtggacagactgtaacctttccttggatgaatgatgaattatggcttgactaccgttatgaaaggcttcctgatttctgttacgaatgcggtatcattggacatgtatttgacaaatgttctgaatttctggaaaaaatagatgatggcaaagatccggatctcccgtatggtccttggatggaaggatctcccttaccaagatccaattatgatcgttataggcaagacttttccaaatcaggaccatggccttttatcacacgtcttgcgcgtaacactatttctcccatcatctctcatccccaaccttttcctgctttaccatctcacattacaagccgtgaaaaggg

SEQ ID NO: 261433 - DNA, 1921 bp, Cannabis indica
cctcgttatttgtattaactcaagaacaaggaagaagattccttttcttatagctcttacaacagtatctctgaatgtataattcttagataataatattgtcttagcttagctgcgtatcgactttcaatctctcgctcccctttgccagtgaacatacatcactatatatagggctagcaaacttgaggaggaagagtttcctctctcgttacaatgcccataaacagaaagatcatgggatcaatgctgaatgcaagaatcgtgggattgaggctgagtacactgatagtgggatcatgtgtatgttgtatccacgtaaattgatccctgagttatagggattaagctgatgactcatgatgcaaaagcttaattcgctaaatatcttactcaggatgtgccagcgaggcatcctgctcggcctatcttccgagcagatgttccaagtggactccatgtgtcaccattctcgtgatgccacgtcagagtgcaaaatttgggataacaattccaatttgacaattcaaacaacgaggcagagtatgaagtcttgatagatggcttgaaaatagctgaagtattaaaagtcaagaatcttgtatgctacagtgattcacagataaatgtaaataaagttgtaggggaatactagccaaagggtttataaatttcaaaatacttggagaaggtttagaagaacttggaatagttttatgaaaaggaagaagttgagatgattaacaacttgcctacatggatgacgcccatagtcaactatctactcaacggacaacttatagcagacaaaaacgaggcacaaaaactcttgtattcagtacctcgctacatgatagtagaaggcaaattgtataggaggggttattcaatgcctcttctatatggttctccccacagaagcaaacgagataatcaaagaaatacacgtaggtttttgtggagaccctacaggttggcagagtctttcaaagaaaataattcgacaaggatacgactggccaacaataaataaagacaaacacgaatttgtcagaaagtgagataagtgtcaaagattttcacatatacctcacgtaccactgacagaactaagaatgatgagctcgctatgtccatttccgatatgggggattgatttgagtggggcattgcccacagggcgtggaggatcaaagtacgcagtggtggccgtcgacttcttcacaaagtggagagaggctgaacctctagtttccatatcttccaagaaagttcttgactttgtcgtccagaacataatatacagatttggaatacccatttaaatagtgtttgataacggaacttagtttgatggagacttattcaccgagttttgcaaaaggagtaaaatttttaagagcttctcgtctgtttcacgacctcatgccaatggactggtagaagctattaataaaaccttgaaggatactattaaacagaagttggacgctgcaaaaggtagatgggtagaagaactaccacaagtactttgggctcaccgaacgactaagaaaacagcaatagggcatactccattctcgctggcatttggttcggaggcaatgctgctactagaagttaatattgcgacccacagacaaactcttagtttccttggatctacttgaaaaaaaacgtgctgagtcgcaaactactaatgcagcataccaacatcgaattacgagatattttaccaaaagggtaaagaaaaggctctttaatgtcggtgattttgtactaaggcgagtatttgcaaacacgagagatgcatctgcaggagtatttaacccaaactgggaagatccttatgttatcgaggcaattgttggaacggggtttataaattagctcggcttaacgactcgctaataaagaacca

SEQ ID NO: 261434 - DNA, 3045 bp, Cannabis indica
atactcgcacttgtcatttctctgaaaattctctttttatattaattaaataatatattttggtgttgcgaaattcactcgacaacactaccttttgctggtaggcctgtaacattaggttggcttgctctcttctttcttctactttgtcaagggactctgccagtaaggtattgtttatttgttggtcataggttgctctcttgtgagaaggtggcactatctttacaggcaacatcacctcgtagccataagctagagaaaatggagtttcgccagtggtcgtcttcttggtagtcctatgcaaccatagaacctctaggagcaattcagcccagttgccttttacttcctcaaggcgcttcttcagggtgtccttaagggttttgttgatagcttttgcctacccatttgcttgaggatgggccacggcagagaagctcttaatgatgccatgtctgttgtagaaattagtgaacatgtcactgtcaaactacttgctgttgtctgacacaatcttttggggaagtctgaatcagcatatgatgttcttgatgacaaagtcaaggatcttcttaaaggtgattgttgtcaggggttcagcttccgtccatttggtgaagtagtctactacgatgacagcaaactatacccctccttttccctttacgagttgaccaattaggtctacccccacactgcgaagggctaaggagactacatcatcatgatttgttgggtggaactcttggtattttcaaaagtctctggcacttaacacattttctgacatagtccattgagtcttcaatcattgttggttaaaagtacccatgtcgaagtatcttctttgataggctttgcccccagcatgattgccgcagcagccttcatgcacttctatcattaaccattcagcttcggctttggtcacataccttaagagaggaatttaaaaactttgtctacacattatcccatctaggatcaggtacctagcaacttttcttctcagtttgtttgcttcatttttgtcttctggcaaggctctagtttggaagtaagctgcaataggtgtcatccaacatgtcaacttcttctgcgataataatgctaggttcctctaagaactgtatgggcaccaagtgtgctttgttagtaatggtgctgcttgccagacgggcaagtgcatctattgtggcattttgctctctatggatctgcctaattgtttagcctttgagctgacttagcaagtctttgattttgcttaagtaggccacaactttttcgtcacaagccatatattcacctaggacttgattcacaactagttgagaattgctaaatatgtcaagatagtcagcatgtactttatgtgccagcttgacgccagatattaaggcttcgtgttcagcctcattgtttgaggctttgaagctgaatttgattgctccatgcagttgctaccctgggtgttgtaagggcaatgcctgcacaagacaattggtctgtgcaggttccgtcaacatagagtttccatgttagttctttgggattttgttgatgatcttgctcttgcttcttctctgggttttacttttctcctgagtcttgagggatctaaagagttgagttggtccactcagccacaaagtatacaagggcttgaccctttatggttgtttcttggttggtatgtgatctcgaactggccaagcgtaatggcccatttgagtagtcggcctgatgcttcaagtttctgcaaaacctaccacaattgttgattagtgtacacctttatggggtgtgcctggaagtagggccttagcttcctagaagccaagagcaagttgtaggtcagcttctccatgagtcggtactgacttttggtgccgattagccttttgccgatgtattatacaaggtgttgtacactatcttcttctcttgtgaggaaagcactcatagcatgttttgtgactgttaggaacactcctagctcctcattatgtaggggtttagacaacactggtgtttgagccaattgtttcttcagctcttagaatgcatttttacattcctctgtctactcaaattttttgttacctttgagaatgttgaggaagggtacacatttgtttgtagacttggacacaaatctacttaatacagcaattcatcttgttatgcttgtacttccttgacaattatgggtgacttcatgtccaaaagggcttggatcttgtctgggtttgcttctattcccctagcgttgactatgaagctaaggaattttcctgagcttacaacaaaagagcatttgagggggttgatcttcatgttgtagatgcaaaggattttgaagcacttgcataggtcctccacgtgcccccagcctttttgaacttgataagcatgccatccacatacacctccatgttacacccgatgagatctgtgaacataatgttcaccagtctttgatatgtggcccctacattagccaaagggcatgacttggtagtagtataggcctaggtccgtcatgaagctagtgtgctcctgatctggggggtgcatctttattgggttgtaacttaaatacgtgtccatgaaacacaggatttcatggccaactgtggcatctacaagctagtcaattttggggagtggtagtctttttgacatgctttgttcaagatggtgaaatcgatgcatactctccatttcttgttgggtttaggcaccaatagcgggttggatacccaatgtgggtacaatgcctttgttatgaagtcattggctctcaaccttttgacctcatcttttagcgcttgggagcgctccttgtttagcagttgcctcatttattgaacaggttggatgtttgcattagtgttgcgtgcatgggtcatcatagcggggtggattctgtgaattaataagttagagaatttacttggtaaattctagatctgcttattggaagctcagttatataggctcatggtccaatactagttgagacaaactgcttgtaag

SEQ ID NO: 261435 - DNA, 505 bp, Cannabis indica
tcggtttggtcggtttttttctatataaaaatttagaattcggtttttggtctggattggtgtaatccgaaaaccgaccgaccaatccagaacttatcttaaaactgaccttttgaatctcggtttggtcggtttaaaccgcctaaactgaatttctttttttgttttctttataatatgatccaatttattttattattttacattttacaaatataaacatacaaattaattattcaaaaaattaattatcttattcttttaactttaatattaataaaacaataaaaatatattattaataactacaatataaagcaaaaaaagtaaataaattaatatatatgtataatggtcggttttagttttttcggtcgctttattaattaaaaataaattaaccgtttagtagcggttttaaccgttagcgatttttcggttttcggttccaacggtatttggtaagtcggtttgaatgattttttttttgatttctggattttat

SEQ ID NO: 261436 - DNA, 540 bp, Cannabis indica
gtaaaatattccaaaaaataattaagtaaagttttaaagggaaatttacatggtatactaacttttgtcatttttttacaaaaatactgccaggcggtagtttttacttttttactgtgtttttttataagtttcatactgcagtatactgtgttaagttttcactggtgttctactggtgttttactagtgttctactgttgttttgagttgttctgctttgtgttttactggtgttttataaaaacacagtatttttgaaaaaatttccgtgtgacagtatttttgtaaaagttaacccaaattccagtatttttgtaaattggttccagcagttaatattacaattaaacccaaataacttaacttctaaaccctaaaaaaaaaattagaatcatatgaacagaagaaacccacatcgatcgcacctatagaaaatagaaacctaaacccccaacttggttgagttgtatcgacatcgtagctatgaaatctcaataattaaaaaggctcgataatcaaagtagaaattatcaagta

SEQ ID NO: 261437 - DNA, 1951 bp, Cannabis indica
tcttttttactatttatatacatatatatttttgtgatggtctactactattaaatttgatatatattagttaaatttgtttaatcaagtactttaattatttgttttgtattagctaagcaaagactggttatgtaaaactatacctttataatagagtttaattatattttaagagacacatgtaaaaaaggtaattagttattttttttgagtaaaaagtactccaaaacaacagggttcaaaaaaaaaaagtcaaggtatatatacccttctaaatatatataaatatatgttttgtaacagcaattaaatatctgcactacttcaagtaccctgcattgcaatgatgtgaaaagttctctgattacacatgatacgtctagtagtattcattaattactagctagctatttggtcagtaaaaagtactaatttcttctttctaaacttttcacgattgggcagtaatctaggtcaataggaaacaaaagatttgccattataagtcttcaaattaatatgaattaatatatggtacttatagctgcaatataatattatatgggttcattgaaaggctataagaattgtattgtattaaataataaataatattatgttaggataaaataatatattgtatgaataattacaaccaaatttttttaatacaatataaattgtattatttaatacataacaaatagtttgtactcgcttgtattataattacaaaggatttagagtcaatcccaatctctgacctagagacctggacccgtacataggatctggacttgcacctgtactgggaagacccaaaccaggactcgtacttgggatctagacctggattcggacgtggacctggacctggagctgggactcgaactcgaaacgaacacagactagactcagatccagttgctagacccaatgagacccgaacttgaatctagacccaaacccgacctgtaatcggtgttgggatcaagtttttaaaaaatatattataactttacacaatctattaatataagtcaataccaaacatatagtattgtattaaataataataataataatacaatacaatacaacacaatctaacacaatacacaatacaataaggcaccaaactagccctatatttattagggttatttgtagcataaataactaagtttaactctcagttacaaataaatacctaagtttagtttttggcagacctaagttatatttctaaaacttctgtaggtacctgcccattaaatgtcaagtcattatccacgtgtcattttcttattggtctatttaaactaattattttttaaaatattaataaaatttaatgacttgaaccaatcagggattgccacatggtaatttacctaacaattaatagctgggtacctacagaagttccaaaattacaacttagatattattaccgctaaaaattaaacttaagtatttatgccataaattactctatttattacgtaataaatttggattgtgcatgaaaaattgcctagagctagcttggccagttgtgctgtggggaaaagcagcatgtagttgtactgtgagaaaaagctgagctgattgtttgttaaattatattttaaagtgttgtgagttgttaagattcgatataatcatgatacgttatagtttttaatttttattattttctataatttttaatttttttctcatattataaatttatatgcatttgataaataataatttataatatttttaaattatagttttattacttataaaaaaatatagtttataaagaattctaagttgatatagtttgttaataataaaaataaaaatataaataatttttttaaaaaaattttaaaattatttattttcatattgttttccttcaaaaaaatatttttatttttgtaatatataataa

SEQ ID NO: 261438 - DNA, 555 bp, Cannabis indica
gtccaagtctgtgtttgggatcgcgtaccagatttaggtccaggtccgggtctcagttccgttcttggtacacgactgtgtccaggcctgagttccagtctcagtttgagtctgaggctaggtctgtggtcagttctaggtctaggtccgagtcctggtcacggtcctagtctttttcttgtcctagtctaagtccaagatctagacaccgactcttggtctctcacgggttaagatctggatcactgtcatgggtctaggtctggttctggttctggttcaggtcccatgtcccatttttgagtttgggttcaggatcgaggctggggtgtaattctaggtcccgaccctagttctttgtccctagcctggttccatgtttgagtctgagttcatgttcgggtttgggtcccgtgtccaggtttgggtggggatccgggttcgactcccaattcgggtctaggtctgacttggagccggggtcctagttaggttacggttttggatctaggtcaaatttcagttatgattccaagtccaagtcctagttccagt

SEQ ID NO: 261439 - DNA, 501 bp, Cannabis indica
gaaagagtttgtgtctgcacagtttgtttcttttggtgctcagatggcttcaatgcagacacagttttctactgtttttgccgattcttatgctaaggtatgttagtttttcaatggttgtttttcagtttttttaagttgttttatactaatttaaattatattttcaatataggacaaaggcagtgactcttccaatgatgatggtggaagtggtaatgaagaagattttgatttagatgaatctgaagaaactgatgacaatgaagaagagaatgttatgggtgatgaagaaggtgagggtagtgaaggtgaagagaaggatggtcaagctgatgaagattctgagtcaaaagaaaaaaatgataagggcagtgatgatgaatgcactgatagtgaggagaaggtagataagtagacaatgtaactaggttttagttactttgtgtggtttatttcgttgtaagtccgtttaggtagtggtcttgtaattctatgttc

SEQ ID NO: 261440 - DNA, 369 bp, Cannabis indica
taaaataatttccaacaagatgtccctccctttccggccgcatctgctttcggatcttgttagtctaattgcactgcaaacatggagttatgagttcaaaaaagaccagatccaggaagaagaagaccagatccaggacgaagaagaccagatccatgacggagaagaccaaatccaggacggagaagaccagatccaggataaagaagactagatccatgaaggtgtttgcttctcgtaaccagatccaggacagagaagaccagatccatgacggagaagaccagatcaaggatggagaagaccagatccatgaaggtatttgcttgccgtaagtagcgccggcatcatagccattgacgctggcaa

SEQ ID NO: 261441 - DNA, 584 bp, Cannabis indica
aaattaaaaaaaccctaaagttatacgaaagcgaagatcattgatacaattaaataaaacaaaaattctatgatgatgataacagaagcaagaatttgattaccttgaatgtacgaagagaagggattagggttcttgtggagaattgcttagatagaaagtagtaatgatgaaagatgaagggtaagaggcaatttataaatcaacttgaccgactttctctgatatttctttttttaaaaaaagaaggaaatggataaatcctaaaccgacttggtcaggccaaaccaaacccacttgactagggttaccaattatattaggccacgtataaaggatgacgtgtcttacgctccgcttacacgcaaagtttggaatattagttttgtcgagttggcctttccaagaccaccaattcctacggcaatgacgtcattcattgcctgtttactgggcttgggcttctagttaaaaacatttttgacccattttgagatttaggtgttactgggctgggcctcgttattaggtttagttttatataggaaaatttacaaaaataccgtcacacggaaattttttca

SEQ ID NO: 261442 - DNA, 2506 bp, Cannabis indica
aatatagtgttctttttattattcaacaaaaatagagagtccaattagtaacttttgcataatacatagtccaaaataatatttattctgtaaaaattttacaaaaaaatgtattttatgtaattttcctaaaaaagtaaagaattgaccataagaagattagaattgagaacgaatgttataagtgacaagagtagaaactgaaagtgtacaataagtgaaggaaaatttattaaaatttgagttttgtttgataaaattcattgtgttagtaattagtattggaagtacacagagtaacttgaacaataaacaaactaaaaagaatcttgacaagaactacaagtctagtttctaaaagcatctcatgtttaaaaaatagagctgccaaaacaagtgtttgtcagtgtgtggctcattttatggtgatatggcatgagaaatttatttctatgaaaatgaaaggtgttaaaataacttatcttttttattgaaaaaacctaattatgatgaacccatttcactcttttttagtgctctaatgaacgctgaagtctagccacggatatcttctctttctcccagcaatttgtgcagctgcacttattacagccacccatttttttctttaaaataatagattagtagcttgtaaaacaaatttaagcatcgatcataaactcgtttagggtaatataaaacttaaaatcagacaagagagaaagagaataaactgtaaaactgatctttattataattaaacagaaaattgattacatatatagaacaaataaaataaaataaaataaaataaaataaacctatttagttagaaagagagagaaagaaagaaaaaatgtccacaattacaattaaaataaaatcttctagaaactgagtaactaagaggggatcgaaccaactacaaatatcttagaaatttctatttcagagcccacctttcatatgcttgtagtcctcgtctccaatttacagcaccaattaatacttgacaatgaactcattcgattagcggcacttcaaagaaattctactgtggttaattcaggcatctaaaactattaagtaccaactatcgcagctttccccccgaaaattaaatacgctgggaccagggaaagctatcctacgaaagaaacaccatataccactcactactcgaggtcctttctaaaagcttctacatttggttgtcacctttgcggttggtccgaaccagctgctgctcctatagccgcggcgcttggtccagcaccattttcagctggttggttggtgccccattcccttccgattccaagggctcgagcacatgtacacttccatctgtaagacctagtgcaaactggttgggttcggatggatgtgcagcaatgaccagaggatagactcttatgctgttgaacattataaatcaatttagtcatatgcaaagaggaatggcaggggcgagtattgagaattttaagataataaaatgaacctcggatttgcaggaagataagcagttgcgttaattcgacatctcagtctgagcgttgatgctgtaagtacatctaaacttccatcttcaaagctaacatatactgacaggctatcacaagaataggtagcatgggtgattggaccactagcttctcgagggaaaaactacaatataataacatagttcaaagaggtaagtcaatccttaactaattccgtaaaactgaaaaaaaaaatcattagcaagaatactataatcgtagcacagtacctatgtgcaaataaatgcaaggaaattaatgctgtaatagttggtttacatgcaatatgatcaaacttgatgggaaaaccattacaagcataataagtaagaggtgtacctgcaaaagagactccagttttggtgcttcatatagagctatctgactttcatgaactgccagtagatgtatctgatcttggtgaaattgaactcgggtatctgcaggtgcaacttgtattcgccccttatgcaagaacttacttgtctgcttatcccatccatctgtgccccaaacacacaactgttggggaaaaaaatgtatattaagattaattgtgaatgcaaacgttattgaactatttatgcttcactcataacatgcagaatctaagtttattattacgaattgactatgaagcaagaaatgagttatgttcagacatgtattcccagttaatagtcacaagctggaaatgatttaagtatgaacaatgaaaggcaataaaagaatatcaaacaggtagcagccaacgaccaaaagatttgtatatcaagcatccctaacctatcatctgctctaataatactgctcctctcttggcttaactaacataccagaccatatacgtttatagattgaagtaatatttacctgagagtccgctcctgaagatacaagtacattcagggtgtgagaaaaggcaagacctgttatcctcttctgatgaccttttaact

SEQ ID NO: 261443 - DNA, 1814 bp, Cannabis indica
aaaaaatacaactatcacagtctgcagcagcagaatgtaattctatcactgcagaacacagtttagcataaacaaatcagaatcagaaatataaattcagcaaaaaataaaatcacttcacaagtttagactccctctaaaactttgccgcaatcctttgtaattcacttcacgaatctgatttttgaactaccatcaaacaacgaactccattcgtctttgatgtgtgagtacttgcttcctctcgaagtaaggcttgtacaagtcttctcccgaagacctttctcttgttcaatcaagttgttcaaagcgaccctaagactagtataagaacaaatacataagcactaaaacctagctgaaccactaggttctcacaaatagaactctctcatcaagaaagaaagatatgcaaaaaatgaaagcttgaagagttaaactaattggttgctctctaggttctatttatagaacatagcaaccctatagacagctacaaaatcgattttacagctgtataaactttcctaaaaaaaatcctaatttgtagcataagaatcgggtttctgtaacaacaaattataccagaatggaaacttgacaaataggtgcctgatcatgaacatggacttcatacctgtcaaaaatagtgtgctttatctaatcttatcaagacacaatcaaaaataataaagagaaagaggaaggttaaagtttccaaataaaacaaacttaagagatttctttttcttacaagaaatttccaaaacaagaaaattaatagctaaaaaagaattctttcatttgaaagaaaagagcaataaagacacaaaatcaaagtgaacaaatcagtttaattgcacaaggaaaacacataataaataaaaaatattttgacacctaaattgtcagaaaatggctttacaaaagtcattctaaaataacaaaaattcaattaaaaacataaaagataaagatagatgagaaagaatattgtttggattcctccaatgttgtcttctgctcctagccttcctcttatgttcaaaattggtgtccaagtacgaatgattaaggaaacctagctccaactcattttatagacaaaatttgagaagtttcccgttttttttttttttgcaagagccgcgacattggatagagagtcgctgctctctcatttttttgatttcttgctacgataactgatagtattttggccataactctctcgagattggacgattcaagatgttttagaaagctgaaagagatctcgaatttttactcaaagattttttcctagaagtgaataaatcatagtaaaaaatttgcttgaagttttaaactttattttcgatcacaaacggagtgtgttgaacatccaaaacttagaattttttaccattgtatcttaaaactttaaaattcatgctaaatctataaaattcatgttgaatctataaaattcatattatttagcatattttatctcaatttaatctacatgatatatttgaccattaaaacctgaaacaaaacgaaaacaaacgtaaacttgaataaaaagaaataaaaactactaaaataaactctaaaaatgcctaaaaacaaacctaacaaattctcccaaacttaacctttacttgccctcgagtaacgacgaagttaatgttgggattttatgccctaaataaaacccatttcaatgtaatctgatttgttatcaatagaagattagaaatcatttatgtttacatgtagtttttatgtttatggtttattgtgtacaaaatctgttaagtccagaacat

SEQ ID NO: 261444 - DNA, 605 bp, Cannabis indica
ataggaaactactaaatacaagttacccaagttaccctaattcttttacacctaatatacagctaatactctaacacatgtaaattgagtagatgacaagagcagatagtgaggtgcttattatcgataacagtgaagcttctatttgacttcaaaaacatgaagaagtttttgttgcacttatggaagaagaagttttaaagggaaataggaatacaactttcacaaagcaatcatggaagcatataaagaaagagctttatacacaagtgaaaagaagttacactaatttgcaactaaggaacaaatacaacttgttaagacaaaagcacaaggatttcaaatctttactgaaagagattggcataggatatagtgaagtgactggacaagttagtgcgccagatgaagtgtgggataggcttattcaggtaaaaaaatatttttcaatgaatttcattgcttgatttattttaataggtgttggaatatttatctttactattttatttcgtataggttaacaagtctgctaaaatttttagaaaaaagggttgtgtactttataaaaaatcatgcaccatttttggtgataccactgtaac

SEQ ID NO: 261445 - DNA, 3332 bp, Cannabis indica
atatttaaatagactaggttgctaaaataaaataaccaatttgatagttttatttagtatcaattagtattgggcttattcaattaataacaattatttaattaaaagttaaagtatggttaccctaatagaaattagaggcagaagacttgggctcttattcggtctcttaaagatgattattgtcttccttagtgtaatattggtgacttaaacaatagttgcttctcaggaggataagaagggaggtaatccctacccgaattagttggttgatggcttcactcaaactttggttaattttcaacttcatgatttttctctcttagactatcattacacctgaggaagggtgaaagataattggcttcatttgtttaattctaccaagttgtttcatttacaagtcattgtctcaaactattttcctattattttaaacctgactaccattaatttagcacccaaagttcaatattttagattcaaaaatgtttagctttgtgagcctctttgtttacaagttgttcgagatagttgggttctatgtgaaaatcaagtagtcatgggtaaattaaaattttttggggagaatttgatggtttagggtcatgattatacgaaatttttttaagatcgaattggcaaatgcaaaaaaagaaattaaaaggctgaaacaacttagagaccccatttctatctgtcagtatgaagaagctgagaagaagttggctgaattttttgttgaaaagaaggttttttctcgtcaacgttctaagaaattgtggctctgagaaggcgactaaaacagtaagttttttcatgaaaaagctacttctcgtaagaaaaataatacaattcaaaagcttcaagattctttggatgtttaggttaatcgggactcgagcttatttaaggtggtgaccaattatttctttgatatttttactttaagtagccagttgtggattgtattagcccttcagtttctttgcaaaagaatttcaaattaactgctcctatttctaatgaagaagtcaagaaggcatttgtccatatgcaagcaaaaaaatctcctggtgcaaatggaatgatacctggctttttattagaagtgctgggatattgcgagcaaggaggctaaataattatttgcatcttcatatgtgccttgtgggctgaataataccaatgttgtgtagattaccaaaaaaaaaaataaatgtcctaatatgggagatttgaggccaatatctctttgtaatgtcttatataagatcatttataaagtgattgcaaataggctgaaaatcgttctccttcaagttatttcagataaccaaattgattttatcccacgatgattgatttcatataatatcatgatttccttttgatgttatgcattacctaaagaggaagcgacaaggtaaaaagggtctcatggctttaaaaatggatttaagtaaggcctatgattgtattgagtggagttttctccgtgctatgatgttgaatatgggttttactcagcgtttggttgatctcatcttagctacaatttcttcagttcaatatatagttgttcgtgatggtcgagctttgggtccaattattcatcaacgaggcattaggcaaggggatccaatttcccttttatctatttcttatttgtactgaaggactctcttatttaattaagaaatttgagctgaatggagatcttaaatgatataaagtggttaatggagcacctattatttctcacatgctattcgttgatgatagctacagttattattgggctaatgagcgtgaagcttccaatattattcgtttactaggtttgttcgaggttgcctctggtcaaaaggttaattatgggatgtcttccatattttttttagttctaatactctggaggatgctcgacacagagtctaggaggacaataacagtttttatcttggccttctctgtattatgggctaaaagaagattgctattttgagtttcttaaaggataaaatgcaaaaaagaatcttagttgggaggggagatttttgtctaaggcgtgaaaggagctacttctaaagactgtggcccaagctcctcctaattatgtgatgttggtttttattttacatttggacacttgtggtggttggagagaatgatggcaaaatactagtggaaatccaagtcctctagttctcgtgggttagctggatgagttggaatcggctttgtcaacataagaacaatggtggccttgggttttgaagtcttactataaccatgctttataaggaaagcaaggttggcgcttgttgttgtctgaaaattccatgattggtcgtgtttacaaagaaaggtgttatctctgtggttcgtttttgttcgctaaacttgggaataatctaaattttgtttggtgaagcatttatgagtcatgagatatgattaaagcagatgcaaaagtgagtattagagctggaagttctgttaatatcattggtgatccttgacttccccatgaaactaatctttttattacaatttgatcacccaaggttgattaattttacagtgcaaatcttgataaaggtggggaggagggagtgggatgaggaggttgtgcaggacctttttgttgctcgtgattgtaatctgattctcggaatcccaattgatactgttgatatggatcgttggttctagtctaaggaaaatttgggtttctatccagtcaaaagtgcataccatttcttacagcataaaaaaaacatgtctagaagagtattttaatttctaccgccacctttggaagctaaagattcttcctaagattcaacactttctttggaaagctttaacaaggtgtttaccaactcgtgttaagctctttcaaaaacatgtacctgtcgaaaccagttgtttattttttcatgatgctaatgagactatttcacatgtgttggtgaactgtccttttgccatctcatgttgcaatcttactggtttagataccaggcatatgaattcggtggagtttgatgtatggtttaagggtgttgttgagagaggtaactctactctcatggaggaggctactgttactgcttggtccatttggaaggctcgaaatgacctcttatgggactttaagagcatgtttggtattgttttctattttttgttttcaaaaaagcatttttagaaatgagaacaaaaaattgtttttgaatttttcaaaacacaaatcgcgtttggttagtattttcaaataataattttctgtttttaaaatcaaaaaacagttttttagttat

SEQ ID NO: 261446 - DNA, 2457 bp, Cannabis indica
tagtttacaatgccgaaaatagaattcttaatgttccaatttactacgtgcgttcaaaaaacttctaatgtattttcagtactgtaaactatttgaaaattttcaaaaatttacaggaatgatgttgcaagcataacaaagccgctataaaaaaaaattgaaaaaaaatattctgacatatgttttcgagcacgtatgttgactaagaaattataataggagattaacagttgtactcttccatttcaatatcgggtctcatatattttattttaataaatattatagagaatcgctaaccaattatagaatattaccttatagtggtgctaatcacattaatgtctcataacaatttttttatcaaaaaaatagagtttaataccattatgtttgattatatttttcgtggacaaagaaaaaaaataattaaaaaaatcgatctaatcggatgctattaattgaaacaatgacaatcaatcacacaatattaagctgaatgtaaatcagagaagatcaagatttacaagtttttcctgcatcgaaaatacatttcgaccaggtagtcactacaacaaaaatgactattagcgacgaatgtattagcagaggagataattcgtcgctaatgttagggtcttagcgacgaactagtgtttaaagaaacaaaaaaaaatcttctttactattagatgcggggtccgctactattgcttgtcgctaatagtttacctgagaaaattcctagtctttttatttcaatttttactagcgtcggagcatagtagcgggcccctccggcaataatattattttattaaaaaattactttgtaattaaaatatctatatatattattagcagcagagcaatagcgacgggctccgcactaataatttttatatatttaaaaaaaactaatctgaattcattttctctcaattctcaaactcgctcatttctctttctcttctcccttgacggcaacccaccccttctcttctctattcacagttgctcgcccttccttggccatccatccctccctcatttttctggtcattttgtctccgtctctgccccattctcatttacgttcttattctcgtccactgaagcactcaccggcctcgtcgttctagccacactcccaatctcgcgccaactccgttttgtggtgtcatccccgtctcatggtggctgtccacatgtttgtctagtggtaagtagttttttttacttatatacaatatatataatatgtacaaataaatatatatttatgaaaatataatgttcaatatatattttattaaaatcttcttttatttatttagggttttatttttgtccggctaccacgatttaccgtaaattgtcggagtacactttaggccactctctacttaaggtattttgctttctattattgtatttatatatattataattaaaattttgatggtttattaatttataatattttgcagattgttaaaagtaattgattatcaattctcagcttaatttttgaattaacaacttgaaaaagtagattcacatttgcgaaaagtaattttttttctagatttgtggcttattttgtttattttgaaaatatatgttatctatgttttatgattatttctaaaatttaaatgtatgttgatttgttcggtctcattcttctaatttatcggaccgccacctcaacttgacttcaatattagtatgatattgtccgctttaggcttaagtcttcatggttttttttggacacctttccaaaatacctcatactaatagaatagtaatcgtccttatatacccataatctttttcatttctagcaaatgtgggacattggttgcacactcaacaatcatctcctcaaaccaaggaccacatactcgtggtctcccctccaacgaaaccacccttgatgttgttatcaacttattaccaacagaacttgccacctgaccataaacattgccagctggaagactttcgacacaaggcaccaaacacagatctccatcttatattatcttgtacgccacctgaccatcataatatcaggtagactttcgatacaaaggcaccatacaaatcttcgatcgcgaggtcatcacattgagtgtttctcccacacatcacaaatgcaactcactatcccagtgctcgtaaacctttggctctgatatcgcttgttgggcatcgttcttccaccttgttgggcctccacttcaccttaactcgcacattagtataatatttttcactttgggcctagtcaggttgcgtatcctattggtgatagcggcaggacaagctggttttgctagtggggaagtaatgagtacgtggtccttgatttgagggaaggtggcataaggtggtttctattagagattttattacaatggaagaaaatcaagacattacaactctatt

SEQ ID NO: 261447 - DNA, 713 bp, Cannabis indica
gctttgtattttctgctggttttgctaaccacgctatttttgttctgtgtagacatgtctcggcagatgatcgacgctttaaggaagaggatgagcggaagctctagcgcctcccttccggccaagaagtctaagggcgaagaggggtcttcagagaagaggccttcttgagaggttattgacctttctgaggagctgactactgcaaatccttccactcccaaatctgccaagtctaaggagtctgggccaccaacatctgggtccgaactagtcaagaggatccctgagcgggtgcaggcactaactccacccatgcccgtgctgcctgaggccaagaagggcaaggaggtgatggctcactacatgaaccggctggttcctgaggtcggtgagcaactggctggtgctgacgactcatctctggatgtgttggtgggcggagtcttgaaggagcttaccagggttagtcttttcttttcgacacttcccttttagcttttcatacttagctccatatgctgacttttccctttatgcaggctggtttgaagttggcttacacctactctcgggctaaatttgctacttccaagagtgcggctctgttcgtcatgagtttggtgattccaacaagaagctatttgccgctgagaagaagatcaccgtgctaacaaaggacctcgaggctgctgatcgctttgaggaaacca

SEQ ID NO: 261448 - DNA, 491 bp, Cannabis indica
tggcatttcctctctatgtgtttgcttctctcgtgtcttcgaggctctttactgttggctatagcacaagtgttgtcacaaagtaaaaccagtggttttcccatttcagaaaaaacaccaagtcctaagcagaactttctcagccaaacaagttccttagaagcctcagcggcaactatatactcagcctccatggtagagtctgatattgcggtttgcttagcgcttctccaaacaactgctccacccccaagagtaaaaaccatctcagatgtagactttctatcatcaagacaagcttggaaatttgagtcggtatagcctacgggatttaaagcaccacccttgttgactaacacataatctctagtacttttcaaatattatagaatatgcttaactgcagtccaatgttcctcttttgggtttgtctgatacctgctaacaattcctactgcatagcatatgtcaggtctagtgcataacattgc

SEQ ID NO: 261449 - DNA, 893 bp, Cannabis indica
aaaaataaaataaaaaatcttatcattatattttaaaaaatgtgtcaaaaaaataaattaaatgtatgtatctacatctaccaaacaacacacgtacaacaaaaaaaaaatcatcaggaataagttaaaaatatacaccataaaaaatactcataaaaaataattgttcaacaaaaaaaaattatgaaaaccacttaaaaataacataaaatagcaaaataaatgcacatatatacaacaaaaatattgtgtagaataatctgaaagtatacacgattaaaaatgcacataaactaaacaacaattttactaaaaaacaacagaaaaaactataaacacttaaacaacaacataaaaataactataaaataacaaaaaaaacagttataaattaacagaaaaataacaagacattaatcttgttaaaatatttgaattatccataaatttactctaaataaactaagtgtatatattatttttattaatcatgtaaaagataaaaaaaatatatgatgagtgctcttaatttttttgtaagaaagagaaagaatgttaaaaaatatatgaaaaaaacaaaagtaaaaaaaaaatagtaaagattaaaagaaattaattaatattttttttataaaatgtgattataatttgaaatagttagagtgagaatagtaagaaaatgaaaaagaaaaaaaataaatgtttgtattttattttaaaaaaaataataataaaataaaatttgtgagtacaaaagtgttaaaaaatgagatacaaaaatgtatatatacttatatatatatatatatatatacaaagaataaaaaaataaaaaaaaaataagtttaaaaataaagagagagaattagaaaaaaaatagaaaaagaaaatag

SEQ ID NO: 261450 - DNA, 1572 bp, Cannabis indica
taattgaactatatttttacaagcagcactattatttggtaagaacgctcaaagttttttaatgttactatgcagttactctgatgactaacagttataaataaggtacctcactaaattcttggcggtcaaatataagaagctaaagttattttctatatcctaatatacaacaaaataacttgataatttaggaaccgaaataactatttctatatctagatgtcatggaaaaatctagcagatcaactaaataccttacacatcaagtgcataaagacactagaattctcttttgctatataacttgttaggtccttttttggtaatttagttgtcaaaatattttttaattaatgtgcattttattgagcttttaaattgtttttattacattgattttatgtattttattgctcttttatatcttaggaaagaatcatttttcagctggacttttctttgtttagaaacttcttgtaagagaagaaattctattatggaaagttgtctaattttgggacacttgactttccctttttctaattgatgatttcaatttcgcctttattagaacaaatcaaattatctttatttggcagctttgaagtccaaattcgtaattttgattcaatttagaaatagtttcctttctggtcctgatctgctactacgaaacccgattctgatgctgcaaatcaggaatttttttaggaaagttttgtaaatcgtttttgttcctgtctctagggttgctatgttctataaataggacctagagagcaaccaaacaatttcatctcttctagtctcatattttcatatctttctttgtgagaagagtgtttcatttgtaaaaacctagagtgttcaactaggttttggttttcttattatgatctcatgctattcatagaataggtgaagagaagctttgaacaagcattggtcttcgggagaagacttttctaagtctcatttcgggagaaagtgagcatatatcttcgggagaagatttgcttaagccttacttcgggaaataagcacacatcaatagctaaagggagttcactacttggtgtgtttcagagatcagattagcaaggtggattacaaagggttgcggcaaatcactagagggagcctaaatttgtttaagtcaattgcttttgtaatctttgatactttactaattgatttcattctctgggcgtggccccgtggactagtagtgtttgaaagaaaactgataccacgtacgaatctcttgtgtcaagtgatttaattttctgcaattatttttatattctaccagttctgttttgtctctgcaaaaatagtttctgcagtatcataattacttattgctgctacagacgtatacagttttacatacaatatatttttgttttaattattggcatttgcaaaaattagatttttcataactcatgcaatttaacttaagcttagtcttttatttatatatatatatatatatactagcaaaaagttacgtgcaaggcacgtatattaaattttatgctagttttttctatgttaattgaaagt

SEQ ID NO: 261451 - DNA, 5662 bp, Cannabis indica
gataaaaacaaaatatactcaagtttgttccctttaaatttagtttttataaaatttaattttttaatgtgtaattaaattttctaataaaaaataaataattttttatatcgcttaattagttttaaaattttaatttattttcaattttcttaatcattcaaaatgagtttttcttaagatctaaattatttttttaaaatttactaaaaaaaataataaacatttcttacttttattttgggggtgcgatttgatagttatgaaaatttagggaacaaaattactaattgacaaagatacgtcatcataaaatatgggacgtaagtcacgtaacctaacagaatgattaaatttctataaatgtaaaaattcaaggaaaatttttaacaattcatatattttaagggcccgaatcaatattatcgaaagcttaagggacaaaatacacataaaaaacgacaaaataaaaaacaaacgacatgttgtgtgtagctactagaaagtgggttcaacagacaatacgtgttaccacaggggctgttctggaaatcaagaaaaagaaaaatatgagagagatgaaccaccatttttagctctcccaatactcgccgccaatttcaattttctcctcaggtaataattttatttattctcttctacatattaattttaatttactcttatgagttttccatttccatacaaaaatctacttaaaaaaaaatattattagaaaagaaattgaaaaatttcacagcggaagatctttatttgcaaaatatatatgcttgggtcgatctagatgatgttataatttctattcattcttaagtgtttgtgatttaatatgttgtttcatttcttatggttcgaagttatggattaaaatagggttttacttttgctgttcttcattgactttgtaattaaattccttgctttgattttgatttttgtgtgtggacgctgttattgttagttcagctccgatattattttgattgattatttgtgtcaatattttcgtggagatgtaattgtatgtactcgtatgaatttacattaacctaattttcttgttttacatttagtgttatctaatttgtgaaactgggatgaaacttttaggttttgaattcaagtttcatgatatgagtttgggtgtgtattcaatacgtttacaaataagatttggatgattacacatgttttatatgagcatgctctcaagctactctgtttcttattttattgttttgcaccattgatgggattcacgctgtgaaaattggaatcccacttgctctagttctagtgttttgttggattttgagaatttgatacaatttgttgcaatttgtttcagtgaaacagtaacttgactggtgtgcattcggtgtgcaaagagttggcttgctcgcaagaaaatgaagtaatttactctttcttctttgcttaaattattatatagacttaagtcctttaacattaagtgataaggaaaagtgtatgtaactttggggttgcattaataaactgaaccatgaacaaattctctcagtgacagttccttgtctgtgggttggaatggaaatccaaaatggcccacttctagaagtgagaaggaaaacttttggatgcaaattcaactcaatcaaatagttaatcttggagattgcttcacggacattatgtgtctgaatcaacttaataatttccagaaactgttggttagtgctctgattaccaaaggtcacctctgtggttatttaactatagccgtcctacctttcacggttctccaaaataggacacgaacacttggcagtgcttcttttctgatgtgtgcgattagcttgctatagataacaagtactattagtttctaaatagtttagataccaaattttcaataccattgttttttttattaatttgtatgtagatgtatatatatatatatatttatatatatgcacacaagctagagtaccatagttttactctttcagttaagtctttctcattcggttggaatattttgtttggagttcatatgtgtattttctctcctttcctcacaaaaggaatcccatgcttaaagtgcataaatagactgatatttaattattttatagtgagaataacaagggacgggtacgatgggacgaggctaacttgggtgaaattgaagcaactaaacctgtgaggcagaaaattactgagccgaagacaccatatcatcccatgattgatgatgatgatggtatgttgatttttatatgctatacgtcttgcaggggactgacagatttatttatgtgtatttctatctaattggttgctggaaaggtacattattttttcaggatttgatgatatttgatcagttaattttttaattaattggctaatttcaggttttaatggtttccaattctggttcttaacaatattaaaattaattcttcttattataggatctctatctcctataaggaattatttcgatgaaagtgttcctgatggcgttgatgcggaagcaatacgaactgcgttgagtgatgtagcatcatcaagtcgagagactacccagagatccagtggctggacgtcatctgatgacgaggcagatgctatggaacaggatgatgaaggtctctttccttacccagcatctttcaactctctttattcatccaaatttcgcacaacttcttgttctttgctaatcttatttccctttctcgttcagtcctttactacatttatattatagaagcttagactgatttgaacttgaaaagtttaacaatcacttaattagtaaaacttttttttccttcacatattttattaggcttgttaacttgatcatgttcaacgaggacagtcctttctattgttattatagttttctgtataattgaggaactctagagtctagaaattttattgaaaccagtactgtaactgtgtgacaaaagatcaagaaaaatggactaaaatctaaatataaaagatggattgtaaattagttgcattcacttgaaccttttgttggtttcttgtgagattactacagttctcaaatatttcattgtaatgctggacttttacagaaaggaattgtctgatttaatttacagctggaactctaacgtgcttgctcttcttactatctgcagatcctgaaacagataaaaatggtagaagtttcagggagcaccggagagctcactacgacgaattctggaaagtaaaagaactccggaggaaaggttctttccttgaagacgaagaagaggacgaggcagataaacaaaggagaaatgctatgtcttcatcattagcggccggtggcagtggtcatggtagtggtgttacggacattgacattgatgatgaaactggtgctactttaaatcagaaatccgttggtgctccggttaatggagtgtgagcaaaataggccctggaaaagacattttaacagagaactttctattataaatttgtaatgcttttggaaagtgtcctatgaatgctatcttgtatacaaatagtattgttctcttataattctcaatcaacaatgtttcctcagactattccataatcttcctcttttaacagtcttttataaaattccccagatggagagagggagataacagatccgacaagacctcaattatctctgacaatgttatttagactatgttttcttttggttcttattgcctagtttatttatcctcttaataaaggttaaaaattgttattcgacaacttaaataacccataattattaattactgaatgatcgactaaaagatattttctttgttttcaattttgttttattttattagtattgtttttttctgaaattaaaatcttttcgaattaggacactgcaaagttttgtttgtttttcagataactttagcaagatagtctcaattttttctttacaaaatagtggtcccagttttgtcttacttgatttttttttttttttttaaacttttcaactaaatgtagacttattccctaattaataggcctgcgtgtgtagtgtgtacgtaaatgtcgaaaggaaaatggcttcatccaattccatggcttcacttgccactgaaatttgcaaccagatatcctccatattctccaaacccagttcccacccaccagtcttggacatcttagtcaacgagatctcctccgccgtcgccagaaacggccgagtctttctgtacggagtagggcgtgagggcttaatgctcaaggccctatgtatgcgcctcttccacctcggcgtctccgctcacttcgtcttcgacatgaccacgccgcccatacacggtccacaggatctcctcatttcctcggcgggtccgggaggattctccaccgtcgatgctctctgctccatagccagatcgaacggcgctagagtgttgctgctgactgctcagccggatacgggttcttgcgtgaagcacgctagcgtggtgggccacgtggcagcgcagacgatggcggatgatgagtcggtgaataaatctcggccgttgcttctgatgggcagtgcttatgagggagctctgtttgtgctgtttgagatggctgtgtatcgtttgggtgaggaactgaaacagagccctgagctcatacgaaatcgccataccaatcttgagtgaggtgagagattatttgagttttcttttaaacttatgtatatatatatacatatataaatataattatatttatatgttggtttcagttccactttgtaagtatgaattaatcaaaagagtttgcagtggaagtttactattaattgatttttcctaataaaattgagtttttaagtaccaatgattgccccttagttgttcatgcatcttctctctttttactttttcattttgacatcacaaatcataaactgctcaagaaaaataaaataaaatgaactgaaaataactaatatagattcgtaaaatgaaacaggtttcagtgacagaccaagaaaatgaaaaacaaaagattacagcatgatagattggtgtggtgttagtatcaaaaaagagaatgaaattaggatactgtaagacttattaatcttttccctccttggactgtgtatttacaacgtaatatttatcaaattactaattctatcgtaagattgagatttgatagctatctagctatagagataatcagttttgtatgagaaagtgtttggtgtggtagctagaaaccatgatgatcaggttctttgggctcaaacgaattttgttcagcgtcctttctctcctctagcggctgagtttatggccatccgtttcgcgatcatacttgctgtggaacaaaaattgcagaactcgattacagattttgaaattcagctcatcaaatccaacaaaagagacatttattccttttgttcaatttgggtaggattaatctttgttttgagtatagagatctaaccttctagctcataatcttactaagtatgctttgaatgttaaagctactactaattgaaatggggttttgctcactgttgctagtcctttcgttgataaggacctgcctttccatttgtaactgcttggttgtttaatgaattcttcccttt

SEQ ID NO: 261452 - DNA, 1876 bp, Cannabis indica
ttagaacaatgtttacttactggtatcaaaaagaaaaatcaatctttacttaccaaaataaataaattgactaaatatggctttcttctttctttcttgataaaaatatcttcgaatttgatatgagatgtcttttggtttaattttaatactcaatttatgtttaattaatacatgccacgtaattgaaaacatttatctcttcaaattaaaacaaaaattgaagaaatatattaattaatttattatattaaaaagggtaaactaaagaatgagaaaaatgatggtaatattttgtaccattttggttaattttaatttatcaatttataaaatagaaggtctaatttataatttttgcaaaacatgttcaaaatggtgtttacctattaatattaaggttgattagatttttttgctccccaaactttgacatgtaccaaatcatgtctcttaaacttttcaggttattaaaaattcttcttaaacttttaaagttcgggcccgagtttcggttcgagactgggtctagatttggatcttgatctgaagtctaggggttgagtctgaattcgggtctaggttcgaggtcgaggtcgaggtcgggtattgagtctgaaatccagatccaggtctcggggccttttttcgatgacaggtgacaagtccgggtccagaatcccgaacccagacttgaatatgtgagagaaaatgtaaaaaataatatgagacaaaaaaaataaaaagtatatttatttttttatatttgggagggaggatttgaacttaggacctcctatttgtgacaagaaacgtagaaccatgtctatgaccacattttcatttttacttaaaaaaaaaaaaaattgaccaaacaatccactttaatttttaaaaactatttttgaaaaataatttttaagttatgaatttaaacaccactttagattttcggtttattttgtcaaaaaaagaaaccatacattttttttcatatttcattataattaataataaatactaaaatatatattatacttcaaaataattttttattgtacatttttacggaattctacatagaaattctcatagcaattaacggaacaacctaaatcgcaattaaaatctacataacaactcatagaaaaaccaccaaaacaactcaaaccgtaaatttaaaaaaataatatatataaagtaatctccaaatatatacataactaaaaaaaatttgtttttataaatgatatacatcaatttctaccaaactcatgtacatgaggtttttttttagtgtcatgagctgctaaaagaaaatgactaagactaaattatctcaaaaaatttaataaaataaacttgagaccatcataaagcaccattaagtataattataatgatgattaaacaatgttaaacatattaaagaacttgtaaactataaaagtatatatttcttactttaaaatcattaattaaaaccaaacctaccccgggaaaaaaaaaaacctaatccgctaaataaaataagtcaccaattagaaaaaaaaaataaataaataaatatggtttgattcgaattgttttctttttttatcagccctaataattgaatcccaatttaagtttaaatacattttaactacttcaacaaacttacacaatgaaataatactaataaataaaaaatcataattttctcaccaattaattttttaaaaaaataatatgtttttattctaaaagcatcttcaaatcaagagtgtatcaagaaagatgctcaagttggagtgtcttcgaataatggtcgagccctcctagttcagggtcgagctcagctactcgcaccattgtagagttgactttgggggat

SEQ ID NO: 261453 - DNA, 813 bp, Cannabis indica
tcttattgctattttccagttttcttgatcgttttcccattcccagtcgagtactcgccgttctaggttgaatactcgcacttgtcggttcactcgacaacaggtactacccccatcccctgatttcactatctgaagctaacttagctagacagttcgcatgaccgttcttttcccgggggattctttctactttgtagtccgtgaactcgtggagcagctgccggactattgttacatacgtggccattcgctcgccacgcgtttggtactctcctgatacctgatttacgaccagctgggaatcactgtagacttccactcttttggcccctatggccttcgctagcctcagccctgctatcaaggcctcgtattcgacctcgttgtttgaagctgagaagtcgaaccgtagggctgcctagagtcgaagtccagtcagggatatcattgccacccccgctccggatccattttaattggaggctccgtccacaaacactctgcatgtggggattgatggtgttggcgtattcgcggtttcctcggcttcattgcattcgctaatgaagtctcccaaggctttgccttttatggagattcggggaacgtagtgtaagtcgaactgacttaactccactgtccacttgaggagcctaccggatgcttctggtttttgtaggacttgccggagtgggtgattggtcagtaccttgatcaggtgtgcttggaaatatggcctcagtttttttggaggctattaggaggcagaaaaccagttttttgatgatggggttgttggaaatttatttt

SEQ ID NO: 261454 - DNA, 1436 bp, Cannabis indica
atcttctggcgttgccccacaagtttaaaatgccaacatggaaaatgtacacaggaagagaagatccactttcccaccacaagtatttcgaaatgcaaatggatttggaaggggtacgaggagatgtgtgttgcaaaatctttcctcctaccttatcagaaactgcccaacaatggtatttcaagttggcccctggaaagtttagttcatggaaagccttctcttcagaattccatgcacagttctcctcctctcgccaacttccgttgcatctgggagacctggttgaagtcaagcaaagactaggcgaacctctccgagcatacatcagaatattcatgatggaggcaacaaaagtttctcaggtaactgaagatggaaagttatccgcgatactggggggcattgaagtcctcggtgaactttggaaggatataaggaagaacgggccggtagactcaatgagtgactttcttgaccgtgtcgaaggcttcatcaagctcgaagaagccattcaacgagcggaagttgagcaaaagcttggcaagtcaaaatctccttctactcgaacatcctcccaaccttcccattacccaaataattcaaactcaagtggtaaacgttccaacaacaaccacaggcacgagaatgggaagaagggaaggttcaccggaaaatccgacaaactccctaagagaatcaagcaaagtacactgcattcactatcttgactaaagacgttgaaagtgtttacgtggcaactcagtccctggccccatattagaagccctagcccatgaagaaagatgtcagcaagagggacatgtcgaagttttgtcgattccacagagactatggccatgacactaatgaatgcaacaccctgaagcgagaaattgaattcgtgataaggaaaaataacccaaacttgtagaagtatgtcaagaccgatcagggtcagggaaacaacaataaccaagatttattacctccaccggtagatggacatctgcaagtcatcattgcaggcctacatattgctggagattcgggaaaagctcgggagaggtatgctcgaacagggcagcacgaacaaaaagaagttatcctggctgtggaagaaaggaagcccaaagttccacgagcaggagggctattacaaattttatgtttattacgcaagtgtacgcaatcaagtagtatctcactcaagtgaggtcgaaccacaaggaattggattaagtactactgaactatacttatgattctatttggtaaaataataagtttgcaatttgaaagtaaataacacagaaattaaagagaaaataaacgaagattaatcaagatgagagattagggaggtgaatcctgttgttaagctaccaatgttaatacctaattgctatccttatctcaatgtgaatgacagatta

SEQ ID NO: 261455 - DNA, 532 bp, Cannabis indica
aatttaaaaaacatacaaaaaattaataaaaaaaattattttctcatcatacattggaataatttttctttctatttcaaaatggaataatcattaatccactaaaatggtggaatgaccattctaatactttactatgcaaccaaacaaaagaatagaatgaagattgtttattttccattgtattgtattttattacctctaaccaaacgctacttaattgtataattggaggtaattgaaggtttcaattattctttttaattctcacactacaaaagaatctcacttttagtcccaactaaacttgtgactaaaagtgaaaacgttgtgactaattataaataatcattcctatgttgtgactaaaatgtccgtaggtaaaagtattaggttacaaaagttataatttgttgtgactaaatgtatttttagtcacaatacttgttgtgagtaaaactaaattagtgacaacttatatctatatattatgttttagtcacaagtaatattttattgtgactaaaagtta

SEQ ID NO: 261456 - DNA, 419 bp, Cannabis indica
gcgcttatgtatcttgtaatcctgttttagaggattaggtttttattattgattagcgtagcatgcctaatagttagggcgttacatttagggtttgatgtttggggttttggggtttggggttttgaggcaattttggcgtttggggttttggggtttggagaatcgttatgggaatgggaataggaattagaattggaatgggaatgggcatgggtcggggaatgggaatgggaatgggtatgggaatggggattgggaatgggaatgggaatggaaatggaaatgggccgggaaatgggaatgggaacgagaaaggaaatgggaatgggatggggaatgggaatggaaatgggccggggaatgggaatgggaatgggtcggggaatgggaatgggctagggaatgggaatgggaat

SEQ ID NO: 261457 - DNA, 1590 bp, Cannabis indica
caatacataaagcaagctaacaagggtcgtcacaagcaggtctttgagcccagtgattgggtatggttacccatgaggaaagaacgattcccagcccagagacgttctaaattgctacctcaaggagatggtccatttcaagtgcttgaaatgatcaatgacaatgcctaccgactcgatttacctggagaatataatgttagtgctacttttaatgtttctgatttgagcccttttgatgcaagtgaagatttgaggacaaatccttttcaagagggggggaatgatgagaacactaaggctaaagatacaagtaaagttccaattggcccggtgacaagggcacaagccaagagattcaaagaataactcaacaacttagtcaacagaattttaaaacaagaggagaccccagtcaacactgaaggagagcaaaaatttgtgtttttcatcaaaatggactcaatttagacccaagttgagcttatcacgttttccaaggcaattgccagctttccttttttaattttgtttcctttattttgtctttgttttatttggaaagttatctttcttttagtttccttttttcttggttgtaagtttgctatataaagctttgtaaatactttgaaaaataagattattttggaataaaaatttgagaggttttcttcttgagttcttaagagaactatttaaacttatcaaggagtattccttgtggcgttcaacctgacttatcaaacggatttccaccaccgtttgtagcgtcttccttaataccaaggttcatgcttaactaagcattgggtcgcggttgcacatccaaattttgagaattcttagaggctgccataattgctattgggtttcatcacaactggttgtgtggttcgtatcacactaaacactaaaccctaatccctaaaccctaaactctaaactctaaatgctaaacgctaaaccctaatctccaccctaaccctaaaccctaaatccttaatcgtaaaccgtaaacactaaattgaaaacccgaaccctaaaccctaaaccctaaaacacactaaaccctaaacccagatccaagctcattcctagacccataatcgaaaccaaacctagacaatgccccaaacctgaacagggactgggacccggtctcgaacccagaaccaaactaggattttatcagaaggtaaggctaacactggagctttgattagtctctctttcagctcctgaagcttgcttcgcacttatctgtccatacaaaatgttgattctttttaatgagcttggttaagggtgctgaaattttagagaacccttctacaaaccgacgataatgaccagccagacccaagaagcttctaacttctgtcactgtttttggtctcggccaatccctgacggattctatctttcctggatccaccttgatcccatctttgctaacaatgtgccaaaggaaggacacctgagatagcaaaaattcacacttcttcaacttggcatataacttatgttctcgaagtcgttccagaaccatccaaagatgttactcatgctcctcttctgactgagagt

SEQ ID NO: 261458 - DNA, 699 bp, Cannabis indica
ttattattattattttaaaatgataatgcattattattagtgagctaggtgagcgttttgttgtattttctaatgcaagcaacttcaagcttggaaggaatgaattattggaacatttagattactataaaagaatcggccaatatcatcatcatgaattatttgacaactattcaagagacccattttatctcaagtatcacctacccttccccgacagatttatttgtttgaatatgtgttttctcagtattgcttatattggtttctctattaatagtacaatctttttttgttagaatattaatggtacaattcaaggttgtacacgggtcgaaatttgaggattacgggcatacggggaaatactgtaagtttgaccgattcacaaatttcaggtccaacaagatatgggtcacaaattttgtttgggaaacttacagaaatactaaaatttgagttaacttttacaaaaatactgtcacacggaaaagttttcaaaaatactgtgtttttataaaacaccagtaaaatacaaaacagaacaactcaaaataacagtagaacaactaaaaaacatcagtagaacaccagtgaaacataacacagtatactgcagtatgaaacttataaaaaaatacagtaaaaaagtaaaaaattccgcctgacagtatttttgtaaaaaaataacaaaagtta

SEQ ID NO: 261459 - DNA, 414 bp, Cannabis indica
aacatacttgtgagtagatctaagatcctggtaaaataaattccaacacaaagacaaccccaatgacttgatgagggtagccctacccgctttcgataaagttttagccttccacccctgaagtttagtaatgagattttcgagaatgaagttaaaatcaacatctttttgtcttgatctaaatagaggcaaccccaaatacttaataactccctcaggggtgtctatacccaaagcttttttaattcctctcctcattcctgttggggtatttttgctaaaaaatattgaagttttaagtttattgaccttctgtccagaccacgaacaaaacttctcaagacaattccaaaaagatttagcttcatttatgttagcccgaccaaccaagatgaggtcatcagcaaagaaaat

SEQ ID NO: 261460 - DNA, 525 bp, Cannabis indica
aaaaataagattcaaaaatctattattgaaggacataagaaaatactaagcgaaagatgttacatattgagagagaagaatatatgatacacacataaaaaatatattgagtgttgttctctttagcgaccctcaagctatttctgcaattaaatttagcacataaaaaaatgtctactgtcaggagccacaaaattaaaataaaaagacagaataggaaagaagaaaaaaagaaaaaaaaaaacaagaagcatcacgaatacttgtatgcatttctcggagaatctgcaatagtagagttgccaatatatatgagtccaacagtgacatgagatgcagacagcttaaactctctgcatattcatagcaaaaccacaaagtcttaattaaagtgcttgaaaattaataaagttacttgtatgtgtatgaattatgttgttattttcttccttttacaataacaaatgacatatttggcacatgtataattctttctaacccaataggtgataggtgattaaattt

SEQ ID NO: 261461 - DNA, 4427 bp, Cannabis indica
catcccttaagcatgattgtgtgaaatcattatattgttagtgttaccaatctaacaggagggcaaagaagaactttccttcttactcattcattacaccaatggaaccgttgttatttaagagtgaaattatgctcatttgtgagaccaactgtggttaagatggttaactaattacattaaatacaattgtagattgattagatatgtgtccagactatgatgttgatgttagaactgcaaaatttcttaagggggttctatacaggaaatttttatttattgccaatctgtattggataagactctgggcattttcgtcattttgtaatgtgctttgatcatttgttaactctaattctaaatgctctttaaacagctctgcacccatctatttatttatttaaatgatgtgttgattgtgtataagaatatcttgataagtcttgtaaattgaatttcactatttaaattcatcatattggaatagtgtggttgagtgaagtagttagaacccaccccaaatagaaagaatgattttttactacattttttctaagagagtaaattgagttaactttcaatgttgctcactagttagtgagtagttcttgttttaatgttaatctcttttgatggactaatttgaactaatgatatacataaattatgtatcgaagtattatacataataaaatgatatttattgaaaaaaaagtgacgtcatatccttactctttatataagaatattaaagattattactagcaaataacccatatgaacaaaatcaattaccccaatattcttattcctatgtttttctctagcacctcaaacaaaagcttgcaaagtcttgaaataaacaacttgaggaatcaaatggcttattattatgcccaaaaaaagatcaaagactttattagtcaaacatggaaaagatattctacctatggaattttcattcatagcttagcatcatattattattatatataattttttgaaccaaacgagtagtaacaacaaacatgagggtccctcattgtggttaaaaaaaagggtgggacaaagggttacatgcatagcatgcactcgattgatcatgagtggtttccccatgtgctatggggattgagagtaacctctctctctcaacctctcaatcacctctgtctccctcctaaaatgtatatacttctttttttttctttggtacatttgagattttgagttgtgattcgattcaacctttaatggaccaaacatggtactagatttctaaacccatgtgatagtaatgtatacatataaaagtagcaaaacgttaaaagaggaatttttggttgtatatgtaatgtatatttatatatattcatgaaaaacaaagctcaaaatttcttgagtattgttctaatgtcgcattttgtttttaaccttgtttttcctttgcattgagacaagaaggtttttttttattaatcttaccatataaagatttaatggctcgtttagtaacatcatgttgtattgtattatgttttagtattatttaatataatattatgtttagtattaaataaatcccgaccctaaactcaaattccatctccagtcctatgtcacaaaccccggtctgaacctagaccccaacctcgaacctgggtccaaggtctggggcgatgaaattttcatatctttcttaaggtttgttactaatttatttttattaatgtaatttgtaaataatttttcggggcgaataagaaagcaatatgtgttttttcaattaaaacattaagtaaaaaaaaatactcactttataataaataatttatttactaattgagtaggatagaattggacatctttaaatatttacctatactcatttacacatcaaagttgtacttttacatattataataaaccttattagattcgagtattatcatgtttgttattataaggtactcacaaaagtacatgcaaaattttcattcttaataccattagaaacttaacaagttttaccttagcttgcatattattcgagaaagagaaaaaaaaaaccataaataagatcaccaaatttatgagttccccaacaacaactttgccaatattgttagttgagaagtcctttagttatgcacaagggttttcacttggtggtggtgccataattattgacctacaatgtgatggtgtggactgtcaacataataatttacccagtcaatcttaaaaaagaaataaccattaaacttagaaagaacaatagaggcttataataataaccataataatagtcttttatgaggcaatatatgtagatggagtggagataagtgattgagtagtagtagtagtgattaactagctaactctgtgtatctgtatattgtactgaaccccatttaaggctttgatgtgggattaaattgttaggtgtaggaagctgaattgggagagaaaacacttaactggttgttgcagatagatagatagattgggaaagataaagcaaagtatgtctaaagttgtttctctctctctttttttcactcatgaattatttctattttactaaagttgcttttgcttgtctatgttagttatatcaatctctctctagtgttttagtctttctctttcttatctcaatctcattcctttattcacgctgctctcattttatagtgtcatcacgtttttttctcttccatctaaaacaaaaaagaaaaaaccaaaaactttcccatttctcctaagtccattcccattcccattttctagaacaaacaataaaaaccaagtatccaagagaaagaagagaaaaaatgtctgaattttccatgtcaagagaggcaagagagtaatggtttgcctagttttctctttatgatctcttaaattttgtttctttgctctttcacaccctttatacttctcttacttcattttcttctcaccatatcttttcaaggttttttcttttctttcaccacttttcatcaccacaactcttctcctacttgctttcatcactactctctctcccggttttgtcaaagatgatggtgatgatgatgatgatgagttgtcacaatacaaggttggttatcttactttcacttaccaaactgttttggagaaattaaggtctaaagttgaagacaatgaagaagaatttcagcattttgaggagcttaatgaagttttcaaaattgtgtttgacacatcatcaacattggaaagtgttggagagaatattcctgctgatcttttggaggaagttgttaaagaaacttgcttagaggcttatgaaactcctgtggacaagtgttcaattcttgagtacaatgcttccgagtcaaaaaaagaagacaaagaagaagaagaagaagaagaagatgatgattttgttgatttcgagaaaaacccggttgagattactcaaatggagatcaaacaaccaagtttggaagcagagtgtactctgaaatggtgtttggaagaagagaaagtgttggaaaatatgtcacacaaaaaggaagacactaataaagaagaaaaagaagaagtgttcacaagaatggaatccaaggacattaaagtggatactaaagtaagtactattactactactaataactcttttgcaggtcttggtgactataatcatgatgatcaatctaataacatggaagaagatcaagaggaggaggatgaggaggatgattctcaaacaatggcttcaaatcttggaagttttggttcattgaggagagaaaaagagtggagaagaacattagcttgtaaactctttgaggagagacatcatcacaatgtggatggaggagaaggaatggatatgctttgggagacatatgaggctgaatcagacaagcatgttaaggccactaacaaaaatactattaagaaaggaaagaaaggtgtaattgagtacaatcatgaagatgatgatgatgatgatgattttgatgatgagactaatgggcaattatgttgtttacaagccttgaaattctcagctgggaaaatgaatttaggtatgggaagacctaatcttcttaagatttctaaggcattgaaaggaatgggatggttgcaccatgttactaggcatggtaagaagaggagcaattgagccaccaaaaaaaaaaaaaaaaataacacttttttacgttttttttttttccttttgttatgtttaaacctagataaatggcaattgcaaaatgtgtatcttggttgaatattatgagtaaatatgtctcttttctcttagtctctataagattattttcttttttgttcttgtttataacacaataaagaataataaaccatgcttagttaagtgctcgtgaagagtttgattcaagagaaggccaataaat

SEQ ID NO: 261462 - DNA, 813 bp, Cannabis indica
accttttggagataactaactctccgctaggtactagggttttaaatcctgactcataactatcatgcggtctatccaatttactaaaaattcgtgttgccacataggaatgagtggccccagagtcaaaaagcacagagaaataagagttgttgaccgagagctgacctattactactgaagggttggcttctgcatcagccgagttatcgtgaacacccttgctagagtgggtttcgctgcagtctttggtgcttcactcttgagttgggggcaatcctttttataatgccctggcataccgcactgaaaacacccctgccttttacaactagggcactctgggtaagtgtatcgggtctcagaattaccctgtcgattgcctcgacgttggttccctcagaacctcttgttctgacctgagcaactggatgcagtaggtgcctttcttttctgatcagtggccgagccactacctcccttactaaaacctgaggtaggaagggtaggacccccgccaacaaccggagtctctcgagattctaaggtgcacttcactgcaccctcagctcgcaatgccttatccactatatcagcataggtggtgttgtcatcggtagtaatcattaagtcatgtctgaattttgcatttgacctgtcaaaccttagcacaattcccgaggcaaaccttgccaagatcaaactgagtcgtgtattcagtaacactcatgttctctttctgagtcagcagagtaaattcttttcttttggcacttctggctgcctcgtaatagtacttggcattgaacagct

SEQ ID NO: 261463 - DNA, 794 bp, Cannabis indica
gggcatttggtatgattaaccgaaatttatctggaaatacatgatctaatgccaacccataactttaatttattttattaaagtttttggtcaaacctttctaaagagaaagggatcaaaccatcataactttttggtttaaacctgtctaacgagaaaggaaaatcaaaagttataaatgagatataactcagaatttgcgtaccaagctgaatattaacggttcgtgcaagatagaaaagtattaaacgagacatcgagatgtcttgataaaagtacttaaacctagtgaatggatagataatctaactattcatacaagcaatcaaaaatatacaaagtgataaaatcattaaacgtatattcaagtttgcttaagacagattacaactgtcattgcgaggcagaattgataactgctcgaaaatcaaaagtctggtagatcaataactacctaaataggaaaattacgagcaatggaaagaccaaaagtactctgcatttgatcaaaatatagttatttacattgtgaataaaaaggtaagcaaacacaaatatattaagttcgaatgaaaaagtacaaggcatttaagataagttggtttacaaacttgtctgtacaaaaatgtcactaggggaaaatcattaatctattttcctaaaaaaagactacaaggttatttatagaggacaggagagctcgagaaagaccgtctacacgtagctcgagaaagaccgtctacacgtagctcaagaaagactgtatacatgcaaaaggactcgacatctacata

SEQ ID NO: 261464 - DNA, 845 bp, Cannabis indica
tggtgcaggagctcgctgaaccatgagccattaagattcgagatagcgaatctacggtgtcagcgcgtgactatcttgtccacttcaggcatgcccctgacgtcgaggtcgaggagatggacgatgattgggtggccccagctcgagagtcaggcgaggaagaagaggatgcagaagggagtgggacggattcggtggacaacactcagttgaacgagcccttttcatgcgaggacttggtctctagggtcaccaaatcggatcttactacttttacaagactgaaccttctgcgacttgcttctttgtgacctaaacctactcagagggcacacctttcctttaccaatccagcaattattcccacagaggatgtggttgtctcaatactcattcttcgatgtggggtatcggtcccttttcacccctttatagcggccattctcaagcgttacgacgtgtccccttttcaactaacccccaacaattatcgcacagcccttgccttttatgcgatgtatatggagtatgtacatagggctcccacagtagaagagtttagttacttctatgatataaagagcgtaggcctccacaatggtttctactgcttcagcaagtgggccacttctgagattaatggggtagaaggcatggtttccaacatgggagattggaaatcgaagtggttctatattttcaaagttccagggattaggactgattttaatcgttgacctagtatgttgcatgtttcctgacttagtcattttttgagttattttgagatttcatgctaacttgctcttttttgttttcgcagatagaccagctcgacctgcact

SEQ ID NO: 261465 - DNA, 2079 bp, Cannabis indica
gtttttatattttcttatatacaactgacatctgcaaaaatacggtttttcataacatctcatagaatgatgcatatctacgaacttcctgtcatcaagaagttagatcagatttgatttgaagaaggaataagacagtgttacacaagataagacattacctgaacctcaagcaacaaacatttattgaagagaatcagagatgtcgattcaattctgacacccaaagaagaaaaatattagaacagaacaaaagccaacaatggaggaaaaaaaaatcacacttgttagcattcccacttaatacgattttaaggctcaagaatctggataacaaagctgaataaattaatctcaaccaagataaaattacttgtgatgactatatcagccctctgaatgattgactacaaaaaagacagaagaaaaatcagtttttttaagtcaaaattcactgcaaaatgatcatgacatccaaatgaactcgggtacatccaaatgaaaacctatttgggtttgttactttagggtctcacctttcattttaacaattgaagcaaatcaaactgcactttaaatcttaaccaatcattacactaattttttttagtgattttgggcacccattagtgatgttgtgattttcttcacaataacataaatagaaaataatagaaactacaaaaacatagaactcccaattcaaataaatttacaaggatagtgagagcgcttaccgattgtagtcacccacggcacaccttccttcaactgtcttgaagccaactacagaagagcatcatgtcacatgagagagtcatattttagaaaaacctgattctcacaatttacaaagataagaagtgaaaaaaactccttaatgttttattccactgcataactaagaagcatcattcacagccacaaggaatcaaaacgacctcttagttgtgtaaagaatggctcttgaacatgaagttcaaaatcaatagtcttcaaaatctgagaaaacccagaaagtgatttaacaaaacaaacgacagccatcaaagaatgcagtcatactcatactctaataaaaacacacattccattttgaaattccaaacccttttctcgcaccaactcattccactcttccttattcttcaagtcctcctccaatcctccggaatcgatccactcacacaaaactgatgctaaacgcttgtaaagaggatctgaggtttctgctgagtacaaaatacaaaataaataatattctttcttaaaataataataaaaaaaattaagacaaataagtatggaaagcaagaagagtgattaaagtgttttcgaattgattaccagtgatttgggaatgggaacgatgaagaaagctgggagaagcccaaatcgatgggggacttcagtatgagcttgaggagctcttccatggagtctcttagctccaccattgatgttcccggtgaggatgcttctccttccatatgtcctatattcgtatggaaatccagggaaaggaaaccgttgtaaaagtagaaattgctgagcttttctcagaaaacgaaaactacaacaacaaaactaacgttacaatgatttaaaaaaaaaaaagaagaagtgattcccaattaaaaaaagctcagattacttacaatctaatagtaaaagtacttgtgtttgtgctgatctttattttactttaattatgtggactttaattaatttttgaatggtagcaaataaggtcaaatcaattagtgttaagtgaaataacaatgtctatcaaaagtttaatgtggactctattctaataacataatgcaacttgttatttgaaagaatctcacaaggtaaatttaaaattttgtaggaataatttttaacaccacaaagatgaatcatgaaatttgtggctatataaatatcaatatatataaataaaggaaagcacaaaagatttttggtggcatcttatctttttttctaactatttttactattttctaaagctttcacattttgttatttggtggcatcttatctttttttctaactatttttactattttctaa

SEQ ID NO: 261466 - DNA, 1194 bp, Cannabis indica
aaatacttgtttttaaataatacacataatattgattgctcagtatcttataacatgtaatggtcagcagtctgaaactgaagaaagccctcagaaatctgcaaataagaagcagcaggtgaacttatagatttcagtactctactgtttttctgagatagggcctttaatttttagattgtcttcattctttacataactatatgtattggtgcaggcgaatcatgacctgctcattaagtgtatatcccaagatctaggtttctctgggggtaggcctgttgctgcttgtctgatatacaaatgccttctgcagtggaagtcatttgaggttgaaagagccagtatttttgacagtatcattaaaaatataggcacattagttgaggtaaattgtttgtttgtttgtttgtttgtttgtttttttctagtttcaactgggttttatggattatggtttatgtttgaaatacggggacaagtcagctccatgaacgtgatacagtctcgtcatagaacgtgatctgttaaactctattagatcttataactggattgtcatgacttgttactgatgcaagtttaattccacagaaggcccgtggtaacagtgatgtgctatcttactggctgtctaatacatccacattgcttttactcctccaacgcacactacgagctactggagttgccggcttaactccacaacgtcgaaggatgccaacttctctgattgggaggatgtctcaagtaagagaggtctttctgattttccaaacatttgaaaatgttcctagtttgtgctgttctagtaaagttctgttttcattgatccaaatttctagggccttcgtgcatctccacagagtgctggtttctccttcttcagtaatcgggtacttggtggagtggaagaagttcggcatgtcgaacccagatatccaactttgcttttcaagcagcaacttatagctgttcttgagaatatatatggaaaactgagagacaatttgaaaaacgacatcaccccgtttattgggttgtgcatccaggtatttgcaatgctttctcatatctttagtacttgtgttctttgttctctacctatcaaccaatagctttgttaccataatgttttattcttgacaaatcacaatttgaaatatacattgtatactcaaatggataatagat

SEQ ID NO: 261467 - DNA, 850 bp, Cannabis indica
ggttgttgtggtggcggtttgggcaaggtgttggccggagctttacgcttacgagattttgatttggtggttgccatggctcaatctcacaataataagctcgaaaatatctgctaaacaatgcacaactcaacagaatattagtaaccaaaagtaatcacatcaagttcagcagcatatcaactcattgaaatgacaataataattattcaacttgaatatccaccaatagactcaaaatcagaagttagcaccattagccctagaatattcaatcctctaaacatcatagagtctcaaaatgcaatcacccaacactaggtaaatcatcaataactaaaaatgggcagcatatacaaaattaatttcaacacatttgtgatttgaaatctactccaaccttatcacaacccaaatctggaaagagaaatcaagaaagatctcaccatgattgaaaagccatagaatgaagtctgatacacacaaacgaaggctggaaactcctccgatggtggtggaaagtggtttcgggtctgggaaaacgaaggctgaagatgaaggggcacttgggtcgggtgaaatcggagcaagggggcggagaggaaggacggcggcgactgggactgctggcgaagtgttcgtcggactggggggaagtgcgaaggcggttcggctgtgagacgcaggctgaagacagggagaatggaggggttcgggttcctggggtggacagatgcagctgggtgaggggttcgtcggactgggggggaagtgtcgaaggcggttcggtggtcgggttctggctgggacagaggcggctgggagttgtttctgggtagggtttcgaagg

SEQ ID NO: 261468 - DNA, 594 bp, Cannabis indica
tgttgaatctggattcttcacgatcttccacactatgattgaggtaccacttgctatgtgtgggcactactctatcactaaggggttcgaaaacaataatgaagaagaaggaaagagaggtggtggctaggttagatagaaggctcaggtttttctctgaaaggaataagatgcatcatctttttctgaagccatcactatctatttatagtatgccacatagggttaggtttgaattatttggcattaaaataatgaaaatattaaatgataaactctacataagtggccggccaaaggcttatggatatgggccccacttttgcaatttgctgttttatcatttatacatctcattttttcaaaaatgctaattttcaaattcaaccatttaaatgagaatttcaactatttaagaactaaaattaattgttaaataatatagtcatttaatatatttattaattagactagtcaaagtctcttagttaacaaatataccctagaaactctttttttgcagttttgcccttgtttagtgataaattcacaaactagacatagtctaactttagaattataattgattattca

SEQ ID NO: 261469 - DNA, 772 bp, Cannabis indica
atcaactcaaattttaataaaatgataattacataaggtactattttttgtaaaataattatatttttacgtttaatttttttttttacattttaaaagttttcatagaaacaacacaaaaataacaagaaaattacataaaagtaacatgaaaataacatcaaaacaacaataaaaaaatagcatacaaataacaaaaaatcaacaataaattaacaagtactacataaaaagaccgtatttttgtaaataaaatcaaaaaaatcgtaaaaatatttaaaattccatgaaatcgtatttttgtaatttttttgttgtttttatgtatttgtgaaataattcctttaataaaactaataaaatttaatgtaagcccaaataaaaaatttaacattctcctacttgggcaacaataattaaaatacatatatattatatatcaaaataattttgtataaaacgactcattggttgaacaacagaaaaatatttgtggccactttaaaaaataatagttctttgatagcatctcaacataccggtccaatttaacctttgatattgaactatgacaatcatatgtttttaaatcaacaaaagacattcataattacaaataccaaagtaattaaatcgacgtgtgttgtaaaaattaatatttatacgcaagtgcacgtaatcgacaacaagtaatataatgataagtaagatcgtctccacagggattgtaaataaaataaatgtaaaatcaactagttaacaacttaaggtg

SEQ ID NO: 261470 - DNA, 493 bp, Cannabis indica
cataagtatccaaagttttaggtttataagcggcataaacctaatgattttttttagtggcataagtactcaatgtttataaaactgtaatattcttccagttttatcagtacagtctctgtaattgttttaaataggacacatatgagactaaaattttaaattatttggtttggacgaaaaatatatagtatcaattacttctaaatcgtttttttaataaatttaaaacggaacctgtacggacgaaaatagagaaaaattacagttttataaatattggtacttatgccactaaaaaaattcattgggtttatgtcgcttacaaactcaaaactttaggtaattatgccgctatttaaccttatttttataaattaaagttcttcatcaccattcatcagtaatcggcttctttctttgactagtcattcatttttctaattaaattaaattattagcattttcttcggaggctaataaattttatttt

SEQ ID NO: 261471 - DNA, 523 bp, Cannabis indica
tcagttagcttgagaccttatttgtaagcacaatggtcaatacaattcatttacaaaattaactaacataacagatgacaaaaatatttttctaactaaacaatataactaactaccgaaccaatatttcattagtttacatcctctctcaaacaaaatggcaaagaagccatttggagtttgctcttcagataatggaaatgatctgtagttaattgttttgttagagtatcaacagcttggtctaaggatgggacaaatcgacccgaaagctgttgtgcaagaatttggtctcgagcaaaatgaagattaattttgatgtgcttgcaccgtgcatgaaataaagattagcagcaagtgcagtgacactttgattgtcaacccaaagcattggagtgtgagagatggggacttgtaattcagacaagaaagagatactccatcttatttctgcagcagtattagcaagtgccctaaattcactctcagtactatatcgagcaacaacttattacttctttgc

SEQ ID NO: 261472 - DNA, 887 bp, Cannabis indica
gccttcaaaaagcttattaattgatatttgagctactcgtctaggttcttcccaatgtacacacatttggtgaaatttcttgggtcgagaataacctcctccaattcttcaattggttttagcaggtttctttcatcttgaactcgaggatcaagatcttcatttttcttctcgtgttctcctgccaagatcgtcatcagttgatgaccggccttcctatgctatagctctatgcaataacaattgcgagccagcatctagtcgccacgcaccacccccacgccttttggggtttggaactttaaagacaagtgcttgatcaagctgattgcccctagtccgataagtgttgggcgacccagcaatatgttgtaagccgagggcaggtcgacaaccaagaattcttgcataacagtagcagttaaaggtgcctcgcctacggtcaatgcgagctcaattatgccaaggttggcgatgctatctccgatgaatctgtagagattcaccatacaaggccttaacttggccttttttagccccattttcttaacaatctccttataaatgatatttatcgagctcccattatcgattaacactgtcatgatcctcttattggcgagttggatggttattattttaaatatttaaataataattatcctaattatatgtcaaaataactcaaattaagcattattcaagtttctacaaaaatatctaggttatttaaatatttaaaatacaatttataaatttctaataagtaaaatgatataaaatagcataaatatcatatttcaaactgataatttataaacaattaaatatttaacaaaatatcaaatttttgaatttgaaaatataatggttagaatatctataaa

SEQ ID NO: 261473 - DNA, 595 bp, Cannabis indica
aaatgatacttcaataaactaatataattactgaaatgatgccttaatcatttatctctattcagacaaactcaaaggaaatcatcgtttcacttctaaaaacttatagaagctatagattccatatcgtttcaattgaactaccatgttcccaagatgtaaatatctgccagaaccaatggttagcttctacgaataacttgaagaacataaataatacaactaagttgaacctaagtatatcaggattaagatccatagacctaagatcaaccattgatattgacttagaaagataaaatggtaagtttatgatatcttatccaagatcaatatcggtcccttccaatgtatactccatacatccaatactagtaaaattttccaatgccctggaaatgacataacacttatctaagatgtaagtataccttatcgccgattatcatgtcagtttaaatccagtgaattgacaaatcatgagaattaaactctagaacatataatcatgattatattctactgtgctgacgacactataatcctgaacaaatatatataaatttatatattttcttcatagaatttatacatt

SEQ ID NO: 261474 - DNA, 734 bp, Cannabis indica
ggtataagaaatatattagattttatcaatgttattttgtacttggatcaaagtgttattattgagaaattatagcaatattaaaatgtaatatttcttaatatatattataataataatgtaataaaaaattatatgattacatttttaaaatgttattaaatgaatataacataagatgaatgataacattaaaaaattgttattattaaaaaattataacaatattaaaatgtaatattttcttatatataacataataataatgtaattaaaacatatatgattacattttgaaaatgttattaataaatgtaacataataaaccataacactaaattaatgttactatttataatatataacactaaaataatgttataatatactatttaataacatgtaaaaaatgtaattaaatgtcaatacttttaattacatggcctgtcttaacagttgctaaaatgttataaaatacatttaattacattttttcagtgttatcgtaaatgttttttcttgtagtgatatatcgctcaaaaaatacaacagtagaaattgttgcaacgagttcattcaacctcgtaacttgattactcaactattgtgtaaggtacgtaactacactacacgaaaaactctttcaatcggagagagcttgttattcccatctactaacaacaatttttggcgagttatcaaagaacaaagaagaactaacaatgaaacaaaa

SEQ ID NO: 261475 - DNA, 3041 bp, Cannabis indica
attaagattaagattaagactatgcgtactaattacttgtcttttccaagaattgcatagagagtctgtaagaaagtaagaatgagagcaatggaagcagcaatgactgaaatgagtgcccaagggtgcttaaaatagtcacgcgtaagcactcttcgatatcttggccatctcagatgacgatatttgtttacttcatttataagtgaatcgtagtaattctctttcacaaaagtgtcaatgtagagcctattaaacaattttgtagcatcttcaatattcaaccaactaacaatagccttacttttacaaagtagctcaatatcaccattcccattgatgagattgtccaatagaaaagcataagaagtgaatatgggctcacaatttgggcaacattgctccaagcttatgagatttctaaacactgtttcactggtctcttgaatgagcagttctgggataaccataacacctggtttggaacaaaatctaatatccaatagagactttgatgtactgtttaccttgaattttataccagaattccaaagatcagtagctgggggcataggcccccactcagacttttgtgtttgttttgtcagagttcaaaactaatgactcccttaacaaatcaagaatgtgtttgagtgtgttgttgttgttagaaacaagtggttcaattggaattggtatggatgagaaaatgttaccaaaaaattcaatcaccaatttgacaagaggctgaggcttgttctcatctgtggatgaattagtactagtttgggtaagatcaaatagagttttaagaaccaaccaaggtaattggttctctagtagtatgagatcatggtaaagaaattggagtaaacaaggcatggagaatattgggtcaccttctcctctgagatttggatacgatttcttacgaaaaagctctatgatgaagcaaccatcaagcaccaacatctctaagaattcatcttctttcatatcaattggccctgcataatactggcgagcttcactctgaatctcatgaacaactctggttagtttcttgaacaaaattggatttggttcggggagacgagtggcgaggtcaagcaaatatttttgtttgattttctttgtggatttgagttggttattgttgtggtggaaagggccaaaggaaaatgcatttggtgtaaaagcagctgtgttgtgccttgaaagtatgtttgggactttgaaaatgctgcatagagaaggcattacaagattagcagatacatctttttcaaacttgttgcttaccaatgtttcaacatttatgttaatttcatgtatttcttcttggtgagctctgttctccattgtacaatcttgcaaaaagagaaaaaaaacacaattaattttcatgagattttgtataaatgaaaaaaaaaaatgttatccattatgatcataccacaaatggctagtgaaacacttagtttattttgctagggatgtatatgtgacaatgatatatagggatgtggaatatgtatattgctttctcttcacttcactagtaaaagaaaagaaaataaaaagtagtatttggataatatgattggatcagttccactttagtactaaattatactaaagcaactggctagtttggaatataagagctttttgtacttgtgaaattcaaagagctagaaataatatactttacttctttgttatataaagatagatgtgaaatacgttgctttaacattatatgtgttgctttttatacctacttaatcttaatcacacaaaattaaaaataatatgatttccatttaaaaatatatataactaattgtctaaaaaaataaaacatctatagctaaaaaatattaatgtatacaatgtgccatgtgggaattgaatgaagtatttttcttttatatttttgaaaataatagatataaggtgtgtaatgtaagaatcattttaggtatataaatgagtatttacatattaaaaaattatttttcatatataaaatggggtataattagatcaggttttagataaacaaaatttaggaatgtagatataatgccaaattttaattgtttatttatctagtttcattcttctgcacttttgtattcctctcattctaattcttttaatcttcttcatcctttttttttcaattcattttctttaattttttgttttgacagtagctggtttcattttgatcatgatctgatgtacagttgttcttgttaagagattttgtcttcgtagttccagttaccatattgttttattaatgtagtagtaatcgataattatgaaattagtttttatgttcttagtaatatggtagctagtaactaataacaaaaaaataaaaataaattataaccttataaagaaatcgtgatggtaactacttaactaaatatgtgaaaagaaatcaatcatgatggtaactgattacttgactaaattgagagaaaaaaaaaatatcaattataaggataactagttacttagaataaactagacattagataaaaagaaaccaaattcaaaactaatgtaaaaagaaaactaatatagtgataactgtttatcatcgtataattaatagcttgtaactagtatcaaattagttattttactttgataatagtgaaaaactaaaatatgggaaaaaatataaattttttagaaaagacatattttggtatttttattaatatttatatatataaattaaatttacatatttttgtaaattttcttttaattaattcttcaaactacaaatataagtatataaatacaagatagatgtaaaatgacatgatattaccataaagacaaacatttggcacacaaacaacattatattaattaatcagaagaaagaaagagagattacatacaatcattatataaatcattgcttgctcactctcaccacactacactaactcttattttttttcacaactgaaccaccaagattataattacccaaaaaaacaacatta

SEQ ID NO: 261476 - DNA, 1101 bp, Cannabis indica
attatattaattttttaataaattttaaaaaaactaatattatatcttgttatatttaaataataattagtacaccacttttaaaataaaatttatttttattaccataaaataatttatggtattcacatttaaatttacacacaataaattaaaatgtacttttaacgtacccttaataaaagagtcaaatatataacacataatttgaactttattttcggcgtgttaaatttttttcgataaaagaatgtcttaaataattataatgtacattgtaattttataaaaaaaaaaaatggatccaaaaagaaataagactattcagtgtaccactttaaaaagtacattgtaattttataaatataattaataatataaatacataacaaaaaaaaaaagtacaaagcatgtgctatatatatgcagcagtaagagcatcaccaacgaggcttcaaatttggtgatgccgtggaatcagccctctaacgtagctgcaaacattacactaaatatagtactttgatgactcgttggagaaacccttagttttaaacttttgtaggtacatatgatcattatatttgactatatcctttaatatttattttttcattattattgttaggtgatgaatctgatgataactttttgttaggttagagaactaaattaagcaatgaatgatactgaaacgtgataaataaaaattaaatagcttgaaattaattaatattattagctaagagttgtgtagatgtttttgtgtttatttaaaacattctcgtggattgttaaaaataggtcacaacactacaatttttttctgatcaacacttcaaacaaaaaactactttagtgataatttctagttctaatataatttttttgtgactataaatatgatttttagacataacaaaaacttatttgtaactcatttaaaaaaaaacttaatatatgtgtaactaattaaaatatagtatttaaatacaagtgactgattaaataatattatgactaatttaattttaatcacaataaacactataaaaaatcttacttttagttcacaacaaaacttgtgactaaaagtgaaaa

SEQ ID NO: 261477 - DNA, 529 bp, Cannabis indica
gaactcatcagagagaactctagtccattatctgtcctaagtttctttattttcctcccagttttgttttcaatgagtcttttccatgtgacaaaagtgttaaaggcctcattcttagttttgagtaagaaaacccaaactttcctagtatagtcatcaactatactcatgaagtagcttgcacccccaagtgtttttgttctggaagccccccaaagatcagaatgtatgtaatccaattttccttttgttgtgcgttttcctggtgagaatttcagcttgcagcatttgccataaacacagtcatcacagaactccaacttctctcccaatttgcccttgagaatgccttgtttttcaagttcattcatacctctttcactaacatgacctagcctgaggtgccataacctagtactttccatgtcaggccccttaacaaccatgtcattttcaccaatgatagtctttcctttgagataataaattccattcttgagttctccttcatgactatcaatgagccttt

SEQ ID NO: 261478 - DNA, 2956 bp, Cannabis indica
atgttggatgtattgaatttttggacacctcatccaacatttgatctgatccgattggatattaaaaaataatattcaatctgatccgatcacaattggatatccaatatttggcggtcggttgttatcagattggattaatttatggacaccccttaatatatgtgagaataaaaatgaaaaatataaattttaaaaggatacaaatgaaaatatgtgggataaaaataaaaaaatatatatatatataaattttatggggacaaatataaaaatatgtaaaagacgtaaataaaaaaaaatattgttatagggcagaatgtaaaatacctacaaatttatacacagaatttatataaacaaaaaattaaaagggggcaaatgaccccacatgccccattttctctgccactggggccgaccttgattttaatttagccttaataaaatggaactaaaattataagagcccctcgatcgtgacactaaatcacctaaataatattaaaaactcctctaacatacgcgctactattttctttaccagtttattttagttgttacagtgcacggtatatatgtcggtatatatgtcgtgcattgtagcaacgatatatatatttttattattattattataatagtaaagagaatataattttttatttaaaaattaaagtattataataaagaatacttttatagtataattttcagttttgtgggtggaatagaaaaaaatgtaacactgtatttagtattagtgttagggctgaacatttgaactcgaaaacccggaaacccaccaacccgctctgatctgctgccgaaaaagaacaaaaaaaaaaacaaaacccgtatgatcgggtcgggtctcgcccaaaaatggtatatacaggtatcgggttcggacttttaaaatgcatattttggaactcaagtgtgcacctgaaactcgaatcaataaatatatatttttttatttttcatccttaaatattaaataaccctaaataagtaaaaaaaaaaatatcagtaaatcgattcgtccccaaacgatacggaagagaagaagactgaccaactcatccctgaatcgaattgatcagtcatcatctcatctcctccggcaagttctcatccctgcaaccagatcagttcgattcctctaagcaaggtgtccactactacttagtacttaggtatcttctttctcttttctttagttctttaagtttaaagttaaattatatatatattatatattgtatatgatttagatagttatatttttcaattttgagttcgttacttatctttctctgtatttttctatatttgtaatatcaaatatattactataatgctattagtatttgtttgtcattcatacaattgtttctcaatgaaataatctattaattgccttttttttttgttcgtcattagaagaccaagacccttacccatttttgttcatcatcgactcattgaaacaataaaagtcaagtgaagacacaagacccttacttttaattgttaaaaatagaaaaaaaaaatgatatttttaaaaacaaaatttcatttgggctcaaaaatctttcatttggacgtgccctattgcaatcctaacccacccacacaaaacccaatgtactcgacccaaaacctgccaaacctgaccaccctaaagtcgagtttggttatacattttaaaaaccgacattcaaaaatccaaacccgaccacccaaaaactgacccgtgtccagccctaattagtgtaacattgaattaatttgatgttcaatcttagagatgcctaatatttaatagttaacatgatgaatatagttaagtaaaatatcattttatattgcaagacaatactcccacgaagcatttaggtcattaaccatcaattgagttcgatataaaacatttgttatggtatcattgaggtgtacttatagccttacatttgtaagaaaaacacccacaaacaatgtggaactaatttcatttaattttctaacagttcctcaagtgtgatgtgatagagtttaacgtttgaaacctgcacaagatagataggtgttaccctttgaaccatcttgtgtaaacatctttactttattgatcaataaccacgatgtatttgaattgtttcctatcattcttgtaaacaatgatatgtcacacacaagaatttctcttgacatacttttaagtctcacttttatgtttgttgtggtcctaaaaaatttcctaattaagagatttcctaggaattgagccctaacctattcaattcctatataattgacccatattccctctcatgtaagcaatttcttaattgaactttgaaagtacccacatactctgcacaatatttcaacacatacaaatcattaaaaacataacttaacattttcttcacaagcaacttttacaaattttgtcctacttgaacctagatattgggatcaccaaccaactacattgtgttcactattcattcaagagctttagtttcatcctctccatgatttttcaacgaactatcaattctctatttaatcctttagttaacaaattcacaatattattatttgacttcacatagttaagagagataactcttaattaatgtagttgtgtaagatggtattatgtgtgcgatacgtatgttttgacttaccattattcataaactcaaattccatagtagatgtaactattatcttatccaattaattgtatacaatacttttgataagagctaaaaatttaatctaagtttatgattatgatgttcttctcttctactatttcatagaaaaaactttactttctttttttttttgttttttttttttattttttttttttatgaatcagagtttcattccatacaaacaattttttacacctaatgactatcaagagatgtca

SEQ ID NO: 261479 - DNA, 2428 bp, Cannabis indica
tctctctctctctctttctctgaagcctgaaactgaaatccattgaagcgtggttggctcacctcctcgcctttcctctctctcttggtcactggttcgccggagctacctcctcgcctttcctctctctcagctgtcctgttcctgttcctgttcgcattggtaagttctttcgacttttgtctcagttggtcttttgagtctcactgttataccgatttgattcttaatgatgtaatcatcttttattgacaagaatttcttattttgacatttacatgaaattgatgcaattgtttgagtagtaatttgttatatttaaaaataaatagccatccctctccactaaatcgttttctatagttgaagccagatggaaaactaatgatatgaatttggttatgatgaaagaatattgaaaactaagaaaacggtgttctctattctattttcatatttgaaaactgaaaataatgcctaaaaggcccttacttgtctgagaaagcatattgaaaagcaccatcttaagtagtatataagctcagaacttagtgccctattaaaatgatgtatatgaatattaaaatctcttttctgcgttgctggtatattttttcccagaataagtgaacatgcaagttttgatttttttatgtcttttaagattatatcatttgggattaatttttcctgtctagtgagtagaaaaaacatgaattatatcatttgggattatttttttttagaattattgatggtgaaaattgcaatgttgaatgtgtttttgagtttcattctttagcaaaaagctgaatattttgtgtagttatggacttctatcataatagtgatttatgttggaagcattcttatgagaatagtagacatagtatctattatagccaatcttgcacaagatctaaagtcatctttgctttttaattctttatcaagcatattatgagatttaatgctcttctttaatattatatggtttacagttgcctaaaactgaaggatgggtgagatccttctaggtatgcctggaccttgggctgatgattattgtgaaccatctgatcattatacaacaaaagttggtggaatccctgtgagtgttacacttcatctattagctgcatatttttgtgtgtaactgcaagatatactttttaattcgtttcacttgtttctgacataacaggattggcctcttcctaaggatgccctaaattatacacttcttgagtgtagtgtgtgtggaagaaaactgagtcttgttgcacaggtttaaccttctaaactatgtctttgtaattgcgatcaaaatgtaagcagcaggcgctaaagttcttttttttttaatcatttaggtttatgctccaatttcgagtaaaagcttgaaggtagaagagcgcactatttttattcttggttgtttgatgccaaagtgtgggagcaatcctcttaggttttgtgcaaattcattttcaatgttaccaacaaggaaaatcctactgttatggttttgcaatttcttgttataattattgtctcttgttttgtacagctggcgagcgcttcgtattcagagattaagtaaagaggaggattcaaatatcatgtctcgagaaaaggtcgagcaaggtgaatctgttacaaagatgaacttatgggaggatttggatgatgaaaatgacgaagagttggatctagaagagttgggtaaagcactttctgatgctgcagctaaggcttcttatgccaagaaacctcattgtgatgggcatccaaagaccaagaagccctcaccattaagcacaacatcgcacgttgaagatactaacataccaggtttagttggaagcattaaacaagtttcgtcattatttctcattatgttgtttcttctttgcactttggagtcatgcacaatcgacatccatcaactatgattcttatggtttatttgttgcagttttaccttgcttttacatatacacgcaagaggagccactatcaaaagatgttaattcaatttgttcaaactattcatcactttccattaaggggaatggaactaatgatgaagataatgtaccggaagaatcgtgggcagatggaaagtatgaatacgatagagcgttaacagctgacaggacttacttgaagtttaagaaacgattggatgcatacccagaagaacaatgtttcaggtattaattaatgaaaatttaagactctgaaacatgttttacagtagacataactctcctatgctgtctgattagtctatattagcttcccaaaatatgcaagtatggatgaacttttctgcatatgtagttgttatttcaaacttgagattattctagcattctttcttacttaagccaagtgagcttatttggataatattaactattag

SEQ ID NO: 261480 - DNA, 6110 bp, Cannabis indica
ataatggggatcaaagaggcgttgagctggatcaagcgtcaaggttggcaacatgttgagctcgaatctgacagtttagtctctatccaggcaattcgcaatcattcatccctctgttccatctttgggaatttggctcaagactgtcattctcttttactttctatgcctttaataaaaattcgttttgtgaaacgatcagcaaaccgcctagcacatgttgttgctaggatgtctcggtccttatctggtcgtattatttctgtgtctaatgctccagctgctgttatggatgtattgtactcagaatgttaatttattgaagttgaaatttcatcaaaaaaaaaaaaatctctaaccatgtcagaggacaagacaatatgtagtgaagattaagtaagattaatatattatttttttaatagaaacaaaatattaaaatttctaaataaaattaaacaaacatattatatttttctattacctatataaacagaaaacgacattctacttcagatttacaagacaaacgacacatagtcgtacgaaaacgacagcactatttttgtcataacaaaaagggtgtcgtttcttttgataatagtaagaaaaaggtgtcgtttttgtactcaaactgtcgttttcattgtcataatgcctttttggtcttgttatttgtgtactgaactgagtcttaaaaatcaaagaataatatctacaaaaattgagtcgtcgtcttcttccccaaatccaatttcttttcttaaaaattctcttaccatacatgtaatatgatattgtagaaaaatctagggcaaaaatcaaccttcaaattcaacatcaaaaccccttctttacacatttccaaaatttgactctatgaacttcgaaattatccacttccgttccgtaaagtaacttgcttttcttcactacacttctctgcaaagtatcaaccacctagccaatttcaatggctgccgtgctcagatcgaaagcatctaaggaaacggcgtcgtttacagtttctcagttccggtactttcttctcaatcacatgcatgctgggagaatggcgagctctcactgtacgcaccgtacaaaattggatgacctttatatgaatactccttatagcttcacttcgttcaaacccgtttcgcttcgcggcgactttgtcgataagggtactcaattatctaataatctgagagtttcccatgaagctaatagcgggacttgtgatgggaattgggatgagaaagtaggtagaaatattaggcgacgttatatttcaagctcgtatggggaccctcctgaggtgtggtccggtgatggccttgtggttaggtccggttcgaccccgaatttggtccgtggtggcgggggaggcggcggtggtggtggttcgaactctggttcggctggtgggtttggttccaattcgagtgatgattgttggggaggatccaatttggggagtgatttcccaacgcctaaggaaatttgcaaagggctggataagtttgtaattgggcaagagaaggccaaaaaggtgaacttgcaacatctctcaagtactttatttgataatattggttaattcaattcaagcatgttttagtattgaaaattttgttactttttactttttatgggatggtaatgtttagcttagccaagcaacttgtgtaaattagtttcaagattttattaaaaaattaagctgcattttgaagttgttgcaactagtaatacgaatcatatagtaatttagacttcagttaaattatcaaagaaagcaagtgttgttattctggtgtatgccataatgttttgcagtcataattgtgttttgatttcaggtgctttctgtggctgtttacaaccattataagagaattcatcatgagtcccaacagaaatggtcagtattcatacgtaataatgaatctatttgctttcttttcccttacacacacacacatagtgttgtaagaagaaatctttggtttataattgtttatcattgctgggaaatttaggcccgcaggagattcagctacccaaaaacctgaagggactgatgatgaaagagtggaactagagaaaagtaacattcttttgatgggtccgacaggctcaggtaatatatcacttggtctaaactaatgcatactactcttaatatctcatcttatattattacactttgcactgtgctaagaatgttaaattttctggtattagacacccttatacaagtcgttatgctattaaggagatcctgatcattttcttgttttatatgtttccctgttaattttcttgttgcttttagttacacgtctcacttcttctccttaatgccgttcaagtacagggaagacattacttgccaaaaccttggcacgattcgtgaatgtcccctttgtcattgcagatgcgacaacactgactcaggcaagtctatgacttgccactcttttcttgaaatagaagtccaagtttttcatgagattgcttaccctgttttttaattgcaggcaggatatgtgggagaagatgtggagtctatattgtacaaactccttacggtaatttttacaagcataaatgaatttataaattgtttgcataatattcgtatacctaactgtaatggatgttgtatttctacttaaatttatgatagttagcaccaaagcttcttcacttctttacacttatctgggatatatacttgtccctgtttatcataagttggtataaatgtgagttgatgattcctattgttatgattgttgcaatgatggctcaatcagtattagcgatgtaataaattggtataaatgatacatagttgcttagtcatttattaacaaatttatttatcttttgacatctgaatgtatatcacaggttgctgactataatgtggcagctgcacaacagggcattgtttatattgacgaagttgacaagattacaaaaaaggttccacttattttctaatgctacaattcgctttagtccttgcttgcaccctgtttgcatgctgctagaaattattttatcaacttatacttcttcgcatttcaggctgaaagcctcaacattagtagagatgtatcaggagagggtgttcaacaagcattactgaagatgttggaaggaacagtaagtgttccgtagtctttttcttgaatttatatgaaataagtaggtgatttaattgcaaacctttatggcaaaaagtattatggatgctgtagacgagttttcctcacctcttcagggctattctaacctctggttataaatatgtttgggtgaattacttatatatctttgctaattttcggttggatgaatagattactaacttctttatgatttttggacctgtttctgatctaggtagtaaatgttcctgagaagggagcacgaaagcaccctagaggcgaaaatatacaggtagacatccattggtttataatctattcatctgactactacttttatctggatttgttaatggtatcatgtggatgctctcataattaggttgtagcttaaattgtttgatatttggtcaaggcttgtaagtgtttcatggcttcattcgtgctcttgtttgctgtggatcctgcaaaccttgattcatttttcgtgttttcttttcagattgacacgaaggatattctgttcatttgtgggggtgccttcattgatttagagaaaacaatttcagaaaggttatcgcaatacatattctgctattttgctatttttcttatgtcttttttctcatttaaacctgacaagtttttgtgctcatttccagacgtcaagattcttctattggatttggtgctccagtacgtgcaaatatgaggggtggtggtgttactgattctgcggttacttcaacgttattagaaactgtaagcacactccatacctgataacattttttttattgttgtcttattattattaattttttgtaatcattcctttgtcatatgaatactacgagacatttcgctatttcacataacatggttgttacttgttgcaggttgaaagtggcgatctcatttcatatggcttaatacctgaatttgttgggcgatttcccgttcttgtcagtctgtcggcacttacagaaaatcaactcgtccaggtgagaactttctgctatttggagaaataattgtgcacccagggtaatttttatgtcctccagaacaatgagactaaatatttttattaatcaatatcaatatgtaattatgtatttaataagtttgggcttttttttgtttacatctgtatgcccacactaccaaatattcctgatttgtgggaatctgattcacaccatccatgcccttcttaattcttggatgcattattctaagcctaaccttgttgtacggaattctatgttttcctgtgtttcttagtagcaaatctgttttacaggttctaacagagcctaagaatgctttggaaagcaatacaggaaaatgtttcggatgaatggtgtaagtaaaacatcagatcaaagattgtctcatgcatttttaatcgtggcttcttgcatttcttattcttactaaagcactctcggtctgtatgcgtgatcttttcaggtcaaattgcatttcacagaaagagccttgagattaatttctaagaaagcaatatccaaaaacaccggtgctcgaggcctaaggtcaatactagagaatatattgatggacgccatgtatgaggtttgctaatttctttctcttctgtctaacttccattcataacctgagcttatttatccccccagagaataaaaatcgaggaaaacttgtttatttgatattctactgtttatgaagacattagaaatcggctttgtcacggatgatcatgatcacaatcattaatgtttttgccatggttattttcagataccggatgttagaaccggcaatgacataatcgatgcagttgtggttgatgaagaggctgtggggttggaaggcggccaaggttgtggggccaaaatcctgtatggaaatggtgcattggacagttatctttcacaacaaaaattaaaggttgttgaggttagtgttagtaattacttggtttagcatcagttaatatggaatttgtagataataaggctttttgtttattcatgtgtgttttgcagtctgtatctacaacagaggggtcagatgtagaacctgaagagcttccatctgttgttgccagcatgtaattctctgcctaaattgtttgtttttatcttctctaataatagatttgtacataataaatttttatattattatttcatagtaatatgtatgtatcatatataataatgcaattctcataatagatttgaacttgatttacttacacttttaagctatatagcagcaaccttcatttatggttttaacaaaaagaccaaatacaaaaataaaataaaaaaaaaacaagtttttttttttatatattttatatagttgaattccaaatcttggattttgttctttaagggtctttttattgtttcttttataattttctgtggatttagagatttgtaaagctaatccggaagagaaagtgttaaaaaggtaatgtaattttaagtgggacctataatttgatcataatagtttttttgtgaaggatggcaactcaaatctccactttgtttttgtgattaatatattgaaagaaatgacaaaaatatttattcaaatctagtttatttatacctacaattagcatatgtcaaaatcaaatacaaacgatcaaatgtcaaatatcacataattcttactaaacttgtggatcttttaattcttaaggggctgtttggaataggttaatcttagtaagggaatggtaatgtgaaacattaccttgtttgtttagagggtttagccttggaatgttattaccctagtaatataactacttttgaggagggtaatgttcataccttaaaaaagggtaggattgaattattagcttccatcatattaatttgaatatatatttagtctgtgagatcagtttttttt

SEQ ID NO: 261481 - DNA, 753 bp, Cannabis indica
agccaacctgtacgctacttgccctatcctctcaatgatttcaaaaggtccaatgaacctcggactaagattttctttcttcccaaagtgtttaatgcctttcatcggagatattcggagaaataccatgtccccgacctgaaaatcaatatctcgatgctttggatcagcgtaactcttctgcgtactcagagccgcgagcattcgcgctctaatcttgtcaactgcctcacttgttctctgaacaacttcgggacccaagcacttccttttacccacttcatcccagtgaatggatgatctacactttcttccatataaaagttcataaggagccatcccaattgttgcatgatagtcgttattataagagaactcgatcaggggaaggtacttcacccatgacccttcaaagtcaagtacacatgcccgtagcatgtcctctaaaatctgtatcgtcctctcggattgtccattcgtttgaggatgaaaagctgtgctaaactttaagtgagtacccatagctcgatgcagactctcccagaatcttgatgtaaacttcggatctctatccgaaacaatggactttgggacaccatgaagatgaacaatttctctgacatataactcagcatactggtcaatggagaaattcatccgaacaggtaaaaagtgagctgactttgtaaacctgtccactatgacccacacagagtcaaattgtcctgtggttctaggcatacctaccacgaa

SEQ ID NO: 261482 - DNA, 1447 bp, Cannabis indica
ggctggccttgcgcccaggttgaccttttgttaacttgggccatttcaaatggagttttcaggaattcttttgagaatcttctttgttttaagaaaacattgagattcaactattttcagggaccaaacgttatttctagagggccgaaactaggacccagcgcctaggttgacatattgtcaacctgggctgtttccaatcaagttcagcaaaaagtgttccaagaatttttttccttcattagaaataatgaagattcaagcaaagttagagaaaaaaccataatcaacctgggacgctgccttcaattgcttaaatttcaaatttgatgcaaccattgtttcaggaatggtcaaaaacagggtaggagaccttgccctcaagttcagaagccatagaagtatcaaaaatgagatcccagaagctcgggagtaagtaccaagcacccacgttgataaaaggcctggtgtggtggcatctacttatccgaatctgatgtcgtttcaaccgtccatctagtttttcacaatgacaaagatttatgaactcagagaagtcacattcccaaggaaaatgaagagtttcgagtctctcatttccacaaaataacaatatctccaagaaccggtgaccaactttgctagaacacataaatagactaagtgatgtcaaatatcacttaagaatcttaaagtacacccctcgaacgtttttacacttacctagcgaccaggttgatgtcatattgttgtgataaacccaacacgcaagtatacgtatcgttttaacaagtaatactcagataagtgagatcgttcccacgaggactgtagctaagtaccaatcaactgaattcttgtttctatttggtagaatcaataataaggttgaataattaaataactaaaaattgaaaagcaggaaaataataataaaaagtgtaattaattatggatgaatatttaggaatatgaatcctgttagtttagattctcaattgttaatgttaattattaattatctcccttttggtgatgacagattatcaaattaaccctaactcttctcagatcattaaggtcctaaatcatatattatctacttgcatctctgaagtaaattaacatataacttgcattaaattcagaatctaaaaatcacataagctatgtaaatactctcgttttacatcaaaacttatgtttgtcctattagagcattcctaatattcacttctcagatttcatattaggatcataaatcacattcaagatggccagtctaaaatatgtaattacatcaaataagaacaaatcacacaatatagggaagaaaagctaataatcacattaactaaattgaagaaacatcatctaacattcatcatatccctaaattgggaatttagtttgaaaaaactcatgttcacatccataaaaattgaaa

SEQ ID NO: 261483 - DNA, 543 bp, Cannabis indica
aggatgttaatgaaacatacatagtagtaagtctagatcctagtaaaatatatccaacaggaataccatcaataacaccagctatattgacatttgaggagcaaaacaactcttcaaaatagcacttaataacttcgaataaaccaaagttccaatcgcaccaagtacctgctgaattttgcagccgagcaatagcattgtttcgttttcgacttgttgctacagcatgaaaaaatcggctgttatgatcaccttcacgaagccacaattgcttagacctttggcgtcaaaaaacgtctctttgagcatacacttcgaagagttctttttcagcttctataaatgctgatatggaattatcatctctgccacttttgtaatgagcaacctgcttcttccaataaaggattctttgtttaaagtttccagtatagttcttaccccattcagtcaaatgtctactacaaagagcaattttatccataatctccaaagagttgctgtaaagcccgcttagttaatttggaaattagcagttgttta

SEQ ID NO: 261484 - DNA, 1393 bp, Cannabis indica
ttatttgaataatattttttataatcacacccctttgtatatagatactaggcgtttggtatgaggtgtttaaaataatctgattatagggaatattatgaaggagaatatgattatagagaaatgtgtaaactgtgtttggctgtgagggtaatatgtaatcatattactgttaattaaattacactgtttggttgagtacaggaatcttatatatattattttgaaaaattaaaataaaaatatttttttattatatctatttaatgttaattacatataaaaataaaatagttatttattaaagaaatatatttattaattagtaaacattaaattttattgtattttttattaattaaaatgatcatttctatatattttatcactatgttatttatttttgttcgatatgttatttatgtacatcatccgcataaaatttttgtataataaatatatatatgtgattgctaataatttaaaataactcagttaaaaaaaattgatctcacagactaaatttatatatcataatattttatttataataaatgataatattattaatatttaaatttatttattaatttaaaaatgttattcaaattaatatgatggaaggtaataattcaatcctacttatgaacattaccctcctcaagggtagttatattactaggggaataacatttcaagactaaaccctccaaacaaacaaggtaatgtttcacattaccattcccttactaggattaacctattccaaacgggtttctcttaaaaaataataatacaccccatctaataactatccaattaaagattttttttttttagttcccttttttttttttaatctcttcttctttatttttattttaaataatcattactttttgtagattaaaatatacatgcatatacatctcaaaagagttctcttttataataattataaacaatcaatcaatattttcatatacataacaataaacaaaaattaaatgattaaaataataaaatcttacatacattaaataattaaacatataattttttatgcgtttattaaatgttcttcattgatgaaacttcaattgttttttctattaatatgaatttttcttaaaacttgaagaaggagatttttaattttaatgttataagtaaatggggtgtaattattaaaataaaagttaaaataggctcatcatttaaaattgtatattttggtaattttgttcaaggataaaaatgtaattaaattttttatttaaaataaggtggatttataacttattaggtgcaaatataatttcccttttccaaaaatatatatactattgtactcttataattgtatctcagtttaattttttcaatttttttt

SEQ ID NO: 261485 - DNA, 1113 bp, Cannabis indica
gttttaatttttgtataaaactaattttattctgtgctttattttagaataacgggttttagtttattttttaaataactagtttcttgtgttgttttttttcctgtgtagcatatgaatgtcgctttctattatctgagaaagaaagttaaacaagatcaatctttgaaccaaagggtaacaacaactgattgtgtatttgatcagttgattttcaacgaatataacaaatttttggaaaatcattctgatttgagcacaattaattttgatagtatatctcgctatattcttggggaatatttgtattcaaacactgcttgggttttcacagatcatgttcttataattgttcatgtgaaagatcaatctcactggattttatccattttagcatcaaggacaggatgcttaatgtttacaactctttatctgggttacgcaatcagaacaaggccttccccatgttaagacatattctgtaatgttgccttatttcttagaattcgtcaacttttatgcatcgaggccagatcttagcatagaagctggtccatattctataggtattagggagcctcttaattataccttaattatggggctacctactcaaaagaagaggtaaatttttaactctataatagaaactggttttattaatatttctttaatttttgtattataaccagttttataatatattttttatgtttgatattttgatatttttgtttgttaaaacttttattaaatgcagtgattgtggagtttttatgattaagtttgctgatttgttcatcaatggaaagatgaatgagataccacgaaatatggctaataagattgcaacttacaaagatgatatggctgttagtttatttactcatgcttggaggaaacaaattggtgggtatcagactgaatataatgttcgagttagaaaggaaaagtcaaagaaactaaaggagaaagaaaatgctaaaggcaaatgaaaagaagtttgagaagaggatgtggatgttctagagcagtctttttgttaatttgtttttttatttcatttagataactggttttagtcatgacaatgatacttaacggtttaaatgt

SEQ ID NO: 261486 - DNA, 671 bp, Cannabis indica
tatagtattattattagtattattattattattattacatacgtcaaattttgcaccacaaatattaacatattcccatgctaggtagtctctctacacttttccgcgctttatcctatactctcatcatctttcctatctatctactctctctagctactctacattattacttctcttctataaatacctatgcaaatacttcctcttatctcatcataaaactctcttatccgttttacctactttatctatattttaagctctttattttgtcaatgtacctacattaattctaaacattctctttcatattgtacgaatttgggcaaaaatggctcccttgaaatggctatggttctttactttgttattgttaagctttttaatagtgtcagagtgtcgaataatgtctaaaaaggaaattagattagactttagtcctggggcaggttcaggttctggttctggttctggctctggttctggttctgactctggctctggttctggttctggatctggatccgggtccggatctggttctggttcaagacatccaccaagtaaacacataaggttagaccaaaatcctggagtaggttcaggttctgggtctggatttggttctggttctcgctctgggtctggctctggctctggttctggat

SEQ ID NO: 261487 - DNA, 1135 bp, Cannabis indica
gggcataaaacccaacatcatcagcaaaacgcccaatctttctgatggttgaatcgtccgtacccgtcaaccacttgaagcctggttgagagaaatagaagtatcccgacctgccttccttgggggtggacttcaaatcaaaaaaccaggaaacttcgtgaggagaaggcataccccatttctgggaagcgtagaggacgaaaaagggcagacagatatttgatgcccttaggagtgaactaggccgggcagaggccgaagaagtccgccacattcttgaagtattactgcaaagtcatcaatgccctttgctgacctatgggtacccgaccaggcgcacatcccctttttagggtttgtggcacgattgttgtgggcgggaatgtagtaatccagctcgcccaggtatctgccctagtcaagagttcgaaggcgcgccttagtaaccttggacgaagggctaacccacctggcgccctggcaccttgccttctatgagtaaccgccgcagcaagttcctcactgacgtagtccacgccctcaaccaggacgtctcagtcagcatcgactggctccccagcctcgttgtactccccgtagtttgggggttcaacctctgcctctccttatgcctcggagaaaatgccaggacgtacatcgtccagctcctcgatctcttagacctcagcgtccccttcatgatccccctcccatttcaacggctggatcctgttcgccgctgggcaaagtggcgtgctgagccacttgacggtcagatacgtcagccagaagcgtggttttctttgcacgcgccatcattctatggttggatacagggtttgaagaatgtccttcgctaggggaaggtgggctagaacaaagacgaggatgatcctcatgcagaagttgaagcaggtcctggttttgatgtccgttttcccaagactcacttgagttcatatacaaaagacaacacacaagatgagtgttgggtcggaatatggaacgataaataagcaaatatgctgaccaggagtactcaacagatttaaagaacgagaatgtttgaagaaaattcagaacttaagaagttaaagatttcttgagttgggaaaaaagttcatgaagcttagaa

SEQ ID NO: 261488 - DNA, 532 bp, Cannabis indica
gtgaaagaaatagtgaggttacatgacacttcgaagtctattatatcgaatagggatccgaagtttacctcaaaattcagtacagttttccatcctcagactgatggacagtctgaaaggataattcagatactggaaggcatgttacgagcctgtgtgatggatttggagagctcctagagcaagtacctgtaagagaagagttttcctacaacaatagttaccaaagtattatagggatggctccttacaagatgttgtatgacaggaagtgcagatctcctattcattgggatgaaatgggagaaaagaaatacctaggtccagaatgtgcagcggactaatgaagccataagaaagatcaaggccagaatgcttgcttctcaaagtaggcaaaagatctacgcaaatccgaaacgcagaaatgtacagatttaggtaggagatcatgtattcctacgggtgtctccaatgaaggggatcagacattttgaaaaagggcaatttatgccctaggtttatagcgcctcac

SEQ ID NO: 261489 - DNA, 1956 bp, Cannabis indica
cacgtgctttactccccaacatttggctatatgggtggaaaaaccataaaaacatattatatatacatgcaagactacactaacaagaagtatacaaatacaagggcactaccttgacattacaattatgattgcttgatattactattaatacaatagagtgaagtctctgatgatcactttaagaacatttgtaagtaatgtaagactccatacttgaattcgaacaaaaggaggggcaatccctcatcagaactcaaaatgattaaatggtataaagtagtgaacacaagtgggagcaagacccatatgagaatggccaggaaagcaaagaatgtaattttctcaggaaaatcaatatcccaaatgttagaactagacacaatcttcgatttcttctcgtacaacaatgctttagtacccgtgaaaaaggccaacacagataaggtaatggaggcaatagttaaaatcattgtcaaggtaaaaggatatctgtgtggcttaccaagtaacttgaaataaagagcaactgcaatgtggattatcatagaggccgccgagaaactgaaagccaaggaattgaatgccgtgaacaatgtgaaagcttcgaggctgcttgaactgctgtatgtcgccgccccggccatgctgatggctgcttgaaatgttatgtctgtgatcagtgtcgacaccactaaatttatgtctgccatttgctttacttccttatcaataatctcttcctttggtacagattcattagtcattgttgatgatgattgaatttcttgaactttttcatcactttttgtagattgattcactattgcagcttcatgtagacttaggagattgctttctgtgtttattttgaatttgattatagcctgcaaagacaaaactatatgtattaatgtgttgaaagataaaaggaaattttcatccaaagagttaatcatacaaatgtttctaaagagattaccaatatattctatacaaaatatttaagggcgcattgggaaagccaaaagcgaaatagaattgcacagttttggaagtaatagagatatcaattacaaaatattttgtttgtttgtctgtaattatattttaactgtctaattgaaaagtaattgaaatatatatcaattacactttccagcttaaatatgaactactaaaaattattatctttttgtgtaattactaactactaaaactttcaatttaaatatgaaactactaaaaattattatctttttgttttgtgtaattactaactatttttatcaaataaaagattaagaatttatatgtaattctcacctcatattcaaacacacattatattttataatagagtgtgattactatgctatgtcattactaccctaatgagaaattaccctagtaataattatagtaactgaaagtcttatgaggctcaaacaaaattgtgtgactaatctacgactactccttcaaatatgaattctgaattaatgtgatttgtgttggggtaatcattgtcaattcgttactgtgcttatagccagtgagaaaggaattgtgactctatggaagaattccttaagtaagatactagaggagtccatggtaaaaactggcattattcagcaaacttcacttaccaaagaagcctcaactagtaagactacttgagtcaggacataggtaccttttcaacattaccaagtagatttgatctgccgataatgtctaaagcagtcatccccatctcattcatgattctcttgtccgtacgcgaattacttgccaaacttacaaaaatttcataataaccacaaacagcagctacatgtagagctgtatttcccttacagtcttgctcattaataatatcaatgaaagctttagtatttaatagagtatgtgccacatgaacctttttgtgctcaacagcaatatgcaggg

SEQ ID NO: 261490 - DNA, 828 bp, Cannabis indica
ctaggtctgggttcgggtttggttctttttttgggttctggtcctagtctaagtccctgatcgagacaccgtttactggtctgttccaagcccctttacccgaatctcgagtcaagatctggatcaatttcacgggactcggtctggttctggttcaggtcccaggtcccatttctaagtttgggttcaggatcgagacttgggtgtggttctaggtcccgaccttggttctgtgttcctagtgtggttccatgtttgggtctgagttcaagttcgggttcgggtcccgagtccaggtttgggtggggattcgggtccagctcccacttcgggtctacgtctgatttggagtctgggtcctggtcctgttacggttctagatctaggtctaatttctattatgattccaagtccaagtcctagttcaagtcccagtcaacttccggttttggttccaattttgggtcacagggtacgggttcgtgtccacttttgggtttgggactgggtttaggtccgggtgtgggttcgggtgtagggctgggtcctaaatccagacaccgactatgggttttgtccaagccctgggtccagatctcggctcctagtctggttgcatttctggggtcgggtcacgacctgggtcctaggttcaagtttgggtctgggtcaggtactaggtctcggtccttgttctgtttcccaggtccctatcctgattctgggtccaggtcccggttattttttgggtttgggtcctggtctaggttcgggttcgagtcctagtctctgttcgggtttaggtctctgtctgggttttgatctggg

SEQ ID NO: 261491 - DNA, 766 bp, Cannabis indica
cttgagttggagtcccatttttcgtaagtaattttgaacaagatgttggaagaggctccattattgatcatgattctggccaccattttattggctatttggacctccacgactagcgggtcgttgtgtggaaacttaactttgacagtgtcttcatcgttgaatgatatggtcggctctcctgctcgtggaactttgggcttcctttcttccacggccaggataatttcttcttcttcgtgctgcactgttcgggcatacctctctcgagcattgctcgaatctccagcaatgtgagggcctccaataatgacttgcaaatgtccatctactggtggaggtagaaaatcttggttattctgacctcggtcggtcttcacatacttttgcaggtgtggattatttttccttattaggaattcaatttcccgcttcaagttgtagcattcattagtgtcgtgggcgtagtctccatcgaaccgacaaaaatttgtcatgtcccttttgttggcgtctttcttcatgggcctgggtttcttgtacggggccagcgattgagttgccatgtatacactttctatatcttcagtcagaatagtgaatgcagtgtacttggcatgattctcctgggaagtctgtttggatttttcggtgaactttcctttcttcccgttcccttgcttgtggttattgctggaacgcttgccacttgagcttgaattgtttgggtagttaggaagttgggcagatgttccagtggaaggag

SEQ ID NO: 261492 - DNA, 1649 bp, Cannabis indica
tatatatatttatttttttaaatatttttattatatataagtaaatttttaatataaattaaatgtaattggattggatcagtttttaattagatattgagattgacatccaataaccgatccaatccagttacacatccaacttttgacatccaattgttattggatatttaatttatttgtaactagattggattggtttgaattggttcgattcagttggatcagattggatcttgtctagcctaaattctagaatgcatgataaggaaaaagtaaaatcttaggtatgttataattttattttttgttaaaaactggtttctttatggaaaattgtataaagcatacttaaatgctttaaaaaatacttttaatatgccacattaaaataagtacactaactattctcctaaaactcttaaacctataatacccttacaattcaaaacaccctctctctctaactctcccactctctctctctctctaactcacacacttacaacggttcactatccccgacccatcctaaaaatttgaccaccctctctctctcttcttgtgagcttgggcccccgcccaagagatgcactgtcgttctaaacaccgcccaactcgcatgaggctcagtttgcaatgacgaaccacgacacctatccccaacaaaccactacgacataccacgacaacccacaagacctatttcgttatgtatttaaatttttgtgtgtttttcaatttgttttggggtttgttttgttgtttgtgtttggattttaaggaaatttgtttcgatttaggttattttttcttgtgtttaaggttgatttttgttgattgttgatgtttctctaaaattttcgttgttttgtgatatcattagcaatgaataacaatatcagcaacatcaaactggaaaaggggttacttagtgttttctacgatatgttgcgacttgtttacgacatgttgcaatttcgcaggctttatgcgattggtttataagttagggctttcttcattgtcagtctgcaattttagagacatcttgtgatattctctgtgacatttcataatattattgatgacagtgtattatcattagacgttgttaaagatatcacaagacattgataaattaagcacacttcaacgaaaattgttcaaatgaataaatcaaacatacatatcgtgacaatgttaaaaacatatcgtaagatgtcgtaaatttttgctgttgatgttgcaagcaatttcattttgtttgcgacattttgcgatgtctgctgttgatatccaattgaaaccttcaacaacccaaacaccatcatatagtacaaccacgaacacatttgaatttgtaaacaacaatgaaaaaaaaattaattcaaatttcaccttcttattgtgaaaaattgcattttatcgtgaaaatagcctcgcattgcattacatctcagaatgtcacagacaacattgtgcaatattgtgaaacatcaacaatgaacatgtgggtgaaatatcgctacactataatcataacatatcacaacatatcgatacacgtcgtgaaacttcatccttgaactctaaccaacacttacatcgcaatatattgaaaaattcatcgcgatatattgctaaaa

SEQ ID NO: 261493 - DNA, 1039 bp, Cannabis indica
gttctaattttgggtcccaggtctaggtttgggttcgggtttggttctttgtctgggttctagtcctagcctgagtcccagatctagacaccgaccagtggtctgttcgaggccccgttaccctaatcccaattcaagatctggatcactgtcacgagtctctattttgttctggttcaggtcccaggtcccatttctgaggttgggttcgggatcgagattggggtgcggttctaggtcccgacccaggttctgtatccctagtctagttcaatgtttgggtttgagttcaggttcgggttcgggactcgagtccaggattgggttgggatgcgggtgcggctcctaattcgcgtctaggtctgatttttatttcgggtcctagtccggttacggtttaggatctaggtccaatatcaattatgatgccaagtccatgtcctagttccagtcctgatcaacttccaattttgtttccaattttgggtcagagggtacgggttcgactccacttttgggtttgggactgggttcaggtcctggtgtgggttcagggccttgtcagggttccggtcaagggctgttcccaaacccagacaccgactacgaattttgtccaagtcctgggtccagatccggatcccaatctcgggtccttgtctggttccatttcttgtgccaggtcacgagcttggtcctaggttcaagttaaggtctgggttgggtagtaggtccaagtctgagttcattttcccgtgtccctatcctgattcttggtccaggtccctgttattgtgtgggttttggtcccgatctaagtacgggttcgagtcctactctcggttctggtttaggtctctatctaggttttgatctgggttcaaatttgggtttcggtactggtggtggtcctagtcttagttcggttctagttccatttgcaattctaagttcgagtttggcttttagtttgggtcggagttcgagtcctggtctcagtttgggttcgggtccggatattagtctaggtccagatcag

SEQ ID NO: 261494 - DNA, 4190 bp, Cannabis indica
ttttggtggaagaacagaagattttgaagatccagtaagcaaaagaaaagttgacttcaaagaaataagttgtcaatgtgaagctgtgtttattttgatttgatggaaacaaattttgattttattgtgttgattagatttcacaaatcatagatatgaggtttttcttacaaatatgatcaagctttacttattctcatttgtttgttttaattgatttttgaagaacaaggtttttgtcaagagggatttgttcgctgaaaccttgcaggtgaaacaatgcattcatattccattttcacttggaaacattcctccattagtgagtccaaacaatttatttatgtatttttacattaaactgaaccaggccaattcatctgcaatttgggtggttaagcaaaagaaggtattagacaaattaccccagtaatgccttcattaccacacacaaccacttctaccagactttcacacacatgtgtatgtcttcatttgtttgaatatataggcctattctgtttgaaatacaaaaggaatcccatgatcttgtcaagaggaggtgacacctctttcaccaccggatgttcgttcactgctgtgacccatgagtagagaaacggtgtcatttctgggtccatgaatttcacaccaaatacttgttcttgaacttcgtagaaacccaatgttgcaactgtcaaaatgtccagcacccctaaattctggccatttgtgtaaggaccatctcctttgaagaaatccttgactccttcctccagtactttctgtttctctatgtattctttggattctttcacttgtgtttccccatcactcattattactcgagacttgctctcgatcatctgtaaacaaaacatttattatgcatagaaaaacacatatggcagtgtgattagctgagaaaagaagtatgtcttacctgttgttgaatataattagcccaaaaccgtactttggctctttcataaggatcttctggaaaaagtctaggaatttttccaggtttcatcgatatattcaaggatgatatatgactcaacaatgggcttttcattgtgaacgagtactgggatcttcttatgaacagggttgcaggtgaggagcaattggctcttattgctcaaatcttcttcaatatattcataaggtatgcctttaactttaagggccatttctactctctttgagtaagaactagcccacataccatgaagctttacttcacatttcttccccatgtctctctcttcttccttaaattttatgaaatgacatatgtgagggcatataccaaatatataatgaacaattacctcattaagttgtgttttgaactttgaagataagtagagctagttcattgtgaactatatacgacttaagatttaaataatgtacacacattggactgaattgtgattggtagcaaatttgtatttttcaccctgaataagtaacccaatactttaagaatcctcatgtttgtataatattcttctgcgttagaaaaagtcttactagttctcctctctctgtcaggcttaatataaagataatatatttaaaagccttattcaaccaatcgtatattgtgtttagaattaatattggaaatcaatgctaaaatatggttgactatgatgcttaatatatataacacttgctggtggaaaagctatgatagctatctcttcattgccaatgtcaaacctgttgtaaaggttgtgcgcttaatttctatagctctcataaaaatatccaagtcaactgttaattagttggcttaaaactctgttccagcctatgctccttcagctcagactcccaaccatcatatcttacaagagttgtaccagaaatgcaattctttgaaactaatcaatcaacgtaagctttcacaataccagtagccacaactgtttaagttaaatgttcttgtcgttatgtggttttaccaattctgtttgtgttatttattcacttgttgaggctgtaattaagatgatgaatgatgattacagggaaattttctatatgggtgaggttaattatgactaaatttagtgtatagagatttgatttactataacttcagactcgattgtatttagtgaataaatgttttggagaagaaaaaccaatcatataaattacaaaggtcgccatggcccaagttacaacaacataagaacagttgacatatacattcactctgctgcttagagcttatttgataacatcttgaaaaaacaaaactcagaaaaacatgacacaatcttaacaacaagaataacaatggaaagtcttatgacactgcaatatcaaggtgcagaagatttaagggcatattctctgatatacttgaggaaagcaacaagcttatcatgaggagggagtgcctctttcaccaaaggaatatcacccagagctgttatccatgctgataccagtggaatcttctcatgatcgatgacatttatgccaaggacttcttcttggacctttctacctccaaacatacacaccataaccaaatctacaagtcccacgcttgcgccgtcgacttgtgcacaatcaggatagaagcttttcaagccctcttcaagtacctctagtttatgggacacttccatgaaagccttctgttgtgcttctccttgaatgcttttgagtgcgtttagcatactcccaaacagctgcatgtgtgtgccaaacataaccaaaaagccttaaacatctttcatttcacttaaacatcaaaatcaatatatctcattatatgatgatctatcatcctaattctcacctgatcaagataactggcccagaatctgacttgggatcttttgtatggatcctcaggcaagagtttaggaccagttttccatgtttcatcaatgtattcaacgatgacaagtgactctgatagggctttaccattgtggacaagtacaggaaccttcttgtaaacagggttatatttgattagttctgagcttttgctagttaaattttcctccacatattcatagggtatgcccttaagaataagggccagttccaccctttttgcataaggacttgcccaaaacccatgtagtgtcaccttgtcttctcctgccatatttttgtgtggaaatgttttgatgactagatctagatggtgagtgtgtttggctagcaggtagtagcttaatatatagatgcacacacaaaattttaacttgtttctgaagcccttcttttttccttggttttttattaaaaataatgatctgtagatcttatttgcaatgtgaatacattctggttgattgatccaattaacatgttgataagctcattgacttgatcagagaagtttgactttttcttcatcttcctcgaataagccataagccatgatccaactctattattttctctagccttagtttagttgaagagacttggccactggggtagaaagtactattattaattaagaaaaaaaagtattattaatattgttgcactaataaaacaatacccacaacaataaaaaatagggagattctataatgtgactgacacattctttttctacagtgatacgatacagtagcaaacattgatcgcacgctacatatgcaagaaataccaacgtaatttgggcttttaaccaccaaatcgatatttctaaattaaattattgaaaaagaaaaaaaaaacagaatcaaattaaaattgtcacgttaatatgtcagttgggtcagaagttgtcagatgggtcagaataaatgatgtcaggcggtctttccaccctctttttcatcgtctcttcttcacattttaccctcttttccatccttcaattttcctctgttcttttattcttttttttccatggtctcttcttcattgattttagaagtaatattttctttattactcattgatattttgtgttatgaatcggagttaaatttaacactataaaatcaaaatctaattatttttgggctgattgtccatttcgttctatgaatattgttaagaaaaaatttcacatttagaatactaaaaataaatacaaagcacaattttacctatgccaaatttatagcataagagtttatttgtttagactcgacccatccattattataagaataatctcttaatta

SEQ ID NO: 261495 - DNA, 754 bp, Cannabis indica
taaaaactactcatctcaaccactggagaaaagagggagcagccatagagagagctaaagcaagaaaatagaaagaaacagaaagtaaaaagaaaatggaagaaaaagagagagcatcaaggacaagaaggaagaagaccacgagggacaccaattttgggatttatttcttctacactttttatttgcattttgaatcttaattttcgtattctgattaatcatggctgagtttattgttattacatttttgcttcacattagttaatttaagaattgaatcttgattactttagaaaaataattaagaaaagataattattttagtcaactcaagctaaatagcgaatgcatgatgcttagtcgtatggtttagtgacctgatcttcatgtatttgagctttttgctcttttggttgttgcttttaatgataatacactagaatctctatttaagaatactctattcaagaataacctctaatttgttataaaaaaatcaagtccagatttgtaccagttataaataagaataaccgctaaattgtaattagttatacattttttaagtcccgtattaacaaagtatacctctatataagaataattacatcttaataaaatatatacacgtattttgtaaatttatttatgtaaaattaataatttaattttaaattataatgcaggtatgaaattatatatactctaaaatatttctattatgatatagtattaatgattatttattgtt

SEQ ID NO: 261496 - DNA, 538 bp, Cannabis indica
gaggtacatagttcaagatgaaaagaagttgtgcccaaacattatgctcaagcaactttgacctacatgaccaaacatgttactcaagaccaacaccaaggcaaaatgagagctagagatcctcattgatgcggttgtcaccgctccaacggtcatgagcatacatttgtgaaaacaagtaggagaggtgagaaaactaacatgagtgaggggagtgttatgccaaggtgatcacttcaacccatgtataggaagttgatcacgtcggcccaaatagatcacgggtgtctcgagaggtatgaccaaggtcggccctaggcataggcggctaagcccgtgtctagggcccacactttccgggagaccaaaataaaaaaatatatatattaggcttttatttaagtaaaatttaagtctattataatcaacaaatattcataacttagttggttgatgtggatggtataatgttcaaggtcatgggttcaaatcccataacactatttttttgatatattttttagggccccaaaattta

SEQ ID NO: 261497 - DNA, 539 bp, Cannabis indica
acccaattcagcatttagaaagtcagtgcgagggtaatatttagctttatacacctaactagcaagagacgatggtgaacagagaagtctccaaccttgcttagccaacatggcaatgttgaaatcatggagatgtcgaaaacccataccccagattctttaggtgcagccatacgatcccaagacatccagatgatgccttgtccattggaactttttgttttccaccaaaagtttgccataattttctcaatgtcttggcaaatacccaacggaatgaggaagacactcatggcataagttggaagggattggatgacagttttaagcaagatttctttcccagcacgaaaaagtgggatttttagtagacacctctgacgattttaaattgtcagggataaccattatatataaaacacaattttcatctcattttatttcgggtctcttaagatataaaccttgccctccaaaaaaaaaaagatctcattttttcaatattactctcgctctgtccttctcctcctctctctctc

SEQ ID NO: 261498 - DNA, 487 bp, Cannabis indica
cgcatttcatatcattgtatatgctatattatatacactatatatatagtctaacagatcaatcatagaaggttggtttgtagtgtaacgccctaacccttagtgatgccacgtgtgtgtttttacaaacttatttcttgtaatgtattagtttagaaaacaaagtgtggtttaattaaaaacttatgattaagttaaaataaaactttcatactaaatgccataatacggggatcccgtgtttataaaattcttttacactaggttacaaaattactattacaaaaataaagttacatttccaaacatagaaaaaaaataggttgatcttgcttcccggaagccaagacaccacgactgatgtgtacactgcaggaagatctctggctcatggctgaacacaacttttaatctttttaccagcactatgaaacacctgtgagtcacaataacttagcaagaatagctattaaatcaaaagtaataa

SEQ ID NO: 261499 - DNA, 334 bp, Cannabis indica
taaataatggattaacaatgaatatgacccctgtgtaaccgattcgacacctgctttgtatataaagaggtgatccaccatgaaatggcacctacgaatcccttgctacagtggactaagcagatcataatctgactgaaccactataattctctgttttattgttattttccagctttcgttaattgttttcccattcccagtcgagtactcgccattttaggttgaatactcgcacttgtctttacacataaaattctctttaatatttacaaaataatataatctggtgttgcgaaatttactcgacaacaaacacattggaaagtaaaca

SEQ ID NO: 261500 - DNA, 535 bp, Cannabis indica
ttgtgattaaaaattaaaaaacaaaagtgttaccaaacagcaccaatataaataaaataaataaataaacagagctgaaatggaacaggtaacttccactttcaggtaaaagaaagatacaaaattcattaattcactacaccattatacaaaaaaagttacatctataaattttgaggatctaaaggaaactcttgtgcaaacttggagattaaatcagctaaggaattacatgcaaagacaggtttagcaacaccagctagcttcaatccacatccttcagcttcataaaatgttttagttacaaagggtcctgtaacaaatcatttgcttcatgaaactagtgatatatatatgtataatcacacacgtataagagtttgagagacatggaagagaaactccgacagcgaaatgcgcaataaattcggtatccataaatgatttctttcttgtcttctaagttagatgatgttacatgtttgattttgtgctcatttggatgtgacactatgtgacacttgaacaagttttt

SEQ ID NO: 261501 - DNA, 554 bp, Cannabis indica
ttttgcaaaaatcaaggctcagtttgaggagtacaacttgaataacacggtgaaggaaagtcgtttcggcaattttggaatgtcgtacccctgacattctcctcggtgttatttcactagctgatgttgcacaaaattaaggttgatgctcaggaggagttgaagatgcggttttacattggtcggaaggagctcagattcggagtgcttgagtttgcccttattacgggcctggacttctcctcggggccaacagaagaggagaaggctgcgcaggttgctcgctcagggtcgatccgattgattaacaaatatttcaaccggtctggtagtgtgaagacagaagcactccaagataggttcacaaactgtcagaacccggaagacttgtgcaagtttggcttgtgcttatttgttgagtcagtgcttctgagtcgcgaggctaacgcgttgattacgcctgacatacttagatatgtcgaagatctcgagttcttcttccggattccttgggggaagcactcattcgccagactcatgcactcgcttcaaaa

SEQ ID NO: 261502 - DNA, 2087 bp, Cannabis indica
aagattgaaggaatggcaattattcattaactaggcaaaactttaaacaacattcatcatcctcccttaatgggaatttagttcataaaaataaaataaacatccatgattaatactgaaacaaaaatacacataaaagagaaataaagagtaaaagaaagaaactagatggtgatatcgctccgggtcttcaagattgcttcctctccttcttcattcactttttcgggccaatttctgatacctttggcagtctgaatcgtatcccttatataggaatgagaggtgtgcctctaattggaaaaaaatcaaaattaggtcaaaaatcctgttctccgtgcctggtcgcgacccacttaaaggttggtcgcgaccacaggcaaaactcgaaaatcgggaattctgccaaaacctcaagtcgcgaccatagtcgtgaccagataaaagggtcgcgacaaggctataagctggtcgcgactattgatccccgttgagcagctttggccgatttttcaccagtttgttccgtcttttcgtcaattgactgaatttgaactctaacgcaccgggaacctgaatcaaagaaaatcaagcgtaaaaccgctccaaaagacaacaataatcgagaaaatgcttatttataagacccgaaacttaggctaaaaatagcctaacataaccccaatcagttaaaatagtgctgcacaaatgaatttttccaggaagggggagatgactgaagtggtttttttttcagctgaagtgtttataaaatagtcgattcaatttaatatgcacgattcaattcaatccgtaaagtacagatattcgcatttgtgcggatatccgcacaagtacggataaatgttgattgacatgtaaaagtaaccggtctaattcaatacacacatatttataaaagaaattaaaaattatatatacaaataacattttaatgtaaagaaaatagtattttaaaagtctaatacatataatataatttatttcaaaacgtaataaatcaaatgtatattctattcttaaatgtatatatttttctatatataatttaaaacaaaattaaacatttctgtatacatataattttttttcttcctttaaatttgttctttgttattttatttatgtagtttttttttgaaagtaatgaataaattcattaaaaatataaaaacgtcatacgggctagttatgatatgttcatcaaataaatactatacatgtcatgattatcaaaatagtactacacatccaacaaaaaacatagattttcatatatagccaaataagttgttaatccatccgagaaacatgcgtaattaatctatgagcaacacagattagggacacccctgaaaatttgaatgacaaacttgtaaaaacttctaacaataatcttaaaattattagagcacggaaaactgatagaaaaagaaatcacgattgtaagatcttggtaacatattgcaatccaattttattttatttattttaatttatttttagagacataaaataactataatttattttattttattgctagttatgtcaaaaaaatattttttcataaatattaaataatttaatatcaaaaagtaactaatctaaaataaccgatccaatccgtacttttgtggattatattgaattggatttgagctattgtacggattgaattagattcagaaaataaaatccacacacttaatgcgaatcagatgcactatgaacaaaatagtgcgaattgaattagatgaacaccccataaacatggatgatgaatcaatatacattgtgagtttcaatgtttgtaattattattaactctttcctcatgcaatgtaaggagagattaaatagaggtttaaattattattaactctttttctcatgtttgcaagttttaatatacattaaatttgtatatatatatatacgtatgaatataatgatattatttaattttttttaagggaaagaagcccaaaccagcaagacaaggaccctcacagagaggaaggaaaatcctgaacagctaaaggtaggggtgagcatttagcccg

SEQ ID NO: 261503 - DNA, 690 bp, Cannabis indica
tttgttatttgaatcaattagatcgatgcctcaatgaacaactcatgttctatattccactagggaatatcaacaatttaactcatattgtcatctttctaatccgtctatcctgttaaataggttaccactaaataacatacatggatagtccattcagatttcttgatatctctaactaaatgtacaatgtttaatatcaataacaattataatattgcccataaattctaacttgagttggccgaattaccgatatcagggtccccttgaatcataactggcacttgggcaggatccgtacatttttcttctttaacattaatctttcttaactgtgggcaggttcttttcagatgacctactaccccacaataaaacaagatctggctctacatttgttcaaatggcgcctttttgcatcttgaacactcaagataaggtcaacatctcttatactcactttgaccgctatcatggtcaccctagaacctttcgttctatcccataatttgtggttcatttagtttttgcttcctgatctactaataagttggattcatatattccaccacatctagtggtacaataggaagtgtcgatagtacaacaacagatacaaggtgagcgtattattctttcagatttcagatatattttccccttgttgtataatcatatcctgcatag

SEQ ID NO: 261504 - DNA, 782 bp, Cannabis indica
aaaaaagtaacctagtgtgtttggcatgttttacaaagtaacctaactatataagaaagtaacctaatatcagtattttgaaattcaattaagtttaattaattaacctggtaccattaaaatttcaatttatctagatttgtttttgtttcaagtataattttaatatttttacttataaaaaatggtgtcttgatttaagagaaaaagtaacttagtatgtctattatgatttataaagtaacttggtttataatacagttcttcttcatcatctaggcttagctactaaacccaattattgttactgagagtcattgaaacaagaattagaagacacctattcattgaaaaagattaggaaaattatcaaagaaagagcttccctacaaggttgtaatggacaccatactacataaggttgtaatatttgttacattctttactttggaaaaacactagttcttttgtttaaataaatattgttttttttaaaaaaaataataaaaatgaagaaaaaaaaagtaaccaggtatgtttgtcatgctttacaaagtaacctaacaatataagaaagtaacctaatgtctatagtttgaaactaagtatgaagtctcaaagagcctgcctgagacataaggactctaaccaaaagacaataacagcagacaacaatgaaataaaagacttgttgctataatttataaacactacgcaagtatacgcaatcaagtagtaaaactcacacaggtgaggtcgatcccacagggaattggattaaa

SEQ ID NO: 261505 - DNA, 760 bp, Cannabis indica
taacttatctatcatctttaaagcaataaatgagtgcgtagctccagaatcaaataaaacagtacatagttttccagagatagaaatctgacctgcaaccacagtgttactagtctcagcctcccctctggttagtgcaaatactcgagctgggacaagtttgtcatccttgagttgatcacccttttgtggacagtccttcttatagtggcctggttgcccacacttgtaacaagtcttgcctttcagtcgacattctcccggatgcttacgaccacatgttgggcatagggggtactccacatatggcttcttccctttgtagttattggaccctatcttgtttctcttgtcggcttcgttgtgttggttacttggcagtttccttttgttatcaccacctccattactggcctttctggcctcccaccttgctgtattgtctttctgtatacgactttcacacaactcagcttctagggctttttccagtacctcagcatacgtggttgcccttactcctgatatcgctatgtcccgacttattcgggagtcgagcccttcagtaaaacgatgattcctcagaaactcagtaggaacaagatatgtggcaaactttgctaatctgtcaaattggcgagcatactctgtaactgtagacttaccctgcctcaggtttgtgaactcattaactctagctgagcgtattgcttcactatagtattttttgttaaaaacttgtacaaagtcagcccaggtc

SEQ ID NO: 261506 - DNA, 1680 bp, Cannabis indica
tttttttttttttatatataacataaatgattaaatatataataatataaagttatatccttaattgttaatttcaaagtcatatatattgtgttgtgctttggtggaatatgatatttttaatttatctttttaatttttattgattttgactttgaaaaaaaaaattaggacagtttgggcgggttaacccgaccaaaccgcttaaaccgttggtcgatttacagatttttttttttttaaattgggcaggttgcacttaaattttagcaacccaaacattagattggattagaaaatatatagaataaaccacccaaatcgaccgatgtacagccctaatgaaaacaacccatttacaaaggaggaagaagaaggaggttgtgcgggttagctaagctcattcactacaatttataatcaaaaccatcttaaccttgcaaattcaaaatcccaattccaaaaaaaaaaaaaatccagcaaatttactttgaaattaatatgggttatacacattattttcacaatatataaaaatttgaaaaacaataaaaaaatacatttatcataaaaaatctaaaaagaccataaaaaatttgacaaaataaaactatcacattgcacatctaaatcatacacccaaaaaaaaaaagtaatctgaaatttcattctcaataacataacaattgaacttaaaacctaaaatcaaatttaaaaccttgctcgtcgtaagccatggaggtgacgttggaggccaacaaatggctttgtgtggtggcatagagcagagaaagcccgagctttgatggtcaatggagtttggttcttcggtggtcgatggagtttggagcttcggtggtcgatggagtttggggctatggaagtgatggtggaggccggtcttcgaagagaacggtggagttggatggtttcgaagaggacggtggagttggttgttagtttcactagagcaagcacgaataggagggttgtgaagtgtgaacagtagcatgaagaggagggctatttgttaaggctaatttggattttatttacatgtgttgcgtcagtttctctttctcatattttttattttgcgtcattttttaaaccttgcaaacaccttgagcgagtgttataaactgacgcgaaatggaagcaattattttatattttttttcctttatttcgtcggtttggcttttattgtcacttaattaaaagacgcaaaatatatattatttgtggcgtttttaatagacaggtcctataacttggacactattcacatcggtcaatactatgaacaatagcgttgaccgacgtgaataatttaatttgtagtagtgtaccagcaataatgtatcctgccttggtagtggatagagagatagactgttattttttgctataccaagaaaccagattattaccaatgtagaaacaacccttgaagtacttttcctatcatctagacaccctgcctagtcagaatcactatatccaaccaaaaatatgtcagtatcatacgaataccaaagaccatagttaactatccctgcaaagtattattgaaaattcttttgactgcaaagagatgtgactatttagggttggtttgatatctggctcatagacctacacagaacgaaatatcctgtgagatacattaagctgcct

SEQ ID NO: 261507 - DNA, 628 bp, Cannabis indica
taattaataaaaaatcaaaaatcgttttatgttgcatgattcacatgatttatttcatgattatacttaatgtataaattctattaagttcagaacatttattcatgattatagtgtcgtcaccacagtgaaatataatcataattatatgttcaaaagtttaattctataatttgtcagtttagtggatttaaactgacatgataatcgacgataaggtatacttacaccttggataattgttatgttcttttcagggtattagcaaagtttaccagtatcggatgtatagagtatacattggattggatcgatatttaagatatcataaacttaccgttatattttaattttattaaattataagattagaaaatgatattgaaaatatctatttgcttattttcagatcatttatcttattagatatttaatttgatttgatagtagaattcaaataaaatctagatattttaaaattagtttgtttttttaattttaaaaagatatttaaggttgttttaacagcctaaaatttttaaaatctagtcggttagttgaatgataatttaattatatatttagtaaatatcttatttcacatttgttacatggataatgtttgttt

SEQ ID NO: 261508 - DNA, 727 bp, Cannabis indica
aatatagacccatatctattcggaaacttttatgttctcggtctgttggatgcatccatgaagcttaatatttcatgctctgctgttgcatccacgagctgatcgattctgggaagtggaaaacaatctttggggcatgctttgttgaggtccgtgtaatcaatacacactcgccaattcttgttcggcttgggtaccagtacgggatttgagacccaagctgggtagaaagcttcaattatgaaattattgttgcgcagcttctctacctcttcctttagggctagcgctcgctctttgtccaatagccttctcttttgttgaactgctcggatattaggatcaatattcaggacgtgcgaaatgacagaaggatcaattctgaccatatcctcatgtgaccaggaaaaaacgtctaggtttgctcacagaaattttatcaatgctgattttacttcaagcaacaaaccttttccaatttttagctttctgggcgggatatctagatcgatctcgatctcttctaattcttccacaggtccaacattgctgcttgggtccctaagtcgaggatccacatcttcatctccgccttgggaagctccctacttagaaatgttctttctcttgtctgtgatctggctgaaggatatttccttcttagccttggccacggcaaggttatattattctcgagcagttttctggtttcctcttagatacccta

SEQ ID NO: 261509 - DNA, 694 bp, Cannabis indica
caaagatcaagtttaattggtcaaaacaaacccaataaactaaattacaaaaatgaatattaggaaacatatcaagtgaataccatcaagtataaaatgtatactcaagataagctattacctttaatttggtaggaacatgtgacttatccaattcatcattagcagaaatactaaaaaaatataaaattaaccaaatattaattattttttattgaaaatatatataattattacttattttgttcatatactaaattgggtaaaatacatactaacaagtagttattttagtaaaattaaacaccaacaagtagatagtatttggttgaatttatatactaatataataattatataccaacaagtagttatacaattaaatttatacactagatacaaaaagtatataaagctttggtgacatatataccaagaagtagttaagaactaataattttgaatgcattacgtaaatttatttatatactaaaaggtatatacatatttagtataacaataaaaatatgatgttgactcttagtatgcaatcataaattaagatactctattatgatattattgttcagcttggaattatataaaaatatgtttccatgaaaagaacgctaattttttttttcaacgccatctttaaatattattattattagtattagcatttgataaaaaa

SEQ ID NO: 261510 - DNA, 830 bp, Cannabis indica
tcccttgggttggccacacttagagccatatgagtttcagattttcttacaatttattaataattcaaagggttttctgctgggaattcttatcgattgagggcagcaggtaagaaagttcccttcttgttcctttgaattttattgtttttgtgattaagtattcatgcaaaattttgagttaggttactgtaggaatgaattgagtttggttttgttttctaaggttgatttgaagttatttaagatggttcaagcatggaatgttgttttttgttttatttggacaaactttgagccttggagctcaaacattactcttcaatggtagatttgatttcaggagtttatttctatttctgttgcttgaattaagtttattatggcttgtttaagtattctactgggtttgaattgatataggatagaattgaattatttgtgaggttctttaaggttcctacagagaactagttcaccagttcgggctttgaatggatgcctcagacccgtcctacattctgagttatgaagcattggaacttcagccagatctttcttacgaggaacaactagcgcaagtacttggtaggagagaaaaagtcttgagaaacaagacaatttcactgataaaaatatcatggaggaattgtaaagttgaagaggccacctgggaactcgagcggatatgcagcagaaatatccagagttgttcaggtaaattttgggacgaaatttctatgagggataattgtaatgccctaagattaacaaatctgattagtaaaattttaactagttaaatgtgtatttatatggaattatattat

SEQ ID NO: 261511 - DNA, 557 bp, Cannabis indica
gagaaagaaaaatcaaaagttataattgagatagaactcataacccgtgtataaagctaaatactaacggctcgcgctaaaggacaatattaaacgagacatcaaaatgtcttgaagaaaaagtacttaaacctaacatgtggatagaagatctaactactcatgtaagcaatgaaaatatatacaaagtgacaaggtcattaaaaatatatttaagtttgcttgaaatgagatcaatattgatgatcacgaggcagaatcaatgactgcttgcaaagcgagtgaagggcaaatgataagttgttcacgcgtaaagtaggttattaactacttaacgttagaaagaaatacgagcaatggaaacccctaagaaactttatgcatatgattatttagattgtgaatgaaactcaagcaaacaaccgtatattgaagtttaaattaaaagtatgaggcattaaaagcaaagttggccatccaaatttgtaaatttgtctttacaaaaaaatgcaacaaggggcaaactattgtctcggccaaaaggccattttccaaaa

SEQ ID NO: 261512 - DNA, 740 bp, Cannabis indica
gttggactctagttccctggtggcttactctaccttgctatttctccaaagtactttgaccaatgctatggtcttgttccgaaaaaccttttccttcctctcgaggatttgaactggttattcctcatagtataaatctgattgtagttttaaggactcgtaactcatgacataagtcgggtctgctacatattttctcaacatagaaatatagaatatgttataaatagccgacaacgctggtggtaaggctagccaatacgctacttgcctaaccttttcgagtatcttgaattgccctataaacctagggcttaacttacccctctttccaaagtgccttatacctttcaatgatgaaactcgcatgaaaatacgttctcttgcctaaaatgcaatgtctctgcgcttaggatcagaataacttttctgcctgctttgcaaagcaagcgtccgagccttatttttgtctattgcttcattggtcctttgaactaattcaggacttaaatacttcctttccttgattttatcccaaaaaattagggatcgacacttcctatcatatagcatttcataggaaaacatccctattgtactttggtagccgttgttgtaggagaattctattagaggtaagtatttactgttgggttttgtgccctaaataaaatccatttcaatataatcaaatttactagttaataaagaccagaaataacattttatgttgcatggtt

SEQ ID NO: 261513 - DNA, 630 bp, Cannabis indica
acatgaccaaaaccctaatttcgagaaacccgaacccttaaccctaggttctgttatactttcaaggagttaatctaactctggaaatagggaaacacccaaccacggcacagaatggatgaaaattgagaaaatgaaaggcctggtgaaccctgccaaaaccggccaaccggttacccggtttgcaccaattcacccaagaaatttcatttcttcctcaatcctccaccaaatgctaccaaaccttctagagtacctaattagggtatacacaacatatttcagccaataaaccaaagaaaaactcattgaatcaaaacatgccattagagatcaaagttaaggtttctgtgctcaaacttgcacaaaacctaaatcaaacatcaaaaccagctactaggatctaaaaccaacccaaactaagcctagaatttaaattccatcaacacctaaccctaacagcccccaattcacaatttcacaacatgaaactaaagtaaaagcttaaaaacacacagctaaaggttttaggtttaccttagctccaagaacacttaaatccttagcttaacttcagaaaattgttgcgaaaattattaaatactatgcaagtggacgcaatcaagtagt

SEQ ID NO: 261514 - DNA, 580 bp, Cannabis indica
tgactcttggtcacttatctttttttttgtcaagtatactcttttgcctgttcggggtcttgggttcgaccaaaccttttgtacgtactggatggtaaattaacaacatgcaagtaatttcgactcaatttgaattttgaaataaacatcttcattcatttattgatcgaacatgtgtttgttaccgttgtaacttacatcaaagctatttgatctaatttcatcttttagcttaacatgaaataaaacaagttgcaaaaattagaaattgtactttaaatgatggtcatctgacctgagtactttgtaatttcattcaaacctttgggcgtggtccgcccagaaggccattcacttaagagtaaatgttctttttatttagtacttgaggtggtaatccgacctggtacttctattcgtagtattttcttaaatgtttcacattccaataccgtggtactagaacaagttcaattttttcatcatacttagctaatttgtatgctcctgattcgagaacttcgaccacctaatatggtccttcccacttaggtccgagtacacatgccgtactgtcttt

SEQ ID NO: 261515 - DNA, 1437 bp, Cannabis indica
cacaaaatttttgaccttgggaggaagctttaaatgccaaaaggaagactagaacttagaaatgtaatatcccatctgccatgaaaggtttaaagtagcttatagccacttttcactaaatacaaatgtaatatctcagaaatttattatgaatatatggggcatattttatgaaatatggattactaaaggtataatgggtaggattgtaatcttacaaattatctaattatgtgagaattaagaaattttatcattaatgaataaagataagcgtaatttattaattatagagactttattggaatatgcaggtaacatgcatgttatttatgagataagatatttttaggaattaaaattatggagactcgatcgacggccaaaaatatcacagtagtattaattatagtattagtgaaactaggaagttaagttgattttgagtttaccagagtatatcgggggtatttggttatgaccaaaatatccctaggttggaagttacttaagagttaagtaagagggcatttttgtcatttgttaaaaataattaacattttttccttttgttttattgggttagaagttgagttagaaagtagtggacttattaaagataagttataattagaaatactaggttagaaactaagtgtaatcaaaagatcaactcagtcatccttactctctttctaagctcgcccaagaagaaaaaagaagaagccaaaactaaacacttaagaactgacctaaattctcaactgctcttttggaattcaactagggtttgatttaattagttatgaagacttaacgtaaggttctaatgcttcttcttctccttagtttatgaaataataataggtttgattgggaattatgatgttttgattattataaatttggataagattttgattgatttcctaggtcaaaattagagttgttttaaagtttctaagcggcaactgctttttcttgggtgaagttaagcttggtcttcaatgacaagttttgaattgtgatttgattttggtttctataaattaggttatggtatattgatgatattggactaatcatatttcctaggtcaactatgttctgatcatattttggaaaaagtgaaaatataaaagttttagatctctttttaagctttccaacgcatcttgaattagctcatttagagtttgtatgagaaagttatgtccattttactgagagaggtcgaagtaaaaaaaaacagatctagtagtcgcggcgagggattatagaaagccccttttttcacttttctacagccgccacagcgagaatattgaccgccacggtgccgacttcatacaggtcaataataactttgtcttttctctttttgggcttaaaaactctattttaataaaaggggattgcaaattttagaggggagac

SEQ ID NO: 261516 - DNA, 1036 bp, Cannabis indica
attctgttaactctttggattagtttggatgcttgagaaacctatgtatggatgcaatttgatatctgtgaaataagttataatttcttattcccgcccacttacttgtctcaataccttgtaaatttctgcttattaacacatcacttcctcttaataatctctggaacgactactgattctgcatcctaatatgaatctttctagcgtactttgtcctcactcatacacttcccgaggtgactccccgaaggatttcccatcttgagattaccccaagttaagtatgcttaactccaaagtaagctcatggtgggttatcagaaagtagatgcttctttgtcgttcctaattgtatttcttgctttcattctttcattaataaaattcaattgccatcactcccttcataaacctcttgcaattcctcatcggtttttgttcacttaaacttgaggaattcccatcttattgtcaacttaaatcttgttcgtttctacttattttaacttgcatcaatttctcttgagttgacacaactttaaaatttcccaatcacttacaattaactaccattataaagtgaattaatgtaacctatacggtagaggcaacattgctcataccaggtacccataactaaactgaaaatacatatttcttgaattctcaactaataacaattaatcaaagatcattccgtgatcatgaaatttcttttctgtgtttggtagagatcttgatgatcttttcaacatacccaaaaatatacatacctcaagtatattctttgttatattgataacccattggtacaaattaccataccaacttatagtgagtctcccgttgatgatgctaatccatcaacatctaagaccctcgtatatttttcccgtcattaccactaaggttttactccctagttcatacaccaccattgcttccttgcaatcatcactatcttcatacttggttaaccactttaaaacttattctacactcaattatatagctcgttgtttaataaataacc

SEQ ID NO: 261517 - DNA, 2276 bp, Cannabis indica
atcccaattaatgaggaataatggtatttaaccatcctgatacgaattgatccttcatttttccctctcaattttacttctttcttcttttctctttgatttttaaaactttaaaacccacttcacatttctttttttcttttctagaaaaggtctcaaaagcttctgaatctctgaagaatatcgacattctcaaggttagtaggaaattgtttgtaactgtttcttcctttattttgagaatcaatccatattctgcgttttagcaggtagataatgcatgagacatcaagaagtatatatatgtgactttattttttgacaaaattgggtatttttctgagaaatatgagcctgaaatttaagtaatcacaggtttcagtaaggacactttgagtattcgcatctttcttgttgagtatgttgaatactcgcgagtattaggatgaacatcttgaatactcgcatatatatatatatacatgaataatttatcaaatatgaaatttagctatcttaatccctgtttagaacttaggtttttatttttagccttccgatttatatatgcgtttgtccaaatattggttgagtcttttgaatggtggatgtgtcactgtaacttaatgttcatgcgagtgtatgcatgttccttgggtcactgtgatacacccagccatttgtgacatgcgacaagttttttcttttcttgctcttttagtcgcatgttagaactgaccagatttcttgaaatggtgggtgtgtccgagtaactctatggtcatgcctaaaaacccatgccccttgggttactgggaaacaccagccattttttgagacatactgttagttgcacatgtgtgacttacaccttgagagagttagctaaattctcgaaatgatgggcgtgtctcaataccttaatattccggtaccaacatgatcattaggttattgagatacacccaaccatttcttgagatgtcttgttaatccttcatattttctgaatttcttttatgcgggtgaggtcattggtgttattcttgcactttcacctcactgaaaagatcttctatctttcatatgagcgaattctcggatatccaaatgctcgactttggaggtggggcttttgctaatgaactagataaaagcaacaacttcatacccacctcgatttctgaggaggaggttcctgtcgacagcgctgtgcgtctaggttcactatctactgatgagatagataggatggtttaagaaatcggtgaaccagggacgattgagattcgcgatagtgaatctacgatgtctgacaaagagtaccttactcactcggggcatgcccctgatactaaagtcaaagaaatgggaaaggactttgagattcctgattgcgagtcggagatggaggagaatgctgagagtagtgaaactaattcagttgacgatgctcaactgaataaacccttttcatgcgaggacctagtctcgtgagttaccaaatctgacctgcatacatttgcacggttgaatttgttgctgcttgggaccatgcatccttcagcatctcaaagacctcatctcccctttaccaaccctgcgatcatccccacacaagacgtggttgtttcaatcctattcttcgctgtggggtatctttaccctttcatccctttgttaaagccgtcgtctgacactacgatgtctctcacttccaactaaccccaaacagttatcgcatagttttaggattttaggtgatgtatatggagtatgtccaaagggagcaaactatggaggactttagttacttttatgatataaaaaacgtaggtcatatcaatggctttcactactttagtaaatgggaaaattttgaaattaatggggtagaaggcatggtttcgaatatgggagaaatctaagtggttttacgcgttcaaagtaccaggagttaggactgacttcaatcgtcgacctagtacgtcgcgtatctcaacacttagtgtatttttattaccttgtaaagtcgttaatgtttatcttttgttgatcgcagataggccggctcaacctgttctaaaccatgctcgcagagaaattgtcgaggttctcggtagcttgcctgttcaagatcgcgattggcaattgctgtgtacgactaccaaactacgagaacacaagctaattcctgagaactccagccttcagcgggagccagtatacaaggagccttccgagaaacaaaaggaaagaatagacaaacgtctatc

SEQ ID NO: 261518 - DNA, 673 bp, Cannabis indica
tttaaaataaattataagtaggatcatctttaatgagtgtcaaaggttcaatatttttataaaagaaaaaaatttcaatggtatatcaaatttgacacatatgctaaaagggttgagacaaatttagtgtaatatatagtgttatacttatatttcgatcaatatgatcttgatacgtgtaatatagctagaatacgaatcggtaggggtatttattggatcacattcaatggatttagagccatccgatccaattcaattatttattagatattggattttgccattcgatctaatccaattaaattgagtcatccgatccaatctgatccaatggatgtattggattggaacggttcgattcattagatgctttaactggttttttattgaattggattggatccaatggatgaatccaatctattttagccactatttaggctgatttcattaaaaagaaaaaaaaataattaaaacttaataatctaataataaacaatagtttaattcaaatccaacttaattttcataatctcataatagaaatataacacaaatctaacttaataagcataagtcttaataaaaaagtaccaatacatcaaatgtaaatattatataatatatttaaatcaatgtgtgcaggtgcacaataaaatatattaataat

SEQ ID NO: 261519 - DNA, 594 bp, Cannabis indica
acatattatcttattctgaaactgtaagttctttctagactaagtcatcaacatagcaatctagtattagcattaatgcaaaataattgcttgagattaactaatcaatagagataccataaaattttatgaggattaggaatttttgcccaagtcattcgaatagactatgcaagaattctactatcttattctcataatcctgataagttatttctatccatatgaatggttagatttactttctcagtagtgttctaaagttcctatcacaagtgtcaaccaaatgaagatgggtaaagaattttaaaattctcccactcaaataaggtactgtgatacaatgtcaaagaactttattggtatcaatttctattacaacagtaaatattaattggaacataaatcaagatcaagaatttattctgataatttgctaattcattatattacatccatgtttaaaatatgtgtgacaaaaagtactgtggtgtattgaatatagtctagagttcaaaatgaactacatatttcaatagtatagtccacccctaagtatatagagattatgatccacccctaagggatatagag

SEQ ID NO: 261520 - DNA, 673 bp, Cannabis indica
aacttaaattagaattaataattaaggttgattttattcaatatacttagttatttatttctatttcaagaaatttaattaatagaaaattatatttaagtgggaaattttttaatttcagatcaacttaaattagaataattttcagagtatattttattttattttaattataattttttcatgtaaatttcagaatacatttatttcaaatgtagatattttgataattctcctttttaaaaattagattaaagttgaaaattaattttagatcaacttaaatcaagtatttttcattaatgattagttaaaatagatagactaaaatatattatatttcaattagaaaattaataattagtttatgaatatctagatagttattttacgaagaaaacttctagtatttttccagatatataattaattaaatagaacattaatatttaaggttgacttgttcaagacacttaaatatttaatattttttcgtaagagatttaattaaatacgaaaaattatatttgtgataaaaattaattaattaatttttagatcaacataaattaaaataattttttccagatttattttattttaaaagaattcaaaaatgtattttttcttaaaattcattgaattttgaatttaatcagagtatatatattta

SEQ ID NO: 261521 - DNA, 559 bp, Cannabis indica
caattgataaaattagggctcgaatgcttattgctcagagtagacagaagagttatgctgatccaaagcggtagaatgttgacgttttaggttggagatatggtattccttcatacccatgaaagaagtaaaatgcttaggtaaaagaggaaaatacagcctgaggttcattagaccttttaaaatcctagagaggatagggcaagtggcgtacaggttggctatgtccccagcgctagcatctgtacataatgcgtttcatatctcaatgcttcggaagtatgtgtcaaactcatctcatatttttgagttatgatgctatggatctttagctagatcttttgtatgatgaacaaccagtagaggtactcgaaagaagagagaaagttctgaggaacaagacactggtgttagtaaaagtgttatggagaaatagcaaggccaaagaggaaaccaaagatttagaatctgataagaggtagaaatatcttgagctgttcaggtaaatttcgagataaaatttctataaggatgggaattgtaatatcttaagattagt

SEQ ID NO: 261522 - DNA, 1831 bp, Cannabis indica
tgtatgagaaatgaaaattaatagtttaaaaaaaagtgtcagatgctgtattttcagtatggcacacacacaaagaaaacaaagatgaaggatataacccttttggggggctataaagctgagccaaaaccaagtgtgaatttttacagattgaaaatgcaaaaagaaaaaagaagcattttttttactaacctaaaacagtggttgtgtgctagtaactctagtattaatgcatattgcgtgtgttggattggagttgttattttatgcatgattgattggtgggtccttaacagttaaaattaggatcatacaaaaattttgataacccttttctgctatgctaatttgcatgattggggttttgagttaggtaacagagaccaaaagtaacagggtttcgtttgattctgtttacgggttttttttgaaggagaagccctttttcatgtttatacttaattttcaactaaagtttatggctttctgttttcattcaaaatgtgccttgttttttcttttgtcttgtgtaaagatgcttttttgatacattgcttgtaattcatcatatactaatgaatcttttattttttttgttgacaggagcacaagagaatctactccttcgaatctgataagggatccagatataatcagaacacctggctctactaccaagcaaactaactcagccgaaactactaacaggagaacacagaactcgtctcagagacacataccaacagcacatgaaatggatgagttttttgctggcgccgaagtggaacagcaaaaacaattcattgacaagtaagcacaccagttttcccgatgttttcgaagttttgaaccctttttcaatttcttgcatctgaacataacaattggactttttttcaatatcttcaggtacaatttcgatcctgtgaatgaaaaaccgctccctggacgttacagttgggagaaagtagtttcctagaagacattaaagcatgtcccatctgggctatcctttcctgcatattttggttgaatcttgatcttagaagattttagacttagcaggaacttagtttttttttcttctttttttagttgtaaaggtagatggtattatttccattttccatcaaccttttcttttttcttttttttacttgtaaagaattaggagtatcaaagatgttgtagacttagactagactaatggtctgtaacataatacaaatcacaagtcctttgtctaacagatcatcttcatcatcatcatcaagaggggaaaaatcaagaagaagaagaaggagaaaaagggtatgaagtttttagtgttattaggtttagtgttcagtcagttaggttcactaatgtatctggtacagataaaaaaaaaagactttatttactagattttgagtttctttttgtactgtatttaactcctcctcttctttgtccataacttgttgtactaatgggaactttaggaaagaaaataaacataccccatttccccctctcttgacatttatgtcctttcttctatcttcttcttctatgttaaaaattttggccctttttgactctctctagtagtgggggacaatgcatatttcaacaaaccttttatgacttagcttagctaccccacattgatatgcatcaaaataatactataattattattattatttgagaaccaagaaacctaatggttggtgggttttgcttataatggtggggtactttgtttttttttttttttttttttttttatgtacctaactatgtatagtgatcacaagtttttgtactctacttgattctttgtaag

SEQ ID NO: 261523 - DNA, 507 bp, Cannabis indica
aaaaataggataaaaagtattatttaacctacttttctcataaaactgggataaaacatatttttttattccaatttttataagaaaaacgatataaaatggtacaatttatctcggtttttatataaaaatcaagttaaaaatatcttttttatcccattgccatgtattttttttcattttagtaattaaaatgtgggataaaaggccttaaaaaccaagattaaaagtctttgcttgtagtagtgccaattattgtgcaagtatgtaactgtactactaacaattctttccgtcgcagaaaacttgttattcccaactactaacaacgatttgatgacgagtgatcaaagaacaaagaataaccaacaataaaacaaaactatgtcagagaaataaaactaaaagactcaaaattatgtcagccttgaccaagctgcacctatgtcaaagatgttagataaattaacaattaacccaagatctatttgtatataacatagaaca

SEQ ID NO: 261524 - DNA, 521 bp, Cannabis indica
ttgtagcattagtcgtcttctacaggtaagtgtttttttttctttcattctttgtattataatagggcaaaaggaaattcattaataagtaactaattgtatatcatattaaaattactagaatatgtacaactgaatattcaaatcatcatatataattatatttatatttaaagtctgtaacttaggttatcgtgtctcttgaaaagatgcctttaataatttatggagagaaagagaacatatatttgatcaattttctagtcatatatatatatgcataaagtatatgatatctacttactagctatgatcaacattacgattaaaataatgaatcaaaattctatgtgtttttgagtattactactcttttattggacatatataatagtaatactgatttaaagcatgataaaactcttataatatgtgtattggtaaatgttaagaaattaaattttcaattcattttagatagaatatatatcataaactcatattaattacttctctttggt

SEQ ID NO: 261525 - DNA, 1466 bp, Cannabis indica
tatgcgagtatgcggttagcttgcgagctataccaggagagctattcttctaagagagagaagttcttcccaagttaaagtgggggagcccactaattcatatgtttaaagaattagggtacttgtttagttttggtgtgtgaatccaaagggaaacactacaacaaatgggttgttcagtgcgaagacttgcatgattactacaagctgcagatagacaatatgcatgggcgtagactgagatcaagattgagctagtttgtggcatgttatgggcgtgctttgtgtttatgggaacactggtgttgtatgggatattataagccgaatggttcagagaacatataccgataggagatagcgaattgggatgacttcaaatcttaagagtaagactttgtgttatcaagtttgttaaaatttagtgaattatcagaggatgcagggttgattttgagagatggacttgtgacacagtgttattgagccgacacgagcaagaccagaaggcaaactcgtggttttaggtgattggtagatcatgcccacgtgaaaaaatcttagaggagcaagtatgcagtgggtcagtggggccttttgcatgaagtcgtggtgtgcgatacggtcggagggccaatatggagaacttcacaaagtgattatgtgcaagagtgcacttggggttgtattaggtgcagttggcttgcgagtctcatccaagtgggacacatcaaaatttaccatgcgatatgagtgtcttgctcgatttccatcaagaggatggtgcgccatggagttggcatgtgaattttctggaaggacttgcccagagggacttagcttcagtagaagcgtgttctgtaggtgtcattgggtacagttggtttgcgaatctcaccccaaggggtgcaccatacttagtccttgtcaaaaggagattaatgcattagacattggcgagtgaactactatcataggatgtgttagcttcaggatcagtgttgcaagtgctacttggttgactggagggacattgtgatggactcagagaagttcatgttgggggaagtattctagtgtggaggcactactccgtgggtggttctgaatagcgatagtggcacaggttcttagatcaagtccaagagtgggcgagggaattcgtcaccaagagggtggttctacgaagatagagggacaagtgtagacttagtattcgtatgaagcttggagtaagctttggagtcgagatcaaaaagattggcctgcagtccgttgatgagggcatcaacatgttgaagtgagggagaatgtaacatgcgtgccaatgtggcacattacaagctaggtgatgcccacaagttggccaagtggtggtcaactggtggcgcatgttgatgtgcatgctggtggcatgttgatgcttagtttgtacggtagtggcatttttgtaaatatctttaata

SEQ ID NO: 261526 - DNA, 503 bp, Cannabis indica
ttgtctcaactagtatgtggaccatgtgcctatataaccgagcttccaataagcagatctagtatatgttccacgatatagatacactatgaaaattttactactataaattcctccttgcaccactatagtaagccaagcttgaaggaaattactatttcacttctatgtccagatagaagctataaattccatatctatgactagcgctcccactcaattgcactatcatgttcccaagctgtacgtgtgacccgaactaaaaggtaggctttgactaacaacttaaagaacacaaataacactcttgagattgaacctaaccatgtcaggattaagatattttgatctaagattaaccaatgatattgacttagaaagatacaacgataagattataaatctttactgttgtgaaaattatatacgcaagtatacacagtcaaacaagtaataaagtgataagtaagatcgtctctacagggattgcaaacaaagtttga

SEQ ID NO: 261527 - DNA, 767 bp, Cannabis indica
atgcatttatttatgagtaaacaaaactaaatacaaataattacgcacactcatatatctacttttttttattttcatttatttctctccatacttggtactaccaattgtggatatatagtaatatttgattaattattaattaatataaaatgggtgcaaattacttcaccaacctaatcattaataagatttttaacctgaatttatcatttagtcaacccaaagttgagcaaaaatattttttaatattaatatctgaccacggctaattattcatacatgctaatatatgctataatacacttaactacttatataaataaacagcttgtattcttaattatataatatgctaccaaatattatataccaatattataacaacaactcatcgagtgaaatatgatcgatttgtaaagttttatttgaaaaaactatcacttctaaaagggttgtcatggtacaagtagttttaatttgtttcgggtttttagaataatttttattttttttatatataattatgtatattgtatttatttagagctattagtaaagaattttaaaaaattcaaaattatttagagtatcaaaaataaagttaaaatattttattgcgaattactttttccttataatgtgatattttttttttttgaaatagaaaaaatgtgatacaatttgaatcttatttttttcctatacaaattatttaagtttttttaagaaaatattttaattgtgctaattaaaaaatattgaat

SEQ ID NO: 261528 - DNA, 1231 bp, Cannabis indica
tgatgtgcaatgttcggctacaaaataaataactgaggaagcactattttcatcaacacttctcaagatggatgaagcttttagaagattctatatgtttgtgtaaaagacggataatttaactatctcttttattttagagatatttaaattttactttcaatctttattttattttatgaatattatataaatatattgtaactgatatcaaaatagttagatttctaaatttaagtgtttgttttatttgtaaatatcttcaagtttaaatgaagatattagagacaatatacctataagtagttatttatttgtaaaggaaatttcgaaaactctaagaatccttgcaaacttaaaaactcccttgagaagagaatttttggagaatataactttgaagaactattttggagcattgagatcaataaaaatactaagtggccaacctattaccgtcaaatgaggcgaaccattataaatccagtgttcatcattttctctcattatttttttatgtatggttacttgaaatctattatttttgttttcaatcgccttattatgatcttcttagatctattgaccaatgacctcatcaactataaaaattaaaaatatatagtttttccttatgtttccccgatttacttctctcgccctcttgctacctttgcacctctagttcttggcctaccaacgccatgtccagtctttgaacctctaagaacctaggcttgaccaacctcatgctcaacctcctcacctcccaactcccaagtaatgatattgttgactcagaaaatcgctaacctagtgtcgtttgataagtggaagccacacatagagagcagaaaattaaacgattaacaccacgattttatagtatttttccccaattcattggaaatggggccatgtctccttgaaattttattaatttcatcaacacttaaagcattcagtctaagtcgtgatgaaaaaaatgcttgcagaagcctggcttagagcgtttggccttaattcaggaaaaaacatgcacttagtttatcagatctctattgtaatgtccccacattaagcctcaattgggtgtccttccacgaaattatggctctcatacacaggtaagtcattttggctgtttcttggagtgacgtcgactgaacttcaaaccaacatgagtatttctaacatgctttgtcctcactcgcacacttcttaggaaaac

SEQ ID NO: 261529 - DNA, 568 bp, Cannabis indica
caaacacccacacctagaatcagacccaaagctagactcagacccggacccaaactcgaatctagactaggatcagaaccaaggacttggacgcgaacccacacccggagcctgatctagaccttcactgaaatctggacccgaaccagaactcagaccaggactggaactccgacccgaactcaaacccaaactcgaactcagaatcaaaaatggaactagagccgaaataggactaggaccaagacaaggacctaaagccaaacccaaacctagaccaaaacccagatagatacctaaaccagaaccgagactaggactcgaacctgaacctatatagcgacccaaacccacagaataaccaggagctggacccagaatcaggttagggacctgggaaacagaactaggaccgcgacctagtacccgacacagacccgaacttgaacctaggacccagttcgtgacccggcaccagaaatggaaccagactggcacccgagattgggatctggatctgtacccaaggcttgcacatgaatccaattcacagtcattgctctttgac

SEQ ID NO: 261530 - DNA, 1507 bp, Cannabis indica
ttttatgttgtttcgttgttatttgatattaatgcattcttgttatttttatatattctttttgttagaataccttacaaatataaaaaaaaaattaaaagtaaaaatatatatttttttttataaaaattagtgttttatgtaattatgtcattattttatatataagcaaggctaatatgatagacttagggagagctatgttcaaggacgaacccacattttggtgagggagtgcaattgcctatcctaaataaaaattgatcaaaccatcaatttttttaatatatataatttttaaaaataccattctttatatacttaagttcccttacaattttattttcaatataccagccttgtttttacaaagtaaaagtaactcaatagaaagaataaaaaattaatcgaacaacttcgatttttttttttttatttattcacagaaaatagtagaaaaagaattgtatatttcgtatgaggagaatgttgaccgaatttagccacctctaaattattaaatgtaaagccaaggaaatcgtaaagaagtctgtttgacccctagccctttctcataatcttatctcttatttcaaacatttcttctctcaactgctcatttaagtttttacatttcgtcatgatttaaatgtagaagaaagtcgaaacattaaatactacttagatagatactactacgtctgacatatccacgcccttaaaaaatatttatacatattacatatagcagtattaaaaaaaaatatttatacatattacatatagcagtattatataatatgtattatgtatgaaagtccataaacgatacgttattaaaaaaaaagtattctagaagtgaattttttgaaacatgaaaaagatggaatagtaggattctaacaatttcgttgaaagtgggtaaatatatataatagcattagaatgtggggttcactctcaaattaatttcggtatagattattatttatattattattggtaatatatgcttgtatttataaagtttaggcatcattttatgtatacttaaatatgaaaagtttggtagctattattgtttttaattatataatataataaatatatgactaagcataatggtattgtaaaggaattcttgacgtgtagactttttgttcacaattgaactacacacggtactatttatcacttgccgcatctacccatctctattattttagatattattatttgagaaatttaccacaaaattctgttactttaatttttatacatttaatttttttaattttgtggtaaaatttcttttaaaagtttttttttttttttttttttatttttttttttttaatttaaatttaagtatgtcagttagatattactattaaatattaactgaattaatattgtatcgatttcgaaattttactgctacatacatacaagtgcatatagtgctcatctagtttatatttaacaataatatttgtactcacatgtt

SEQ ID NO: 261531 - DNA, 538 bp, Cannabis indica
taaatgccatgtttatattatgttaaattggatttagggattcaccctatacttgtaaatctcggaatttgtgactaggattaccgacacttggttagcagcacccgggggattttgaatctctttgtttgtaggacatcaggtaagacagtagttgaacgtagggttatgcatggtggtgcttatgttgaaatgatatacgtgagtaattagaaactgggattagtgttattaccctaacatttggtttatcagcttagagttattaccctagtgatatatgatgagtaaatgctatgccatgttaattatatgagtatattaagatttaggactgtgcattcaaggcattattgtatacagacgtgtgagcgcaacacgtaagtctatgtcacatagacataaataggcatatgagcgtaacatgcaagtttatgtcatacaggcaattgtgaatggcataaatatttatataatgtgataattatgattatcgatattttatactgtcttgctgggcttggctcacgggtgctct

SEQ ID NO: 261532 - DNA, 742 bp, Cannabis indica
tatgtctactttatgaattttcactaagcaagggcgaaattgtaaagaaaggtttatttattgattaagagactttatatgtctattttttttttttgaacaagaagaagattctttattcaaacaagcaagaaaaacaaacaacaaaaccagcacagcagcagccgaagcactactgcctaatcccagttggaaattacattatggatgtagctttcaagcttcccttttcccccattacaaccaattaaacatctagtttttacacaagccttaatttctttactcaaactgctagctgtcctacaactcagatcaaaaatacacttatttctgtttacccaaaccgagtaaatggtagccaaaatcacagtgttgatgatctttttctgcaatgtgttagctgcctctgaaaaccatctgtggaagttaattggccaatcaaaatggccacaccatttagtaatctcacagaccagcctacgggtaaacctgcagtgactgaaaaggtgttggtgcgactcgttttcgctgcaacagacagggcataagggggaggagatcggcaaaaacctgctgaggttgtccctggttagcagctggttgttcaccacttgccaacctataaatctatgtttgggaaggaccattctactccaaatattactggcatactccaaatattatatgtctaaattaataaatatattaaatggcaatattatttgataattatttccaa

SEQ ID NO: 261533 - DNA, 3524 bp, Cannabis indica
tttgacacgcgtataaaataaaaaattacgcatgttatagactatttgaattttattttcggtacgttaaatttttttaaatttcttaaaattttgtaattttttttaaataatttataaaaaaataaattaaaatttttttcttcaatatcaaaataaataaaaaaaaaatacattggtgaaactgttttagaggtgtattgaagaagcactttaaattataaatagtgcatatatagattcaacttgctaaacttttaaaaagtctactgctaattaaagtggtcatctcagcagtaaacacatctgtcgatttacgtacaataacccacctaggctggctattgacttttttggtgttaaaataatagaaaaccacaaagagaagacagtttctatttttacttttaatagtgactataaataataaataaaaataataataaggttaattataatattttacccgaatcttttaaatagttgaaaatttctgttgcaccttgtagattattaaatttaaagatttttattaatttttgttcaatttttgttcaattttattaatgtagaattttgatatgtattaaattgtgtccttaaattttaattcacgtcagatttttattaataaaattgaataaaatttaataaattttttaaatttaaacaaatctcaataatttaaataagaaaagaaacttttaagaggcatgaaaaaattaaagaaaaagattttatagtggtatgtatgtaaatgaaactgctggttggttggtatgtaatatgtatgtatgaatagtggtagcacgttttaatctcggcatgatcgaggcgtggctccgaggcttatcataacataacttcaattgagtaccataccaatcatgactctcattcttctcctctctctattaacttaatttatcatcccaaaatagtcatttcatctttcttaaacattgtataatctctctccctctcacacatttcacttatgaggttaaaatagtcatttcatctttgtatgacaatttgattccatttaagctggtgggttcaatttatgaaaatttcactttgtaataagaagtggttaagagtagtgctctttcacacggcatgaaattgacacaactcaaaaaacacgagcaagagtaaacacgaaaaaaaatatgagtttgggtaagatacaatataatgatataaattagcacaacatggtatgaaatatatgtggttaagtataatataaaaacaaaaaatacgaaatacaggatatatatacatagatagactaacctgaaaaatatagcacacaacaaacctaaaaaataccataagaaatattaaaaatttctataatttaatagatataataataatacatgtattttgccaattataaataagtttaaataataataacatttaaatatcattgaaaattataattctataattattcatagaatgatataaaaatttgagtatttataaataaatattcaaattctaataattttagttatttttttatatgattgtccgtaaaatattgtcgtataaaatatacatatactttagtaattaactcattattaattgtgaaaaaaaaatagaaaagtaaaatacgattttgagcttggatatgaaaacaggatgacctgtttaagaaaaacgagcctacacgagtaaatcacgacatgaaaatactgggtgtaggggtcgtgtcggacctattttttgaaaatgttggcacgacaaatacgacccattttttaaggcacgatatgacaaaaacacaaaaaaaaaaaataacagtatgcacaaatttacaacactagttaagaggaaatttgtcgcatgaattttattttatttattttttattttatttatgtatgcaaaacctttaaatactataagtgcaaacatacccttttaataaaataaattatctaacattatgtagggtcggctctatgttaatttaaaccttagacaaaaataaaaaatggggcctagtaaaaaagtaaagttgttaggatttgaattctaaatctcttaattaataaactaattaaattaccactaaactgcaacacatatttaatattatgagtattattattgtaacgccctaacaattaggcacgctacggtttctgataaacatagcctaaccccgctaaaccagaattactagaaagagagctgaatttaaactttaaaacatttaaggaataaatatttaacttgtaactgtttaaacttttcaaaccatttcaaaatattacacatgatctgggatcccgtaaaagttttcacaaaatattacaagtcactttaacgtgtcgacctaagcaaaaaactgagaatatagatacaatagctggtagacccaagtcgcgtggtctagtgtgacccgaacatgtacaatccaccgctaagccctcaaactcatggctgatcataaatagttttacccttttgtagagtacccatgagtcaagcccagcaaaacagtataaataataataaataatatattctctatgcaaataaatattgatgccaccgcatctactgtctatttagcatagacctatgtgttgctctcacacgtctatttataataaggccttagattagtttatctcgattttaattaccgagtctaaccaaattatgccttacccacataattatttattacaacacatatagcatggcattgcattcaaaattatttaatcactagagtaataaccctagaccatataaccgctcactttagggtaataaccctaatctcgatttctcatttaatcaaaagcgtaatatcaaacatgagcgccacctcgcttaactctacctgctaactactgtcttacctggtatcccaagtatgtggagatttcaaaccaccaggtgttcctgagcaagcgccggtaatcctagtcacaattctcaagatttcacaaatatgattaatcctaaaatttaacttcacataatcatataattggaatttcaattctagataaacatatagagctcggaacgagctttccaacaatataaagaacatcccaaacggaattccgagtcaaaagttatgacgaaaataaaaactaaaattccccggagaaaacaaggcctcactgcggcgagcagggccacggtcgtggcgagcaacaacagtttggtctcgccgcagcgagccctgtcatggccgcggcgaggggccttgtaacaactatttttccaaggtcaaaaattttacctaaaatccatcccatctcaaccaaaacatgcataacctcgaattcaaagctagtacaacctataattgatataacatcaattccaagctaatcaaagctcaaggtaccaattcaaaacatactcacaaaagcttgaaccaaaaccagcatatattctccataaaacaaacttaaacacaaagcctttaaatcaacaaaaaatacccaataataaaccatgccaaacctagattt

SEQ ID NO: 261534 - DNA, 632 bp, Cannabis indica
ttccatgtccttgcgttagctttcagccgtgaggcttactttagaactgcattgcgtctgtttttcattctgctttcttcaagcttcatgaactttttgccctaactcaagaaaaactttctgacatcttgagtatagacttttctttgaacatggatgttctttaatctgttgggtactcctggtcggcatgtttgcttgtttttccgcttgatactccgtccaacactcatcttgcgtgttgtcttttgtagatgaaccctggtgagtcttgggagcctgagcattaaatcgaccaagaactgcttcaacttctgcacgaagtccaccctcgtcttcgtgctaatcttccttctgattccgtacccagccataggatgatggctcgtacgaagaaaactacgcgtctagctgatgcttctgatcctaaggtggctcggcttgccaccttgcccgacaccgaacagaatttggcggtcccaatgaaggaggaccgtgagggggatgctgctgaagtccaggaggttgaggagctggacgaggcgcgtccgggcagccctcccgctgctgagggagaggaggagagtgaaccccctaactatggggagaacaatgaggctggggaaccagtt

SEQ ID NO: 261535 - DNA, 848 bp, Cannabis indica
atggtggctagaaccatgatcgacaatggagcttcttcaaacatcttgttcaagactgcttacgaaaagatgggactccaactcaaggatctaactccatgcctccagcctgtctatggttcctccggtcaaggagttgcacctctaggacaaatccggctgcccctcactgttggacaagctccgacgagcataactatcatggcacagttcttaatattggttgttccttcagcttttaacataatgcttggccgaccagctctgtatgtcttaaaggctgtcacaaaaatattttactcatgcctgaagttcccaacaaagaatggggtacaatgtctaagagggaaccaacaatctgctcgggaatgttacaaccttgcagtggccaaggctaagaaggaagtatcctccagccaaagccgagacaagggaaaaaacatttccaagtaggaaactttccaaggaaagaatgaagatgtggatcctcgacttggggacccaagcagtaatgttggacttgtggaagaattagaagcgatcgagattcatcaagctatccagaccagaaagctaaaaataggaaagggtttgttgctcgaagtaaaatcagagttaataaaatttctgagagcaaacctagatgtttttcctagtcacatgcggatatggttggaatcaacccttctgttattttacatgttctgaatatcgatcccaacttctggccagttcaacaaaaatgaaggctattggacaaagaatgagcagtagccctgaaagatgaagttgaaaagctgcgcaacaacaacatcataattgaaagctttttacccagcttgggtcgc

SEQ ID NO: 261536 - DNA, 1043 bp, Cannabis indica
aaaaaagttatatttaattagggtgtgtttggaagtaattgtgtaattattaggtatataaggtaattactagggtggtaattacacagtttagtaattaaaactatattttaaaatacaaggtgtgtttggatatgagatggtaattacatatgaattcctaatatcctggcaaaatagttaataattacataagaaaataatattttttagtatccaatgtttaatatatggaaagtttttagtaattacagtgtaattaattacattcaattctttcatgggggccatgagaattggagagtgtaattggaacccctcaattacttccaattacacagttatagtgtaattacatggtgcagacaaacatgtcaaattgtataattacctctaattacatacaaatccaattatattgtaattttccaaacacagttttttttttctcaatcctatcctcaatctcaagtgaatcatagtgtcatatatgttatttttttttttgaatgaagtgtcatatatattattgtctagtaatataagcgtttactacttgaaagaaacatttttacgaaaaataaaaatccacaataatgctcctgaagaggataaaaaaaaaaatggccagcttatatttttatgcaattttgttttaatgtatgtaaagtcaaaaaatatgctatatgtttatctgtataaatatatatatagaaacttctcactagtactaaaaaaaaaatgcattttcatcggttaaagggttgggttttttcgagtagcgctaaaaaatcgacactactaaaaatgagcggtgctattaaacactcattaacgtcggttcgtaacaaatgctaggattttgtgtccgttttaaaccgacacgtaaaaaaaaaaaatttacatgaaaattcaaaaacataacttttattacaattttacaatgggaaatttgaatatttatgcattaattgggggataattttttctctaattgaatacatataaaaattgaaaatatgtgacaattttatctaaaaccc

SEQ ID NO: 261537 - DNA, 702 bp, Cannabis indica
taatagaatttatacattaaatacaatcatgaaatatatcatgtgaaccatgcaacatagaatgcgatttctgatctttattaattagtagatatgattatattgaaatgggttttatttagggcacaaaacccaacacgcttaacatcagatgttccttcaaactgagtttgaaggatctcccaagcttccttggcaaattcacaagatgatataagtttaatataaccctcacctacaccgttaaatatagcatgcaatactttgctattgtaggcaaaaagtttaccaattttagtagtccattccagttcagatttaactgtagaattacctgcggaatctgtctcaactggagaagaccaacctgatagaaccatcctccaagctttctcatcttgagatttgatgaaggccctcattctaactttccaataacgataattagaatcattaagtaaaggtggtctagaaatcgaacttccttctgtaaaaaattacattgtatacaaaaacgttaaagcgccacactaagagtttagtgtcctgctctgatacaaattgaaaaaccgagtttttgcaaatgtcaataatttgtaacaggtatatttacaatcttctttcatctgtgtatgacctagagcattactccaccattactcttccttaatcacaaaatccttgataatgtgaaattcctct

SEQ ID NO: 261538 - DNA, 516 bp, Cannabis indica
aggatgtgctactacggagaaacttttgatgatgccctggttcgcacaaaaattagtgaaagactggctgtcaaactctttgtcgttgtccgaaactattttgtacagcgatccaaacgggaagattatgttcttcacaacaaagtcttgaactttcttagatgtaatggttgcgagtggttcgacttctgtccccttagtgaagtaatcaaccgctaccactgcatactgcactcattacttgcctttgggtaattgtccgatcaggtcaattctccaaatggcaaaaggccacggactttgcatctgagttaagtcgttcgacggagctcgaggtatctttgaaaatctttggcatttgtcacatttcttaacctaatcctttgaatcttcaatcattgtcggccagagataaccttgccttagaattttcttagataaactctccccggcagcgtgagttccacaaaatccatcgtgcaccttggatagaagttgtgcagcttcttcttgagt

SEQ ID NO: 261539 - DNA, 766 bp, Cannabis indica
aaaggctggcctccacactcaaaggttggcctcctcttggtggagctatagtaacctacctaggtcttggcaaaactatggtcagcaaggattgacgtgtaggaccatggacggccagactttcttgtaggcctatggatggccaagattgacctggcaagatttcatgtacaactctacacgtggacacaagatattgtctgggaattagggacctaaaagtccaacagactggttgaagaatatctagaatcaagggcatttgatcttttgtaaatatctaactaacaatgatatttttaagggatttgaattgtaaacatagggtttaaggcttcttatataaaggccttaaccctagcctagaaacctatgctgcctctaaatcacttagcttccaaatagctctctctctctctctctctcatgtacacggccattagggctctctctctcttctcttcatctctctcacacgcctactctaggctagctaacacctttggctggccactaccctaggttgtccaacaccctagactgtccaacacctgagatctacctttgtaatcctaagggtgctatagcagatcccacctatagtgatctggatagtatttccctttgtataatacaaccaaaagtggagtaagtcattacccgctatcacaaggaggccaaatgtaacaccctaactagcataggcttgttaacgtgatttcaaacttactgtgcagttcgttgctaatcaacgaggttattggaa

SEQ ID NO: 261540 - DNA, 454 bp, Cannabis indica
gcgattacataaattacaattaaaattctttgccatgtcggtgagacttgcaatagttgcataaagatccaggcttcacctgtttaccattaaaataacctaacttgcaacgacggcagccttcggggaaccctggtggtggagccggccatacatttgttttgtgaatttttttttcgagttgtagtaacctccactcgttcataacctgttcattttcaaaacgtttcatgtcgtctagcactttttgcatttgaggcgtaattttgccacaatcaggctcctgcttgatctcttcatgagtaagaattgggtatttgcccttgttccttctagtagacaattctaagagaattacattctagggttaaataataagaaaaatatgtaacttatgaagtagaaaattgctattatagacacaactagtagttgggaagtgttggaaattatt

SEQ ID NO: 261541 - DNA, 650 bp, Cannabis indica
tgctccaagagtttgatattgagataaaagacaagaaggggaccgaaaatctagttcttgatcacgtgttaagacttgaattggaagagagtcaaaacctgaagtgtacagataaatgaagagtttcccgatgaatagctctttagtttgagggagagcttgatggtaccttggtttgcagattatgtgaatttcttggctaccaatgttacacctccagagatgtctcgacaacaactgaaaaacttcttttcagaggtgaagcactactactgcgaagagccaatactctacaagcactgtgctgatcaaataataagaagatgtgtgcatcaagaggagatgtactctgtcttgaaccactgccatgctttacaatgtggggggcatttcagcaaaataagaactgctgccaaggtttttcaaagtactttttactggccaactctttcaaggatgctaataactttgtgaaagcatgtgatcattgttagagaataagcaacatttgaaggagaaacgaaatgcctttgactggtattttggaggtagagttgttcgatgtgtggggtatagatttcatgggaccttttccatcatcctttaacaacttgtatatcctgttggctatggactacgtatcaaagtgg

SEQ ID NO: 261542 - DNA, 2345 bp, Cannabis indica
cagattcagtaaggtgaagagtatgattcatatcatgcaaaagatgatccatgaagttgaagcagaggatcggatcacatgaatactgcccagaaatgcagaaattcaaaagaaaagatggagggaacagtttgattttgaaaaaagaggttaacagatacggtttgcagaaaaaagagataaactaaaaggagaataataaggataaaaacaaggagtttggtagttaaaacagttaaaatgaaaaaaaaaaacactaactgccacagagctttttaagggcacacatgctcaccatgatcagatttttttaatttttacaatttagctatatatttattcttatatattattattaggtgtttttataatatacacttctaaaaaaaataaaagtgcaccgatctatttttgacatttagaaaaaaaaatttaatctaatttttttttattaatcttatacgttatacttatttaaggtatcctgtaaaattttgagaaatctagaataataaaattaatgttcaaacaatctattttacactcatataaataactacaataaatactactataaaaaaaattagactataatttttgtctataaaaggtgaattataaaattttcctatattatatataactaaattactcaacataaaatagcttaataaaaaagatacttatagttatacgtacactttttcttatcttaattatttttctcacttatttgtaactcaatatattacccaaaacatcaaatacacgtccaaaaaaataaaaattaattaattagtaataatttaataatatatatataattaaaaagaggatcatgtgccccaaaactccttcttaatccttcaaaaccggcacgtagtatgagtatgaccaaatcttctctatatatacacatattcaaaaacttctcttctttcatatacacctctcatatatcaacataaatttgtcctcaaaccctaatattcactatacccaaaaaagaacttgactatatataagagaaaaaagaaaaaagaaagagaaggattattcatatatgtgtaattattattatttttagattgagaaaaaaaaatgagttttgagaagattgaagaagtgtatgatcatcatcatcatcatgatcatgatcaagatttgttcaacataatgaaaaataataatagtctttcaagaaactcttcggtaggatgttcatcgcgaatttactattaccggagcacaggcaccggggggattccatttgaatgggaaatgcagccgggaacacccaaagatccgcccaaagaagaggcgctaccacctctaagtccaccacccgcggtgctcagcttagggcttccaaagccttgcataattcataatattcaagatcaaccttctaaccctaataggaggagaaggcttgtagtacttaggttttggaagaaaaacaacaacaaaaaaaatcataataataataatattattgattttaaagatgagaggtttggtggtgagttttctaactccgatagcgagttcatggcttctccagctagggattcgagctcttcctcgtcgtcttcttcgttgtctagacaatcttcgagattgcaaagcccgggttggtatcctcctatgatgaatagtagtagttctagggcaaacttgagttgtagtccatggagtattaggtcttttctggttacacttgccaagcgagtttgaatgaattaataatattaattgtaattgtattattttatattgatctaatgtattatatctatacatatgttttctgtgaattagaatttgttgcatgaaattttgtatatatatatttttattgatgttacttgtattatttttttttttacttttacttaacaaatttaaaaagaagccaaaaaataaataaattagaacattattgagtcagatattctaacaaaaccctcaacatttaacattgttaatgttaattagaagaattttataatttgattgtaatgtggcagctaccaattatggatcacatgtaaaaataggtcttgactataatttatgtatatgttactatgttagtattcattgattgtagctataattttattttaattttttctttcacattttttaaaattttgaataatttaaaaaatgaccacacatattatttatgttagctatctcagcttaaatggccccaccattttatctcaaccaattagttttgtttaaaaaaataaacaaataatctagcaacttagttggtatttggtaattactttttcatcagttttttgtttttaaaattgaaaaatgaaaatatt

SEQ ID NO: 261543 - DNA, 1999 bp, Cannabis indica
tctgagtggactacatgttattcccaacatagcattccaagcactttctaaaggcatctgttgttgtagtgtaaattgctagttacatgtttcccgttatatatttacactgcattgtttctgtgtattcgtggtgtcctttttcttgatgtccttgtgtgtgtgaatgttggagaatttactctcttctaattgctcatgtgatctaccatttcagtgaagggtctcctgtctaaattgggaaggaagtctgttgtttttgatgagaaccgccgtgcaacctataacatttccaatcaaccagctgtaagatcagaatcagtactcacgacctttgagtgtgaaatcaagcagctggttgcggtatgttcacaaattttttagtcttcctttgaacttgtctactgcacatgttccacttatttttaatgtgtatttcaaaatatgttgggatcaggttgggcttcatgcagagtacgcatatgctagaagcctggctcgttttgctgcaactcttggacctgttgcttggaaagttgcttcgcagaggattgagcaggcactccctggcgggtgtaaatttggccgtggttgggttggagaatatgagccacttccgactccagtattgatgcttgagagccataaccaaaagcaaagtggtttgatttcgatgtatacttctgctggtgaaatgaggaaggatgataaagcctttaagactccagttatgaaggagcaaactgttagcgggtctttttcagagagaagacaatctaagtttgttaccgctaagggacctcaatcagaaaccaaactgtccacattcagccccactgggcctcagtcagaagccaaactatctgcattcagttctaccggctttcaatcagaagtcaaacaatctgcattcagctctcatggcactcagtcagaagccaaaccatcttcattcagctgtaatggaatgaaacccagtggcagtgtgaacgccatttttcagcaacaaaatgcacatttgaaaaacttctgtaagcctgagatcaattttcccaaacaagtggagttgaactccttacccacagccaatcaaagtaatgctgagctaactgccgaaaaacaattttccagaaatcctgaagcagcagcttctaaattgagagatacagcaccaaagcatgtgaatcttaaacaatcattacctttcaagatgccagatagtgatgttgttactggaggtttacctcatggaaaagacatgagtgcttccctagattctcgaagaaacaatccctctgataatggttccgatcaaatagtcaaaggggcaacccactttctgcatggacaggagccaggtcttagggattcagtacacacaatgaatataatggaagacaagacacagaagcaacagaaatcttcagatttatcaggaattggtactcaacaagttatgccattggctccttcagttcgaagagaggactcaaacaatgcagcagctgctgctgctcgtgcgtggatgtccattggggctggagcgtttaaacaatcaatggagaatccatcctcactgtacaacccaactagggaatttcagtcccaagttgcacaatctaatggtgattatcctgtttctggtgcaatgcaattccagcctgagagaaatagtactcaagttccaggattcctcccacaaccattacgtatggggaatgaagcgcactttcgtaatcggcctttagttttttctcaattagctgcagctgacttgcctaggttccagatgcagacccagtggcgtggtctgagtcctcatgcccctgcaaggcagaaacaggaaacccttcctccagacttgaatatcggtttccagtccccagggtccccagtgaaacagtcttctggtgttcttgttgagtcccagcagccagacctggctttacaactctgaatatgaacatgtattctgaggatgtggaaatgagtagggcac

SEQ ID NO: 261544 - DNA, 891 bp, Cannabis indica
aaggcttaaaaatggcgaagtatttagagaaagttcgaaagaacttggaaagattcgattactttaaaatcgaacaaattccgagagaacaaaactccaacgtggatgccttagcaaagctagcatcgcagaatgacatggatgaactaaatctggttctggtagagatgctgagcgagccaagtatatgtgaaactaaagacgtcgagatgatagatagatctccaacatggctgacgcctattatcaattatttactcgacgggcaacttccaaatgacaaaaacgaggcgtgaaaactattgtattcagtacctcgctacacaatgatcgaaggcaaactatatagaagagaatattcaatgcctctacttcagtgtgttctccccgcagaagcaaacaaaatcattagagaaattcatgaaggcttttgtggggatcatgcagattggcaaagtctgtctaaaaagatcattagacaaggatattactggccaatgatcaataaggacacacatgagtttgtcaagaaatgtgataagtgtcagaggttttcacatatacctcgtgtactgccaacaaaacttagaataatgacgtcgccctacccatttgctatatggggatcgatataattagggcattacccactgggcgaggtggagctaagtatgcagtagtagcagtcgacttcttcactaaatggacgaaggccgaggccctcgtctccataacctgcaagaaagtcgttgactttgtcgtcaagaacattatctgtaggtttggaattcccatgaagatagtatccgataatggaacccaatttgatggcgacttgttcactgaattctgcgagaggaatagaattatcaaaagcttctcgtcaatatc

SEQ ID NO: 261545 - DNA, 1337 bp, Cannabis indica
gtatacattaaatttattatagttttttattttttttttttaaaaaaaataaaatcttgcaattaatctatgtataatttaaatatatgtattatacttttataatttttaatgtggttattttttttcttccaatatatataagtaaaaataaaaagttaatgaagtatatagattataataaataactagttattataaataattttgttagaatgacataattgtaataacattagaatatcataatattttaaacaaaaacaaactttactcaaaatttgacatttattacatcaaagagagtgtaaaagagagagtggggatagagagtctaccttagcactcctcattaggactatatcagataagagtacatctttagaggaaattatattgtatacctactttactttatttattttaatttttaactctattttcatattcttttaagatatacacacttttatagatgatgtccccattagatctcttaggttaatgtaaattatatgctagacttaagtagagaatgagggtatattgggcaacccactcataaaagtgggtatattttaataaaatgtaatatggggatatttttgattagtggatataaaaaagaagtatttttcaacttatcccgttaatctaaacgtttagaattaatagttttttttggagggggggggggatttacaaaaatattgtaaaatggggaagaatttataaaaatattgtgacacatagtttttttatattattattttaccaaatttacaaaaatattgtgtttaaatttttaaaattacaaaaatattgtgtttcattataataaaagaacatctaaaaaacaacgctgaaacaccttaacaaacaacatgaaaacaactataaaacaataaaaatataactacaaatcaacagtaaaataacaaaatattcaccttattggctcagagattagcctcagagagcaacatcaacaaatattggcagttgaagctaaaagacaactaaagcatgaacaattaagcatgtagcgagtacttctcttcccaaatgagccaatggcatatcaaacccatcaatggcaatccacccatattctttcaaaagaattagcgaaataacatacctattctcttaaacaagaaataacaagtaaaaattaatgatccactatgtataaatcccaagatactaaaaattgtatgacatagggtcagaagacacccaagaatcctcttgctctcagaaacaggaaaataaaagatgatactcccactaccaatctgccaaacatgattaaccaccaatctcccttgcgataa

SEQ ID NO: 261546 - DNA, 623 bp, Cannabis indica
gaaaagaccaccttcccctgaagttgatcaaaaagatcatcgatcctaggtaaaggatatttattcttgattgttagcttattcaactcccgatagtcgatgcacattcgtagagacccatctttctttttcagaaacaataccggagctccctagggtgacacactaggccgagtaaatcctatgtcaagcaacccctgtagttgaattttgaattctttaagttctgttggagacattctataaggggctttagaaaccagttctgctccaaggtgccaaatcaatttctcgctgaggttgtaaactcgaaagttcattaggaaaaacatttagaaattcccgaaccaccttgatgtcctctggccgaacagagttaggccgagtggcatccaataccgcaaccaaaaaccctagacatccatcacataacaatcctttggcttttaacaccgaaattaccgggattcgagatccctgaaccgaaccgagaaaaacaaacagttcttcaccttctagtttgaagattaccatctttcttttactgtcaatactggctgaatatttggacgagaaatccattcccagtataatatcaaaatctgctaagctcatttctatta

SEQ ID NO: 261547 - DNA, 1085 bp, Cannabis indica
agtttagtttcagagtcccaaaacaattatcagtttggaatactgttttaagctttttactaactgtgggaaaagtctgatgttatgtattcattcttattgcattaaatacattacatatattgctgaattgaacatgttgatttattcttattttttgaatagtactttgtaactcctcttatcatgttgaattgaacatttgatagttgatcccaaaaataaagcaatatgttaattgaagccaaaaatatcatagatgagagatgacaacattaacaaatgactaggtcacaaactgtaacattattcaccagaaacgtaatagcaataacaataacaagtctctctttaataataataatagtaagtctctcttttttgttcttgaaatgaacttctctttaaggcataaagccaaataaaaagatccaaataaagtcacaactcaaaagacacttggaacacacagacacaagtcgctcatggcaataaacagtaaataatttttttttttttgaatatttatggcaaaaatatccaaattattagaagccaaagtactttttgtactaaattgcaagtttgcaacaaaacataggtgaacaatatataattgaaaggtacttttattactaaaaaaataaattcatttttttaaaaaaaaaatcaataatttacatatatactataaatgtattaatatgaatatttttttctacattttttttactgaaatagcataagtaaggtttaaattttgatgacgataacaacatataatttttgaatatctattaaaccacatccgaatcttaataatttgtgcatgagctcgtcccacatgaattttttagaggatacattttataagctatttttaacttttagaattagaaaattatttataattaatctatttttttttcaaaatagaaaaatattcacaatttctaattagttttttttattgattatccaaatataatagggtaattttacgatgtacccttaaaaaagatgtattgatacactctttaattgtttcggaatccaaaaaatgttttagtttaattttttttttt

SEQ ID NO: 261548 - DNA, 714 bp, Cannabis indica
ttgaaatattaatgtcagagcatttattagccgaaaatcgaagggacgcccagccaacctcacatcgagtctcggacgattgcactcaacacgtgtccgcatccaaaggtagaaacagctcggatgaagtctacacgcaacttcggaagtcccgtacagacttggggggcaaatgttatcccaattttgcactctgacatggcatcacatgaatggtgacacgtgtaatccacttggaatatctgctcaggaagaacagtctgagtagggcatatcgctggcacacttataacaaagtattcagcaatccgcgtagagcagccaacacttagcgaattcaacttatgcatcatgagtcattagcacaatccctataactcagggagcaacttacgtggatatggcatacacacgatcccactatcagtgtattcagcctcaatcccacgatccttgtatttagcattgatcccaagatctttctatttatacgcattgtaacgagagaggaaactcttcctcttcaagtttccttgccctataaatagtgacatatgttcactgggcgagggaggataaaaaaagaaaagagagagatcaatctgtcaaaaagcagttaagcaaaggccatattattatctaagaattatatattcagagatacaattgtaagagctataagaaaaggaacctttctccttgatcttaagtcaa

SEQ ID NO: 261549 - DNA, 6647 bp, Cannabis indica
tgtgggttggtgagagagtccgagatgtttgatgttaggggttgggtcagtggtagtcaaaaaataggaaggataatttaagaaatagataaaatttagcctagttggcaaatattagttaatagaaataaaatttaaacctaatggattgaaattttgatcattaactacactctgcaagtacaatatgtttggcatataggtatatatatttatgccaaaatttggtgatggtcattcacgaatcacgtgagtatgattttatgttttttgtgttgctttgaactcaaattctgactttgccaccgctaaagcattagacaagacgtagttttggttgaatatggggtgggattttcatctatagaagtggacatataccaccttacaaccacatgcacatgcacatgcacatgcatgtgtcactttgactacttccagcaaatttgtttggctctatactataataacatataaatatatatatgtatattacgtaggtgatgagccatagcttcactgcacttaattttataagcaaacgtacaaaattccccttcacacacacactgtaaatgcccagacgaccttccaaaagctaatcagctttttctcctataccttcctttcctattctatacatatccatccatgttatctttttcttcttaaaaaaaataataataataaaacccaaataatcagatcaagatccatagatttgcaccattaataattaattattaggttatattaatattatgtcagcaagcaagacttatgatctatatatatatgaagggattaacaaaattagatcatgattattctatacatataaaatgatgatgagattctgaacatatctctggaaatatctcagtatggttagtccgaatatagttttttagtactatagttaaagttggggttcaatctaatttaacatttttctcttcatatcatctgaatcaatccaatttgtaattgaatttggaaaattattatccagtctaatctccaattaaatctcaaaattcaatctaatctaattcaattactaatttaatttattttttaaattgaatatccaattacacacctaaattttaatattaatataaaaatatgataaaaaatacgtaaaaattaaatattatcttttattgaagtttaataatactacataaacatactatcgttacaaataaaatgcaactaaaaatttaaaatatttaaaaaataataaaataaacaaaatatcatgaaaataaatatacaaaacaatcaaggattacatataaacacaaaaaaaatcaataaaaatataattaatgtatattatatttttttattatataaataattttttaacatatataaatatataatataattaaattagatcaatatttaatttaattttaaaatttacatctactaattaaccgatttaatctaattaaaatttaatttttagcatttaatacaagttcaattcaaattaaattaaattaaattaaatggtgtccagtcctaattaatattacatatattgttaattcataatgccttattaatattcaatatgcatgattattaaaaattgttaagtgtagatctactttgaaaaaagtaatgtagattatttggggttgagtaatgcagcttaatttatagagaatatatttggtccaactccaacagcaataatgatgaccacttctatatatagacatagtattatatacaaagcactgcaaatagaccacgcattaacatatattcgctcgtgctccaacgccactcgccacatgctttggtgttatgtattgaaagtgatctatcctcttttattttttatttttaagaaaaattcattcaaaggtatatcacactaagtatatattacatgcccaaacagctaaagcaaaacaagttaggcatatgaaaatgtttacagcagaaatatttttgtgctggtaaaatataatttatttttgatgtgttggcaaaagagattgataaatcaacgttgatattacaacttttacattgccaacacaaaatgaaaggactggcaaaaatgattttttccagcgcgtaaatacgctggtaaaagttagattttaaccactataaatgtgctctagttaaattttaacccttttaccagcgcagtttgcgaaatgcactggtaaaagttatttttactaatgcaataacgaactatgctggtaaaagtaatatttcttatagtgctaacactaaactgctaggatgttgtagctccatcttataatcttgcagaaaaaactccatcacagtagaatcccctaaaacaacaatagaatcaaccttacaatgtccatgctgcaagtcatggaggttatgcgggtactaatagatctcgtggcaggggtagtagaacaacccaaaataatggcagtcgcccaatttgtcaaatttgcgggaactatggccattcaacagctgtgtgctataacctttatgatgaatccttcatgggaagtggcccttgcgacaagaaaaatacttaaccttaatttggattcaacagtccaactacctttgtcatgactccataggttattgatcatgaggcttggtttaaagataggagctaacaaccaccacaatgcagatcccaatcagttgactcaatccactccgtacgatggtaaggagagattgactattggagatgataacttgttattaatagcttataatagaactttctctttaccttccctatctcaaaaaactcttatcttaaaagatctattgcatgtactttagattgttgaaaacttaattagtgtatctgagcttactacagataataatatactcatggaatttcactctgattttttctatgtgaaggacaagaccacaggtaaagtgctactccaaagagctcttagagatggcctctaccaacttcaactaccatcctcaccttctctatcttctttttaagctgctattaatgtcgtgtctcaatgttatgctcatgagtctaaagtgtcacaaaataatgtaaatcaatttgtgatcgatgagtctttgaatctaataaatgaggtttggcataggggactaggccaccctcaactagattcctaaaacatgttctggtttcaaccaatgtaaattctagctaatgaacaagttccttttcgtgatgcatgtcaaatgggaaagtctcatgctcttccttttactctttccactagcaatagccacagaacttcttgaattaatacacactaacctttagggtgtggcccaatcatgtctaacaccaactataaatattatatacacttcttagactattatagcagatacatatagttcttttcactcaaagacaagtctgaagccttaacaactttatcttaatttaaaaatcttgttaaaaataaatttgatgctaaaattaattaaagtcttaagatcaaattgggggtgagtatattctatttggaaaatttttcgaagattttggaattcttcttcaacatctgtgtcccgtttcctcagcacaaaacgggagtgctgaacacgaacatcaacatataatcgatatgggactcacgctgttagcgtagattggcatgccattataatacttggtcgatgcctttatcaccttagtatatatcgttaatcaccttcttccatctgttctgcagtcttagtcaccatttgaggtactattccataaaaaaattatattactacaatttgaaaacttttgggacaacttgttttcgctatcttctctcatatcaatcatacaggttcaatttcagatccctcaaatgtgtcaatttaggctacaatgatatttttaaaggctataaataccttagctctacgaggagaatgtatatctctcaatatgtcacttttaatgaacatgaattcccattcaaacatacctttctcaatacatcaccctgaacaaccagttcacacttcctaattacacttactgtttcaactaattctacaggtctcctaggtccattagactcatctacaactcctagagtatcatctcctgattttgactcaccacaaaacacctccactaaggaaacattccctatatctccatctattcacgactcacatgatcttgattgcagcagttctcctagcttgcatgttgcaacatcttcctcaacaggactcaccatcacctccttttccttctcaccccatggtgacttgtgccaaagttggcatatttaaagccaaggtttatactagctaatcttagtggacttcctgcattattgaaccacactctgttgttgaagcccttaagactaagagaaggaattgagccgtgaatactgaaatctatgctctcaaagccaacaaaacctagacccttgtccctttctctccttttgaaagggttgaaaaaatttggatagggttctcttttcatctagatgcacagaggtatcttgaccctttaaataattactcgagccacacatattcagacccatatctacactattacttgacccttcattaaattcttctcacctcttggcccaatagttaaaattccttttgttgggccactaccctccattaaactcttttcactgttcgacctaggaattaaagttccattagttggcccacaagccttaccgaatcaaagatatgtcttggagatagattcaattcaaaaccaccgatttcctcatggcccaaacaccttccaagcccaataattccataaaagggctcgagttgaccgagtcaacaaaatccaagccatgcaaccctttgaccgagtcaaccaaatccaatccatgcaacctttccatcttgcagagatggcttcgtcgagtattcacccaaaacaacaccgcctctagaaaccctactcattcaacgaaaccttaggaatccacaccattctagccctaaaactagaaagatcaatcatttttaaccaatccaaatcttgatctgtgagaacaaaggcctgaagcaccatcaacattccagatctgaagaccttccaccggcgttggagacgacaccctcagacccttcgatacatctcagaattccaattttcatttgtcactcttgaccctttattggaaacatacagtcaacttgagatgcagcttgggtacggagataagatattgagccaagggccaaagagaggaaacaggataccctgagcatccagaataatgaccggaggagccagggaacaatcccttctctggtgacctaggcgtccataaaggtaacaaaaattttccaacttctcatatttgatttgaacccaactattctcaccattaaccagtttgataaagcacccacagaataaaggattgttcacatcaatctcaacttggattctaatccatttgtttcaagaaattggttttgactcatctagtttaataaacacgaccttccccgcttgagcacccagtaagttaggattaaccctgaagtaaaagtcatgcgaaaatggtgtatttggatccaaaaatggattgagttaaaagacaaatcctttagttcgaaccgagaggaccaagaaagcaacactaacaactctcccttaacgcaccaaggtccatgagtaagcacccattgtctgaaacctttttaaagccaaaactgaaaatattagaaagtgtttgacaagaaaatggagcatcgactttcacctgagtcttccaaagtttagagcaaaaattttccacttttcttctccataaagactctagaagagaaaaacttgccaaaaagacagaagttagagagaacctgggcagtcgaggcattagggacaagagaaatagatgccacattaaatgaaatgcatctacccctcttacctacaggcagttcaaaaacttcacccataataagtaccagctaccaatacacgcacaaaaaccacaaaacaaaccaagccccacaaaaaagacagaccaaaaatagactagacaaaaggaataaagatccaaaaaatagtgatcaaagaaagacagacgtacaaacacacaacaacaaaggaaacgtcaacgaggacctcaacaagaaaacatgagagctaataagtaaactagaagaaaaagcacaagagccacactagaaagaagaaacaaaaagcacgggtcaacaaaagcaggaacgggagattttgaaacgaggagaaaaaaagggaaaagatagagagtagtagaagctcattctctctattggaaatttctttagtgcacatatttttcatatttgttagaagtttgagtggcaaaatagtaaataaaaaaaatgatatttattgtgatgtaaattttgttcattctacattttgtgttaaatttagtacaatttttaacatgtatcaaatttagattatattatacactaatattagagttcaattttataaacataagctagaaaatatatatgctagggtttagggtttagggtttagggaaattaaagatgttctaaatacttttccctcaaatgtagagaagttttatacgtgaaaccaatccaccaaacatcataacttcctacattgtagaatcaatccttgt

SEQ ID NO: 261550 - DNA, 828 bp, Cannabis indica
tcctttcattggagtcacctgtagaaatacatgatatttaacctaaaattttatatctctacgctttggctctgcataacttttctgcttgctctaagacgcaagcattctggccttgatcgatctctatcatctcattgatccactgaactgattgcagtgtcaaattactatgtctgccaaccacaaagtcctgcattgaccatatccacgactaactgaggggaaatcataattgcactgaaaacctgcctgagacctttcctgcttcaggcatcttccaccacattaaccttcttgggatgatagataatttcacaatcgtaatctttaactaactccaaccaccacctctgtctcatattcaaatccatctcagtaaagaaataattgagtctcttgtgattggtatagatttcacacttttctccatagagatagtgttgccaaattttcaaagcaaaggccattgcagtaagttttaggtcatgaattgggtatcgttgctcatactccttcaattagtaagaagcataagcaataaccttattagcttgcatcagaatgcaccccagaccttgtttggatacgtcacaataaactacaaacttttcttgatgtgacagtaatgctaacttaagagttgtgatcgatcaatgcttcatctcttggaaacttgcttcacacttgtccgtccatacaaaccgtttattctttttagttaattttgttaagggcattgagattttaaaaaacccttcagaaaaatgatgataatacccagctaaacctagaaagattctaacttcactgactatctttagccta

SEQ ID NO: 261551 - DNA, 741 bp, Cannabis indica
taaatatttatttatttttgtattcatttatttccttcagaactcataatttaacacttaatataaaagatagcatacgtgcatcgcgcgtaacaatatactagtatatatatatatatataaaaatacctgtggccaaataatagctgcagccataagacccacataatcgaggaggataagtccatgacaaataagtgctatgggttttgctccatattcagttgggaacgttgttacaccaaacctataaataatcctcatattgtttagttttatagtaaattataaaaaagaaaaacaatgaaagacaaaagtagattaattataattgatataaacttacttgcggtcaccttcaatgtctgaaagatctttgccgatgcagatggtaacagcaatcaatgaaagaaaccaaacgagcaaacaaaaagcagggctggacaatcacaattcataaaacaaaaccattattaaacatcatccacaaaatgttatggtaaaatatatgaggttttatttcaataccaattagtatacaataagaagagaaactcgttgcattataaccggacctggtataggcgggctaggcctgtgccactaaatttcaggaccgatgcattgcatcttattatgaaattgagacttaaaatagctaataaatcactcattatgaaaaatattgtatcaatataatgttgagtttgaaaggagatgaacagtgattgaattgataat

SEQ ID NO: 261552 - DNA, 575 bp, Cannabis indica
agccttctctctccacatctttggccgaacccactctctctctctctcttcctcattgagatttcgaaatggtaaaataatttccaataagatatacctaccaactgttagtaaacaagatgttcaaagaccatatcagaagaaacatggaagtatatgtgttagacatgatcatcaaatccaaaaaggatgggggaacatagaggatctggatgaatgctttaaaatccatagaaaatacaacatgaaactcaatcccttaaagtgttcctttggggatagcttgggtacgtttcttagatttcttgttaatgctcgaggaatagaaggcaacccagagaagatacaagccctcttggatatgaagtcaccaataaaaacaaaggaagtgaaaagcctaactagtcagatagccgcactcagcaaattcgtttcaaagttgacagacaagtgtgttcccttcttcaacattctctaaggtaataagaagtttgaatggacagatgaatgtgaaaatgctttcccagaactaaaaatgcaacttgcaaaacctcccgtactctcaaaacctttgg

SEQ ID NO: 261553 - DNA, 997 bp, Cannabis indica
aatctacattagacatatagaccacctacctcacacttaagctttccatatcatctaatctaaccaagtccattaagtttttttcctatattaatggccaagacagagatactagtaacaactgtagcccacagaataaatgtaaaaaattaaaggcactcaagataagatggctgcaccatcatcagatttcattgtcttgaaaaaaattcttttggagagaaaaaaaaaatagtcctacacaaaatccaaaccccctttcccatgacttgttttttcaattttttcttttcttttcttttctttcacataaaacgaaattcagtaatcgtcaaataagaaactcaactcagtaaaccagagggcgaatacaatcagatagataccagaagaagtgaagaagtagctgtagtagcatccaataatgttgcctctaaatgtacatctttcgttatgctttgcagcattacaggtgaagcttcttttgttttggtttagctaatactccaggaggtgtttttagtgggattccaccagcacatacagtggtttcccatgcaatctctcccgaccctgaaaacagaacaagtacgaaaaattagactcattttttagctgcatagcaaaaactaaactgacaaatcataacactaggcttcttctttcttgataactaacctgtaaatccggcaactcgataacacatgcacattccacaacttcagctccaacgcgttctgcattatagttcagcacaaagttgagagaatttttcagccaaatgtacaagctatgtaagttgcaggaggtgccaaacaagaatttgaggcataaaagaatgttttgtgtaggatatactatacataaacatcacacaaaacctgtggtgtgacaagtgatattgccattcaggttaatagcggcataagtacctaaagttttgagtttgtaagtggcataaacccaatgatttttttttagtagcataagtacccaa

SEQ ID NO: 261554 - DNA, 816 bp, Cannabis indica
aatgtctgaaggttgttgattaactcagggaagtcaaaatccaacttgttcataacataatttgatgtaaagggcagaaaagctagagtcaaactattaaagttcaaactcacttgagttgtctgatctatgatagctccattattctcaacttcttggaagtaactagtcatctggagcaggtgatcacacacgttatgatgaggtttcatctgtgcattgataaaattcttggtcgcctcaaaacgagcttgatctaacgccatcccaaatagttcagttaactagttcatgatatctgcaggtgtgagaatattggtaaaccttcttttcaaggtgtcgaccatgctagacatcataaagtatggagctttattattagcattctgccaacgctcgaacttttccttgactgccttggtcgcattctcacatggctgctcaggagcctcttcagtcaacacaaatatggaattttcacctatgagagcaatattaatgttctctttccatttgacaaagttagcactagagagcttgttgtcagtcaacagtgacaccatggggttgttcatagccataatgggtactacaaatatcaataaatagaaatcaaataaggtttaatacaaaatcatacacattcataaattattagcacttagcaagtaggaatgtcaagtgaaaatataaaaacatacaatcctaaataatttctaaggtttccaagaaactgataccagtgtcccgtttaggcgagagtcaaagatatcatccattaaatagagtagtcagctctgttggaattattttacc

SEQ ID NO: 261555 - DNA, 666 bp, Cannabis indica
cttagaacataagtattatatttcgcctacacataattccttgattttttttttttgtagttttatcaggttgtaacacactaatgcttagaaattatactttcttttaagtgaaaaaaaattctacttttttaaaagaaagttgtgcttaaagaaacaatatattttgaaaaatatagtgtgatttatttccactatatctaaaacttgggaattgttaacggctagaactcgttaacaatataattagacttgtaaaactaatacttaaaagaaaatttaattcaagaatgtttagaatagggatctcataaactttttatatctcaagaggttactgtttcattcctttcagaaaactcaaaaaatcattctttactgtaacaccttgatccacagggacgccacgtgtgtattaccttattggtagcctccacttgaccgttggtctcggggtgcaccacaaccaaaaatcctctgcgtattcccctctcatcacagtaagctcctaataggtcaccaaattgagttgcattattagtgataatcttatatgggactccaaaccgaaaaataatgaacttattgacgaaagagactacctgtttggaagttgtgtaccagcggttcagcttctacccaattggtgtagtagtccgctgctaa

SEQ ID NO: 261556 - DNA, 1732 bp, Cannabis indica
aaccatgcaacataaaatgttatttttgatctttattaataagtaaatctgattatattgaaatgggttttatttggggcacaaaacccaacatgaaattcctgagaactttcttcttagagagaaacaaaaggaatatagagattatcattgtaaacacttttagtacgcaaacattttccaaagaaggataatactacagactcgtggactaaggatcattaacgcctcaaccacgtaaaaaatctatttatctattatttaatatttttcatttccttaagctcctattaatcaatttccgaaaatctcggtaaacaaatagtgattcctgtacagctcaccgtacaggaattagtataaaaaagctaagtttccaccactctttagtggtggcccttgttcggtatgtcgtgcaggggtagccaaaatgacgaatgaaagcagactttctaactataagcttttattatcaaaaaatgtacattgtacaacaacaacacatatttaagaccaataaatggataaaagagtttatctttccaaattgtgtcaaacaacttgctaacaagataacttcttaaaatcgatatttacttttagttcaacatgcatacaaataggtccctccaagaaaatacataggcaaaggtctatggtattttttgagtttcaagtgaccaagagaccataagtctactcaatcacttgaggggcaccctcactatacagcatcaaacaagcaccgctaaacttaagcaaaatgtaaagctttgttaagcgaaaaattgaaagctcagtaagtgcaaatggcatacttcagattagacataaaaaacataagtctggattaaaagctatccattaagctacatgtttagcaagagaagttaaagcgaagattaaagattgtcttgttagtcgtctgttcaaaagtaaaaggcactaaggccatacacaaacattattcaaaagtaaaggttcataaggccatacaagaacaaacatatcatctgtccaaaagtaaaaggcctaaaggccatacaagaaaaaaaaaataaagtatgtgaaataaaagcataagaacaaaccacaaagtcatcaaaggtctttaaaataacaactggaatcagcgggttcaaagttgtatcagaaggataagttttctagactaagtaattcttcatcaatctggttatcaccaccccaaaagtcgttccagttcatttatgtaaaaggtagtgggaggtgaacaatcggagaactgttgggaatattttacaaggatctaaatttcttaacaagtgtgttgatttaacatcctaaatataaattctctaaaataatgaaataaaaacataagggtttaagaaaaccttacattgattgtagcaaaatataataacttcttctgttcaagatctctagcacttgaatcctttgtgtagcagagcattatcaagatctgaacttggatctctttctctcctttaggtttgacaactcttactcactatgattaagtacttgacttgctatgtgggggcatagaactcattcaccatgggttttgaacaatgaaggagatgaaatcactatgcaaggaactctctcatctaggttagttgaatagtcaagttgacattagttgaaaagttgtcaagaggatgagtgagagtatcatgttccttttatagtgtttcaactagggcttagggctgaattatatgga

SEQ ID NO: 261557 - DNA, 676 bp, Cannabis indica
tcggttatatagacccatcggtccccatactagttgagaccatactgcttgtaagactcagttctaattaataaatatattagatgacaatattattcaataattattttttagttaataaataattagaattggcatttaagtggttaaattcgaaaattggtatttttgagaaaataggatggaaaaatgacaaaatggcaaaattgcccaataactatcctatggccagccacactagtagaatattactatttatttttctattattttaatgccaaataattcaaacctaaacctaggtggtttcctataaatagatagtgatggcccacattcacacttaactctgtcagatgaaattcactttcagaaaaattgagcttctttctattgctttggccgaaaccttttgttcctcctttcttcttcaataatttcgaaccttgagtgaatgagtgagtgcccacacacatcaagtggtatctcaatcatagtgtggaagattgtgaagaatccaatcaacaagaaggagaatcagaataaaggaaggagagaaagagaaccaggttcagatcttgataatgctcagctacagaaaggaatcaagggctagagatctgaacagaaggagtcattatattccgctgcaccgaatgtaaggtttcctaaactt

SEQ ID NO: 261558 - DNA, 491 bp, Cannabis indica
tcccggcacttgggatctgcataacttttatacctgctctgcgaagcaatcttgtttattgcctcatttcttttctagaccagctcagggcctaaatatttccattctcctgtttcatcccaatgaattggggaacgacattttctaccatagagctactcatagggagccattcctatggtactttgataactactgttataagagaattcaattagaggcaaatacttactcctcgaacctccaaaatccatgacacaagctcgtaataaatcttcaagtatttggatggttcgctcagattgcccatctgtttgaggatgaaaggttgtgttgaacttcaaactagttcccatagccttctacaaactcacccaaaactttgatgtaaatttagggtctctatccgagacaatagactttggtaccccatgaaggcgactaatctctttcacatacaagtcagcatactaatctactgtataggttac

SEQ ID NO: 261559 - DNA, 793 bp, Cannabis indica
agttattgattctaaattattaaattatgatattttatttgaattcagaattcattttatatgtcatatgtagaaatttcataaattttgcttgttcagtgtccgccaacattggaacgcggtgtatggcttagttgaatcacatcttagtattttagtatagcatggcaaaatagttagacattgggaatgtcgagattagtcgggaatttaaaatttcccaaaatacccctaaatgccattttatgttggttggtgagggaagggaaaaatagtcttttgccaagagtttcttttgtcttttagcaatttttattttaagtttatttcagcttatactttagataaattagtagttaataccaaagctattacatttatcatttatttttcataaaaatcaaaagaaaaattaagaatcaagctctcttctctctcttcactccttctttctctcgagccctaatagcaacttagtggagttcctcagctggttttgtgcttagtagttagcctttggtgtttcctttgaaggtaattctctttaggatgtgttttccataattatcttaagctttaagtaattatttattgcatggattgaatattagaattctgagctgtggattatgttttctttagtttagttaggtttcatatgtttgttttagcgtgttttgattgtttgggtttgagtttggacaagatttgagatagaactcaaactttgatctatattggtgaaatttgattttgaggatctgtagtttgttttgttgcttgggttttgttc

SEQ ID NO: 261560 - DNA, 548 bp, Cannabis indica
tgtaataacatctttcattaacgtgtcgtttaccatgaaagagttattcataccatatcaataatcattagtagatcattctgaatcttgagtatacatgaactcttgtttgtgttaattgagttatttgattcactcgttaaagtttcttagataagataattcttataacttttattttgggagcttaataacatgagtggatattaaattaatggtacataaggagtcaagagataattagaagagtaaaataataattttgagtaactctaattatgaattaataattggaggatgaactacttatattgattatatcaataaactacaagtaagaattctataatataattctatattatcaaagagtgtaattctctattcttagtggagtaataataaattaataaatgggattattctaatgatgagatcgataataatcaagtatttattggagctttaaaatataagtctatggtccccaagtcacctctatacaacactgtacaagaaaatattttatttgatgagtaaatttgagt

SEQ ID NO: 261561 - DNA, 1895 bp, Cannabis indica
tgcacctttatcgctcttatatttgagagaattttttttagttcgttttttttgtgatagttgtctgtgttataattatttaaaaatatttttgtaaaatttttaaaaaaattaagataaatttaacacgtcaaaaaatataaaataagtctcgcgtacaatagaatatttgaactttattttcgagttgttaaattttttttaaatctctcaaattttttacaagttatattaaatgatgccaaaaaattagaccaaaatattctttcagatactgaaacagatagaaagttgcatcgataaaactttttagagtattcgaagcaccaaatatgtatatatttaaaattataccgcttatggccttgtcttttaatctgtaacattatttaattgttttactatgatatatttattttatttgaagaaatttactatgatattttagttgaaagcatgaatgaagttgtccatttgtctaatgttatcaatttataatgttaagtaacatcaattattgtcaattgtcaaaatttcatgtccaatgtatgtttagtgaaataaagttcttccatattaaatttttaaaatgatgatagttgattacgttggagctcataaatattataaaatttagttgtaggttgagtttaattttttaaaataaatgtacggtatatattttatttgttattattttatttaaatcaacatgttagattttattataataattattatatgtaaaaattagagaataaaaaaacaaaataaatacattttaatttctctttaacttttacattttaaatttttattatagtttaaacaataaataaataaatattaattatatagtatgctccaaatcttttgaagtttttgtgtgttattgctgaaattatatacataattaattaatgggataatttcgataataatgcatacgataatatatacttttatatgatgataaatgattatatattttttaagtttttctctttccttttatatatattgaaaagaaaattagttaacaaagcattatatgttaattttactaaatacaaacaaatacaatctcttttgttaaggacatgttacctcctattttgggatgaaaattaagtttttataattacaaaatgacatagatatattttaagaaaggaaaaaaaatcttctcgtaatattgcaatatataaatatctttttgtaattttatatgattttttaaatattataatatagcaatatttacacactaattatactaatttacaatagttaataaatatatttttttcttgaataataatataacttaccgatgatcatagtgttttataaattactatgtaatataaatctctatttttacagtttaacaaattgtaggaaatgtctcttataatttaatcaagatacaaatatggaattttttattagtaaataattttacaaaaaaaattattactaaaacaattttgtgtggtctatgatcgcaaaaggattagaagctgcgtaaagtaaattaagtgaaattattttacaaattttaatatttcactttattagcttaaaaaattacaatacaaatacatgattaattacaggtatatctcacagtatattatgtatatataactatatatatagaataatataatcaaatttggtcactcatgtatgttctatgttgtactgattcaacttaattagattaataatatatagaatttaattcatgtcatcatgcactatgaatgtacttaattcatgtaatagatcatgtttaactatctcttatatcatttgttatttgttcttcttaatatataatatgtaattttcttttttaatttcataatatgtagttttttttttctttt

SEQ ID NO: 261562 - DNA, 525 bp, Cannabis indica
taaataaataaataatttgtgttttcaactaaaggaaaaaaaaagtgtcgttttaagtactttatggcacgtaaactatacagtacgtaatcagaattggaataaattaatagagaaatgtaacagaataaataaaaaataatcggaatcaatatttgtaatatgttgtttactaaaatttttcgaattagaatagttgtgatttatattgtttactttattaggaaacataatcggaatgcttaaattgactaaattgcctttttgagttaaactatattatatggtagttattttgttattttgtaagacatattttaaaggataaaattgttattatatatttaatattaaaaaataaaataaaaaataataaaaatctattacccttaatgacattccttataaaattggtggggaaagttctccctaatttattcaacttttccctttcctaattttaataatgcaagtaaacaaatgtaagagaatgattatcttactattgattcccattacttatta

SEQ ID NO: 261563 - DNA, 2126 bp, Cannabis indica
tcaggttgtgttttctagtttatatgaatatctatatattattgtttaatgtagtagttattggctatgctttccacttgtaattttcagtctaaagttctataatcaatatatcagtcatccatttacaatagagtgttaaaataaatggcaatgatggatgtggaagtattattcatgaatgtttgaacagtttagattgaacaatgttgattaatgccacttcagtgtttctttctggcttggttggttctattgtgagatcttaatatcttatgctttgtgttatttggccataagagattttagtacaagtgattctacttgaggaatttttttcttctctgtttttattattgaattatgagttaacaagagtactatggactgtgtttttgctattgtactcacctgctgcaacttacatgaggctctattaactcgtgttgttgatatgtagacatttaatatattttcttatgccttcgggccagtgagacatttaatggttacgtcatgtatctttaccaatattgtaatacaattaattaatgcacttaaaatatgaacacaaatttaacagacaagtgatttgacagtctttaaccgattacagtttttctaaaatgaaacctataaaaaaatagtactatgttactacatatcataaacttataacactacttcatataatactacagataatgaaattagttcaatttgcaagcatgatcaaatgaaagaattgaacacgattggttaatttggttaagaactttgcatccgccttggcattcaaagtgctaaaacaaatcaactggttttgtggagtcaaatgatgttgatatagtagagtatatcattgatgatatgacaatgcataagtgagttgggtgagattgatggtctctcagaccaagttttggtataatgtatatatggtggaaacagtgcttcgatgcctctttgcatatatccttcacttcacttcctgtactcttcctatctcttacgtaccacaaggatatacagaacttagatttgggatataaatataatgctatcacaacatggtcagatgttaaggttcacatttgaagctgcagcattctttcttgatatgcatacaatttatgtattttcccctttatggtatagtttttggaaaagacatcttactctggaattacttaaatccccaagtacagttagtggtcaatgtttgtttcttaaaagagttgaactctatttgccgttgctcattttgtgtacgagtattttagtaactacaatattgcaaattggaatcgatatgccttttaaagtaggattggagtttcagtttaaaatccattgagtggcaaagtcttgttgtttaatccgtgctgttatttctaatatagaatatttagaatactatctctgactctagtggcaatgtttataggcaattagcagtatttttattttttttttgaaaaaattattgacagtttctgatggaatggttaagaatcttctgactttgaggcttggttgatttattattattattattatcgaaacctaactactatttaggtatatgacgtatgaatttagcctatttataatcttgacttatttttttgtttggcaaggcgaaaggaagaacgaaagagggcctatcaattattatgtctctcacaaccatctaaagtaataaactactttttcaggtcttttttatttttgatgaaattttcagatgaaatttggttgaagcaatggatattcatggcaattatttaaatttttgaacatctaactaactaaatgatgctgaacttagttcaaagattacaatctcctcaagagaaaatttattaaatacactcctcattgataaacaattagctttcttttcttgttcaaatacgtatagaataaaaaaatatatgcattttattttttatgtttggttacattttaaaattatttttgttgctcctaattaaacacacttttaattagtcttagtttagcataccattgtctagatgcttgttttaaactatacaagcttttgtttaatttgtaaacagtattttgtggtatcactccttattaacattgcaacatcagtc

SEQ ID NO: 261564 - DNA, 522 bp, Cannabis indica
tactttatggaaattaaatgtagttctcaaggtaaaaaaaattgcgtggcgagtgtaattccaattggattcctaccaagattagttttcaaagacatgcatggattataatttctcaataacaatttatgtccactttgtactaatgagttggaactattcatatactctttggggatgtagcaaacgtgtctcggtttggaagctatgtgtttttaaacttggggacccaaacatgattgtaattaagtgatatttatggtttcatttgtaattaatattttgaatcttcctccgaatgaaatagaattgatcatgttgacatggtgacgtatttggtactgttataccgaaatcaaatagagtaaaattggaacaaattaccgatagaatagtctggctgagtcgcggacaatgtcgctctctttaagacgtttcgcggctctgcccgaagtgtgcacggcagtctagcaaccacggcgtccccaggataaaacagcctctgtataagtacgatacgtt

SEQ ID NO: 261565 - DNA, 732 bp, Cannabis indica
ttctatatatatacataaaatataaggtaaattaattatcatgttttaatttgagttaaagatttggatatcctctataaaattaaaacaatagataataaacttcgttgatgagtacttaagagttaagacacattatcaaatgatttacctgctcctcaactttagccatgttctgaacagccaataacttcaaaacacctgtcaaggaagctaactctgtttggaacgtagcttcatgattgatttggatttgggccattaaagttaatctagaattaagaagctcgaataatttagcaaaaacatcattttcatccttgttttgaacaaccaagtacgacgtttcatctaaattcttcacacgtgcaccgacagctggaaaaatcacctgtaatatataacaagtatatatatattttctcatcaaattaaccaaagaaaataccaaaatttattcatacatgctaattatatgtatatacatataccttatctttggcattcaaatattgcctaaaaattgatcccagaaaatgggtaggccccaaaagggcttgaattatttcaacattagaaccggtaccagccgttgccaatttatgaatctcattcagcccattacgaatggctttgtggaaaataaggaaaaacaaaattggagaatcatcatccgtactaatagtactcctaaactgcaaacctagtgatgatgatgatgatgaggccata

SEQ ID NO: 261566 - DNA, 1402 bp, Cannabis indica
taacctttaggggaatctgcaatgccgaaaaaaaatttcccccatgataatgctaaagtagagctagagctatggtcttcttcttctaaagatgttgcaaggtgatagccagtttgaactgcatatatcctcgaagtatgatagtgtcatataagtttatcattggtgctgaaataactcaagggtatagttaggattttcttaacatcaagtgggtagagaacctggtgcaacatggagatatttcattgcctttcttcagtaatgatagaaagtctactgatgcgtcaggaagtaacactagtagttaatttattattggtataatgccaaaaatctgtatagaactttgcataggccgaataagtatctttcttgcaactttaagattcagtctcattgatagagttagagacttaagatagatttttacgcttttctaaaatcactgctacattcttaaagtaatcaccatctcatcagtagactttcaagtactatatcctattagagaaatttagtacaaattttaatacactattagagaaaaaaaaaatatcaaaatatcaaattatatagcatttgaaccacttattagattatataaaatattttatctgaattcaaattaatatcaccattttcaaccatttaacacaacgcaccatatatcgaattcaaaaaagaaaaaaaatcacattttcttaaaacaaaaagtttttattaaggcataagaatacaaaataattatataaatcctacataatataatataatacatgagaaatattaaatattaagtagtagtgtctagtaatttttaaaatgttatatcattattagtgcaacgaatttatctaataatttttatagaacattgctaaataatccgaagatataccatctcgagctacttgaaattggatattactagtacctaacagcaatattcataaatatatatagagcattgttatttagtatcttaagatattatggtactttacaattggcttgtgatcgtctatattatttattaaataaaaatatgtagaaattaaaatgaaaatatatcaataataatatattattttttgtggtggttaatacccttagcttttcttaatatataatataattcttatatatatatctttttaaacatagagataaagccataaaatttggacataaaatacacttagtttagttgtaggctttgatagtgtatataagtacgtatgtataaatattagaggtccttaaaataatgcctcaaaggaggcaactcgatctcgtcttcctctccaaaagagacacaattactttggagagtagctagcttgaccagtcaaaccctcccaatatgtaaagaataaaattattttttattaaataaaaa

SEQ ID NO: 261567 - DNA, 503 bp, Cannabis indica
agatcctggtaaaataaattccaacaaaatataagactataaggttgatgctatcactagctactcagtttgacatggagattgaccaaatggatgcgaccacggcttttctacatggggatctagaagaagacatctatatggagcagccaaaggggtttttggttaaacgcaaggaagaccatgtttgcaagcttgacaagtctctatatggactgaaacagtccccgagacaatggaacaaaaggtttgacacctttatgaccaaacaggggttcaataaaagctattatgacccctatttgtagtttaaaggttcggaaattgctaaagtcatttacttgctactttatgtggatgatatgctaataattagcaacgagaggtcaactatcaataaggtcaaggattttctcaagttggggatcaacattctaagggacagaggcaaagggaaatttatgctacatcacgaagactatatcaacaagatcataaaaaag

SEQ ID NO: 261568 - DNA, 765 bp, Cannabis indica
tactcgggtattcagatgaacaactcgaatactcgcgggtattcagatgaacaattcgaatactcgcgtattgacaagatttactttcttttgattgatggctagatcttttaggatttttatatgttgtgggttgaattgcgagggtatcaatcgctattccaaatggtgggtgtgtctcagtattctaatggtcatatatgcgattatatgccccttgagatactgagatacacccagccatttgcaatatgcgatgatactcaaatgatcgtactccttggctgataggtagtctcggaacggtgggagtaccccagtaacttcagggtcatgcttgaaaacgcatgccccttgagtcactgggattctcccagccgtttctggaggtatatcgcttggcccaggatgcgtgacttactcgcgtttttagtattatctctgctcgcatattgatggggcggtcagtattcgcaaggatgctgaccattctatcaagtgcgactttatagtttaatgcgggtgagatcacttattttgcttttcacacatccatcacgctgaaaagatcttctatctttcagatgagcgacttgtcggatagccaacagctcggctctggaggccgtgcattcgatggtgaagttgaccaggaggaggacagctttctcccaacctcgatttcagaagaggaggccgcaccaatagagctaggcccgatgtcttctgcagacatcgaaaggatggtgcaggaactcgccgaac

SEQ ID NO: 261569 - DNA, 1050 bp, Cannabis indica
tagactctttgaagggaagtttagtagaccaactatttgtttcgacattcagaatttttttagttcaatttgttttttataatcgtctattttgcagttatttaagagcatttatagataaaacataaacaattacttactacacatacatataaaaaaaaaataataaaataattatattttatttttagtattataaagtactaaaattttatgaaaattcataaataatcataactaactataatatttacgaccataaaaaaataattaaaaaacattgtatttcaatgaaaactaaataaatttatatctatttttgttattacatgttaaattaggtgtagattatttttaaaatacatctcaaaaatttattgaaatatattacatattgatttataataatagctatttcacaaataaaaaagaaataatcatagcaaattaatagaatatgaataatttgagtgagttagcacaaaagaattaagtgagcattatttattatatgacgtatttatgtggatgaatatagcttttaaaataaaaaatatatatttttatagggtaacggagctaacagactagcaagaaacggaagtagttgtgaattaattgactcatgagaatataaaaacatgtggcatttatttgttggagggacagggttgggatagggtaattgggacaggtgatttttttttgtgtattattatttgtactaatctatgttgcgttgttctttttcgaggataagcgttacagttaatattctagatattattcttacactatgtttggtaggagggagaggactttgaaaaccagaaaaagaaaagacacaaatagagaagaaaatgctcagctcaacaaacaattggctggttgctatttcatttatactaactagggttattacaaaggaatcatctaaaaaaggtcataccaatcatgacctcataattacaaagcaaaaggaatagaaataacagaattgtgtacaaacaaattctttagggatctgtacaaattagttatgccacctca

SEQ ID NO: 261570 - DNA, 901 bp, Cannabis indica
ttttccataaactaaactttccaggagcaaacttgaaataccattgttgtgcggcttccgacagagtggcagggaagattctacaacatacgtgtcctcgcaccccttgtaaatccatttgcatctcaaaatacttgcgatgggagagaggatcttctctccaagtgtacatcttccacgttggcatcttcaacttgtgtggtagtggcaggagattgatctctggtgagaagggagttccacgtgcacgatctaacttaagatcattgttatgctgcccgaccattccatgaaacatattcttcagttcgtcgagttgggctgacttgattggcattttggtcgggttggattatgtcagcgtccttctgagcggggatttgagtatgggctccgggctgcacgttcgttgtagtattctgctcgtctattccccttcttctgtttagatcatcccttaggtcatgggttgttcttagcctttccaacacagaagaaattggctgtcttagcgattggttcgcttggttgacaggtggaatggctccattattctccgtggatccatcgagcatggcccctccagatgaattccccaacaaggtctgtttgcctacctcttggcccacgagtggaactcgtgaccgggtattggacggctgatcgttggttgtctgggaggcattcagcgtcgggtcatcctctgtttcctctaagggaacgacactcgacgtttgctggcctacagtctgataggctcttcgtatcagcacagtagctcgccgactacgatcttcgatttctgcatggtgagcccttaatgcctccatctctttgtccctccactcggcgaatatatgcctctgttcgtcaaacatgaggtttactgcggcatgtaatt

SEQ ID NO: 261571 - DNA, 723 bp, Cannabis indica
ttctatattcatttatcaataaagaaacagatttattttcattacttatttaatttgttattttgttcatgtgatcatttagttatttatttgattcataaatttatccaaatccagatcacattgatattcttgataattgtgttgtcaacacagtggaaagtaatcacaattgtgtgattaaatgtattcctatgatttatcaatacacagggtttaactgatacgagaatctacaatgtagtttacttgcaccttaaataagtgacatttcctttccagggcattggttaaagtaagcttgggttggatgtatggagtatgcatcgaaagtgatcgatattgaacttagataagatataataaacttaccgtaatatctattcaattcaatatcacccagttgaaatattagatcaaatgatctcaatcctgaggtgggtaggttctagttcagttgcattatttgtgttcttcaatctatttgttaaagtcgaccaatggatacagaatttatagtttttatctggacatagaagtgaaacgataatttccttccagcttggcttaagatagataaatggttgactactcatttgaatgattatattagttcactgaaatatcatttataggtagctaagtattttaaggataaaatacattgaagtgtgtaacgataaatttgaccctactcagtgtagatcatctatagaggatcat

SEQ ID NO: 261572 - DNA, 1555 bp, Cannabis indica
aatggccaaaaaagttcaggaggcacgatttggtacatatcaaagttcaggaaaaaaaattactaattaaccttgttttatctttactcttaatatcaacaacacaaaggacagcaattatcttccctattcctcctactcactctcgttcctaccaaacataatttaagtattgagataatactaacctaacccttgtaatattatagattttctttgtgatcaatttgcaaaacatattcactattgacattatttgtacaatttaataagattatgcatttcttcaatgtaaaattaaaggaaaaatatccatgtaaaaacaattaaagttactttcacaaaagtgttacaaaagtatcaatatttagttttaatgcatgcatcgtacacacatacataatgcatcattaaacaattacctatttgagagagtaaacccgagttattaggccatgcatgtgaagcagagagcccaacgtagccaaagacaacttgccagcgctcaccttcaacaccactctaaatgggtaatgtcgccggcaagtcatccttggctgcattggacactctctacttctttatgcaaggcacttttaaccatattttttctccatatcgaagcaaacatagcataatattccggagctcttgcatagtagaatcatgcaatactctcacacatatatatagatatagatatggattgagagcaataatccatgtccttaaagcaaactactataatggagcataaaagattaggagaatctgaactagttggggaaagtgggggcaagacaaaattcaatgagagacagaaattgatatgagtaattaaaggtagtaatgcctaataaaaccaaagaaacaaaagccatattcactcactcaaaaccttgttaaatacatgcaaattggccgttttcatgcaaatgggtcttcaaaaatggtgggcaattcctctttttttggtcccacttttccttttgtgtttcacaacatgggtacggttgaaaacaattttaaattattttattaatttgtactaattttcactttataacatttttatccgagtattgttataagatatcagtgatgctaaacattatttagaggtgacactttataattagttaataatatttcataaaaattattatattaaagtattttattactttgtactatatttcaatttataacattttttattcgaacattactatagggcaccagtaatacttaataacgcatagagatgacgctttgcatttagttagcaaataacattttcattcgagcattgctataatgcattaactagtagtacttagcaccacctagagatgatgctttgtaattagttagcgatatttcaaatgttattacattaaattatatgtgactcaatacttaattgtattaagagtgacgaattctaggtaacactaatgaagatttaaatattgatccctcttctaatctaaatataaatcaccaacattataagatagccattgatgagcttttttatttttatataattttt

SEQ ID NO: 261573 - DNA, 754 bp, Cannabis indica
agtatactttaccaatgtcctgaaaagaacataacacttactcacagtgtaagtatactttatcgctgattatcacatcagtgtaaatccaaaacactgatgaagcagggactaagtcttttgaatcatataatcacaatcacatttcactgtgttgacaatactgtaattgtgaataaatatatgttctggacttaactaattttgtgcatatattaaatatatatataaacaataaacatgaaaaatacatgttaacataaaccacttcaaatctcttaaactgataactaatcaaattgtaatgggttttatttagggcacaaaacccaacattatgtttggaaaacaattgcgcaccaaatgtttttggggtagtataatcaggtgaaatgttgaaaagtttctctatgggtgatttgtgatgaaggacaggtgtaggtagtctatttgagagatagacagagattctaaaggcttcatcccaatacttgagaggcatagatgcttgagcaagtaaggttaggccattttcaacaacatgtctatgtttcctttctactaagccattttgttcatgtgtagtaggacatggatgcctatgagtgatgccaaattgtttaagatactcaatgaaagacctaaattcccctccccaatctgtttgaagacacttgatatttttaccaagctgtaatttagcttctgttttgaatagcaagaaggtttttaaagcctcaaacttgtttttgag

SEQ ID NO: 261574 - DNA, 673 bp, Cannabis indica
ctcagcttaagaatatggtatgacttatatacttgcagaacggcgagccttccaaaattctagcagaatcttctttcatcctcttcaccaaattaaggttgaacctcgagcctgagaaattgcattctgatggaaaggcaaataagttatacgcattacctgcacaagttaaaagtacatgatgaaattaattgccggatcataatatggtttgtaagaagccccagagcattatttaccaacttccaaaacagtccatacgtaaatctgaaataatagaccaaaaatgagtctgtcaatatgcaaatttgacaacatctaggtcattctagaagtaattattctgtcatcttcagctataaatcataagtgccaaaaattgagtgaaagaaacctatgaagcttttcacctacctatagaatatttctgtgctgattatgaatttcttaaaggtttatagtcacccgaaaagccagaacacattgattccatcaaatatagtcagaatctatcatctacaaccgcataactattaacctatagcttaactacaacaactcactgctaggtataataggcatcaaaatttcacaattcaaatcccttctatggtaacttacctgttcgttcctcctgaagaaatttagcctcatttctccgttgtacctggtg

SEQ ID NO: 261575 - DNA, 562 bp, Cannabis indica
actgattacgacaaggaaattgctgagaagatagtaagtgtatattaatctttaattgagtattgctaatgagttagtatatataattcatatactaattgcttgaatatatgtgtgcaataggctaaattagaggagcagcttactcagggtcaaattcaagtccagggccaaaacgatattttgacgcaggccctcaggacaccatagcatcctggatgtgtcaagactgctgggtatgctatgttttggacatatagatttagtttagtattaaaattatagagtaccatgtgtgaaatcttataagaccattcacttcacatttctctcttgcatactctatcaatgactactacatataaacatgagatttagtttagtacaacaacatatttcttcacttgcaaactttttatgatatcttttttctcttctcttcttatatcaataggattttgtatgcttggtgttgataatgctaaacacttcctcaaatgctaactaagctgctgatgtttgaagaggctatgttggagatggaaggaaagtgaagagattt

SEQ ID NO: 261576 - DNA, 495 bp, Cannabis indica
cagaatcaagaatgtggttaacacggcctatgcctgcctactatacatgaataagtaagaaagaaaagttagtgttcaagcaaaaacaaaaaaagttagtggatcttaaaccatttttagagactgttttaattaggtacgcttatactgtttttattagaagactgaacatgcacctatgatagcacttaatggtcttgtgggcagataggaataggataacctttcctacaaattattagaagaatgaacatggaaaattgattagattttgactagaggttttatttattattattattattaatgaaagatttttagagggcattatgaatggctgcattatgaatggcttgtactaaattgtgtttgtccacctaaaaaaaaaggctgaaatattcaatctctatataacgatcatggatattcgatccatcaacggtttgaaatatataacatttgtgacactttacacttaaaggttcgtttggtatg

SEQ ID NO: 261577 - DNA, 744 bp, Cannabis indica
atgatgcaaggtattagtatgaccttgcatgagtccaagagcagcacggaggttctggatctcggtctcatctccaacagttgttcgaacatttgttgttggcagaactctagtactaggaataccctgattggctgctgaactggtatttccagtctcttgcacaccaggcgcgattccactcaaaggagtcggcacaccctgacctacggttggcgattgttcaagatttgtggctggtggaacctctacatttgctagattctacagtgcaggatccactgccggtggatttgctggatcgaccacgcctctacgagtctgtaccaccatcgtgtttatgattaaatttgaagtaaagagcgagtttgtgattttggctctcattgaaagtaccaaaatattgacctcgcttttagccaacgacaatgagtcttaattgtaagcgacaagtgatataatatagatgtaatatagtaaaataaataaagacacggagtttttaaagaggttcagccccgagcagttcagtaatagcctactccccttgatttgtattgacttaagaacaaagaatgcagtgattcttctcttagagttcttgatatctatgagtatatactcttagataatttttttctaccccttgcgcagtgagaatagatcactatttatagggctataagcttgagggaacgtttcccttctgtttacaatgtctataattggtaagattacacatta

SEQ ID NO: 261578 - DNA, 501 bp, Cannabis indica
ttattcattatgttatagaactgatcctgtttttattatatccgagacatttgatccccactttttttttaaaaaaaaaaaattataaccggttttatgaggtattctgtgttatgaaatattttattatgaaactagttttgtctttaatttatatttcagtgttttaggaactgatttcttctttgtttttaattgtaatcggtttgagttattgcgtgttacttgtttgtattcattatgttatataaccgttctattttaattataaccagtttgagttctttcgtgttatttgtttttattcattataacactgttatagaaccggttctattttaattataactcgtttgagttattttatgttatttatatttatttattatgttacaaaaccgattatatttcaattataaccggtttaagttattagtttctattcatataaccggttttatttttagttatatatgagacatttacttatggtgacttttc

SEQ ID NO: 261579 - DNA, 832 bp, Cannabis indica
taaaacctcaggtggagacttagtgcctttcatgtacatgtaaagaacttctaacttcaattcatacaccaaggggtccacctcaaactcctcatgcaaaacttcacgcaccttttttagtgtaaagtcaatgtccaacatcaatgtcttactttttgaggaatcaaatacccagttgaaaccctttacagtcgaaacgccatcatacagtacaggcacaaatatagttgaatctgtcccaaagaaatacaaacaaataaacagaaaaaattagcatactatatcacacactaaatcgcacaagctactacgaatgtcgcacaatatcgccttatacaacaataatataaacaagtatcatgtcgcacaataatcgcacaacaaaggaaaaatatcgcataaggtcgcacaataaaacatacataacaaaatggcataacgatgcacaaatgtcgcacacaaatcgccaaacatcactatcgcacaacaatcgtacaatgtcgccaaaaatttagcatgtcatccctaacctcagatttctcatgacatcgcacaaaacatcgtacaatgtcgcataaaatcgcaaagggaaatttgattttttatccttacatttgtttaaaaaaaaaattctaaacaaataataactaatatttgttggatatgacaattttcaagatattcctaaaatacccccatttacatcacccccatttacaccatcggaccacccattggaccacccatcgagccatccatcggaccatccatcggacccatcggatcagatctgctaccaatttttttttttttatgtttttgtacatacaaa

SEQ ID NO: 261580 - DNA, 516 bp, Cannabis indica
cttcagcttcaacaaaactatccaaggaaggaaaggttttgtaaaaaagtttaaaaaatcgattggtattaaaaaagtaaaaaaaatagctaaagatgaaacctaatgtaaaaatccctaatttttttttactatgctagtatattatttttttatagtggtatagtaggttaggattggggtataattttatacaatctaaattttattattttattttgctgaatgttaaatttttgtacacaaaatgtatatactataattaaaatgtatataccacaaactaaaaattaatattccatcaatttttttttatcttagtacaataattgatatatcataacttttctctctctaagttagtatgaaatatataattcatattcatatatatacaataactagttttgtagttattgtatatcaacacttgttgataaaaagtgaacaaccaaattcattcaatagaatatatatacacatccattacagtatataacatactccaactataat

SEQ ID NO: 261581 - DNA, 483 bp, Cannabis indica
aatgaacttgtcaaatgtatttagaggagaatcagaataaaaaacacaaaaacagttatagagaaggaagaagaaatatatttatagcctccatcttccacacccatgggtagagaaccagcacagcaacacgagaacacttggaaaacaaccattaactctggcgagatggagcaagaacagtgaaattgatgtcaaataaataaatcatggcaaaacaaccgtaaaataatactaaaacaaatcaaaaagaaaaataaaagaaaaaagggctaaaaaaactaatcatcttgtgtacagcctcaacaccaaatgcaacaacgactatatttgaaagaatagttctagaaaatcaaaataaaaaaaaaataaaaaaaaccacactcttatttttccccaacagagtgactgaaaattagaaaatctaaaaaaaatgaaaagaagatgaagaagaagaactaaacaagaaataaaataaaaaac

SEQ ID NO: 261582 - DNA, 800 bp, Cannabis indica
tcgggattggaacttgggactcagacccaacctagataaggacccaggacgcgaacccacacccggagcttgatcttgacctagtttgaaatcaggacccgaacccaaactcagacaaggactcaaactccgactcgaacttaaacccaaactcgaactcagaatcgcaaatagaactaaaatcaaactaggactaggaccaggacctaaacccaaacccgaacccagatcaaaacccaaacacagacctaaacccgaatcgagactagcactcgaacccgaacctagaccgtgacctaagcccacacaataaccgggactttcacccagaataaggatggggacctgggaaacagaactaggaccgggacgtagtacccgaccaagacccaaacttgaacctaggacccagatcgtgaccctgcaccagaaatggaaccagactgggacccgagatttggacctggatctggaccaagggcttggacaaaatctgtggtcggtgtttggatttaaaaccaagcctgatatggactcgaaccctgacaaggacccgaaccctcacccagacctgaaccgaagccctaacccattacaggacccgaacccgtaccctgtaacccaaaattggaaccaaaactggaagttggtcgggactggaactaggacttggacttggaatcataactgaaattgtacctagatccaaaaccgtaaccggaacaggacccggaatacaaatcagaactagacctgaatcgggagccggacccggatccccacccaaacctggactcggg

SEQ ID NO: 261583 - DNA, 548 bp, Cannabis indica
taaaaattaaaaaaaattaacacactgaaacagggttcaaacaggctgttacacccgtgacactttcattttatacacctgtgaaatagactatttgaaaaaaaattaatggatcacttggatttttatatgcttggtagactcctctatctttttcggcatttaaaaagatattctatttttttttattatcacatacatcgtcgaacattataattactctaaattatactcattttcaattaatgttgctgctataggaaagcaatatgaaaatatatatgttttaaaagaaaagaaacaagtaaaaaaccttaaaagaatccgtaaaaaatataaaaaaaaattgtaacaatataaatatatatatgattataagtaaattgtttaaattttctttcaaaatttgagtattgcactagctacccatttaatatagattcgtttaccaaaataaaaatacctgtcctttatttagtttctttgtacgatgataatattttactttttttaaaaaaatatatagttttattattcttaactttgtt

SEQ ID NO: 261584 - DNA, 1136 bp, Cannabis indica
aaaatcgaggatgagatcggctctgggacctacaagctaaaaaagaatggatggaatcatggtgccaagggcctggaacgctgatcatctccggaagtattatcaatagtcaaaaaatataaacttaggctttgttaagagaatttgtaccgaaaagtatatgcaacctctaaatttatgaataaagctgagtgccttaaaaacaatgttttcatgtcactcaggggggtagtaaggcataccacacggacaagtgcaaaacaggccaaaagtaaaagcaaaatcaagcagaatatgtatctaagcgaaatatatatttaaatgtaaatataaaagatgtcctgacctaaaagcaggtccaaaaaaaatattaagggcctggcgacaggccttaaaaattgtctccccttaaaagataataattaaattgtctggaaaaaaggaaaacaggctgttaatgtaaagatagaaagaaaaataattgtagtggtgaactggttgaactggtcggcctaatcaatgcagggtggaaaacgagggccccggcgctgctcgagcaaggcgtcaagccttttcttcttctcccggaagcgaacgaggacttcctcatgcttgggataaaagtcgagcttgatgttttggccatttgactgccaggccatgtaaatgccgtcgtcaaaacgcttgacgcagtgcttgcagacgacaggagtcaggagctcatcccttttggcctttttcaaggcctggtacttaaagtccctcagctccttcacttccactgtcaggttggccgtcgacagcaagtccgcctggtgcaactcctcgaaggattttaattagcggccatctcatccatagcctccctggcttcccgcaactcgcgcttggccttggccgcaacctcgccctcagccttcagctcctcatggtgcctcacctccgcctgagcctccctctgctgggcctcctcctggaatgccctcctctcagctgacaagtcccgcaaaatcttcacggcctcgtccatgccccctaatttggacatgacaaacccgtgatcaatcagggtctttgagaggcgggcggtctctgcagtaatcagaaaaaaggaacaagaatgaaatcagatgcct

SEQ ID NO: 261585 - DNA, 1348 bp, Cannabis indica
cttgaccgcagcgtgcaggtgttgccccccaggcctgacgagggaaattcctgcaccagatagttgatctgttgccgacccatccacatgtagtttccaggtcagtttgtcttcattgttacttggctgaggtgctggctcagggttgctttctggtatgctttcttttttgcttgtgcattctaccacaaagtcggccaaggcatggcctttgattgttgttcggggttcgaattgatttcgtactgacccaattctaccgcctacttgagtaaccgtccaggagcatctggcttttgcagtatttgtcatagtagttggttggtatatacacgaataggatgagcttggaaataaggcctcaacttccttgttgctagaatgaggcagtaggcgagcttttctatcaatggatatcggccctcgagctcaatgagtctcttactaatgtaatagactgggtgatgtacactgttctcttctctgatcagcacgacactcacgacatgctctttgacagctaggtatatccccagctcctcaccgtctagagttttagaaagtacgggaggttttacaagctgtgcctttagatcttgaaaagctctttcacattcttctgtccactcgaactttttgtttcctcgcaggatgttgaagaatggaacacatttgtccgttgattttgacacgaatctgctgagtgcggcgattcgaccagttaagctttgcacttctttggtttttgttagcgagttcatatccagaagggcttgaattttttctggattggcttcaattcctcgggcattgacgatgaagcctagaaactttcccgagctgactccaaaggagcactttaagggatttagtttcatgttgtatttcctgaggactttgaaacattcgtccaggtcgtctatgtgcccccagcctttctggatttgatgagcatgtcatccacgtacacttccatatttcgcccgatctggtctttaaacatcttgtttaccaatctttggtacgtagctccagcgttttttagaccaaactgttgggttttaggccctaaataaaactccatttcaatgtaatccattttataaagaaacaaaagtattttacattcatttgtatgtgttggttcatcttatcaatttcttgtcaatttgatttataaattcatctgaaacccttttcacatacttgatcctgtttattgtgttgtcaacactttggaaagtgaacatgactatgcgaataaagtttcctagatttatcagacacaggattttactgatatgataatctacaacagagtttacttgtatttggagaaatgctatgt

SEQ ID NO: 261586 - DNA, 847 bp, Cannabis indica
gcttgagcgccataataccatcacaccccttcttttccttttcaaatgatgcattatctaataggagatcataatattatcggatattagacgaccttgaagaaacgcactttgagtatccgatataatggaaggcataaccactttaagcctattagcaatgacttttgaaacaatcttataaagaacattacaaagcgcaataggtcttaagtcacccatatccataggttgtttcttcttgggtattaaaaccagattagtattgtttaaacccacaggaagatttccagagctaaaaaaattacgtaccatgtgtatgacatctcgattaaccaccggccagcatttttggaaaaaagctggtgtcattccgtcaggccccggagccttgtcaggatgcatttggaacaatgcttttcggatttcatcatcggagaccggctaaagcaactccatattctgctctactgtaacacgagcttgcacactacttgtaacttctctccagttcacattagatgaagcaaaaagagcagaaaaataatctaccattatttgtggcaagcccaaagaccaatccacccaattgccattcgaatctttgagctttgaaatgaagttattacgtctcctattagttgcaaaagcatgaaaaaatttactgttgctatcaccttcttgcaaccacaattgcttcgatcgttgacaccaaaaaacctcacgttgggtataagcttcattcaaattgttccttgccaatttataattttccactgaggtatcatctctccccaacttccacttttgcacttcatttttgcattgttgaattctctctttaaaa

SEQ ID NO: 261587 - DNA, 1278 bp, Cannabis indica
ttttgagattgaaaatctacatttatgttggactgtgtgaaaacgtttttagacttaaagatctcgatcttatttgacgatttcgagcttttgttgttagttattttggataatttatctttcgtttatggaatttgtagcttcgatatgtgtgtgtggattggatccttcatcctctgtgttataatcggattgtgtaatcataatcggatcatgtatttggatctaatgcagataaatggatgtcatgtactcatgttaatgcggtcctgatttaacttaggttttactaacgcattaaagttaaacgagctggtcactggtgtgtccagatttcctttttgagttttatgaggttctggttcaagagaattgatgatagaatgaacatgttgtgaggaaaagtaacgatccatatttttggaagaaggagcccggcgctcatcttatatttattaatatattaatagagagagagcttggaaacttttttattttataattctaatgttatttattagtaaaactatttatttgtgtttttaatagtccaaacgaaaggttttcatgatctgtaaaagtggtgctagatagttttgcattggaattcatcttgtttaataataaaattgttgctaatcaaattagtaatgattgaaaattatatcatttgaaactttcaaattggtgcttcgttatgtattctacgtatttaaaattgtgatgctaggattatttaatggcattagtcgagtttgacgatattttatgctgactgtctgttaaatatagttccaatcatgtggaggttcaaaccctttatgcaaaaggaggcagctgggcttgaaggccgttctatggatgtggggaatcttaaaatacatattcgaaatgtgattgctgaaggaggcttttcatgtgtctacttagctcgcgacactcttcacgtgtcgaagcagtatgctttaaagcacatcatatgcaatgatgatgagtcattagatttggtgatgaaagagatttcggtatgaagtcccttagaggacatcctaacatagttacactctatgctcataccatctgggatatgggacgaactaaaagaagcgttccttgtcatggaattttgtagagaaaatctctggtcagtgtgctggatagtagaggctcaggttattttgatgaaaaacaagtccttgcaatgttcagagacatgtgtaatgcaatttttgcaatgcattgccagtctccacctattgctcacaggtgtgttagatg

SEQ ID NO: 261588 - DNA, 529 bp, Cannabis indica
aaagatctcgtctggagagcggcctcaaactgcttgcaacaaaaagaaacttgtgtatcaagaaggttttggtggaaagcaactgtcctatgtgcgatgttttcgctgaaaccgagtggcacgtactggtggcctgcgagttcgcctggtcttgcttcaatgttgctggtttggctgctgtagcaagggactccttctcctctttgctgccgtggctagaagctacagccaattctgtttccagcgagatgatggggcgtgtaataatgctatgttgggcattatgggcagcgagaaacgatctggtgtggaagaagcgggttagaagggtgagtgacgtggtggcgtttgctaatttgagtcttgatcattggataaaagctcaaggaaagggtaatctacccttgttgtctcctctcaaagagggagatggtgcggagcagtggttaaaaccgtcatcgggtatcaagctcaacgtagatgcggccatctttgcctcctccctcaagtatggcttcggatgtgtggt

SEQ ID NO: 261589 - DNA, 556 bp, Cannabis indica
cagaggtgtctccggccgactcctcggtttcccggcacgagcttggggcgcgtgagggtgcatctaatgatggcattaaatgcagcgattcgcttttttgcagaggtcgattcgtttcacgccccttgattgatgcggcgcattaatggtgtcagacggatactcaaacgtttccaccgcctttatggcaactcaatctgacccgttgatctttgggtatttgaatcgtgcatttcccccaccgtacgattggtaggtggtgacgcctgttcctcatgcatttttgcctataaaagccaccatctttccttcatttcggttactttccattccttgccatttttgctcgaatttcccagagagaaaattcttcaaaaacagcacgaaccttctgaacactttgccattttttcccagtttttccttgcttgctgttatcagtccttctcgtctttactcgactaaactcaggacccccagttcaacacttcactgtaagtttcttgcatcctttggtaatgacatgcttttacttgctttgtttgttttttctggg

SEQ ID NO: 261590 - DNA, 625 bp, Cannabis indica
tttttctaaggtttatatatataattttttttgctgaaaggtttttatacaattttcggacactgtgttttttaaaaaataaaaatagacatttggatctgatttttctcaattacataatcacatatttttcggatttagttaagcaaaagaataaataaataaaatgggatttgagttacttgactttttctcagaaaacagattttcagatctatttattttaaaaaatattttgattttccttaaaaaaaaaaaaatttgatttctttggtaaagttaacaaatgttttaattataattggatctaataacttaattttaactttttagaaattaagactccaaaataatttttttttgaaaaaattgatcatttttattaattgcaatccacagtgaatacatattaaaatctggagtaatcactactcatgataacacgatcaaaaactaaataggatgctcgcactatttgcagaacatctaataaaaattgacgtaaacatctctcaagtcatttaacgacatcttacaatcagaaatagtactcccaaagtatgaaaccataggaatagagctatgtaacgcttgcactacactaagactattagtttcaatgaca

SEQ ID NO: 261591 - DNA, 524 bp, Cannabis indica
ggcccaatatacatatcacagtcatgtaactacgtttgcgtttcagtgtcggagtggggagtctcagctcagcgagaagaagtaaagaagaagcaaaagggatttttgctatttgagcagagaaccaaaaatggtgggtacgaatctcaaggcagaaacaatggctttgatggacaaaagaactgccattgagaccgacatgaacctcatcatagataccctctgtaagcccggcggcccaggtctttccggcaatctagtcgactccgaggtcgttcttttcccttctctctttatctcataatttatttcttgttcttcataatttattaacgatcatgggttttaaactttttctttaatcttgtcaatctgtagggttttcctcggtctgatattgatatcccagtcgtgcgagcagaaaggtctcgtctttctggtacaatgctctctcctcttagtcttatcatttagtaacaagttcaatcttatttggtcttgggttgatggaagttaatggtggt

SEQ ID NO: 261592 - DNA, 1652 bp, Cannabis indica
gtagccttatatagatgaatgaagtgtttgaatgcatacatagccaataagtggttcttaagacatttgggaagctttgacaaatttgcaagagacataaacataagcatttgaagttcacatggctttgtcttccaactcatatatgaaagtttagctgtaatagagcccacttgtgctataagatttgcaacaaagataatgaattagcttatcatctatattttttcgttctttctaattcaattaacaagagaaagaaagttataatattgcagacaataccatgtgattgctgaaggactatgcttcttgttagaccccatccaactactaggccattttggtttgcactgttcactggaataaaggaatatataaatatatatataccaaataatatcccaccaaagacattaattttatagaaacataattgggttccttagcatttcccttattaccaattagttctgagagctgagatatcaatctgcaaagaattgttatctgaaagcttcaccaacacaaggtagtaagtaagacttgtttgatctttgtcaacattgattgtaaagtaacattttggaatgtttgtaatcttcatatcactttttgatattagctacattaatcttcatcaccctcattatattattatacattttttatgaagtctaaagaaacaataatatataaatatagccacactcatcagtcagacgatgctgtcgttaggccttagtgaaaaaatcccacatgggaaacagagaatagaaaccaagtaactcaacaactataagatcacgagtctttttactacttaattcacgcagccacgcagtgaacacaaagcgaactattctttcgccttttactaaagaataccgtgtgttcgctgccattggtggcatacgcctatttttggagaggtttcttctttagaaccctctataattttagttcaattatatattttccttatttaatgactcagagaagtataatttatatattgcaccgatgattttgttaataaaaaatgtggtaacttgatgattgagttctgtggtaatgtgggcttgtcatgtgactcttacatggacacttggttattgtgactgtgacatatgtatagacatcaccaggtgaacaaactacaagggtaccccttgatgcaaaatattgcagaaagataaaccattgtggaacatatttgatcacctaatgaatccttcaactagcaatttttttcttctcatgtggcttttaaattagtaggaaagacacaaccatgtgatttctcaaagattaagtcactcactagaccctatctcattatttgactctttagtctccaccattcatttccacacaacacagtgattatatatatactcataagattggttcttcagcatctcaactcctcacaacttcaagtactcttagcttacattttcctccttcttctacctttagaaacttcagcaatcatgggtttcgttttcccggtgtagttcatgccaagcaacttcttcaaaatctttagtacaaagatgttccaaaagggtatttggcactttatgtggggaagagcaaaatgacaagatttgttatccctgtgtcatacttgaaccattcttcattcc

SEQ ID NO: 261593 - DNA, 500 bp, Cannabis indica
ttatgcaatgtggtgtttaaagtgatatcaaaagtcatggaaaacagattgaaaagcattttgggttccattatttctaatactcaaagtgcctttgtacctggaagactcattagagataacatcatggtgtcttacgaaataatgcattacttaaaaagaaagacgatgggaaaagtgggtcaaatggctatgaagttagatatgtcaaaagcctatgacagggtggaatgggggttcttagaagccatgctacacaagatgggcttccatagtcattggatatctttggtgatggaatctgttcgttcagtgaagtattggattcaatcaagtggacattcgttgggacctatcattccgtctcgggttatcagacagggggatcctctttctcgctatcagtttatcctgtgtgcggaaggcttgtctgctttgattcgaaattttgaaaatagaggctggattatagggtgccgtgttggtagaggagctccatc

SEQ ID NO: 261594 - DNA, 711 bp, Cannabis indica
ggttaggtcttatatttatcaattgtatttgaattttaatttggagttatgttagttgcatatttattaagtcttacaattattttattttttagctgttatattgttgttcagtacatgatatacttacaattttttataactattaattgtatttttattagttcattcctatattaattttgtcatcctaatatttttaggtggctgataagacctctgatgttgttgataagttgaagcttctaaagaaaaatattgtcaaggtttataatttatttttttgctttgtcttgtttgaaatattctctgactatagttcattcatttaaaaaaatatatattttatagtagaaagttgttttatagtttgtttaatgttgttatgatgttgttttaattgctacaggacttgatttctagtgatgatgaacttcaaagttgatcagaatgaagttagttgcatacattaaaagtgtacaagaaaatgttccaaagtctttcaagaagggtgaagttactgagcatgaattaatgattgagaagtgtgtttcgttttggttgtatgtgcagaagagcaatatttttttaagaaacttttgcttttttatattttttttaaatttttctctagttaacttcatatatatcttgtactagatattaaacattataaatttttaaagttgtttatatcttttagtacattaa

SEQ ID NO: 261595 - DNA, 1822 bp, Cannabis indica
cgtcggtcgtatgtccaatatccttatcgccatttacagtatttgttaggatctctttgctcctcgaattcctcataggctcgggtttgtcgaaggctaccttctgctcttgtgcgaggtaaatattctcccgcgtttccttatgttcagtataaatagtatacactggtacgtatttgtcatgcttcttttgtttctttctctccttcgacgattccttaattccgtcctttctcttcggaccagaagcccccgagttatcaattctcgtggaaacagtacctgttgaaacattgctgggtttgcttcctaagcttgttttcaacaagttcatttcctttcgggcttcttccttccggacaaacacctgagccctttcattgaactcagtgatgcttctcaccggacgtccttataagtcatcccacaactcgacccctgcggttaatggatcagtaaagatccccacttaaagggttgtaagttgcgtgctgtcatccaaatttctaaccatagcgacagccatgctgaaatgacttaagtaccccttaagtgtgttgccgggctgctgctttatattggttagtgaggccgcctcaggtcgcatatccctagcagcatgaaattgcttcttgaaatccctggacagttgctcccaggaagttattgagtgatgagtaaacttgttaaaccagctactcgctgctccaacaagcgaggtggagaacaaaatacaacgtaaattgttcgtcacattactcactcgcattattatgttaaagttattcaaatgcgagaccagatatgtggttctatcataagatgagacatgcgagtttttgaatctcaaaggaaaaggggtattcataatatctggatgatacggctcaagctccttgtcaaagtcgtatccacatagtttccctaattccccaacttgatatctcctgaacttgtcctccagctcgtttatccataattggattggatcatcttgctttagaccaagctgttggtgaaggtcagggttctttcgatttaagtgctctcacagattcgactaggagtaattgcgggcagatcttttcttacttataaattgcgtcttacacaatgactttgtctttcagtggctcgtggatttacttgttcccatactttctcgatcattagcttgttgagtactttctcctcttcgtgttgattgactatcggttctggattgcctcgaagtcacacttgcttcttcatgctctgttctttcctcccgagagtagtttgtcgtatttcccctataagggtatgtacgagtcctcgctctgttctttcctccggagagcgatttttgatttctagcaggtgatcttcgttctcccggttgagtcccaagatcctcctcattttcatgagggatttatcgttcatcatttttcggttgcctcccatctggctgttcatcctgattttcaggggggtctcattttccccgggttattcttcccagaccttttcctgtctccttgttcgtgagccacgaggtctgcctcgtggtcttctcactccaggttcaggttgattttgagccttcgtcccctaggccgccctggtaaaggctgcttcacgttctaactcagcgtgcctatgctgcgcctcttccagatgacgtctcaggcgacgactttccatttcataagttttttctcccacagactgggcacctccacgattgagctcttcatccctcgtcccgtgattctgacaattcccacgctaagttctcctcgagaatgttgtccgcgtactaagaccaacgtcgggttga

SEQ ID NO: 261596 - DNA, 628 bp, Cannabis indica
tcattaatatgcatgctagtttatatcatgtagttgttgtaatgtattattgttaaaatatatacataatagttattatttgatttgtggtttaccagtttaagtttttgtattttggtttaaagtatgtaatcgtttcgcatttcgtgtgtatatagtatacaataaggtgtgttgtctataaggatttatgtttatatgtgtgttgtataaattagtgtatattgtgcatatttttgtatactaaatgtgtgtatattatataaattaatgtatattatgttctctgatttgggatgtatacttagattaggtgtaggaatgtatgtttgttaaattgtatacgtaatagtttagaatatatgtatattgcaagtgttatttgatttgttatttattaagttaggtttttgagtgtttgtttgcattatgagactgactcgaattttgtgtatatatatagtatactgtaaggtatattgtttataccgatttaattttttgtgtaaatcgtattaaataatgtatattgtataattcaatttacgatgtatacttagataaattgaggtatagtaatgtatttgttgaatatgtatacaagatagtttataatattttatattgt

SEQ ID NO: 261597 - DNA, 1164 bp, Cannabis indica
aatattttggacaatttaattaactttagtacttattttgaatttgcaagactgtaaaaattgatttttaatgtttagacttttgatgaactattgaactttacatttaatcatgggaaattttgctcaaaattttaagttttaattataaaaaaataagggttttaacccaacccaacccaatccaacccgatttaaaatgggttggattgggttgggttgtaaataaaacttaatatgaatgggttagaatttaataggccgatctcattgggttggctcattaaaataccttaacggccaacccaacccatgcacaaccctagttcagggtcctatttgtaccattttagaaaatacagagtccattttgtcatttaacaaaacagagggtcaaattgttaacttttgcaaaacacagggtctaaaatagtatttacccgaataaaaattaaagagagaataattttattaatttatcacgtattttaacatttattctaacaataaactaaaagtcgtaatcaattctcattaccattcttaatttcttattatattatattactattatattaacattatattctatttttttgagtatagcataatggtattgcaatctctttaatagcttaataatttaatggtcttgagttcgaacccatgatttctccctttttccatccctccttcacccattggtagcttatattaacattatattcaattaaactaagggttaattgtggcaaaacctccaatagttttatgttgtcgagtgaattttgcaacaccagattatatgatactattagtaacaagaagaaatttacgtgaagaacaagtgcgagtattcaacctagaatggcgagtactcaaactgggaatgagaaatgattaacaaaaaactggaaataacaatgagacaaagaattatagtggttcagtcagatcacggtctgcttagtccactgtagtaagagttttgtagatgccatttcacggtggatcacccctttatatacaaagcaggtgtccgattagttatacaaggatttcattcattgtcaatccgtttttacacattgaattacaataattaactaaacaacgtttatattaataaatgaacgcagttactaagttcatcaacgtatgcgt

SEQ ID NO: 261598 - DNA, 1320 bp, Cannabis indica
aaaagaaaatcactgtatttttattttaaaaaaataaacagtaccgacactaaaattagaattaatttatccttgaaaaaaagaaaatatttacatctaattttatatgggacttaagatgcaccacacgtgcaccctttataaaaaataataaaattagaaaattcattattttatctaggtttccacgcatgaaaaaaatagtgttaattaaatgatcagggaaaacacaaatgagatacaataataattccaaatttgatgtatatatatataatacgtactaacctgcaagcagtccatttataaggaatttttgtaaagttagcatgaagtgccttctgcacatcaggcctattgtagtaaatctcagcatacttctccgtacaaggatcatacccagacaactgcctccgaaacttaatcttatatatttattttacacatatataatactcaatcaatatactacatttacatacatataaaaaaggtgtacatatattaatataattaagtatactaaagcttacgtacggatgaatggtgatggggtcgatgaggcaaacgcatagtggattggcgagtagtggtggtggtgatggtgctaccatcggagttgttacatggaggagcataaatgttgtactggtcaatgttaccaaactccttatccatggcgtaactgtatagagtttcacactcgtctgactctttttgtcggcgaaagtcacacgtgtttattaactgtttgtaggttttatcagatatcatcgcatggctccaccaatacgttactgtccctacgttatcatagtagttgtctgtcactgcatttcccacctgcaatttaatttcccccaaatattcattttttattttttatttttttcttttagttttttatattgacaaaaaattctaaaaaataaaataaaattaatataccattattcctcttagattaattgggtgcttggactgtttgttgtacaacatgatttctctagctaattgaggcacataatgaccggcgtagctttctccggttagatatatttctctccccttatatcgtggaaatcgatccagccatcggataagaaattgtagtgagtcctttgctgattaatattattataattatatcatcataacattattagtaatataaagcatgtatatatataattaagcttaattagtaataatattatatatgacaacttaattataacaattgaaaaagtgtacgcctatgattatgattatgaaaaaaaatattatatagttataaattagaaccctttttttcctttt

SEQ ID NO: 261599 - DNA, 518 bp, Cannabis indica
ataactcactccaatcaacccccaaatcacaccaaaacttccagacctgctatttagaccctaaggaacatttccaaagcatcaaaacttagcttcatgcataaaatcaaaatccaccattaaagctccaagctttgagttcaaaactcaaacttgattaaatataacaaacatgcatcaaacttgctttaattcaccataattaatcataacataaccccagaaatcaaacccacgcacaaacaaccactgcagcaactagttcctcaatttactttgaaaaccataatttttgagccaaaattccaaacattgaataaacacaactaaggatcaccccaaccagttctaaaccattcatctaaacataatcaagcccaagaaaacaataacaaacatatacagcagctataaaaccaaaactcatcaagcatgcaaaagttctacttcataaaatttcaaaaactaaagaaagggttacacatgagatacctaagcttgctatgaactaggaattg

SEQ ID NO: 261600 - DNA, 782 bp, Cannabis indica
atcttcacttaattactaggggactttaaattagacaaattttaaattgggaataattgaatgaaatgaataaaatatatatttgataattgacaataaataaagagtggagttctcttcacttcatatagtcatcacattatacaatatatatacaagtaatatatggtcaatattattctcctacgtactgaattgttgtgatatggaatggaattttaataacggtcttctcaagtaaagttaacaaagttaaaaacatatatatgaaaaagataaagatatctgaatatatacaccacagtttattttatttttcttctgaagaataaaacaaaataagaggagagtactcttacttttaccaaacttatagattacattagcactacacagttacgatcaagcttttcagataatatatgtgccaatggcgattcaaagaaaatctctagaggaaatccaaagttaactgtaataaatgtgtaaattaactaataaagtgaaaacaatatctttatttttagggtgagagagggaagaagctgctatcatgacagaaaatatgtttggtggaaaacaatgactgattaaccattgtaattatataacacatatacataaaatattttggacattttcactaataccaacaaatatatatttaatcatcatatataatgaaattctgattgagttttttttaggtattaaagacacttgtttttaccaaaaatggtaagtttctttttgatcaaattatcctgtcaatatattttttt

SEQ ID NO: 261601 - DNA, 3107 bp, Cannabis indica
ctttcgagtttcacgtctttactgctcacagaaacatcattaaatatccatgcccctgaataaaatggaaacgtttttgcaaagtcatggcaaattgatactgaaaacttaagaaataatcaaacttggcaatgggggcatacactataaagcttcttttatttgtgaacgagatacaagtcacatatcattagtatataattctctttagttttgtctgttgttacttgacactaataacaaacacaaattgttatgtccagtaaacaaaatggcaatctggtactataattttaagttcagtcaatttgcagctttgatggactatataagatgtcaaatggggaacccaaacattatgcatgttttgtgtttgcaaggcaaagtccatgcaataaagtcaaggtataaactatgatcatcctgtatgtaatgtctaaatattattaagtaggtagcatatgactctagtcaagttaactgacctaaacaatttaaatacaccaagagatggagtaactctagtctagacatcttaaacataatttcataattgaaagtgccacatcgaaagtgctctattatggaagattagccacatcaatctacaataactaataaaaaaaccaagaatataatttatgaagatgtaaaaacaatatctctggtgtaacttgagatcccactttcagtttcccaagatatctatatcaattttatcataaatggtaagtgttatggtttgcaaaataggtatgtaaatgaaaaactaaacaagtaagagcttcaataatttattgttgacaaagctgtatacattagaaaaaacaatgattcggcatgatctcgtttacctacttgatgtgacaagttcataatcacacaaagaaatgagttcttatcgagaatctatgtgaattaaagtggtcatgttaaagatgtacacaatagataatgcctggaataatacttgtcctatttaaatgaggggggtcctgaaattcttacctctgctattcacttaattcacatataaatctaagcatgcttacactagaaaatactcaaaatagcaggttatttgtaagttttggctgagcccataaaatgagagcactaatcaaaaccattgctttgctacagattgcccttgataaacgcaaaaaggccaaatcaataaaaatagaacagtaaaacaaatattgcatcttatcaaagctacttgtaaggtggtccaagtactcacagtaaaagattgagcttatctatggtgtaagagatcctggtccacggattcaaattctttaagattgctaactacattttgaactttcttggatagctgatcactgtgttcttcaacaatttttataaatgcagtaagctgttcttgatatgtagtgcatagtcgcttcttattccgcagctctgcagtcaattcctgaatcttcttatctttttcatcctaaaaatagtaacgcacaaaaacaagataaagccaaacttatatcatgcagtacgcaatcatcaaccatgatttagtaagaaaataataaaaagaaaacttcctaatgttaacaacaagaagagaagggaggacagcaaactgtctcatttgtatttcaaatatgaaaccctgaactatccatgtaggaacacctttctaataacttatagaagcataacagtcttcaaaaatttccaagtaaaaaatagcccaaaaatatatccacctttcttatcactattagacacaaataaaagaaataaaatgtaatgcgttaccaattttgtgttgttataaggatgcctaaaaaatacaattaaagctttaactttcaacagaatggaaaatataattaagattcatgatacattcaacttgatttgaaatgatttagtgctcgaatatcacaggcaagcaatgctgttgagtttacacaaggtagtgaattctccagagcatttggaaccactaacaggtcagcaggtttatacacacacaattgttcaatttgatgattaaatgactaaaaaattcatcaaaataatttagaacaatcaaaaaattgatgaggccagaattgttgatgcctacacatttaatcaattggtatattctgaagaaacatgtaagatagcagccaaggactatgcatcatatgtattctcagaatgtgtgagggcatgaattgcatgagtgtctgtaaacacattcaccaaaactgatgtcaagcaaaacattataattatagaaatttcctgaatttctattaacaaatacattgttatattaaaaacaggcaaatatgtgaaaatgtttctgatgaaaagaaaaataagaatcgccttgttagagcagccacattattaaatacaggactactcaccattgtttgacgagcttcacgaggtgagaagacaagtgggtgattatggtcctttacaaatttagtaatcacccattttccagacttatcatacttaacatgaatcatagccttgcaaccttctcttgtgctgggtcgaggctttcgaactggcccaaatttacctcgaatactaacacagtgaccttccttattacacccaagtcgacgggcaagaattcttccatctctttcagaacggcgacatgacatgacacgcatgacgaaccccacctgcctcgcatactcatcatagaatatcttggcagcatcttcagaatcaaatgccataccctcataaggttctacaatcccatctccttcatatgtccctaactcttgctcttgcacaccacaactctccactgcctcagctccctcatctgaatccactgccaaaaattgactgtcacttatttgtcaaacacaaagcaaagaaaaacccatcatctcactataatgagacaataactcctttagaaaacggattagaagtagtccttttggactttttttaccataaaagaaaatgtataaaattcataaattcgttggctcgttaaggtaacaaaaaccaagtagagtttttttttgtttttttctttctatagactactagtatttatgaccctccctcataatttaacaaattattaatattctgttagttattttatc

SEQ ID NO: 261602 - DNA, 681 bp, Cannabis indica
ttcttctgcaagtgatagtgtattcacctcttcctcaaatggttggggtgaattcgggcaataaggaaggtatcattgactccaatcctgaagtgatggatcctaatgccagtcgtaatcaaaatctgccatatcattcaacagatttattacatcattgcttctccttaacaaaggctctccagttagcgctactccataattgacccactttcttgttttatcatcaagtctgttataaaagaacagagtaaaacaccaacttgagaaagtgggataacatctctcttcaagctccttaaatctctcccaagcagaatagaatgactcattgtgttgttggaaaaacttcacaatgtactgatcttaatatagcatattgatttaccttagaggtcaaacacattcagttaaacattagtaaaataaaaaaaaaccaaattagaatcaaattcaactatattgatattaactaaaataatccctaacaacggcaccaaaaatttgttttggattttccaacacataagtatacgtatcgtttacaagtactcaaaagagtgaggtcgttcccacaaggactatagttaattaccaaacaattaaattcctaattctatttgttgacaataaaaataagaacagatgtttaatttccactaaaaaagaaaataaataatt

SEQ ID NO: 261603 - DNA, 720 bp, Cannabis indica
gggtgtggcaccttgacttctcgtgcgaccgtgtgcctcgtttccatctctcgaacaactcccgccgagtcatactcgcaagcatccatgagtgcggccatgcatcgaaggtctctagtcaagatactcgcattgtccataaatttccactacgataagacaagttccaacatcgacactcacctagtcactcgtgaccaaggtaggatgtgtggcaagatgccaacaccaaggtgacatgccaacacttctaatcatgccccgttcgatactgtctgaacaatctccctcatcgcccaaggactcccatacgtccatggaccaatcctcaaggcgccatgcctccacgcatgttggtaggccctcaagacaagccaccactctagcagcatcctctgtctcttctagcatggtgcatccgtcccatgcgtgtatgcaagctagcccacaaatgactactcgtgtcatctcgtggccaaggcgcaccacaacgtcttttggaggtttaggtcacgtcccgtgctagcggcattactggtaagccaatggaaatgtacctgttaatctctggcagcttcttagacgcactaccggattgacccgataatatccatgagtactccaactcatggagacatatgagtcctcttgtagtcctcatatgcccgccatactagtcccgctgactagtagtaggtcacttagcaccaaggtgctagg

SEQ ID NO: 261604 - DNA, 604 bp, Cannabis indica
accaataccattacatatcttttcccactgatactttcattctgtattggccccatcaggtccacctgcattagttccaacacacgtgaagtgaggagtatattaattgggggatgaggtgtcttatgctattttccaagctgacatggtccacagactctctccttggacactttcatgtcaggaattccccttacagcttgaagcttcaccagtctttggagatctctgtagttcaagtgccctagcctgtagtgccataagtcaggtttgtccaagaaggtcctgttgcacactatggtattgcatacagcatagcactggtctacagttctgtttcctgttaagacaacacacccatcagatgaaactaagcactgagttttagtgaaacttacagagaggttgtcgtcacacaattggccgatgctgatgaggttggctttgagtcctttcacatacaggacgttcgttaactgagccactccattcacgttcacatcacctctcccagcaatctgccctttgttaccatcgccaaaagtcacggatccccctttttcgtctttgtagttaactagcagtttcttatttccagtcatgt

SEQ ID NO: 261605 - DNA, 689 bp, Cannabis indica
cctccgatggggtcctcccaaatcatggccactctcccgttgggtcttggtggtaggtcaggaatatgatgggcatcttcgtggggagcaactggggccaaagctcctgctgcacccctggcgctccttgaggtagagctcctaccgccggaattggattgagatggggcaatcggttcttgatccactcgtataggtgtcccaatcggattaagttttcgatctcgtccttaagatttttgcaattgtggtactcgcatctcttattggggtccctccgggagctatccttatacagagggggtggtctccggtagtacgtattttgcctagtagcaaaatatacacgttcttgggagtacgtcaactccatgtattgagtatattggggagtatacccccttttctgtcacttatcctccgttcagttgctgcctttagaggaccttttgctccgagagcgttgagaaggaccagctaggcttgcggtcggagcggagtgcgatggggctagtccacccatccccgagggatttccaaaatgggaagatgcgggggccaaggcctgactttgactatatccgggagtagcagaaaattgtatgccactcatcggtggagctgttgctggcaaagtacctgagagctggggctccgggtacatatcctgctgtcccggtgggatagta

SEQ ID NO: 261606 - DNA, 1232 bp, Cannabis indica
tgatgatggagctgagctatggactaaacccgaaacaaatacaatcaaggtaaatgttgatgctgcgatctttgctagtgataaccaatatggttatggaatagttgccagaaacgactcaggttctcttattgatgccatagctcattgttctaacggtgccttcacaccagaggttgttgagattatgggtatcaaagaggctcttagttggatcaaacgaaaaggttggcagaatgtcgttctcgaatctgacagtttagtctctatccaagctattcgtagccgctcatctctttgttccatttttggaaatcttgctctagactgtcactcttttatgctttctatgcctttaataaaagtttgttttgttaaacgatcagcaaaccgcctagcacatactgttgctaggatgtcacggtacttatctggtcgtagtatttctgtgtctgatgctccagctgctattctggatgttttgtactcagaatgttaatttaatgaagttgatattagttgatatttcatcaaaaaaaaaaaaatatcattagcattgaagattgatgataaactaaattactttgaaactatacagtcattacatggcaagaagcccaaaagaaagaagagttttatcactataccttttatagaatggaccacttgttaagagaagattttcagataatcccattagtcccataatgatataaatataacccaacccaacccaaataatgtaagtgtctaaaaaaaatcaatcctcatgacacacgggggtggaatgtgaaccaccagattgagattattccaggtaagcaggagagaagaaataataacaataatattaataagtgaggaagatggtgatgtggtctccatctcagattcttaatgccacgtggcaagcacgaagccaataggacatccacactcctatccttgaagataagccatttccaattctattgtcttactcttacattacattacatcataattttacatgtgtttagccatttagactgatcacaccaaaatcagactcttttacacaccaacacaccgtaacttgttctgggcacaactatggcctccgcttgtgcttcttctgccattgctgccgttgccatttcctcccctaggcaattaagtttttattttttaattttaatttaccagttaaaatatatatagtttagtttaatgagttgattaatctatgcagc

SEQ ID NO: 261607 - DNA, 671 bp, Cannabis indica
gcttcttctataaacaaacacataattaaattttggcatcatggtgtgtaatattttttcaactacaatcacgtcctccatcttgtcatcgtggatctgcatcttgttcacaattgccattgtccgagtgagataatttgacaccgattctcccgtctttattcgaagtgtttcgaactctatatgaagtgattgaagctgctacctctttgcttttgtagagcgttgatattttctcttcatagaatcccaaatatgcttggaagtgtccttgcaaggaatagtctccaagactgtgtgatcaatagcttggaaaagataattctttgccttgagatgtttcaaccaccgtgcttctagctccgctctttgtccatctgtcactgttgtaccgacttttggttcagtaactccttcggagacaacttgccagtactccttagatctcagaaaattctccatcaacatactccaatgatcatagtggccgtcaaagcggagaattgtcggttgaacaaagttgtcagccaaattgttgctgcaaaataaaagtagaagtgaaattgaaaatatagctcttattatatatatgtatatggaggaggtttcaatagttacatttttattgtaaccattatgattacattttttttagtcattgaatcactatt

SEQ ID NO: 261608 - DNA, 675 bp, Cannabis indica
aaaacgtgatctttttacatcagtggtaccctcaactgaatttgaaggatttcccacgcgtcctttacatattcgcaagatgaaattaatttaataaagccttcaccaataccattaaaaatagcatgtaaggccttattgttttaaccagataatttttcatcttcagtagtccaattatgttcaagttttaccttagtattacctttatcgtcattttcagtaggtcatgaacaacttgtaagtatagctctccaagccttctcatcttatgacttatgaatgctctcattctgacctttcaatatggataatttgaatcattcaacagaggtagttgagtaatagatcttccttctgcaaacaacgacacctcacacaaaataaattatacgaaataaaataatatgaagatctcactaagagtttagtaacttactctgatactaattgagattctatattttaatattaccagtttattatttaattaaattcttaagtaaatgcagaataataaaactggtgctgaaatagttttttctgtagctacagaagacaactctgtaactccaagatacgtggtttcaacgatccttttatattgttactagtccacgggacctcacccaaagataagattcattagatggatctcaaaaatacaaagtaatt

SEQ ID NO: 261609 - DNA, 860 bp, Cannabis indica
tattacgtatatatgtactcatgttgagacaaaaataattgactctctattttttgtatgtgaaagttatttattataagggatgagtgagcgtacgtgtgaaatttgttaggctatttaaaacaattatcacaattcacacaatatttttttttccttgcttttattttcttttcgtgtcttgttcttgctaaaaatagctttatataataatattttggcattgtgaacgggctggtcaaaggtcaactctttgggtgcgagtaatgttttaataaacttgatttggtcagaagcacagctgcacagcacaacacaacaagcactttcttcagtattctaaccgtgtcagcagccaagcctcgcattaacgccacttcccacttagccaattacctctgaagattatgactcatgcctttaattccaagcaaatatatacaataataattatccaaaccattttgtttcaggaaataaggcttttgttctcaattctcattgagatttaaacacagaatcatttgattatttagcattacaagttacgactagctacttatgagtacgtggttagaagcatagcatagtgtactctatattgatcttatgtggaaatttcaaacgaatcttctctcttattaaaaaagaatattatatacgagatatctatatttaattatttatttttatttttatttgacaagttggtaagaatatttttagactagttgatggatatgtacatgttttatgatttttcctcacaagtttacaaaaatatggggtttaaaaagtaaaccctatactatatttttgggtaattctacaatgcaaccccttaaaatagatgtactgat

SEQ ID NO: 261610 - DNA, 538 bp, Cannabis indica
tgtgagcttatgggccatgagctagttcaccccgcaatcgggtccgagcccaaccagtcagccaaacgagtggagccaagtaaatattgaaccagtcagaaagacggttactactcccttaaaattaaggaagcaatcaacttgaacaagttcaatgggtggcgtggatggagggcaacggtattgagaacacacgataaaagaaaccatacagtagatgcagggcatcgaacattcgatactcacactattcacttactcaagcagacagtcgtccttttgaaacttttctcttaagcctcaccacagtagttgttcctttagtccgtctgtccacttatccgttcatcagtccagctaccatttacatttcatttatttctcgttattgttattttttactacaatcatactgacttgagcgtcggagtccttttggctgaaaccccaccggtgctcccaattaaacttttgtctctctctttgttcttaacaggttgttggtgcccaaatttcgtaattatagatttcaccctct

SEQ ID NO: 261611 - DNA, 931 bp, Cannabis indica
tgaatgtctttgacctgatattgacttaaactatgtatctcttattctttttcccccttttactgaagtatcacttaattaagacctataatttcagatagctctaatttgcttatatatgtattgttgtttatgatctgtcacatgtaaccaaatccagacgtgcaaattagaagttagttggtcggttattacagttaattcggttaactgttatttctagttacaattttgtattttttgcctttaagttcagtttgtatacatagctagataactcattctttttggtaagccttgtgcatactctctcattgtaattctctccaagatcaataaaacatctcaagattattcaatctgattattgctttctgttcattagttcttgactggttttgtaccagtattgctgcaacattgctacagcattgctgctgttagttctgttaattttatctttgattcttagtgttcaatctcgattgcaaggtgatcatcgatcacaacaagtggtatcagagcaaggtgtttagctcaatcaagattgaaactcaaagacatcaagaaactcaagaagatggctgcagcaagatttgaaatcgacaagttcaatggaactaatgatttcgggttatggaggattaagatgaaggcattgcttgttcataatggaatttcagaagcaattgatgaagagagtctcaaagaaattgaagatgagaagaagaagaaagagatagaaaccaaggcacatagtgccattcttctcagtctaggtgatgaagtcctaagggaggtatctagtgaagacaaggctgttggtttatggaacaaactcagttccatatacttgaagaagtccctggcaaataaattgtatttgaagaagagaatgtacactcttagaatggatgaggggaaagatttg

SEQ ID NO: 261612 - DNA, 551 bp, Cannabis indica
actaagcggtctttacattaggggtgctcataatgatgctaatcccattgctttggccgatgatagagcccgagcaataagcgagtatgcagcccctatgttcaacgagcttaatctgggtattgtgagacccgaaatccaagcacctcactttgagctcaagcccgtcatgtttcaaatgctccaaatggttggtcaatttggtgggtttccaacggaagaccctcacctccctattcgctcatttttggaggtgaatgactctttcatgatataaggagtaagtaaagaggctttaagattgaagttgttccaattttctttgagggatcaggctagagcatggcttgatactcttcctcccgattcggtgactaattggaatgacttggctgaaaaattcttgtgaaagtactttcctccaacaagaaatgcaaagtttcgaagtgagatcatgtcttttcaacaattggaagatgagactactagtgacgcatgggaaagatgttggaaatatattttaccaggaacttagatctactcacaagtat

SEQ ID NO: 261613 - DNA, 524 bp, Cannabis indica
gctggaacctcctcgaaccaggatagttcatcgtctaactgcagagcatgctttgccaaccatgagccgcgaaaatcttagagcgagcgcataaatctttaattaaaaaactaatgaggaaattaataaattttgatccatatatatttgatccatatatatatatatacaaaaactatataaattttggaaattaataactttatctttgatcagatcttaggtggggatgttaatttatccacaaattgacttggaattctatcaataaaaatttgacttggaaatcatattacattaatttcaggtcaattagattaattttaattaccagacatatatatatatatggccatttttctacacttacaagtctccataaatactatagactttttttcttaatgagataaatattaaatactatatagactttgataatatatgtctatatagtctagaagaggagagagataactttcattttaaggcatcagctattattaaatattaaatattgtata

SEQ ID NO: 261614 - DNA, 868 bp, Cannabis indica
gatgggttccccataaccgatgaatattcccttaccccgaatccgttagttattagatggggatggagccgggatgggggtataaataagtagcgggaattgcattccccgtacattaaccgcccaattttcatctctaaatgtgacatttaaatgagttgcaattttttaattaaataggaacatagagactgagaagaagtgggaaagaagatttgtgtccatagcgtaattggttaatgggcataacttatacattgtagtgtaatatttattgcccataatgagctctttttggtcggtgtaacgcttagttgattaaaatcacctaaattcttcacgaacaaagttggtttgtatatggtagttagttataactaagctaatttaatttttttccagtattataatatagttacttcaaaatataattttaatgtatagtaaaattataaatatattatcgtattttatattattattaatattctaattattaaaaactaaaatgcacaattttattaattaatatttgaaattatttatgaagaagtttaaaatttattatatgtagtattttaaattactttgttaaatgaatttatttttataaaaataaataaatagaatggtgttcaaaaaaattacagtgttccctataatatattatttttatatctcgattattcaaaactattgcaattattgtatctcacttgtcatctcattatatctcacttattttcatcatcgtatctcattccttgctattaccgtagtttacttatagtcttcactattgtattgtatttcccaaatctatatcttaatcttaaatttcatctcgaattttaacatttgttctgtt

SEQ ID NO: 261615 - DNA, 834 bp, Cannabis indica
acaaatttaagcctgtcgatctgcgcatctgaataatgtttgtttggtaccaaccttgcactaacaaagtataaccatgccttggctaccgggtttagttcacacctaaacaaatgatacagttctccatcatactcatgaaacctaaggcctggataacctaaggtttcagctatgtcctcataattcaagctctttgctcggatttgctgtttcagtggttgttcttctggggtgaaggtcagtaagtcatagacagcatgaatggcggctgtggaaactggcactctaacccccctaactttgaccttgtcatcctctctttctggccaattggccaagaattctaaagctaaggttcggttgttgcgctcagtgatatctacaaacttagtccaacgcctatttatgattttctctctaataggctcaaatacagcaggaatatttctagtttggttagggtcaccaatgtctatgcccctatcttcgatgaagggtctatctttcagttgcagaaatcgctcttgtgcgtcaatatttacaaatctagccctatcaacagtggagcgacccctaggtaggttagatgatgaagctccccctctttcacatactctagctcttttaggacccatctctctaacactcaaaaatttatgaaaattttggcagcacttccccttaaaattcacttcccgggtaacaacccaatcacaaatagaacaactcttaatcacaaacaactttttccaatcaatgtaatgagaaaaatcccacaaatcacaataaaatttcaagattctccaacaatccaaaattatccactaataa

SEQ ID NO: 261616 - DNA, 520 bp, Cannabis indica
acaagcatgtccgaaggacgcccaggatgtctaaaaaccccctaccaaccgacagaccagtttcccaactaaaggaccagttctgtggggtttcctggggaccaactagaattctggctcctacaggtcccactgaactagtcaaagaaacacctaaaaccccacaacaacctcaattcgaatccaaatgcaaccaaaccttccagagtacctaattacaccataatgaacatcattcatgcaataaaaccaaccaacacaaccagaatcaaaatccaccattaaagagcaaagcttgagttcttaaactcaaagtttgctcaaacatcacaacagtccacaaaccaagctcaaaccaacataattaaccttaagtagcttcagaagacataaataaacactagtgaacaactcagaaccctaactcccaattaacatgcacaaattaaacttaaagcttaagaaatcaccaagaaagaggctagaacacctaccttgagttgaatcacaaaaaccttgc

SEQ ID NO: 261617 - DNA, 870 bp, Cannabis indica
tttagtttatataaatgttatgctcaaaatatatatgcttagttttattttaagttatgtatattttattatataaatgttatattataaattaaaaataaaatgtttaatacatagtggtaagaggaaaaataagcatcaaagtaatttaaaaaagaaaatttatataaaatattgtataaaatttcaaagaataaaaattaaacacaacttattaagaaaatatattaaaaataatattagtaacatcgtgaaattgaaaataaaaaaatcataacagtattactatttggattgattcttctttttcaaagaatgttgtgtgtattgatattttagtagtctacattacaagaaacgtcacttttgccagcactgcaaaagttggtattgtgctggtaaaatagaatctacttggcaaaagttggtattgtactggtaaaatagaatctacttggcaaaaattggtattgtgctggtaaaatagaatctacttggcaaaagttggtattgtgctggtaaaatagaatctacttggcaaaagttggtattgtgctggtaaaatagaatttacttgtgatgtgttagcaaaaaagggttggcaaatcaatgttggtattagaacttttactagcataaaatgaaaagcgctggcaaaaatgacttttcccagtgcgtaaatgtgttggtaaaaatcagattttagccactgcgaatgtaggctggtaaaactttaacctcttcgccagtgcagtttgcgaaatgcgctggtaaaagttatttttactaacgcaataatgaattgtgttggtaaaagtgacattttttgtagtgctagaaacacctttagagcagtttatattgaaaatg

SEQ ID NO: 261618 - DNA, 951 bp, Cannabis indica
gcgccaacctgtcagaacacacctgaaaagacaacacaagcatactatataataatatagttctagaagcacgtaattaaattaatttcatcaatttacccttctcgggtcataattaccaaaatgccattggctcaccaacggggtcttaacatattaaaattcatataatttcacatatattgaactatataataatataattcctcaattatacataattatctagttagggttttgctaatcctttctcataattccgggtattacaattttcctaataccacttcatcatacatttaattaataatattaaattaatattaattaatccaattcggtattatgacataatgcttccttatttattatttaaatagataacctcctaattattataccattcaaattattataaaactattcatattagtatcttcctatacaactaataaggcaataatctcaatacttcattagcatttacttcccatttatttcaatatcttcccaaaaataaaaaataaaataaaacaaagtattctcaattcacaattaatgtccctacctccaatttattacaaaatcccacatttataatttatataccaaaattaatattatgttatctataatattatgttatctataataaactcatatttataatttatatacccaaaattaatattatgttatctataataaactaataaggcaataatctcataattatataccataattgttagctattaaattttataatatttttacaattcatgatatcttgtaattttaaccaattaccctaaataattagggaccagccataaatcatgcgtgaaaaccttaaaaggcaccaaagccataaacaatggcgcagctcatccatcaaatttgtacttccatttcttccatcaaaaaactaataccactcatccagaaatt

SEQ ID NO: 261619 - DNA, 559 bp, Cannabis indica
tattaggacgagcgcgctggtttaatttccttcagtggttggtgcttcttattctcaaagaggtcatattgaaagggcaaccattaatactccgctgttgatgcccttttacggcagaaatatactgagtgttgatcttgttgttgatgctaagtgtgcacaaaactggtacactgccaagtaaaacatggtgtggtctcttctctgctatggatgaaaattatcaatcaatcaatcaaggtatctatctgtttttagtctctgcatttagaatggaataggttgttaatgtgaaagtttttgttgaagtaaaccccatattatctatacactgtcaaaccagattttttacacagagattacaaaggcagtaaaaatcttatgtggcctcaggcctctatttacctagacaggtttataagttaattaataaagtttgttaaaactttattattaactcttctcttgtattccactactatatataaagccaaagattacaacatcagaaggtgaagaaaaaatccagatcgataacaacacaacaaaagactgaaca

SEQ ID NO: 261620 - DNA, 1082 bp, Cannabis indica
aacttttgtgagttttgtgtttattgatttcattattttaggtttttcattttagcaattcttttgtttgtttttttaggggcttctttttagttttccaaatgtattattgtttttcatttcagtttctttatttgatcagttttcattttttaattattttttcattagttttttttaatatagttttaacaacttcatgtatgtgtttgtatcgaatttgttgtttctagttgttttctgtccatttatatatcatcaatgggtaaaaattagtattatcatggatgttgatgttgtacgagctttttcaatatgttagtttgtttatagttgttttgtagttgtattatagttttgcaacttgcatatgctcattcattatatttactttatttgtaaaatgcaggattgggttaacaaattctgtcacaatgatttctacagatcgaagtgcgtatgtatgagcaatttctctgttattgataacattaagaaaactgtatctgtgaatttgttaacaatgttccgagagacccagtttgagcattttttttagatattcctgactttgtttttcactcccaagtagttcacaaccttcttttgagttttgagggaggtttaccagcccaaattccaaagaattttgggctaaggttgtcggtcgttgtatgcggttcagctccgaggagttttacttgatcactggtcttgattattttggggattgcaataaattgttgttttcccaggaatcaaaccagttaattgaggtttgtttctctggcataaaaacgattgatcataaggctaaagtggatgctttcttgggcagtaggtggggtcaggatgaatccttaggtttgaaactctctgtgttgtatttcatccaatatttccttcttagcaatactccggataagcaagtttgtaggtttgatttaaatgtcattgacagcggtcgatgggatgagtattgttggggtagggagtcgtttgagttgactattgattcttttaaaggcagaatgagcatggtataaaatgaaaataaaaagaggagaagggaggtcagtcct

SEQ ID NO: 261621 - DNA, 1260 bp, Cannabis indica
aaaaataatgtaagcccaaataaaaagtctaacaaaatatccctcactagtatccagaatctaatgagagagagagagatacaattcaagctctgtatttagatctgattaagagagagaagcaaatattacaagaatggatggaatacatggtgttggtgttggtgtcaagattgcattggcatcatagaaaccgagtatggttcgtgaccgtgcatcctttaaccgataaatgcaagtatgagaagggcttccatggtttgaactgaaatctaacctcatagtatcaacaacgttagaccccactgactccaacacattgaaggtctgtgcattgctcttctcaaggtcataactgaactcggctagaagaaacatcttctccgaatcatatgaccattcagaattttgctcttgcagccacccggagactctgcaattcttcgtagcacttgatctgtcgaaagcaacactctatacacaacacatatataccttagtgttagtacaaaagtaggtactacaaatgcaagacagaaaaccaatatgaaactacttcagtaaacaattataaaataattactcagaatactccgagttttgacttttagaaagaattagaaaatttccaaacagtaatattaccaaacaactgtgctggccttagagaatttccaaacacccaagtttaaaatttcccaagacaattggaaataacaactcaaaagcaacacatatttgtaccattaatcagaatttattaaagccatctagcctattattatccttgaaactttattacataataccagcatatgaaactctatttcttgcatgccacatcatgtgacaagcttcaacaaatatcagcgcataatcatttacatacactaaaatcggaagaatcatccaacataaaacatacagaatcagctcagccccatacacgtctaaaaccacaacacaacaaaaatctaagactggtctataaaaacagcattattgatccaagaagtgcgattgacaaataagaaaactgatatacaaatattcaatcaaaaatatatagccacagtgtcaaagataaatacaagttataaataaagggtattagagattcatccacaaacttaaaaatctatttggccaatttcatcaagacgtttttggtaagagatgcacattaccatacataaaatctgatgggtctatagtcatacaatccattgttagacttttatttgggcttacattaaattt

SEQ ID NO: 261622 - DNA, 742 bp, Cannabis indica
ttccaagacacgaagataatccctaaattcatgggattagttcagagaataaagacaataagcctaggtttctcattctttgcattgtaattgtagaattaaattagttccctattttatttattatagattaagggaaatcattcttcatgtaataagcccatataaatagtggtttaatctcactattcaggggcacaaaattgattcagaaagaacactcaagagagaaagagcgatctaatagagagttactcggagatatattgtaagagctagagaaagaatattttattctttaaaatgggagtaggctattaccattctcacagggctgaacctctagaaattttggtgctctctttatttactgtttttgttttctactatttattttatctaatcgctttattttgactcaatatcattggctagaagcgaggtcaacaagaaattaccatgaattctactacctgcctagattgtgaagttggcgctgactatcataaacatcttttttttttattgttctttttctaagcatctcatgcacactatctattcttgacttggcaatgctatttggccaaagtcttatccgaattggcttttgtgattgaatgctaatcgagatcgcagtctacttcataggattgttgcgggtctattttggtgtccgactaacgagttttatcttatttggtggaaattcggaatgcttgtatcttttgagaaaaaaact

SEQ ID NO: 261623 - DNA, 1159 bp, Cannabis indica
attattataattttttattttatactttaattacatatcacaaagtaaattttatttaagaatcaaataataaagtaaatagaaaaataaatagacaagcaacgatttttaagtagaaagtaaaaacctaaagcattgatttccctatttcaaactatgaatctcaatttaccgattatcccaatttatcctataatttgtagtttcaagaatcctaatgtaacctattaatctctctcgagcgatgatagatttaacttaaattaactaacacgatatctctattcaatgttaatcaaataagcaatcataaagcaatattattctctataaataaaactcatagaattagtggaatctctcaatttcacacttttcttatgtcatgcaattctcagtccgattttagattacctctctcaagtgtaaaacctaaaatctctatactaattaatggtaatcaagcattaaaaagatgataactagcacaaaattgcataaacaaataataagaacaaatgtgggaataatctaaaaacttaatttcataatctaaaatagttctatgaacactctagaatgagtgtttagttcataatcacaaacataataactacaataatcatgttcgtaattaaataactaaacaaagaataaagaagaagaagaagaagaagaagaagaagaagaaaatcactctaatgatgatagttgatgatgattgcttgaagtctcttctctcttgcttttcaatgtgttttttaatctcaaaattacttgtttctatctctctagtcgttcctcaatacaatttacatccttctttatataggccaacaaagatagatcaatcctcttagaattaggattttttaaaaaaaaatgataagtgttgcgctatagcgcccatactctgcgctatagcgcctaagagaaaaatcctgaaatacccacatgctgaaattatcctttttttccgtaaaaaatcttttttttttccagccaggtgctatagcggctagcaaaaaaaaatttctacttcgaccttgctcagtaaatcatgcataaattttgcgtccggactccaaatgatatgatttaacatgttttggaaaactatgaacgagctctatcaatttgggtttcataagctcttcga

SEQ ID NO: 261624 - DNA, 2523 bp, Cannabis indica
tgcatttcaaattacttaatgtgcgatagaagttcttctttgcccatctgggaattttgaactcgtgcagcagattgagggcattgatttgaggtgaaaatggggaatttggtgtctgatcaagctctaggttgatgagttttgggtcagttaggctttgtacaaggctcttaaattgatcaatttaggcttggaccactggtcaacctgacctgcctattgacgaagatgtgtcacttgtggaccttttagaacttcatcgggaacatattatccacattaatttattgaatattaggggggatgaagtgtccatcctgtccccatatgcgcttcagagcatctctcaaatcatgtacgagtcccaacttgtggaagactaattcacttggaggccttcttgtttggttattatcagtatttgattggtttggtatatccgtctgaggatagaaatgatattgaccattccctctaagatgatgggctggaaaaacctgctggtctactgcatggccacagtttgaccctgtggccttagattggacagtccattaccttgggtatgttgagtaaagtgaattagggatataggcttctttctctctgtttggatcccgtatgagtgtattatcttccactaattgttgtccaattagctgataagctcaccgaatcagcacgatcacctacttggagcgattatgaatcgttgcttgttatgctctcatgatttccatctgttgattcatccactcctagaattggcattttcgttgtctgatgctatattcacaacttctccgttatgctcctaatcatggtgaagagtgtttatatgtttttgcattttgcgaaggcatcatacagcttctacaactcaatatcttcatcgataataactggaggttctccaacaaatggatttcaagtacccaagccaattaatctggtatgagtactagtggttacagtttcttgtgtgcctagggtgaacccaaccagaagggttattacaccctatcctacaaatggtggaacttgtggaggaagacgggtgctgagatcaggatctacaaccattggatcgctcctatattaataagagttagcacttctagatccgtagccattggattagattttttcattagtttaggagctcttggtagttactaccatctttggagaggatcaaagaaataactagtgttctttttgctcccagtgaaagcaccaaaatattgagctcgcttttagccaacaatgctgagtcaattaaagcgataagaatgaacgataattattaaatgaaagtaagaaataagaatagtgagatttatagaagttcagccccatgatagtggtaatagttcatcctattttacttgtattacttgtgagaagagaaacaattgagtttcttgctctctctcaaaagcttaaaattttatagcattagaactcttttgaagaatagaattcggaacccttaataatgaaatgacttttcttgacctcacttttaatcaacgattaaagagataagaataaatgatattattaaatgaaagtaagcaatcagaatatataaatttatagaggttttgctccgctatagtggtaatagcctacttcccttttacttgtattacttgtcagaagagaaaaaattgagtttcttgatctctctcgaaatcttaaaattttacagcatcagagctttcttgaagaataaaattcggatatctgaataatgaaagggattcactatttatagggaaaaaatacatcaattatgttttctaaataaatgagaaataataagggaaactataggcatgttttttattttacaaaaataatgtgttgaattgtcattaaaataggaattcaattaataaaattaataaggaaaatatctctaaaggtatttcagttgcattcaccctagctggcatatgcaggcttgctgtgagactaaagctagttggacagtatcatttaccctatccgatgctccagcttattcttcaaataagttgttttttgaagaatagcccactctggacgacatgccgaggacgtatcacttgttcaggtcttaaattgttccacgtgttacctagatgaatgctacattatttgtgtagaattttggaataataataatattttttttaggcaaaccgagtaacgatatgaacagaaattaattttaagcatagagagaatagagagaaagaggaatggtaacaaagaataaagaataaaaaaaggagagtgagaaaacgaaaaagaagacaaaaaaatgtgaggcaacattaaattgaaaccttaacaatgaaaaagataaattaaatacccaaaaaaattaaatctgaaagaagtattaagcatattttctcatactttaatgctaaaactcatgagaaagggaaatgtacaatatatatgattatataagttgaattgaattagttaaagctatgtttgttaacacttttttgttataattttttt

SEQ ID NO: 261625 - DNA, 505 bp, Cannabis indica
gtcctcccattgatctgagaaatcagattaacggaaaccatggtgattttttgggatcacctgaacaaaaagaaatacggacccgtagtctctacgggagcgttaaacgaaggaatcatggcagagcttgccatactctgaaaagacatcgcccgagtctcccggagacagaaaggcgacgactctgactctgactgtgaggatcgggagccttgtgccaagcacatcctagaagcagagctccccaaaaattttaagatgcctgaaatggcagcttgcactgggaactcggatccaagcgatcacctgtcacggttcaaccgagtcatgacaatcatgagggtcagcaatgacgccaagtgtttgtgcttcccacttactctaagcagatccgtggaagagtggttcaagaaactggaaccaggatctgtggatcgctggaataaattgcaaactagcttccggagacaattcgtcgccgcaagaaaagtcaatctggaggtca

SEQ ID NO: 261626 - DNA, 1947 bp, Cannabis indica
atacttgttaataaatctagattctagtaaaagataatccaacacggccatcctactaaaaccatggccgaccaaccttttggaggccaggtcgatgctgtagttttatcccatctacactcagttggcttttccccctagcataattgtcatagagcctttatgcactcctgtcaatatctattcagcttctttcttggtaacacttcttagaggtggtatttggataccacgtctgtggattatgctgtcaaggatttggcacccaacaaccatccctctaatccttactttctggcaaggtttttgtttagatgtatgctgctgtaagtgtatccaagttggttgtccatcatgtctattccttttgaaatagaaatgtttagttctttaaggaattgagaaggtaccaagtttcccttagttgtcaagacacaactggctagttgagcgagtgcgtcggttattgtgttatctttggggacatgccttttaggatagcctttgagctaacttgataagtcttagctcatacaggtcgtcatcatattgcattgagttttatattcacctaagacatgaccgacgactgtttgagagtcgtggtgtatgtctaggtgttcagtacaggcttcgtgtgctagcccgaggccaacattcgaagcttcattttcatccttgttgttagaaacattgaaattgatttttgttgtctcgtgcagccatcgccactaggtgttcggagggctaggactggatcgggtaggtggtcaatgcaccttctaggttgagttgtattgctcaaggaactccttcatgttgctcattgagatccttttgatttctttccaaaattcactcaacgacaagatgcttttgagtatggtcatatatcaattttctttagtcaggcctttaaccttggtggcctcagccatgaactgttgaatgtaatctttcaaagattcaccttgtctttactttatcttgagaagatccaccagccgtgaaggtatttgtcttgaggcagagaatggaacatagaactctttggagaattctttccaagaattaaatcttcctagagctagcttaaaataccactgttgggctattttagccagagttatctgaaagattcagcattgcatgtatcgagatacttggttgagatctatttcgatctcaaagtgttttaggtgtactaggggatcttcatttcccgtgtacatcttccaagttggcatcttaaatttgggcaagggcaaggcattgatgtatttttgagaaaagtgagccccttgacctatcctgctcaaggtctcatggtttttggtcatccaagcccttaagcaagtctcgtattcgatccaattgtgcttgcacaaaaggatctattgatgtaggggcctagttagttggcctttcttgattgagcgacaaccctcgattggctagagcctcaccgggcttaccctgggagagggtatgttcaaaggtcggccaaccctgggcctgagagctattcatggctggccaaacctatgttgggtagggcttggcggcccattcttccttgattggctggtggaacctgtgcgttggcatggggtagatcacaccaatttctcgagtttggtggatctaactatctaaactgattgtgttcactccttaacttgttgttgtcttcggtttttgcacgtgttcccaaaccttgctagttaaagattggcctttaggttactcactcctgggtgctccggcaaaagaattcaccatggttgccaactagaggtgcaccactaaggtgttggaccagataaaggttggtaaataaggggtgttgtcaccaccaaatctgttgggttttgtgccctaaataaaacccatttcaatataatcaaatttactagttaataaagatcagaaataacattttatgtt

SEQ ID NO: 261627 - DNA, 562 bp, Cannabis indica
aaaaaatagaacaactcaaaacaacaacagaacaactaaaaaacaccagtagaacaacagtgaaaacttaacacaatatactgcagtatgaaacttataaaaaaatacagttaaaatgtacaaaataccgcctggcagtatttttgtaagaaaatagtaaaaattagtataccatgtaaatttccctattacattacaagcctatgaagtccattaatctttggattgtgtggaattgcataagtagagaatagttttgtaattaagcttaaggagtgaattttcgttgaaatacacatttttttagatgcgcattgattgttggcatggatgaataatattagtaatatgatgagttgattgatctcacacacacaccgaaaattgagtttgaaaagtaattatcttgagttgaaattctaatgattgaagagtttgaattttttgaaaattataagtggataaacaatttttgaaataaaattattttttatcaagaaaaatttgtttaagcatcattcattttatcattaacttacttgaggacgagcaagagtcaagt

SEQ ID NO: 261628 - DNA, 540 bp, Cannabis indica
tttaagtatccacttacaaccaattggttttacaccttctaatgatgggacaacttcccaaaccttattgtcttgcatagacttattctcttcattcatggcatcaatccacttttgagagttagaacttttcatggcctgatgcaagttgattggatcatcttccatcattccaatttcatcctcatgttcttgaagaaatacaaaataatcatctgaaatagcatttcttctctctcttgtggacctccttaatggctcttgttcttgagggtgttgaatttgttcttcaggaacaataacctcatcctgatttgggagttgttcaacattgacttgttgaggttccaaaaatcatttcttgatcaatgaaaggtgtggaagcctgaacattgtctaaaatgatagtaggaactgaggttgaattcaattcctcctcaaaagtaatgtctctaaccttatttctcccctcaaatttaacatcctcaaaaaatgttgcagttcccgtctcaaaaatatttctgacagtgggatcataaa

SEQ ID NO: 261629 - DNA, 825 bp, Cannabis indica
aaataccctgaactactttttctcagaaaatcctattttcccgtcttcttcctattctgtcctaaccaccatagccacctcgtctctaccttctcctcacctgaaccacgaccaccccaaccaccatctacctctccacctccattcaccagaaaccccattattagaccccaatcccatttctcctctcttcttttccaccatcaccaaacccaaaaatcgatatgagcctagaaaaccctccgcccaccttcactctcatctcatcatcatcctcgacttctcttcacctgaaccacgacctcatcaccatcttcacatgagcccaattgcactaatcctgatcccgcctcgtttatcatctcattaaagtttgcaaaagataagataatatcgtgtatcttctttttctaccatcaccaaatccaaaaattgacctgagccaagaaaaccctccgacccaccttcaatctcatctcatcatcatcctcaacttctcttcacttgaaccacgacctcatcaccatcttcgcatgagcccagttgcactagtctcgacccgtctcattcatcatctcattaaaaaataatgataatattatgtatcattttagaaaaaaaaaatcagatcatggctaacaagtaggggagttaaagttaaataaataataatcctatatgtgctaccttatgataactaaataaattacaatattgccatcagattaaaaattaaaacttttacaggtgagaacaaaagtaatgctttcacttaagaaaaattctctatatatatatataaaagagttatttgcggcataacct

SEQ ID NO: 261630 - DNA, 677 bp, Cannabis indica
tacttgtgagtagatctaagatcttggtaaaataatttccaacaaccactcccatgaaattcaatattctttcaataacagtcagccactttttagccttaagtacattagggcctcccagaaacactggaggtgcttgcttcctaaatctctcatataaaggctccatatggttaccagcaacatgctgctttgctggcaccacaggagctgcaagaaccgcagcaggcggttgcaagggaagctcaacaggagcatcccgttgcccgagtctccgaatctcatcttcttgttgcgcaattctggcttgcatctcagcaaacctttgctcccaatcagccggagcctgaggtggatcctcttggccacttctcagagcacgactgcggcctctaccgcgtccacgggggttatggggatttctaccaccccggccacctccggtctcaaccatttcaccctgccttctgacattttgttaggcgtccattattagaacttagcctgcgaacccacaaggcatgcaggttcgatagtggtcaaatattcttaagaccgcatcggtcttcagtgaacaacctggtggctctgatatcaaactgtgacgcccgcatttgaaaatttactaaactaaaaaaaactattatattatactgtaattaattaaccatataggt

SEQ ID NO: 261631 - DNA, 530 bp, Cannabis indica
gtcgagttgtttctttgtactgcttggtttgtttggttcaacaggaacaaagcccttaaaggtcaagcacccgaccctgatcatgcaatcctcaacttggctcaaagcttcctggaagactaccattcctctcagcagactattgcgccttcctcccgccctggtcagattctggttcaaccgtcttggtcccccccagctgcaggtcttctcaagctaaatgtggatgcagcagtctccaaggtcaaccggaaagcgggcttcggaggtatcattagaaacagcgaaggtttggtggtagctgccctggcccagcctcacttcggaggaggatcggtccctaccctggaagcaaaatccctcctctctatgcttcattggtgccttacaaagcatttttttgtccatgaggtggaaacggattgcaaagccatcactgatgctctctctcgccataaagaagacatttcggtgtttggtgaccttattcgtcaaatcaagaatactttgtctcagttccctgctgctcg

SEQ ID NO: 261632 - DNA, 2165 bp, Cannabis indica
tttactttttttttaacagtttgtggataagcagcaatacgattcaaaaactgaattgttaccaatacaacgacagtggatatatagaacggttgatggcggtgattcacgttgacgattgaggctgaaaggcccaagaatttttcttccctatgttatttttttaggttaacttgtagttagatttattaacttgttaatacttggactaattttacaatgtttgtgtaatatttaattacttttatgaaatgaaattatgtattttagccaattttaaaattaatttaaataacatttaatttaccttttaaaaaataaatatgtaatttaaatttaaattaaataaaataatatataaattaataaatatataatttaaataaaataaaataaaaattgaaatccgagtacatatggcgtcgattcctacgccatatacgccatatatggcgtcgattattagctaggaatcgatgccatatatacccctatggcgtcgcttccaagctaataatcggcgccacagaggtatatatggcgtcggttatttataaccctacaacgtcgcttgatcagcgtcggtagtaaatttcaccaaaatcgactctaaaaggactaaaaaaccgaatctaaaagaggttttgtagtagtgaatgttaatgataataataaaaatatttataaaaatctatttatggtaagtttactcattaatgtacttgatataatttaattatcaatttgtatgattttatgtaaatatgttttgaaatgtatacattttcaaatttttttgtaataaagttatttttattgtccactaataaaaaaaagcccttaataaattacatgtagcctatactaatttgatcttattttatttatgaatatatttggttttcttatgacacattaagtgagattaatttcaaacttaaatgtaattataattacaatttagtttttacaattaattactaaataattttttttatatgattacttacaaataattcaattcgaaaaatattttttttactattgacataatagcatgttgacaacttaagtttataaaaaatatagctaccataattatatttttaatgtaattatttagtagtcacctaacttaaaaataagaaaagtagtaattaaaagaattcattaaatgacaatataacacaaagtttgtggtacgtttagaaagttattatgtaaatggatttgagtgtaattcaagttaagtattcacattagcatgtttttttgaatatataattacacgatgaagtaattgatcagtagtccaagtaacactctcaattctcatgccccgtgggaattaagagtaatcaatatatataaataaaggaaagcacaatagtgatgacatgacagtttctataaaatttcttttcctttctttgttttctcatattttcacattttttaaaaaaaaattagttacttttctttaataataagacctttcatttttttcatctcaccttatttaataataagacctttcatttttttcatctcaccttatttaataattttatataattatatcatgatctttgatttacaatcttaacagttacacaatgataatatagtattcaatattccctttttataacttgccccactaaattaaacaaaatagttactacaaaatcaatctatatattagactataaaagaagcacgatctattgccattgttcatatgagaattatgtgatgatctctcaatctacattcttcatgatcactatatatatctacatagatgattataaagattgttcaaatttttttcttttccaaagtatttttatttcttttttagattttattaaagttagtattaacatatacattaaatagtattttttttttaaagttcttcttaagaatatcaaaaatatatttagatgtaaaaatatatatatttggcagtattaattattatataatgtaatatgattagttagttatagatataataaggtgaaaaggtaaaaaattaatataaaatgtatatttgtaaaagtacattattcatgtttattattatatcatgttggttatatttggatttttagatatactaattattttgtggcttataattaccttctttctcattg

SEQ ID NO: 261633 - DNA, 718 bp, Cannabis indica
tttctcgaaaaacatgtcaaattaaaacttttatattaattattaaactttgaaatgtaataaaatatttacatatatcgggatcccctttttaaacttttaaaagttaacattccaaaatataactgttacaggtcgcacaacgactatcaaaataagatccacagatgttccgagaccgaacactccaggtcgcgctgcttgacatgtacaatcccacctgagctcaggttcactcctgttcagccttcgcctttcctttacctacacatggaagcagaactgtgagtcgacaaactcagtaagaaatgcatataacatatcatataatttccgacctgtaaatagcccacacacctatttacagagcttaacaaatgagtatgaacgttcaatactagggtacaaccactataccacatacaccacgtacctcactgtacgagtgttggtagggtttactccgtaccctgagtaccactgagtcatatagaacacacctaacactttctcgtacccgtgttgatatcactgtatcgtactcaaaacaacaacactcactataccaatgcactctgtatcatgtccatacaagtgttggtagtgcaaatcacaatttaggcatgcatatataaacacatatacatacatccagataatcacatcacacattatatccagttcttacctgttttctaaattcaagtgtgctggccga

SEQ ID NO: 261634 - DNA, 808 bp, Cannabis indica
ggagtatgtgattggtaccttgattgtatgtcaatcttctgtgggaaggtggctcgagttcgacgggcagcatagcttcataactgtacgccattgcaaatggtgtctgataggttgctatttttttcgttgtacggtatgaccatagaactttgagaagttcttctggccagtttcctttggcatcttcgagtttcttctttagtgtatccttcaaggttttgttgactgcttcaacttgaccatttgcttgaggatgtgccactgcggagaaacttttatgataccatggttcacatagaaatcagtgaaggattggctgtcgaactgtttgccattgcctgagactattgtgtacggtagtccgaaccggcatatgatgttcttcacaataaagtcttgaactttctttgatgtaatggttgctagtggttcggcttcagtccacttagtaaagtagtcgactgctacaactgtgtactgcactccgcctttacttttaggtaattgcccgatcaagtcagttccccaaatggcaaagggccacacggactttacatctgtgtcagcttgttggtggagctcttggtatctttgaaaatctctggcatttgtcgcacttcttaacataggctctcgaatcttcaatcatcgttggccagaagtaatcttcagtcatcgtcgtgaacttcagataggagtcgtgcagcttcgtcttgagtgacacatctgagtaatggcatcgagaatcctcttctgtacatgaccgccactactatgatatgccgtgttgcctttcttctcattt

SEQ ID NO: 261635 - DNA, 853 bp, Cannabis indica
gcatgggcttactgagaaggttactgtgaggaaagttgctagtgttttcttcagcggtgcattgaaagatgatgaagattatgtgaagatagctcttgtatacttcttttctgggtatttgtatggttatcctcaaggcaaaaagattgacatttatatttgctatggttgatggggatgattttattgaagtgtttaatcggtttggtggggaaagttattgtggaaaaatacattttatcacttgaagattgcattgaaggatggaaacgatacttttgaacagcttcctaagaaaaggatgattgagaagggttacaagcttaaaggatttcctattgcgtttcttatttggctgtacgagatcattccgtctttgtcacctcggttttgcaaaagaatcggcaacaagagtcctcgtgttctgaattgggagtatagccctacatcaaaatttagtaagttgattcaggatgtgtttaataatccgaaggtaatttttttattcaaatttcatcgttttggtttttgtttgttttatgtttctttggttattttaaattgtttagtttttttttttatctttccagattgttataaaggattttgttgctttgagtggtgaaaagtcccaaagtattttttctaaatttaagtttgatccccaatacattcccaagagagttggtgatgttgtgtgttctgatgaagttaatgatgaggtcaaggtattaaaaaccggtttcttattttattttgtttgtgtattttggtaattatatgtatatcattacttactttcatgtttttttgtctaatatttaggattctcatgaaaagttggaccagattt

SEQ ID NO: 261636 - DNA, 810 bp, Cannabis indica
acaaaagtggttacagaacgcatttttgtttttcaaaaataaaaattttactttcattttatgattaaaaaattaaaaaataaaagtgttaccaaacggcacctaaattcaaaagtgaattataaaatacataatttcactatacaaattcggagagcacaatctagtgataatagttcttgaattagtttattcatgaataaataaataaaataggcaagaggattagagacaaaaaggtcaagttcgtatctaaatggagtgtcgtcttctttttttttaaaaaaataaaaaatatattaagtgaggtgtcgactatagacgacagctacaagataatgaatctctccatgaggcttgggagaggtttaaagatctgatcagaaagtgccctcatcatggtatagagaagtggatgctggtccacaacttctacaacgggttggttggtaacactagaactctaatagatgcagcagctggtggagcctttatgagaaagagtgctaatgaggttatgatctattggaggagatggctctaaacaatcagcagtggccaactgaaaggagtcaatctaagaaggtagctggtgtgttagaggttgatgccatcacaaagttgacagctcaggttgaggcattgacaaagctaattgcagggcaagctaaacaagcccaagttgtttgtgagatatgtggaggaaatcatcacttttcagagtgtcaagcagatgtggatgatttgccaatggatgaagctaaagccattggaaatttttcacagaacaacaacaacaattatgggttc

SEQ ID NO: 261637 - DNA, 1145 bp, Cannabis indica
acaccgatgtgatagtcagggataaagtttacttacaccttgaataagtgttatgtcctttccaggacaatggcaaaggatgctagtatcagatgcatggagtatacattaaactggagtcgatattgatcttggtaaagatattataatcttaccgttgtatctttctaagttaatatcactggttgatcttagatcaaaagatcttaatcttgatatggttaggttcgatctcaagagtgttatttatgttcttagagttgttcattaaagcttaccaattggttcgggtaacaaatacatcttgagaacatgatagtataattgagtgggagcgataatcataaatacagaatctctaacttctatctggacatagaagtgaaatgatgattttcttcaagcttgacttaatagagataaacgaaagagctcttatttcagtaattatattagtttaatgaaatatcattaataggaagctaagttttttaaggataaaatacaatgaggggcagaacggtaaatttgtccatactcgatgtaaatcatctatagagaatctttgattatttggattagaacgatgaataattcatagcgtatctacatcttggaacatatagagcgttctatataattaagggctcgtttagtacgtcctattgtattgtattgtgttggattgtgttgtattgtattagtattatttaatacaatacaatgtttggtattgacttgtattaattgattgtttaaagttataatatattttcaatacactcaaccccaacaccaactatgggtccaggtcccgagtctagttatgggtctgggtctgagtctgggtctgggtccaggtccaggttcgggttcgggtctgggtcctaggtcctgggtgtcggtccgggtccggggtctggggtcccgattttgggtccgggtctgagtctcgaatttgagtctcgggtctccgggtccgagtcacgaatccgggtcccgggttcggttatgggtccaagaatgagtctgggtcccgagtccgagtctaggtctcgggttcgggtccgagtcagggtccagttctcgggtcccaggtctgggtctcgggttcgggtctcaggtctgggtctgggtcctgggtc

SEQ ID NO: 261638 - DNA, 1135 bp, Cannabis indica
gctctagcgtttttgagaccaaatggcatgactttgtagcaatatagacccatatctgttcgaaaacttgtatgttcttggtccggtggatgcattttaatttgattgtaccccgaataagcatccatgaagcttaatattctgtgcccagttgttgcatccacaaggtgatcgattcttggaagtggaaaacagtctttggggcatgccttgttgaggtctgtgaagtcaatacaaactcgccattttttgttcggcttcggtaccagtacgggattggcaacccaagccgggtagaaagcttcaattatgaagttgttatttcgtagcttctctacttcttccttcagggctagcgctcgctccttgtccaacaaccttcgcttttgttgaactggtcgaaagttgggatcaatatttaggacgtgcgaaattatagaagaatcaattccgaccatattctcatgtgactaggcaaaaacgtccaggtttgctctcagaaattttatcaatgctgattttacttcgagcaacaaaccttttccaatttttagctttctggccggaatatctggatcgatttcaatctcttctagttcttccacaggtccaacattactgcttgggttcccaagtcgaggatccacatagaagttccctacttagaaatgttttttcccttgtctgtgctctggctagaggatacttcctttttagcgttggccacggtaaggctataacattcccgagcaatttgctggtttcctcttagacaccctaccccattctttgttggaaactgcaggcatgaatggaatattaacgtaacagcctttaagtcatacaatggtggtcggcctaacatgacgttaaaggctgatggaacgtccaataccagaaattgtgccattatagttatgctcgtcggagcttgcccaacagtgaggggtaggcgaatttgccctagaggtgcgactccttggccggagaaaccatatacgggcagaagacagggggttagatctttgagttggagccccatcttttcatatgtggtcttgaataagatgttggaagaggctccattatctatcatagttctggccaccatcttgttggctatctggacttccac

SEQ ID NO: 261639 - DNA, 541 bp, Cannabis indica
gattagaattttagttttgttttatatttttttaaatggaagaataatattgatttaattttttttattaacttttatttaagtagttttaaatctcaaccaatttggaccaaattatttaagattggactaaataaatctactgtcaatagtttagtcaattcaaactatttataattctttggttcgatcatgcttttaaaattctcatctgtggttcaatctaaactgtttaatctttaatatatacttaatatgattttttttgggaatattaccggctaaaccacctgaactttacggtttgtaacacttaaccacaaaaattgaatttttggcggctaaactacctaaaccctggttccgttttgctctgcacatctctgtccaaaaatcacagttaagtgccacggtggactgtctacgtgtacacacttgtacacgtggcaaatttttagtggtctacgtaatattagttttaaaaaataattataaatacttaaaaaaaattaaaaattagaattttttttctttttacttt

SEQ ID NO: 261640 - DNA, 577 bp, Cannabis indica
aaattgtaacaccctaactattataggcgtgttagcgtgatttttaacgtactgtgcaactcgttgctaatcaacaagattattggaaatcgtgaataattaaaattttgcttaattatttaaaacttaatatattacttttataaaattccgggatcccgtttacaaaatacagttacaaaagtttactacatatttataaaatacttgtctcctaacgactaaacaacaaaaggccgtggtgtcccgaggatcgtacgctccagacctaaacgcgccgacatgtacaatcttcatctgctcgctatcacggttcctcaactttagccttgcccttacctacacatagcaatagcactgtgagtcgacagactcagtaagaaaagcataacacaataaacatactaacattacgggttataatcaggcgcccatacacctaaccataaccctaactgaatcaggatcgatcttgacaaagaatgactaacttcaaatccggcctatactcagtactctagtcgtaccgatgtggtagcagataactcatactatgtgattgttgggttttgtgccc

SEQ ID NO: 261641 - DNA, 585 bp, Cannabis indica
aaggacaaaagattatggagcaaaatgaccatttggcccctcccacactaaaagggttaaaaagcacttaagggtattcttgggaatttctaaattcccgaccaatcccgacattcccaatgtctaaataaactgccccaatatactaaaaatactaaattgcgattctactgagccatacaccgcgttccatgttgtcgggcaccgaaaatgcaaaattatgaaatttcactatatgacataaaaatgcattcaaaattcaaatataacatcataaataattatttaaatatctataaataattttcataattaattcttaattagctgctaatttccaaattaaactaagcggtctttacatgtaggatgagattaggggtgggcatctgatccaatccaacctttttttccccatccgattcaatccaattagtaattgtatttggaaaatcgtcatccgatccaatctaattagaccttaaaatccaatccaattactaattggattggatcggttttttaattggatatccaattacacacctaaatttcaatattagcttaaaaaaataaagaaaaata

SEQ ID NO: 261642 - DNA, 15746 bp, Cannabis indica
ataaatagcaatgctcatatgtgacataagattttgtcaatatcagacctcgaacttagactagccaccgctcagatctgagtgcaactacttctaaaggggaatatattttaattaacaaagaaactaaataaaaaattaagagacagaacaaaactactctaccatccacaatagacagttaaagactaatctcatctctattctctagttctagttctagtagccgtaggttgttaataaataattacttttttctgatcacattaaatttaaaatatttttaaataaacttacttgagtaggtaggatgagagtctgagttgtgtggtgagcagaggacacgtggttgaacgtccttcgttgcagtggtcgttaactcagtttggagggacccacgtcagctttggttccaatctcagaggagatcctcacgaatcttctttctcttattcttcttcttcttctttattaaactacttttaatctcttacacaaccaaataccttcaatctcctataaaaatacaaattcttttttttttttttggagagagcaattggatttcagaatgagagctttgaattctcattttctgctcattgatcttcacacctcatggcactcagccaaccaaatcccatgttccagtttcatttcaactgtctcacactcatttcctcgaacacgtcgtgggcttaacgctattgcttcgtcttcgtcccacacaccggcccctgaaattcgtagaccctcggatcggttcttttctggaaacgggtcctttctcaattctcaaaatcctgcctttacatcgtcggaggcggccacggagctcgatatgtttcttgagttgttgcctttgagaatgaaaagagagttgaacaagcacgaggagattgaacagcttattgaggttgttatggatttgggaaggaagccgattgcgaggtttccttctggggattgggttatatcagaaagtcctataaaggaagaagacctacgccacgcaatatccaaggtgaactaagttaaccatttattggtttcaagcattaattttgactacttttttttttttggtgatctttaattaatgattattattctgaaaatttaatgaacaattgtgaaagatacgctaataaatggttttattttacctgtatttgctgaatgaggaaaagggttctcctctgattggtttaaactactcattgatagcaactagagtcctaagctctttgttttgtgaagctagattatattactcttttttcttctttgttttgcttgttatctctatataaagttggcatttttcttttcttaggttggtgacttttcagatgataaccggtcaggtattaacaattcattgcatcgaataagtgctataagaaatcgtaaactgcaaattattggcctcacttgccgggtgggtagagctgtctctggaagtgctgagattttacgcgacttaattgaaggaggaggatccattttggttattggacctcctggtgttggaaagacaaccttaataaggtacttaaattgttttgattattaagaagcaaggggccaataaccaattaagagctttgagctatcaacttaccatactattgtttccctaatgtggcataatgaatatcaacttgtctctttttttcatttcctgctgctgcctaattgttttctgtgttactcactctgacacaaaaaagaataaggagaagaatgttgggctgtgtgtggtttttactttattccgccagttgatgtagcataaagagagaaggtaaagtctaaagcagtttttgttttgcagagaaattgcgagaatgatggcagatgagaacatgaagcgtgttgtcattgtggacacgtctaatgagattgggggcgatggagatgttcctcatgcgggaataggtcgtgctaggaggatgcaggttcctaatgtcaacctgcagcataatgtaagcttgaagttgctctttggcttttttattgtgataggttcccataacaggaataactgtgaattttgtacctactttttgcacaggttatgattgaggcagttgaaaatcatatgcctgaaaccattattattgatgaaatcggaacagaacttgaagcattagctgcttgtactattgctcaaagaggagttcagttagttggaacagcacatggaatgaccatagacaatattatgaagaacccttctttgcagatccttgttggtggcattgaggtgcaataaactttttattttctatacatgaatttcttgtgtataagctcttcaggaactgtgcccttgaattttccataaaaaacaactctatcatctggaaggaattgaatcctatacatttgacattgggcattagtttattaattgtgtccatgtcttctcttaaaatcaacagagtgtcacacttggtgatgaggaagcaaagaagaggaaagtgcagaagacaatccttgaaaggaaaggacctccaacatttacttgtgctgttgagatgatttcgaaaacagagtgtcgtgttcatcacagattagatgcaactgtagatgctatactagcaggtctttaataaacctttttcttgctctatttttttttaattgaacaacatttcattgattgctctttttattttgctcgaaagttgttcttattattttcgttctcttcgaaattgatgggttatgcaggaaaatgtcctctgtttgaagtccgtaaaatggatggcgatgctaacaattctcaaaaggatacttcaatatccaaaaaaaccagctcagatatgtctgattcgacagtagatgaagaaatggttgctgatttagaatctgatattgaagatgaagaacattctcccagtcattccaagaaatcgagtggtggtagatctgctaacaagcataattcgccagtgagcttatatacttacaaggtacattgattggactttcttatctgtcttcacatgttcaattgtacagatgagagtgctgtaatttcatttgattatatgtgaaaatagacattataattctccaattcaatagaataataaaacatttccaagttgctatacagcacataaattcttacataatcgttttcattgttggcctgtgtttcttatagatccttgaggctgatctactacaagttgcaacagtaatggggatagaggatcaaatagatgtaactgatgatattggcagggcccatgcaattctagcttgcagttctgaaatgaaggagaacccttggatccgtagtgtagcgaaattccaccagttgcctgtatttgtaatgaaggtataatcttcaaacagtataatgcatgtgtgtatgcatatgggttcctctcgtttctaaacttggtacctatgatgcatgcagtcaaataccatggcacaaatggtgaaagcattccgcatgattcttggaatggaatcatttgactcttcgtcgaagcaaccaatcaaaaaatcttctgacattgaaattgaagaagatgcaccagaaagaaaaccatctctggaagaacttgatgccttggaggtgcatgctctttcccattccatccatgttcattttactcttttttaaatgattaggagtagaaaactgatgcctgctggaattggtacgtaatttagaccttggtaagtgattatggggaagagtaatgtgtctttaacataactcttttgtgatgtgatctcgcttaaaatgacagtggcttaaattagttaatgtgtctttacataactcttttgtggacattagtaagtaccagaaaatgtagaaaagtttacattaaatttgtataggttaggttcacgatcactttttcaggaaggaaaacatagggttatttttagattgggtttgtgcttattgagagtatcatatgcttacttgaacattttccttttgttatgaaagaattgttagttgataatttcacctcatttagattgagttgaatctccgttataaattatgagtgttcctttttccttttcattaggaggttcgtctggcaatagagtacattgtgatccctggtggagaagcagtagagcttcttccaagacgctcggaaataattgcgcgacagcttgagctggtcaaaagctatcagttggcagctgaaaactcaggcaccgagcagaatccaaggctgcaaattcttcctgtaagattaactaggaagagttcttccagatatacgaagttcggttcaaaatcaccatctggtggccgtggccgtggagcaagcagtgctgctaggctgcctcttttgcctgaatgacaaaatgttgacgataccataccaagtttcaatcaatggttgttgatacatgtaccttttcatgtacagtcatgtaaagtaaattgatcatcttgtaattttcatgtaattatgtcaacacttcaaatatgcgtaaatttttaactcaattcttcaaagacagtgcactaaatataatatgaaaagtaatctcttactatccattttatggccaaatccatactcagcatgattattctaataagaacattgtctgagcatgattacatacttgtagttgtattacactgtggtagaacatatctaaaaaaaatattatttctcatttataatttattttaacaattaaattttcctatgaaattaaaatatatcattgatccccaaaaaatatttcctatccgtactttttgacagctaaaaggaaacatactatcatatacactttaccagcccccatcatatataacttacatttactttacatataaatttgccccaacatgtgctctatacattcgagtatgaaacgcttcaaatactcctctacacagatcatccataacatatcatattccaagatcaaacgacggcatactgggactagagggattttctggtggtatataaggtgcaattacctcccgtctttgtgcctctgctttctgcttgagcagcaaagtcgcctgtgcttcaacctcatctagatcaagtccctcatagaattcatcatcgcagaccatttcatcatttttgtcacagtattttggagcttcacttcctccagcagcttcatactgcagttgaaattctggctccaagtttagagttggaatagaactacttgatgtgccataaaagcttaatttccttttccggccaccataatcaatttcaatgttagaggagacaccagttgtacaaggcacggcttctgagctgggattcttcatttgtatttgttttgactcttcactgttgttcactgagtgatttgctgattcagttggaggtgtctggaaggtgctggatgtctcaagggaataactccctgcttcccttgttctggtcgtcagagcagtggaattaggactctgagtggcagagccaattgggaatcttggcattggtgattggctgagcaatgaacgcctgttggaggatggcccattagttaagagaattagagttgaaagaatttctttattgaagttgagatggctataacaggcaacaaatataggcactatcttcttaactaactgatctttgtcatgatagcatataaggaaaaagaggggagaagctaaggacctgtatactgccatcatgtcaatcctactggtagcagattgggtggccataaatgtaggacttatcctgtcatctatgaaactatcgtgtgaattgtcatcatggccgccatcatcgtcctcatcatcagacatatcactatccgcagataccctatatcaaatataaccaaatactaaaacaatcagcaagcacttttcttataagataatttctgaaacttcatttacataatcacatgtttcaagaatgaccaaagatagcacatacagaaagaaacttactcagcctcttcgtcaatgaagtctcttattacgtcattaacaggcttcttacctgaaattatcaataggcaatgtatatgttaatagtagttcttataatttggtggttcgatagttttgtgttagaaattacaaaacaattttttaattaaaaaaaaagaagtacaacaataaataataacttgcttcatagcaaaagttggtcacaaatgtctgaaaaacaaaaattgtgatatgaagcatgatccaaacaaaaatgaaaaatttaaatatctagcagtataatataatgtccaaatacctctactactcttatgctgatcaaacaatttctcaggccttgctcttgggttaaatgaacaatcttggcctcgatgcagattctcattttttccttcattttcaaccttgcgcagccttttaaatttacgtgtcggttttacactttctgacttatcagcaatgcttagaccccaatctttgctgcagctgccacttgtcgggcttgcccacggactacaagacttgtctaaaattggggatgtatgggtaagtcctctcatgctggcactattgtccttataaagactaggagtttgaattgcacggtctatagaaaaaacagagacatttcttccacagttgccgctttccatattgactatttcatttttctctagatttgaggacttgaatggaatctcattatgtaattgggcaggtgagagaaggttgggtctaggatacgcttctccatcttcaccatttgacaatcctgcaaaattcacccttcaggttcatcacaaaacccctgtataacaactcaattctaggaaagaaatcattgatacgatatcaacatttgtatacaaaaatatttaggaataccaaccattgttatcagtaggagactctggaacaacaccacttttgatcatgttagttaaccgagggctaagttcattatctctggaatcattactgtaatcgtcagggagtggtgaagccttcatttcatcatcaggtgtctcgctgacattatcttcatctagcagattcctactaggagtgccatggaatgctttccctttcaaggcatcagaaccacttaaataattaggactttcatacttccggcaaactgtctgaggaatcattagatcttctaaacctccagcttgagcagttgtgtccttgtcctctacatcttttaaatggcaagagactctatctacactatgtaacagcactttactgctttcacttgtacgattcatatgtgaaattcctttggaagtaagtaaaggaacagaaagaattaaaatatttccaaaagtgtcaatagaaacaaaatcttgaccaaagagataggaatgcccatcaggactttggtgaggaagatcacgcccactatgattctctttggtttctatggtctctgccggtgaagtttcaggcctcaaaaaatttgtttccatattatgttgcgaagagtaatcatcaaactgcaaacctgcacaagattttgatgaattataataataaaattaaaaaagaactacttgggggattttccagacatagcatcttcactcaacaactccttgatccaacgagctactttatatttctgcacaagcatttttgagatgaatcgaaaataattctaccttctccattttcatgttcaacattgtccaatcccaaacccctctcaaagccgacttcaacctgaatacattagtaaatcatataacagagtaaaagaagacaaacaacttgagctaacgaactgaaaacttacctccatcaggggacttttgctgtcactatcaaaggatagtccttgcacttgttgcattgcatcaataagcagtctggttttaaaggaatgcattactttatgaactctcgatggaaatgtctggaagtgaggaaaagcaataagagaaggtttccaagtaataccaccaggcgggtggaaatacttggtaactaaattactctccgcatcagttagattttctttaagcacgggtgtcatcattgagtcatcatccttcattttctttccactgcgaacaaatttttcaattgaaatctgaacatagttgactgtgggtttgtatatatgaggaacctgaaatgttctttaaaataattagtatgtccagaagcaaaactaatcgaaccaaacatgaagaggtcagttctcttggaaaatcttaccatccttggacttgggtggaaattgaagctattcattcccccatttcgcatgtgtttacccacattcttgctacatgcttgctttcgtgtgtaagcttttaactctgttccttcacatgctagaactagtaaagcttgtaaaggaaaaatggagcttaatgcaataaaaaggagcatgaagattccatggcatgttatgtatgtgctccttacctatgtcttatactaaaaaaaacaaacagatcaattgaaaaaggatatctactcgaccatcatttttacgcccagttctccccattcgttgaatcattctcagtggtgacacattagaatcaaagcatataacaagatcaacttccattatatccaagccttcttcaccaatggatgtggcaacaatgacattatatccaccagcccgaaatttctgtggagaactaagtaagcatgtgcaaggtggtggagaaaaacagaatgaagtgagcagttacctccaaaacagcctgttgaactttttgtgactggcctttggatgattttcctttaagaaacataggtaaatgtaatattttaataaactaaaagccatacaattgaaatcgctggctacattactgctaattgcttataagaactcaaatgaacgtacatcaaaatattggtaattctttgatgcaagaggcaaccagagaaaatgttagtacagtaaaatatcaggacaataaattgttttagacttttagttggttgtatggtaatagtatttccagtgtaaatatggtacattatagaagcaatattctattactttgacatcttaaaaggcatagatgattcaattagcagagaaaaggtttctttgagctcagtaaagagataatctcaagctttggttttcttgatgactagaacagatgcaatgacaactataaagaaataattaaacatcagatctaagtctaaatacactcccaacttgtggtgggcctgctactgctactgctaccaactccaacacgaagagtgaaaagaaaaggaacaaaaaaatgagaaggaaacttctgtttgaatagtaaatagttggccatatcatgagtagatgctagaatgccatacctgaactttgaccaataaattgggtagctttaacaatatttcctagtttggccaatgcatccattatgtccctgtaccatcatttgtatcattaaacaaaagaatttttgaatttgaggaaatttattaaacacaagaatgtgttaagaaaacattggcatacacaagtattttctttacctgacacttcccctaaaatttgagaagataataacccttgagcgttctggatcatttttttctgcatccaccaaatagatataattatcatatttgctgacagaccgtaaatcacatccaaaattcatattaaagatcaaatacagataaacatcaacatgtcactatatacactaataaaataaaaaagatcatcttaaccaagctccacaagatttgtttatttatttatttatttatttttcttctacaggataagaaaaagttcccacaacatacaagaaaatactaactcaatctgaaactaatttaacatttagaaggtattattaaagtcgtgactacaatcataaaaatctagttaagggaataccaaaataaatgagttaaataagccttgagttgctggattttttaatggttcagctatattgctacattcaattagtttgcaaaaccaaagttttactaagacattagtgcaaacatgatatttcaagaattgggaattgctattatttttagatgcaacctcaaatcaggaacgaatttcaaaaatagagatgaaaacaattccaggcttctagtaaatatacatatccctgcgaagcaagaagcatatcaagtatacttaggttaggtcagcaagaagatgacaatattaagagcatcgttattggtgcccagcaccattacaatgtagcgtcttgctaatggttttataataatttttaaattaaaatatgtaaactccgacacttaattataccaatagcgatatgacactttgtggtggtattgggcaccattggtgtcctttagcaactctctaataagaatggtctgatcacatacttcaaaaaccaaattaatcctcaaaagcaaaagttaaagaaaattttatgcatactctaaaatttatacagcacaaaaaaaaaatatagacaaacagaatgagaagatgacaatgacaaagaattagttagcaactgtattgaacaagaacaataagaaacatttttacgaagtttaaaggtatagaatagatttccatgcagttctaaactcatcttgaaaatttgcaatcatcctgacttctgtaaatcaaaaccaactttgcatgtcatgacacatactcaacatatcacataactaatgtttacatatatcataaatgataacatgccacatactgaaatgatcaagcagtacttctaacattttggataacttaggacttggagcaccatgggacaagcattgctgcattattagcttagctttaaacatatcttcatttctactcatatatctggcaaaagacctgaaatagttaaatgaaaaaaagctataagacagttatgaaaattgagaggaatcaaactcgatatatattgacattagtatgtgagaaatgcatggtacagaggataagcataacttaatttacaaacttatgcaacaataaatgtagaggtccaaatatggtcaaaacaatcttcaggaacatgctgggtgcccaaaaactatcttcaggctattgttacatggaaagtcagctggcttaccagctttgtgttaaaaatttgaatattcctggtataattaaaattcatgaaaagaaaaaattattcgactccaaacacagacaccaaataaaagatttctggttgaagaaatcaccataaatgaacatgggatgtataagatcgacttgatgcaaaacactgaacattacaggaacgcacccttgtttgagttttcttcaagcatctcataagctggccttactccatggctagaaagtagctttcgaatgtgatatagagtgagaagtaaaccaaaatatccttccatatctcggatcataatttgggaaaggtttggaggaggtgctagacgaaaggtctctcttgaactaagtaaatcgcatgggctcaactgtcaaacaacccaaaacgaagcacatcagagttcactagggcgaaatacatatacatgtgtaaatgtatttatattagtttaaaagataaacaagaaattgaaagtatagcccataaaaatattttcagtcggtagggaaaacaaaattacactgatgtccttcaccaaattcaccaaaacatatgtgaaacgggaaaatgttatcaacatgatcaagatatgcttcaagaggtatatgctagacagaaatatacaagacatttgattctacaatgaagaagatatcacataacagattcccctggcatgcaaactagtaacatacagaagacttagacaaacaattaatgaagaatcttgggataatctaaaattactttggaatttagcctttaatttctgaaagaaatgcttcaaattaacgtatttgtaaaattgaatggtagagacttccaaggagcaatgagcatggagaaagaagcggcaaaggaaactagagaatttaatccagcagagtatagttcgtcctaattatataaatatatagtgatgcataatgtcaccatacagtcttaaagtctctatttgggagaactcctttctcacaaagcttggctaagtatgggcgtataacgtctgaaagcttattattgatctcaacagcatcctgacccatggccacctaaaacattccaattaagttagagcaaaaaatttatctattcttaagaataaactataaaagagaatctgaacaatacacttacttgaattaactctatcttcctattgtgaacgtatttactgacatcatggtcactttcattacgatattcaagtgttgatatacgtaagttatcaataatttgctggatagtctgctgcttcgctgaaagaacatttaccttacaatgtaagatatatcatttaagtccacatcaaccaagtctgtatcagttacttacatccaggtgttgccgttaatgcaagtattctaagttgcactggtacattcattaactgcacgttcagagttatccttttgtaaatggactcagccaatccataaataaaatgctgaagacaaacaataataatcgaacaattaagaaagatcataaagaaactgaatggatgacctcttgaacagcaacacaatatgaaaattttcccatagcacggtgagcttcatcaatcaccaagcaaaccaagtatttgaccaaacaagttcctgcaacaaatttttaataaaaaaaatcagtaatagaatggctcttgaataataattattagataaaaataacaggttaaagttagatattaacattaaaaaaatcattcaagcgtgaataatatatgacccgtaactctgcttagaaattcttaaacatttactgaagttactagtatcaaaagacaaatgaaatatatgatattattattcaaacaaacactttcgtctaatgaatgaatgaagtaaacaatgttgtgatcaaattgaattacttcagatggtaaaaaacgatcttataaaactaatcatacaaatctggaatatacacttatagaggatgagaatgaatacataatagacactgtttagacaagataaatactgtgaatagcagaaattatgacaacagtgaagtgcttgtatacatgtttaaaatggtgagcatttattttcattaaacaaaagtagaaaatttacaaaaatcatttagagttaggatttgcttatgtttaaatattttaatttatacaagaataaaagttagatagttgtataaaagtgaaaataaccattaaataaacactagaaatgtcaatagtacaattgaaattacaggttcttagagcctacattctaagtaaatagattcctttagctttatgtaatgtattactcttaaactcctgcataaagtttatatcatgaccaatttatgctaataaaaaatgtatatgtgcttgaaacataaatttccatattgtaaagttataggtcttcaaataagatgtcagtatatgtaagaaatgagatattgtagggtaaattcaccagattgaatatctttctccagcacttgaggagtaacaaagaatactcgcttagatttccataagcaggctctatttgtaggactaatctgaccagtcatatcaattgtccactcctacaatcattttatcccaatcttttaacatctaaattataacaaaaatgaaagtgaacaccagatttgaatgaatcactgttcgtgtgttaaaaaagcgctacctgtggaattcccacaatattatggcatgcttctatctgctgtgtgacaagtggccgagatggagcagtaaagactatttttcctgcatgggaagaaaaaatattactgattacaatcaaacataaataaaataataaaaagtcaacagcataaaaaaacaaaaataagaagtctaaagaaaaacaacggtgaccaagaactaaattccatgactggactgaataagaaagtaaaataatttggcacatgtataatttgcaagatgaagttttgaagacccagttctcatccaaaaaaaaaaaaaacacttataattctccacttaacccactccaagagtgatacatcaatcaactggaagttttcaaatacgtggtaaattataaattaaaatgacacagacattaactaagtaagaagcataacaagattacgttaccatctgggaaccatctgaaatagttatacatgacaactgcagcaataagagtttttccaagtcctgttggcagtgccactaaggtatttgaaaataatgctttctctgtaatagcaagttgataatcacgcagaggaacgtttactgcgtcaagagtgaaaaagaacaatcagcaagtgaaaagcaaccaaggaagcaaaagaaaagaggaaaaatattctatggggattggtatcagtattgcccgatgataaactcaaattaaatcaccttcctgaaaattaacctcgagaaaaccatagaagcaagaactataaaaattggattacaccaccaaaaagggaaagatattatatgaatattgctgaccactgatccagctatagcaataccagatgacttaattgcaaaaacagcattatgaaacaagaaaagcagttttatctcgatcaatttcaaactaaacattctttttttcttaaaaaaaaaaaggaaaatgcacacaacaatcaagaacaaagagttagactaaagcatcaaaatgcttaagtaattccttttaccagcccattcgaaatcaattgagcgacttaaacacaatcactatttgaaaaccgaattaaacctgggtatatccaagttttggctgcttcagcatcaatctgaacgttaggcagtttctcatgacccggttcgactacactttgaatttgcggctgaggcttcgataatggcttcacaacaaacttgtcgagcgtggattgcctagagctagaggccccattcctttttctgttctcaaaagaatcaacaacagcaagaggaggaggaggaggagcaacgcatgaagacgtagaaggaagattcgaagagggaaaagtcacgtcgatttgcttaaccgccgcatcccaatcaaactccttagacaaaaaataaaaaggattaattcaagaagagaaaggagaaaagaagaaaataaatgaaaaggaagaaggtgtctacatcatcatcgtcgtcgtatatgtgaacggctgagctcattgagtttgtaaaattcttgtactgaaaattcttgttcagaccaaacggtaagccaaaaaccctcactcgaaaaagagtacgaagaagaagaagggaattgaattggcgccaaactgagtaaggccattttgaagtgtccaacaagcttctgagcttaagcttagcccaataaactctgctacgttctatacattcatagttgggcttttcacacaagaaaaattgggcttttattattgaggaaattacgtataatatggcattttttccttaaatttcataaatatggaaaaattagagatttacttaacttatggcttttttacaatttaagttagttgtatggaaaaatatttccatatttttaagtttttattaaataaagccacattttcattttattaacttatgtttagagatttctaatattttttaaagcaaatcattaatatttatacatttatattatttaatttattttaactctacataatcattctttcttagcttaaatttctattttattttttctttaaagaaatctattttatattaatat

SEQ ID NO: 261643 - DNA, 810 bp, Cannabis indica
tttgtatgtggactgtataaatgtttaatgggccggcctataagatttttgtaattttttttccttttttgtatttttctgttttttttcccaagtttaaaatttataccatattatcacatttttttaattattttatttaattattttatgcttactcaattatatttatcttatattaaagttcttaattaatttaaattatagcattttttagcttgaaatataaataatatatttttatttttaaaatttaattacttgaattttaaaaactaacaataacaattatataataaaaaaaaaaaaaaacaaatttggacgggttaacccgaccaaaccgacaaaatcattgggcgggttacgattaaatatttgcaacccgatatttatattaagttaataaaaatatgctattacccgaccaaaccgaccgacgaacacccctagcatggatacctccggctgcatacggatcggatttttgggtggcctagtttgagagcgggtacatccggtttggatttgaggaaattacttgtactatggatttttattaaattattagatatatatatatggataaattttagttttaagtaagtaatgatatttttttattttaaattattatgtgttttttttcctttttccaagtttcttttattatttttccagatatagaaatctagtggttttccattttcacctctccatcttctcccatcttcacctctccgttttccatttccttttcaggcagctcccattaagggtgttcataaaatagtcgatccaatccaatccgca

SEQ ID NO: 261644 - DNA, 1431 bp, Cannabis indica
tttagctttcctttgcatcagggatggggctagctctagttgcacagatataatagctaccagcttcttcattctgctgtttataaaggtgcctcttctcatctacaactatttgtacttctcctcaattctcttcaattcaaatatgatcacattaaaaggaacagacggctactgctacatacttcacctcaacccagctaacataaattgacagacttagagggaatggcattttcagaaataccactacagattcaaactgatacctaacataaattttgagatgtcaacaagtccatagttcccttagactgaaaagtttccaaattgatctttgaattccaacctaggctaaagataatggaattgcaattacaaagattaaacctataacaaacacgaacaagataccatgcatcgtccaaacacaaaataaccattaccaaacctgtcctattactataaaaccaaatcatttaactcaattcagttagtaataaaaaaagaaacagaaatcacatattcccaattcttgattgagacccaaacaaaacccaattgtcaatttaaaaaatagaggcagaacttacaaagtacaagcgaaaaagaggatgaagagagaagcatagttgcgtgcgtagcgcttgacgttctcgtgagccctcaaccgagcctgggaagaggaagaagggaaagagtaggaattgaaggagccaagaaaggcagtagtccaggaaggggttttccctgagaaatcatcgcttgagagcttagagaaagggttgatggtaaagagagagaggaaggtgacgatgctagagaagagcgagacaaagacgccggttgcagtggcggttgaagagatgctatctgggttgcctgcggaggaggaggaggaggtgtcagcggtggcggcggtggtggaaaggcggtgtaggtcggaggtgcgctggtcgaggacttcgatatagccgctgtctcgcagccaggactcgaaagctgcctcggggacgctaagcgacaatgggttggatgagaagaccatattgctgttttctcttttcaacaaatcactcggtttcgcattctcacacaacaacactatctcctaatccttatttcaaaatagaaccatggaatttgttccaccaatacaacaactttacaagaattataaaaaaaaaagcttaggtacgggtacagctgcctagaccagcggcttcaagaaaagtaatatttcttttttatttatctaatatattctgaaaagtggaagtctccctcccaacaacgatgaacgatgatataatcaagattcgacatgtacgctggacaacaacgaatctaatttttttttttgaagaatatgtttgttatgcaaatgattataagttaaaagctcatcagaatttttttcaattcaacttt

SEQ ID NO: 261645 - DNA, 542 bp, Cannabis indica
ccaaacccgaacccagatcaaaacccaggcagagacctaaacccaaatcgagactaggactcgaacccgaacctagaccgggacccaaacccaacattaaccgggacctggacccagaattagtttagggacgtgggaaacaaaacttggatcgggacctagtacccgacccagacccgaacttgagcctagaacccagctcgtgacccggcaccagaaatggaactagactgggacccgagattgggatccagatctggactcagggcttggacaaaacccgtagtctgtgtctggatttgggagccagccctgtacccgtaccctgacaaggaccccaacccatacccggacctgaacccaagcccaaatccaaaagtggacccaaacccgtaccctgtgaccaaaaattggaaccaaaaatggaagttgaccgggattggaactaggacttggacttggaagcataactgaaattggacctagatctagaaccgtaaccggaccaggaccaggactccaaatcagacctagacccgaat

SEQ ID NO: 261646 - DNA, 726 bp, Cannabis indica
gatagagctagccattgtgtggtagccccaacgctgtggaacaagttatggaatagcaaagtgcttgagcggcataagatcctttggtggtgcattctctcggaggcgctccctgtcaggaaagtgatcgggagaagattccaaatagaggatacaagctgccctatgtgtggaatgggggaggaatctgttgaacacctttttctctcgtgcaatgtggcgctacatctgtggcgttcatctccttagggcatctatccggtctgtgataatgggattcgtgtttgggactgggtgaaatttctttggacacttaacaacaggggtatccgagtggaggaggttttcctttatgcttcgatcgtggttgatactatctggagagcgcgaaatagaaaaattcacaacaacaatcacccggatgttttaaaatgtattgaccttattcatacttcttttgcagaattacatactactctggtaccacgtccatctcctaacttgacaaaaagctggaatccacccccggaggattggatcaagctgaattgtgatgttagagtgggtttggcaagcatgtgcacatctgttgttgttaggaaccacctgggcaaagtggttcggatccacacgtctcagctagacttttcggatactttatgtggagaggcggtggctgtttgtttagccatttatgtggctttggatttaggtttaaagtttatt

SEQ ID NO: 261647 - DNA, 983 bp, Cannabis indica
acaaaaccgggcccgacgcccccctcgagcccctactactcgcacagacaaccctcaggtaacgaattctagacgtcgtaataaccgtgttcgcagggaacgaagagccaaccctgagggtctggacctgaatcagccaacctcgagagaccaatctgtgagatatcctaaccaaggaacgcaggctgatgaagatcctgagcgacgcaatcctcgcagtcgaccatcgagagacaacgacgcagaatcagcctcttcatcttcgcatggtcgtacaccaagcagatacacaaggtccggctctgtagaaacgcagcagggaggacactatcaggtacatcgaggtgatctacgtgatcacctcaacgcagttttcagagcgcgttctcgcgccccccataacaacgaaacaccccgtgatccccttgcgggtgatcaaggtgtaaatactcacaacaacccgcctagcgcaccgatagcgactactgggatcactatcccagcgaacctcgccgcgtagtcgcgactcctgcagtcgcagcagtcccgactcctgtggctggaggaattgatcaaagcatgcttttgcaagctttgaaaatgctcgagcagcaaagaaagcccatatacaagctgcatgggacctctcctttcactacggaagtgcgacaagcccaacttcccaagggatttcggctatccgaatccctaaaatataaaggtacctctaaccctatagattatcttgaaaaatttaatactataatggaagtggatcaggtaccacagcttgcaaaatgccgcattcttgcggcaacgctcgaggaaaacgcccacgattggtttacccaattgcctgaggcctcgatatcgacatgggaaacctttgtcgacttattcctcacgcactttcaggccacgatgacctataggcctccttatacaactctggccaacatcaaacaagaacccggtgagtcttt

SEQ ID NO: 261648 - DNA, 934 bp, Cannabis indica
tttagcaagtctatgtgactgctgaatttagcaaacacgattgacatgagaaaccttttacattttgggaaaaaagataaaagacttaagacatcaatattaaaatctgaaaactctgaatttgaattgaaggagctttcaaagcgttgacaaccataagtgcatccatctcaattcgatcaatagataagtgatgttgaagaacccaattgagaccatagaaaagtgctttggcctccatctcatgagatttgaggttgccgagcataggcatggagagggcagctttaacatggccattcacatctcgaagtatcgcacctatacctgatgtgtgagtagaaacatccacagtcgcatctgtgttgagcttgaaggcaccagctgctggaggacgccaaacaataggagcagatggccgagggagggactggtgcgagagtgctgatgttgctggtgcagtgactggtatggcagcagttgatcgctgttgggctgctctaaaattttagagaaaaaccaaggcaaaggcagcaagattttgagcacgtcttgcttttttcccatggattacattgtttcgttcagtccaaatagcccacattgtacataaaagttgttccatttaagttttgttgtagatggaggaaaagtgtactatttttcatagatgcagcaactgaccaattaaagcttaaacccaaagatcgccaaacagtcttggcatacttacaactaaaaagagcatgtcccgttgactcccatgcttgtttacaaatggagcaagtggaatctgtgattatcttccttcgaacaagtgatgtggcaacagataaaacatcatgtatattgtaaaagtaattaaataaaactaattcatagtatatttttcaaacttaatatattaaatatttatatttacaaaagaaaatgt

SEQ ID NO: 261649 - DNA, 577 bp, Cannabis indica
gtaccacatggcatgacaagtttcataattatcgattgtctgattaagtaatgacaatgtgattgtgatatacaagctcacttgattaggtgatgttatatatggatgcgagactatggcatgggcttgcctgattaggcaatgtgatgtacaagctcacctaattaggtgatgtgatatatggatgccaggctatggcacgggcttgcatgattaggcaatgtgatatacaagctcacttgattaggtgatatgatatatggatgccaaggtatggcatgggcttgcttaattaggcaatgtgatatacaagctcacctgattatgtgatgtgatatatggatgttaggatacggcatgggcatgcctgtttaggtaatgtaatatatggataccggtattcgagttgttcctatgaggcaactgcgataaagtcatgactcttaactgaaactgttgttagttttcttcttgtcggcaatcctagtgaggtagtgacagtgacatataggtgctaggctatggcgcgagcttgcctggttaggcgatgcgatatattgatgccaggttgtggcac

SEQ ID NO: 261650 - DNA, 600 bp, Cannabis indica
agataaattatatgtatatttttttgtatttaattaaataaagaagttataactaattaaatttttctagatatttaattatttggattttcatagaataaatatttaagttcaatatcagtttttcaaattaattttggatcaacttaaattagaatattttgaaattaataattaagtagaattttctagagaattagctatttagttattctttaaaaatatttttaagttggaattttgttaattttagatcaaatcaaatagggatattttttcaaattaaggtcattagttcaagatacttaattttttatttaattaaattttggaaaattatttaagttgaaatttttgttattttagaacaacttaaattagatatttttcaggaatttattttattacattttatatattttcgaaattatatattatatatatattatgattttcaaaagtaaattaaagttgaaaattaatttttaattaactttggaccaacttaaattaagtaatttctattattaaaatgtatagattaaaataagtgattatttaaaaatatattatttaaataatgagctttaatcaaagaga

SEQ ID NO: 261651 - DNA, 2197 bp, Cannabis indica
ataaaaagaggtatgtttcaattaaataaaaaattagagttaattttagttaattgataaataaaagaggtatttctcaatatacccctataaaaaatgtgtattatgatatgggcctaaagcagttttgggccagtattcttcgttttaaacacatttcttgatttttttttttaaagaattacagacttcttgctttttgagagagagagagagagaacctgggttcgatcgagagctatggcggatattcatggaggcgcgtcactgccgtcgggtccagacgcgaagaagaggcgcgtcagttacttctacgagccaactatcggagactactactacggtcaaggacatccgatgaagcctcacagaatccgtatggctcacaacctcatcgttcactacggcctccatcgacgcatggagatcaaccgccctttcccggcggaccccgctgacattcgtcttttccactccgacgactacgtcgattttcttgcttccgtctctccggagacactgggcgagcacaccttctctcgccatctgaagcgctttaatgtcggagaggactgccctgtctttgacggacttttcggattctgtcaagcttccgctggcggctccattggagctgctgtcaagctcaaccgtggcgatgctgatattgctctcaactgggctggtggtttgcaccacgctaagaagtctgaggcttctggtttctgttacgtcaatgatattgtgctcggtattcttgagttgctcaaggttcacagggtaatgctttttctttttaatatacttttaatgttatttttaatgttgttcccctgctttcatttgtatacaattaacctttagattttttttgggagcaattacggtcgtagagtagactgatttttctatttagtagcattgtttgaactatgtctctacattctctgggttttgtttctaggattattttgatgcttcattgactgatgttgttggttgttttgattattattggtttagaattgaatagggtattttgttaaaaataaattaggattgctttgctgtctttgttttcttattgaattaggattgttttgctgcaagttaaggatcatattttactttacattttagctttagtttttatgggattaaagccatttcgtttcaactcattttcttatttgttcatgaacaataatttatgtgacaccattgttgtcttcgaacagcgtgtactttatgtggacattgatgtgcaccatggagatggtgttgaggaagcattttacaccactgacagagtgatgactgtgtcttttcataagtttggggatttcttccctgggactggtcacattagagacactggagtgggcattggaaagaactatgcactgaatgttcctcttaatgatggaatggatgatgagaattttcgtggtctttttcggcctatcattcaaaaagtcatggaggtttaccagccccatgccgtggttctacaatgcggagcagattctttatctggtgatcgattggggtgcttcaacttgtctgtcaaaggccatgctgattgcctcagatttctgaggtcttttaatgtccctctgatggtcttgggtggtggaggatacacaatacggaatgttgctcgttgctggtgctatgaggtttacctcttatctctatgtttttgctaccatctgttacttttgttcgattcctgacgaagttgatttattatttcttgcagacagcagttgcagttggagtggaaccagataataagttgccttataacgagtactatgagtactttggcccagactacacgcttcatgttgaaccgtgcaacatggagaatctaaacactctcaaagatatggagaagataaggtaataaaagttataaccttcacttgtttagtaacttaatattattttataaaagagctttaggggtaaacaaaagtttggaataacaaatgtctaagggtgcatcattgtgactgtgaagcaagaacgttaagttttgcaggtttcctaatgacatatcatttttttttgtttgtgcggtgacttaaccatttctctggatataaagtgtatactttaataaagccaaacaatgtctttaagcaaagagggtattgggatcttgtgatcttggattaaagctgtgaattct

SEQ ID NO: 261652 - DNA, 594 bp, Cannabis indica
gagtcatgagagtgactttttttttttttttttttttctgcacgtgaaggtatggagggttggttggtgggtggtggtgtattgggctggaatggactgggccgaaaaagtgttgttgggccttttttttttaaaggcattatatggctggttttgggccctaggcacgggcctagtccgcctaggcccagggccggccctgagtgggtgcataatgtgtatattaatcatgaagattggtgggggtataaggcccctacccacaccagctggtattagagaagaattgtgagcacaaaggaagttgtgaagctgatcatgccacctgatcagtttacagctttagattttaaaattgcttccttatataagctgcttaatcaggaacatagagattttcatgtcagtaaaaaagtctggagcaggcttaatattccaaagcacagctttgtgctatggattgcagtgcagaacaagatgagaacatgagatagatttctgcagtttcatatcattgatgatattgtctgtctgctatgtaataatgcagtagagaatgttctgttgggttttgtgccctaaataaaacccttt

SEQ ID NO: 261653 - DNA, 1199 bp, Cannabis indica
agtattatatcgacatggtcaataagtctagtagtgtagtaagaaattatgtttagcatgtgatcagtttaaataacataatttccttatcagtcatcaacttcactgatatcgtgatgcttaataaataagccagtgaaattaaccatacactacttaataaataagtcagtatcactaaacatgcttaaaagattaagccaacaaaatattattgttattaagtaaataaacttaaaagataaaaatcacaacaagatacgaactacatactttcaattttatcattctcgagaatatagcacaacataattgaaaacataaacatccaataataagaaaaaattattggcctacaaaacaaaccaaatggttcataacatcaataataaaattacatataaatgtaatctcaattaataaagcaacaagccttcactaaatcaaaggaacaaaagattataaaatactcatatcaataacatgtttattaagcaacaggacacttattcttttggttagatgatatgctaacatcaacttggtcttgtaatattctatcacaatttttcctttcttgaccaagtcactaatagtgagaatattttatttttatatatttagaagcactactaatctttttattctttgaaaagaaaataataatattattatcacaatagatcgatagatgagtgaaaacagaatcaaccacttgtatctctaaaattaaatttttttaaccacaaagcttgcaaactcagtatatatagtagatgatgtgctcaaaatttatttaacactcttccaagaaatagttacaccagccaaagtgaaaatgtaacaccccaacctctaaggatgtcatgtgtgtgcttttataaattagtttataataataaactaatggtttaatcaaaatttgtgatttaataaataaacctaatatatatataatacagttacatccgtaagtattttgtttcagggatctcctgttataaaagtattttacaaaaggtgcattaccaaaatgtattaatcaaaatactttccagatacaacgcaaaaacattccctgacaactcggctcaacaagccaaataggttgtaatatcccgataagcctaatggtaaataattagagtttatatttatactatgggttaatcaggtaattagtgggattatgatcttac

SEQ ID NO: 261654 - DNA, 688 bp, Cannabis indica
tttctgcaattactccccttcaaaaaatggcagctgctcacgttatggagaagatgatggtgtacttggattttctcctcttttggttgttggatccctagggtacaaaattcacaccctaaaattagaagcccaatctttttccaccttggcccactaggtttagtcctttttcttccacagaagccagctagtgtactttaagtgactgggacgaaaatgctgatgtggataagtgaaattcattttttagactttttccacgtcagttcccaatctgcccagaatgctatagcattgcttcagcaattctgcccagttttcagcttttgctcaaacttttcctttgcttcactttctttttcctagcaagttaattcttctttcctacaacaaacaagcgatatttaattaaaaaaaacacaattaacacaataattttttacaagactcaaaagttagcttactaaatagaaattaaactcaaactacttaaaatcaagcaaccaaacacattttcgctactctcctctcaatattttcagttttaaagcataaaaaataactctatcccatagagttatcacttaccacaagtgttatcagttgttcataatgtatttcgtatttcaatgttgaggaaatatgtttcagacccgactcgtgtcttgagttatgaagcccttga

SEQ ID NO: 261655 - DNA, 622 bp, Cannabis indica
ggttgatgtcttggttctagtcctgttcttgggtcccggtctacttaagattttggttcaaattttgagtcacagggtacaggttaaggtccgggtttggatctgggactgggttcaggtctgggcctgggttcgggtcttgatctaggttcgggtccgaggctggttcctagatccagacactgactacacattatgtccaagccctgggtgcatattcggatccagatctcgggtcccagtctagttccatttcgggtgtcaggtcacgagcttggtcctaggttcaagtccgtgtctggggtcgggtcttaggtcatggtcatagttccgttcccaggtcgctatcctaattctaggtacaggtcctgattctggtctcaatttgggtcccggtctaggttcgggttgggtcctagtcccaatttgggtttgggtctcagtttgggtttttatttgggtttgggttcaagtcttggtccttgtcctggtcctggtcctaaacctagtccagttccagttctagttgtgattccaagtttgagtttaggttagggttcgagtcggtgtgagtttgggtttgggtttgggtctcggtctaggtcgagatcggggtctgggt

SEQ ID NO: 261656 - DNA, 3939 bp, Cannabis indica
taaactattagattttgatctaaaaaatacaacaaaaattccgtgtgccggtaaaattgcaaatttttgtaaaatccccatttgtaaatgggcctctaagcccaacaatgaagcaaagcattagtcttcacttccatttcgggagctccgacatataataatatctccaaaatacactcactgtgatagttgagcttcatacaacaagaacaagaacaagaagaacaagaaaacaaaaatggcaataacgctcaacagtggcttcaagatgccgattgtgggtctcggtgtttggcgtatggaaggaaaagctatcagagacctcatcatcaactccatcaaacttggttatcgccatcttgattgtgctggtaacttttttccttcttcttcttcatgtcattttcatttggttacttttgagttttattcatttgggttttcattctgattttctctaaagcttcaaacccattattggtaggtttgaagatttttaattcgtttatagacttaattagaaaagatccactagtactgtgattaggactgttgtgctcttaaaagttttgacttttggaggaaattattctaaaataattggtggggttgagattagattacatattgaactcatttataggttcttattcttaaaagttccactagaagaagtatatgtgtagttattacttctactagataagagttaaataacttcttcattagctagaatagaataaacttgagaatccttacttgggagatttgattcactttggtcaaatttatgtcttattgtcaaataggctttgttaactaaacttttgaacttttaaataaaaaataaacttaactatagtgatcaataaaaaactaatctttttgacccttttgatcaataaaaatattaactgttgttaataaaaaaaaaaaacaagttgtctatggtagtggaaaaaagatccttagtagattagagtaagaaataatagaataccgaaaggattaagtgagttactttattttcaaataggaaagtatgagaaataatggggaaatgaaggattgctcatttgcaatatcaataatatacattaattggtaaagcctcttctaagtgcattagttctttaaactgctcctctacaaaatttaaaagctgtagttacccagccagtcatctttgtttgtatttatttacccttttttgctctattatttgtgtaatcaatgaatattttctcattgaacttgtacaaaatgttaccttttggtacatttgagttgctacaatgtaatgtttgactagctagtgttgcttgcagctgattacaggaatgaaacagaagttggggaggcactttctgaggcgtttcagacagggcttgttaagagagaagatctctttgttaccactaaggttagtttattttcgaactgatcgtataatatgtatattctgtatgtccagccagactattattctttttctttacctgtcttgattgcagctttggaattctgaccatggacatgtccttgaggcctgtaagaatagtctgaagaagcttcagttagattatctggatttataccttgttcacttccctgtggccacaaagcatactggtgttgcttccctcttctttttcctttcggtcattttttcaattttctctgcttttaaactgctaccgatgaatattccataggatttctgcatcaactttgttgttatgccacatgagtttcggtattacatgtcaaatagcaaatcatttagtcagaaaaattggccttacagacagattcgtagtaattctaaatatgacattctttacatccgaagcaaaattggtgtttgaaccaatactgaattgaaaaaactaagagatattagacactgaaactttaaacacggagtgatttagctttatgtatgggtgttttgcgaaatctttaatgctttttatgaaccgatttaatgttctgtttcgccattcaaaggaattggaacatgttcacctgtttttttctcttcctcattctgaatttcctttacattcatgcaggagttggtacaaccgacagcgctttagatgaagatggggtgctagagatagatacaaccatctctttggaaactacctggcatgctatggaagaactggtttccttgggtctagtccgtagcattggaatcaggtgagccaacaacattatgattttttttgttgattatgtaagccacctgaattattgtctgatatagctattaactcactaaagaatgagtaagcattatgttgtgaattttcccttttcattttgcaatgtaatgactgagattttaatgcttagaatttcatgtggatttttaaataagtaatataaacaacaattgcactttatttcctgttttcaacttttgtacattttcttcagtttcaaactcctgagattaataattgttatccaattgttcgaacaatttcgcagcaactacgacgtgtttctaaccagagactgcttagcttactctaaaatcaagcctgctgtgaatcagatcgaaactcacccttacttccaacgcgactctcttctgaaattctgtcaaaagcatgggatttctgtcactgcccacactcctctgggaggtgctgcagccaacactgaatggttcggttcaatttcatgtctagatgatccagttctccaggtaagctaatctgtcaaaactgaatatgatctcacattttctaaataacccagaaactagaaacttgtttttttttcccgattttaagttacaatgttggttattgtcaggatcttgcaaagaaatacaacagaaccgtggcacagatcgttcttcggtggggaattcaacgcaatacagttgtcattccaaagacatctaaagttgagagattgaaagagaatttccaagttttcgactttgagcttaccaaagaggacatggatctgattaaaactctggacaagaaacttagaaccaatcaacccgccaagttttggggcatagatctgtttgcataagcagaggctcacaattctatccataaccatgtattctgagaagaataagagagtacaagagaaataggcatcttatgaactgttctcaagactcattaaatgttgaacttgttatgtcttttaatgcaaattttccaatatgatcatcaattatttagttattcatttattttgaacgttgtatccctgcattgctaaatcaaattaacaattcatgatacaagataaagtggtgggcaagtgtgttagcttcccttggaactaaagctgagaaggaaagtgagaaagggagagattaattttactaagtcttcaggaaaagcatttggtcactggggatctcttacatgatccaccagcaccttacaatttctccttggcatcattgaagagcatgaagtagtgcttgagcttgcatgaggactaatttgtataagccttgccatggaggagcttttgctgcaacaataccaccttcgcatttgtgaatgactagaccaaatcccattttgctcgatgttgtacactgggcgacatcaacatttaacttgacaaggcttgttggaggagcttcccaggtcgcaacaactatggactgtcgagaatttggggtgttgtttacaacaccgtgattactcttgtattcttgtaggaagcttgctgtccattcaaaaatcttaggaggagagtgcctaacctcatagtgcaaaagctggtatatgcaattccaaacattccagagcaatacacaagaaaaactagaagttattttctgtaaaagcatttcattaggcatgtcaaaaagatccatttagttagattaggtcggagctctaatccaaaatattcggatacttattggatctcggatcagat

SEQ ID NO: 261657 - DNA, 1471 bp, Cannabis indica
ttcaacgatgaagatgctgtaaagaccgcttagctttaatttggaaattagcagataattagggctttattatgaaaattagattttaatattgaattaattatttatgatgatttatttaaattcagaatgcatttttatgtcacgtatagaaatttcataattttgcatatttggtgcccggcaacatttgatgcggtgtatggcttttgaatcacatcttagtatttttagtatagcgggacaatagttagacatttggaatgtcgagaataaacgggattttagagtttcccaaaataccccttttatgccttttagtgtgggaagggcaaaatggtctttttctttcccattcttgttttgtcttatgtgagttttaattaatgttaaaatcagtttttttttatattactttggctgaaagtagtgtagtaaaacctaggtttatttcatttattcaaaaaaaatagaaaatttgaaagtttggaaaattctctctctttcaacctctctctctcacgaaatcccttagagcagctaggattctggaattttgtcttcaaatcttgccattttacagcagctcttagtgatttcaagcaagggtaagcttctagacaactttcctttagttttcttgaaattcaagttttggaattatgcatgttttgagagtttgagtttcatagttgctgttgttgtttgaatcatgtttttggagttagattatgaattgttatgttgatttaggcttgaattagtggttgtttgaagttttagacaagctttgagtttaagaactcaagcttgaagctttaatggtgaaaattgattctaagctttgattgttgttttgttgcttggaaaatgtttattggggtgtaatatgcaggtctggaaagtttggttgagtttggaaacgttttggttgggggtttgattgttgttggttttctgggtaaaaccggctaaccggttttacactgcttgtaaaaccggttacccggattttgcagcagggggtgaaaactagttttttcagcttgtcgtttcgtgttagtttcaggttttcaggcagtttattccctgctagtttgggatatttttgtattaagttacagtaggttaagttttggttttaaacctttgtcccggttgtgatttagcggatcacttatatgttttggaatcgatgtgatttaggagcctataattcgccgagcagttgttccactcaggttgaccggcacacctgaattcggaattgaggtaagattagtataatatcatgcatatgttattacatgtttagcgtacatctgttattgcctattagattacattgattgcaataatagtatacatagagttgtactgattattgataaatgtatgttggctagaatactgatcgatgttgtcacatcaatatggctagagtatgactagcatattgagtataggctga

SEQ ID NO: 261658 - DNA, 590 bp, Cannabis indica
atatattcttgatgattaatcatattctcaagaataatgtatttatgatgtttagttaattgttgttgtaagttttaattatatgcatatggtttgtattgttgtcttaatattgcagtgtgtggtggcttagcttctttatttttcatgtgtgtatgtttgtgatttaataatgggaaattaattaattgatattgttgtgactacaaattatatgatcatcaaatttgttgttttatcaaagagtattaaagagcggaatgcatttgtctattgatttcgaaacaaatttgtcgagtgttgcaatcttttttttttgatcaaaaaagaacaatctatattaatcaacaagcaaattacaaccaaacaaagccttaacggccaactacaaaaagaaagctacaacgagcaatcttcatcaacaaattcctttcctctcctttcaaattcttaaaataaaaattgttaagtctatatactttgtatcccttctaatcgtatctacaattttttccatactataagtaaatttattaaacacacaagtatttctattatgccaaatataagaaacaattctgttctcatgc

SEQ ID NO: 261659 - DNA, 511 bp, Cannabis indica
tagtgagatggctgcaacgacacaaagtcaaacaacttcaggacaagagtgtatgctgctgctgtggtggctttagcatacaatatttggcaagcctgaaatggagttctttgggaaggaaaaagtgtgcaaactgctcaaatagtaagtaaaacaaaaatagacatcttgtatagaattaaaaatgtttggcctaagaaagttagtgacaaaaataggtcatggtttgaaaatttgaaaaaaaaacaacacatatgcatatttgttgatgtatagattattttcaggtctcgcttgagatgctattaagctgtaaatggatgtttcgagtaatgataatctcgctgattcataaaaaaataaaaattaaaaattagatatttgttgttttaataaaattttaacatttattatatgttattatttttagttgacctaaacctattagaatacgatatctcataatcttcagtatatgttttttatcaaaccctaaactatcatagtttta

SEQ ID NO: 261660 - DNA, 1861 bp, Cannabis indica
ttatcctctagttcaaatattcgcaattggatgggatctccttgttgttgatttgcattttgattgagttgatggcgcaaatcaggtgcattttgattcaaacgctcgtgaagatctggctatctttgatttaagcattctcgaaggtcaggctgccttcgctcataattactcatagatcttgtcttcgagtaactttcggattgataacttcgtgaattgttgatactttcttggtcagcataacgtcgaggtttacttccttctcgcatttgcctacccgatcgactatgtcctcgagaccttgaatgtcccagacttgaacttgcttcatcttgtatcagccttctccttcaaaagaggttagatacacgtcctctattcaagtatgtgtgtacatcctctctctctgatcgagaaggacgttgagggtgacttggaggtagcccacctgaccttggttgatttcgagggtttctctcattaccatgagggatttcttggttccctggtcgaggctgtctcgtatcctcattcttgcgagatgcttctggtacatcattttgctcattcccttggtttataaatccttgggaaacttgaggaacatctcgccgttgctcttgattatctgtttgattatctattggaagatcccttgtaccctcaggttgttcttcctaggcattttggggatttccctagtttgtttcttatctcttggttctcgaccctcaaggtcaacctcgtggtcttcttaccgaaggatcaggttgattctaaggatttattccttgtacccaggccgccacatcctctctttcaaactcagtatttcattggttagattcggctaagcattcttgaagtttcctattttctaattccatcaatgatatatatctagttgggtcataagcatcctcgcttttaggcacgtatctagcagaattattgacatcttcagtccttctttctgaatttcgatcaccaccactatcgttcttccttgaacgtgatgtttcaatggtatggggtctttgagatcccattggctcttttccagggcgacatgttgtttcttcagggcaattttcatcattttgattgttatcagccattgaatatggacaaatttctgtttgtaaggagggatttttctgagttttatcactaaggctctcaataaaagcaccaaattgttatgcaaagttaacaaaaaataaatagccttttagtaataaattatcaacagaaattaataagttataaatgatagtataattccacatatttttacgtagttttgtagtgaaaatctacctactctatgagtccttattattagggatatttttaaagtacagaatacaatatctgattttgaataatagtcttttctccctggcactcaagactgggatgagactttgattaaccgttgttttactcaagaagtggctcgggccattctacaaatcaagcctattgtaaaccaagatgacattctcttttggagaggcagcaggaatggaactttttctttgaaaagtgcgttgtggaaggctcagagtgatagatttcatcctaaaaaagatgtttggaaactgctatggaagttgaagttgcatcctagacaatcactactcatatggaaagcactgactagcagtcttcctacaaaaaatcggctgggatttttgcatagcagggataatttgtgctgcttctgtggtgtagagcctgagactgagtgccatgttttccgagattgtcacttcataccgaatttgtggttccttagtccttggggtatcagaacggatcgtttagtctcactatcatttgaggagttcttcat

SEQ ID NO: 261661 - DNA, 1874 bp, Cannabis indica
agtcttagttaagagaggtgattcattttgtgttcatggcttctacctcaatgacttttagttattaatagataaatattttaagtcttttttattatattataactttgattattttactatctctctttgaaattatttatgattatcattaaattgtgtggtaatagagttttattatattattttgtatgtcaattttattgagaatctataattacatatcaagaatgttcttttatcaagtttattaatatcattattagagctataattcatccttcatcattttattttattttgtagatgttttatggactaatcaagatatgttattgcattgaacgtactaattgttgtccttataattgcattgtctaaatttttcaatgagagttttgtcaaacgatgcttcacaaccttttgtttgtggtctttgatttgattaaacatatcttttacttaaatgattagtaggtctggttggttggaggagatttacgtctcataaattcattagtgattttaatacaactattaaatatttcactcgttaacaaatatatgttacaaaaagtaatatgataattttaacaaataattttatcttcatccttacaattttaattataacattaaacaacaattctcaccatctatctactttctatgcattggactcttcctcattcttaccaaacacaacctaatagaatatttaaatgcccccaattttctaatgagagatcaaaggcaagccccttgttttatttttatcttctaattctatttttttattttattttattgattgtatatatatttttcattttttatgaaagccaaagaatgaatctgacaataatagtaataagaattggatgaatctgacaataatagtaataagaatgttagaatttaaggataagatgaatgagattccaatacaccctcctcacatttgggcctagaaagtgaaggtataacgaacgatctttaagaagccacaattttgaaacaggtcaaaactagtggcactttgggcttacaacagatcataagtggctctgataccatgttaggatttgggaataagatgaatgaggttccatctcaaaacccattggcaatgggaggagtagcccatttctcttatatatgacaatttattttcacacattaacaatataggactaactctaatgaagaatcgtttatatatactcttacaaggattttcgtcaaaatttttataaagttaaaccttaatttatataaatatatatatatatatataagtataatataaattataagaaccattatgtcaatcaatgccatataaaaataaacctttaattaatttcctcatttgataaagtgaaagaaacaggaggaggaatggtaaggtcttgtaagaggtgatcacatatgtacgtaataaaaggaagaagaaaacaacagaggtttctttgcatcgtaacgcattaatgtatcatatgtgtatataaaaattatcgtagcaggtttggactggaaaagagcaatgtaacatttaaagactctactcaagttgaggacaaaataataaaacagtcaaacttcattttcacttttacttgctcataatattgtacatttgtactactgacttctgcaaaccaaacaaaataagatcatgccaattacttttctttgttttcgatatcaaaataattcctcaactccaattccagaacttgattcattaatgtacatgtttcaaaccttctattgaaattatgatttaaatttatttttatttattaggacaatttctttattttttagtggattttttatttttctacttcaaaaaacattttttttttttt

SEQ ID NO: 261662 - DNA, 419 bp, Cannabis indica
actggacctccaaaaagcatatgatacgatgaatggggatttcttgaagagatgctaactggtctaaattttcttgggaaattcatatagctagttatgaactgcagcactactcccaaattttctctaatgtttaatggtactcttcatggattctttgaagctaggagggggatcagacaaggggatccgatttcctccctattattttttttgggcatggagtacttatctagactgatggtgaaagttggggcaaaagagggattcaaattccacgatagatgctcagaattgaaactcaatgatcttgcttttgctgacgatgttctttcattctactgtggtgattgcatgagcattctctacatgttgcaggcattaaaaaccttctctcttacatctggattacatccaaa

SEQ ID NO: 261663 - DNA, 868 bp, Cannabis indica
agagcctgatctgaaatagattgaaatccacccgaacccaaagtcagaccaggactcgaactccgacccgaactaaaacccaaactctaactcagaatcacagatgtaactagagtcgaaatagcactaggaccaggaccaggacctaaacccaaacccaaacccaaatcaaaacccaaacagagacctaaaccttaaccgagactaggactcgaacccgaacctagaccggcacacaaacccacacaataatcaggacctggacccaaaatgaagatagggacctgggaaacagaactaggaccgggacctagtacacgacccagacccaaacttgaacctaggacccagctcatgacctagcaccataaatggaaccagactgggacccgagattggcatccgaatctagacccagggcttggagaaaacctgtagtcggtgtttggatttgggacccagccttggacccgaaccctaacaaggaaccgaacccacacccggacctgaacctagtcccaaacccaaaagtggacccaaacccgtgcgttgtgacccaaaattggaaccaaaacaggaagttgaccgggacttgaactaggacttagagttggactcataactgaaattggaccaagatccagaactgtaaccgggcaagaacccggactccaaatcagaactagacctgaattgggagccggacgcggatcccaacccatacctgcaatcaggacccgaactcgaacctgaactcagaccaaaacatggaaccagactagagacacgatactcgggtcaggacatggaactgcaccccaatctctctcccgaacccaaactcaaaaatgggacctaggacctgaac

SEQ ID NO: 261664 - DNA, 650 bp, Cannabis indica
ttttcttaccgttttttcttggatcgacttctatataagtcgtatcataacaacgtaagaagatatcttttcaacattaaaaaaaaatcttttctttctttacgatttttctcagagcaaacaatagggtgttatagagcgatacagttcggtgcagaacgtatcgtacttatacagaggctgttttatcctggggacgccgtggttgctagactgtcgtgcacacttcgggcagagccgcgaaacgtcttaaagagagcgacattgtccgcgactcagccagattattctatcggtaattcgttccaatttcattgcttttaatttcggtataacaattttaagacgttcagttctgctatggctgctaccgatgaattttctggttctgcttctaacgatattaacaagcctttccgttttgagggattacattttaagcgatggaaacagaagatgttgttctacctgacgatgaagaaagttgctttcgttctcactgctctgaagccagtcgtctctgaagcttctaccgacaaggacaaagaggctgaatgcgagaagcaacagaaggatttggactcctggatcgaaaacgaacttcctctcgtagaattttattttaacggttttatctgacaatctgtatg

SEQ ID NO: 261665 - DNA, 658 bp, Cannabis indica
gtcataacggactactttacacagctatttagttcttcctcttcgattactcaaccggttgtggaatgtgtggatagaatggtcacacctgagatgaatgagacttttttgctcacggttacggaggacgaagtgcgtactgctatctttgggatgcatcctgataagagccccggtcctgatggtttgactccggctttctaccaaaaaaactgggcagttgttggcttggatgttgtcaagttggtgcagcggttcttcacaagtggcaagtttgagaatgatattaataaggctaatgttgtgcttatcccgaagaaaagaaatcctgagcgtatggcagacttaagaccaattgctttgtgtaacgtgctatacaagaccatcacaaaagtaatggctaatcggttaaaaccgattatggataggattgtgtctcagcatcaaagtgcttttattccggggaggctcattactgataacattatggtgtctttcgaagtgcttcactacttaaagaggaaaaggcgaggaaaagaaggttttatggcgctaaagttagacatgagcaaggcctatgacaggattgaatggaaatacctggaagaaatcttgttgagattaggcttcgagcatgggtggattgctttgatgatgg

SEQ ID NO: 261666 - DNA, 880 bp, Cannabis indica
aaaaaaatatataaatttatataccaatattcaatttgtgtaaatgcgaatatctgtcctttgtggatttgattgaattgactcgtgctaattaaattagatttattattttgtgaatacccctaaattaatagtgctttcttgtatcggtgtagaggtgtgtcagatagcctatcttcggattcaacctgtcatcaatgtcttcataaatcaatcacacatcgaagaggaaaattaaactagaaacaagtcactcaccctggacgatcaaagatctccatgtgcaattcccttttttttgtttttttttttttttttttttgtaagtgtcaaagatttgaaatattaaacttaatgagagatattaaaactcttctactatgctaaaaatttcacaccttaaaaataaattacatttataatggtatttaaaattttacctcgttgaagaaaaaaatttgggtaaaccactcgttactaaaattataactgtcatatataattaattattgaatggagtgagtagactacgtgctgttaatattctatagtataatttaaaattcttctatatgaaacgtgtatatatataattgtttaaattctaaatttccacatcttgaattttatttgagaataaaagaatgatagtgttgaataatagaaaaaagccattaataaataagtaaacatggaaggaagtgaatgaagttatagtttaagtactggtaaagtctcaagtcaaagttgatgtaccaaaagagagagtgagagagccagtactatgtatatatagttaatatagctatatattattatatgtatagtcaagcccatctccaatcttcaatgaattaatcaagacaattcagcacataat

SEQ ID NO: 261667 - DNA, 731 bp, Cannabis indica
aggtcaatgccttggagacaaccggcctcgagctcttcttcgatttctggaaggctaatccccaggccaattttgactacttgggcgaggctaaggacatgtacctttagtactgcgcggcccaagttacttatggtgggaatgaggcggctgcttctacctccggccaggcctctggccaggctgctgatgcttctcctgttcgaacaatagatcctcctgctccagttggctcagaagatccagaccaagagccggggactccagctgtttaaacacttctctttttatctcctttttatatatatatatattatatgcggcctcaaggcctgttttaagacatcatgaccgaccaagcggtctttaaactttgaattatttttcattttttggacaacgggctgaccgtgcagcttttaatcctggtactacgtgcttttgtcatccttaatgaatttcattctctgtttgtaattgctgtgtaattgtgattgttttatttttaccaaatgctttgtacaggtgtaggttccccctaagtgaccgagcagacgtatgactcttggtcacttgtctttcgcaaatatattgcttatctgtttcgtgttttgggttcgactaaaccttttctacgcactttaggtaaattataatcatgctgattttttcaactcaatagaattggaaatactatctttattcatttattgatcgaaaatgtatttgtt

SEQ ID NO: 261668 - DNA, 775 bp, Cannabis indica
atccagaaatgaaactgaaaaattccaaaatctagctgcttctagggagctcaagaaagaaagagagtttggagaaagaatggctaagtgttctttcttaattttctttgataatgaattaaatcaataataattatataataagtcccaatatcagatttataacataacctagaaaggtaaataaagtcactaaagacaaaggagacaaaaggccgaaaagaccatattgcccataaagggtattttggttatttctaaatccttggatattcccgacattgtcaatgtttagctatattttcccgctactactaaaatactaagatgtgattctgatggccaaacagcgcgttccaatattaccgggcacaaaagatgcaaaaatgtaaaatttcatatgtggcataaataatacaccccgaattcaaataaatctccataaaatgataaatcataaataatattctatattcataattaaacccttattatctgctaattctaaattaaaactaagcggtctttacatttttataggctggaaaagcattccaacaagtcaacttgcccctagccttggtgattaaagaagtgcagtatcagaagattcccgccaatgttctgcaggtggaaaatgatcactacaaagaatttccaaaaatacaagctcattattggaatatatagcattggaccattcattaatcatgatagctctcgcgatcctccagaagtcagagaagagcacgtcgcgatggttgctgaggaaatg

SEQ ID NO: 261669 - DNA, 1160 bp, Cannabis indica
aaatcatccacaatggtaaaaaataacgatatccttcaatgctatcaatatggaaaggaccccaagtatcaatatgtatcaaatcaaaaggggcagcggtcatattgtttttgcttagcaaagtgacaaatagaacaatgagagtcatttggtttcaaagaaaattgcaatgttttatttattgaacgagaaatgtacatagaaggatgtccgagacggaaatgccaaggatcatcattagtacaagtattatttactgaaatcaaatcatcagaagtaaaaaagcggattgcttgctcaaagaagaagagcttcccaactttcttagctgtcccaatcgttaaattccgagaggggtcttgaatgacacaatgagattcagaaaacaacaacaagttagtgttatcttccaaaatttcattcactaaaaataaattgaatctaaattcaggaataaagagaacatttttcagcctaatatctttgttaagctgaaccacaccagaagcggtgactttaatttgttggccattaggcaaagtgactaaagaggcaataatattgtggtcaaaatcagtaaagcatctaatgttattgcatatgtggtgagtagcaccactatcaacaatccaaaaaatagagtaaaaattagggttaccaaacacattagaggcactcggagcggctgtgaagttggatcaattgttggttgagttgcagctgtgaagtggtgtcttatcccgtaacaatagtagctgaagcttggttggacttggcggaatcttgcttgcgtttgtcaccataaccagagggaaaaccatggagaaagtaacatttctcaaccaaatgtccaggtttgaggcagtgagaacaagtaggcctaggtttcttgctccgagaaggattaccgctattgttttgagacggaggagggcggctagacgaagcggcaacaaccatagcattcggaggagcaagagagcgttgacgttcttgctgaactatcatggaaaaaaccctggacagcggaggaagtggctcaaacatcaagatttgatcacgagcaccagcataagagtcattgagacccgtaaggaactacaaaatttgatcacgagaatagtgatcttgaatttgttgcatcgcaccacaagtacagc

SEQ ID NO: 261670 - DNA, 1276 bp, Cannabis indica
ttccttccgttcaagattattctaattgtaggccagtggaatttgacgaacaacctcataagtttaggatgccccattttcgttggggtgatcacgccaagagcttttatttttcaaagcttagtcattttttaggccggtcccggatggggtccggttctcccgtacccattctcttggatcattctgcctatttatcttccagttggttcctccctttggacagctttctgggggatgacgacaccagccttttactacatacttttgctaggacaaaattagatcgctagggtaggattagtttcattacattattcttgcatgtatgattttttgataatgctctaacatctttactcgtttatttccttaagcagcaaagccgatggatgacctcttggatgtccttgccttaacttatagtcttgaggccaatgtgcctcaagcacgcgacctgggggtgactcctgggaggtcttctaccagcattccctaggaccaagtcgttctaatcgatgaggaagaaggggaagaagaagagggcgagatcttccctcccttggaccgaaagcgcaaaggcaagattgtggagacagaagttactaagaaaccatggcgtgttgacactcctgctcccaattttgactcagggattgcatctgaggtggacgagtagaccgtgcctcctggtatcgtcttaacccccaatcctgttgatgaggaaaggactcagctccggattgcaaagcacaattatgccacaacaaattatactaaggggaacgcagaggtggaggccttgaaaaatattttgaaggaggcccaggatagctttactcgtagtgaatacgtcgggaatgtctgggacttaaatttggatcccttgactgactggttcaaccgtttcattggacctaccatggctccctttgcttcagagttgatgagccatttcgctaccggcctgacccagttcccaataaagagatacacatcctatttatatttgcccgtatgatatgccttaataccccctaagtgacatgaaaagcagtttttaagtcacttagtcttacaaaattaaataagaggttgcgtacatttgttggtacaaattcttttacaggatataaactttgctttttagctattgataatacttttggagatgatcagtattccaggccctaagcactgtgattccgtcaattctttttagcttgtaggtcctggagtcaatttcatcctcaatttcataaggtccttcccaatt

SEQ ID NO: 261671 - DNA, 681 bp, Cannabis indica
catgtttattaagcttgttagattacatcgatagtggtatcaatatacgtagaattatattggatactgatagatgtatgtttgactcagctattgatcaacgctatttcatcattacacttagagtatgacttgcatactgagtataggttgatattatggttgatagtattatcgtacaaatgttctagactcagtacggtgtcggaaacggagatagggttatggttaggtgtatgggcactggattataattaggggtattgctatgttattatctatgctttttttttactgagtttatcgactcacaaatatattttgcatgtgtaggtaagggcaaggctaaggttgagcaattgtgagagcgagcatatgaagattgtacatgttggggcgattaggcatggagcgtacggtctttgagacggctatggttattttgtatagtcgctgggagacaaacccttgtaatatgcatagtaaaacttttgtaaatatttttgtaaacgggatcccaatttaatccaagtatgttatttggtatttataattagttaattaaaggtttaattattcacgattttcaataaactcgttaattagctacgagttgcacaattaagttaaaaaatcatgttaacacgcctatactagtagggtgttacactaacgtagaat

SEQ ID NO: 261672 - DNA, 542 bp, Cannabis indica
ctaatacataactaaaatagaactggccggttccacaataaaaggaataaaaataaataacacataataactcaaaccgatcataattaaaatagaaccagttataattaaagaggaaattagttcctaaaatacttgaacataaattaaaaaaaaaacaccaatttcacaacaaaatacctcataaaactagtaataatttttttaaaaaaagacggtaagaatcaattctaaaaaatactgaagcataaaatatgaacagaaccagttccataacaaaataaaaaaaggaaaataataataacacacaattcaaatattatataaagaagtgagttatatttgtcaactatttaaaaaattgagacaaaaaaattagttccgtaaatcaaccaagataaaaatatacacacaaaaatcagttaaataaaataaataaataaatgactggttctttaaactaactaaatcaaaaatcagttcccgaaataactaaggtggcgcttggtaacacttttttaatcagttttgtgtttttaaaa

SEQ ID NO: 261673 - DNA, 691 bp, Cannabis indica
gaggatattatcaaggcgaaagccaatttctccatttggggataacgcgtctcggcatccagtaatcgcttactgacgtaatacactgggtattggcgtccttggtcctcgcgtattagtaccgaactaatcgcatattctgagacgaccaaatagatggacaagacttctccggacaacggcttcgacaagatcggaggctgccccaagtgcgtttttaaagcttgaacggcttgctcgcatttttccttcatatgaaaccttttgttgcctttcaaaatctgaaaaaactccttgcacttatcagaagatctggatataaagcggtttaaagctgcgactttacctgtgaggctttgaacctcctttggcttggtcgctgattggcttctattcctcgctggttaaccatgaaaccaaggaatttccgagagccaactccaaagacgcatttcagtggatttaaacgcatcttatatcgtcgcaatatatcgaacatggcctgtaagtgggcaatatgatccttcgcatgttgtgattttacgagcatatcgtcaacatatacctccatggtctttccaatgagatctgcgaacatcatattcactagcctttgataagtcgcacctgcgtttattaaaccaaaaggcattactttgtaacagtataatcctcgatcagtaatgaacga

SEQ ID NO: 261674 - DNA, 516 bp, Cannabis indica
aaaatacttttgttgtttaaattatccttcctcatttttttagtctcttttacatgttaactccctcttttttttcttctttttttttcattttatattgagattagcatttttttaaaaaaaatgaaaaataatgtttattaataataaaagtgacataattatttagaaaaaaaataccccttagtttgtgctagttcagtgaactctttccacttagcactgcggacctcccgagtgagggacaccaattcccaccacacgagagcgtcttcctggaactaaaatgtagcgcaggtcatccgatcattaccaaccacacccatgaaattcaagattcgttcaatcacagtgagccactgctcagccttcatcacatttggacctcccagaaacactggagaagctttcttacggaatctttcgtataacgactccatacggttgccagcaacaggttgttctgctagcaccactggagcaacagcggcctaagcttattgtggaggcacggca

SEQ ID NO: 261675 - DNA, 721 bp, Cannabis indica
acataaatcaattcaattactaaaaaattacctaatatgattacatgttcttttaaagcacaaaattaaaattagtcaagaatataacatcaccaagcacacggatttttcgaaaaataaataaacttttcaaatcatgctatctacctactttcaaattgactcacattaagcaaattgactcacaacaataaaattaaaaattaaaaataaaaaaaaaaaaactcaaaataaaaatttaagtcacctcccccaaactaaagtgacacattgtccccaatgtgacattaaagaaaaaggaaaggaaacttacctgagcgccacatcaacaagcggttgacgcccgtaataagcgtcatgcaagacaacttgaaaattgttgttgtacttgccttcaagcttggcaagcgatgagtttgaaccaaagtcagcaccaacaacataagactttggatgatgagcttggggagaagccttttgtagcttgtagaggatataatatggtgttgatgacatatatggatccattggtggtttattagtcaatatcattgataaagtcgaatcaatgatgtcatgttcttccttgatcatggatgaattcattctcttctatgatttcagtcactccattcattatttaccaagaaagaatctgatgtagccaaattttgagttaatactacttcaaaaggattttgatcttcaattgtaggctcat

SEQ ID NO: 261676 - DNA, 593 bp, Cannabis indica
taattggatttacaaagcagatagcagcttgacgttgatagttacaactgagacaaccctacaagaactgggccaaattttatatgaagagttggaagttgatcctgtagcgtatgatttaaagttggagatttgttccttgtacatgaagggacaaatggttgtgccagaggttattaagagagaacgccaactgagaactttcttagagatgagggcaacaatgtcaaatatagagtttatgccattattcgtgaccaagatgagaaaagttgggaattcagagcctacgccgcctactaatcctctccctcggagtgtggtaagttcttgcgttcttgaaacagatgttgggattggtgtgaatgaggaggttccgaccaatgtagaggttccgaccaatgtagagcaagaacaagaagcgacaggatttcatcagtttgaagagttcgatacaaccttctacaataacgatcctattgtaggctcagccttattgtttgggcgatagatacaacatcatgacgagcaacgctgttgaaagcttcaatagtgttacagaagagttcaggaaatatccaataactactttg

SEQ ID NO: 261677 - DNA, 534 bp, Cannabis indica
aaatggtcaattccataaccccgtttaactccgatataatattttctctaaaatatttctcactaagaagaaaggttataaacttacccatgtgatcaaactagccatccatcgcattttccgttgtcgccgggcgaaattacaaaaataacatatttcacatataaaccaagtaatgcccctagagtttaataaaatctccaaaattgagatattataactctaatattcatttctaaatattggggtccacaaataattaatttcataaataatcataaaataacagaaattagtgctaattgccttttctaatccaatttactaaagcggtcattacaggcaaccaccttcgatttcttctttggaggagctcgcccacgtttagacaatggaggagcaaaattggagccatcctcctcaacaacaggccgtttacccttgtttctattagctaaagatttcaatcccattttagagcttttctttggaataggggaaggacacacagaatcagttaaatccagatcatat

SEQ ID NO: 261678 - DNA, 779 bp, Cannabis indica
cgaacattcctccactcttgtagtgcatcttcagtgtaataattatgggaaggtctgatgggtccgaatcgggaatggtaactagttacgggagaatagttgtagaagattatattgaaaatgtcaatacatgtgtcaagctccccagtgtatctgacttcttcgtttggggcatttggaatactaggatagcaatacactgcagctgaaagaagaagcttcctgccatttgggaaattgtggaggtccgcagctattttccactcacgaaagagattgtggaggtttgtcatgtcgagtttggtttttggataaatccaagcaagctcaacaccatcaaacttatagttttctgccaacgctaaggttgtctcaataaatctcttgcgtgatgctgtgtttcctgccatttgagagatagcaatggagggatcaatggcagtagcatcattattcggcttcggacctccaatggataccatagctttcttcttttcatgacgaacttgttcactgaaagtgttcatatcttgctcaagttctccggggatgataacctcgcctgtaactccattaacttgaagaaagccataatagagatgagtgaaatagcgtattgcggaaactggaaagcgttggtctgcggatgccaaccagtaaccattcttcatcgatgccattctgctgttacattatatatatatgcacaaattaaaaaatcaattagcaagaaaatttaataaaatcatacttaattatattaatctcagccataatta

SEQ ID NO: 261679 - DNA, 534 bp, Cannabis indica
tttaacctgttcggttaccctacaaaaaaaaatgattcctaatatcatctccaaccatatatcaaagagattttataaaaatactcaattttggataaaaatttattatttactgttacacagaattttttataaaaatattctttttataaaataaccacaaaataacaaaacaaaacaatcaaaacaattaaaataacagtgtaaccactaaaaactaactgtgaaatgaaaacacaatataaaatttaaacagtaaaaaaattcagtgtaaaaactcctagtctgaatcacagggacaccaaatttgaggctcattctatttctaatccagatcgctaatttagggtttcatctcacgagcaatatctacagctttaaaaagaggcttcatcaacaatcatagtcacgctctcaactctcaactctcagctctcatcatccacatcttagtattttctcaactcggttagtccctcctccagttcatcctccttctccaatttctctcttttgtttttcttattttttttt

SEQ ID NO: 261680 - DNA, 722 bp, Cannabis indica
ggaaattttactagccatgattagagatcaagctcccaatatagtgactttggtgaacaagagcgagccacaacggaccctagttttttaggcagatttctcgaggctttgcattattactcggcgatttttgactcattggacgcgacttttccagccgagtcacctcagagagctaaggttgagcagtatatatttgcgcctgagattcggaacatcgtggcttacgagggtccggagagaattgagagacacgagaggttggataagtggaggaaattgatggaagggaaaggattcaaaggggttcaactgagtgcgaacgcggtgactcagtcaaagatattgcttggactttactcttgtgaaggttataggttgactgaagataatggttgcttgctcttagggtggatggacaggcctctcatcgcagcttctgcgtggcgatgttgatataggtcttacgttaaatacacaatttagtatcgggtcacaatagggctctcatcgttgcttctaccgggggatgctgatggatttattgctaaaaagtatctgtggtgtggaacattactcatctttaatattaatgcaatttagtatcggatcaatatgattcgatacttaattgcattagtttgatgattcaatttagcttatttatcacttattagtggattttgtttttacatttctggtacgtgttgatttggattata

SEQ ID NO: 261681 - DNA, 687 bp, Cannabis indica
acttgagtccaatggagagttactgcttctaacagaataactgttgaggattgcagaaaagagtggaaactttttcttatcacccatctgctgatatacgaccaggtgaaggaattccatgcttttgaaaccattcaggcatgtggaatttttcatagagtgcaggtctgacgtctttctgctcagagagttccttgaggagtggaagaaggacgtccaaaagctgattgagaaataagagaaaaatataagaatgtactcatcaagagatgacagaatatcatatgtagaaatttcaattgttagatcttaagagacctgtgtgtcatgcggttgtcccgctgtaaatggaatacatggaatcccattcacaggttgtaacaagaagctgaaggggttgttgtcaacgattactattcgacacatatcctttgctaaaccagtgagatccttaacatgctcccgatactccctgtatatctcaagcatcaaaggttatttacagaacataaaactaatggcagatgcatgaccaaatataaaaattcattattccaacaaaagtactcgaaccaatcagctaacttgatttatctcaaaaacgaaaaatagctaacaagatattacattgcattgacttgtaaatctaaaatggatattagtaaattgtcaaatgtttaatgtgtg

SEQ ID NO: 261682 - DNA, 1178 bp, Cannabis indica
taatttaacttgattttggtaatatatgcaataaaaaaaaaaacaagacaagtttgccaaaatgataatgtgaagaagcaaaattagtaaaattacatctttacttgaacagattcacccttatgattgtgctaataaaccatgaaagttatttgccagtgaacctttttctagagagcttagttctatattgctgttttgatggttgaggtcagttgtaaagtttgaaattgagttttatcaaggacactatattgtgtttttaaagtgtttgagaatgggtgatctaggccttatatttcccagataaggatttatgtagaacagagaaaaactggctttaactctatttgttcctgttgcttttagtgaaagaaccaattataaccaatagtattgtacagccagcttttcatccatttttttctcattctacttacaccaaactactctctactttcttatattttgtcaatgatattgatgcctcaccgtcatcttcagcttaaactgtgaagatttcaaatacttagaaattatggtattggatggattgtatttcaataggattaaacaaaaaataaataaataaataaataaagaaaaggaatagatgatgttattttataagtcttcttttttattttcatgccagtagcaaggaaggataaggaaggacccaccttaaccaatccgaccatatactaaagttttatttttttctttttaaagttgaataaaactttgcacagttataaaaatattctactttattgcaaatttgagctatggtagcttattatagagcaaaagaaggttcggtacaataattacctcagaaatattatgtcgcatatactcattactggcctttgtttattgggaatgccaaataattgccttcagaaaaattgagccttccccactttctatacctggccgaaatcatctctcttcttttctccttcatcaatttcgtgaccctagtgaaagagtaagtgcccacacacagcaagcagtaactcaatcatagattggaagactgtgaaggatcaaacttgaagaagaaggacattcaggctcagatcttgattatactctgctacagaaaggattcaagggttagagatctgagtggaaggagacattaattctgctgcatcaatgtaaggttttct

SEQ ID NO: 261683 - DNA, 620 bp, Cannabis indica
agagtagctgtgagaaagttaccatgagggtaataccgtgctttatagactctactcacaagggattggttattaacaagaaggcgccaaccttgttttccaagtaatgacaaattatagtcatgaagactacgaaaacccatgccgccaacatccttctgctttgttaagcgtttccaactcatccaacttataccacgggtgttttgattggaagaattccaccaatacttagacatcatgctctccaaggaagagcaagtatctaagggtaaaagaaacaccgacattgcataactagggagagcctgagccacagttttgagtaaaacctcacgagcagctttggataagaatcttccttcccagctttgtattctcttttgcattttttctttgagaaaccccaatattgcgttcttgtttctcgcccatggtacaaggaagaccaaggtatgttgagttctcgtggggctatctcctatttgtaaataaggaacagatgcgtatctttaaccatttcagtagtgttcataactaaagaaaatagagcttttaccaagttaacctgctgtccagaagctgactcaaagagttgtaacaaatctcatgacattaga

SEQ ID NO: 261684 - DNA, 1244 bp, Cannabis indica
gttttgttcctatactatgcacatatttttttagccattgattcatatgatttttaaaagtcaagattgtataagatgtatatgtttgtaggttaaaaaaaaaaattttacaaaaaatttgacacccaattaaaataaattaacactcaattaaaaaaaattaacaaccaataaaaatttattttttatcttttaaaaaactaatttttaatgttatttatcatttcccatgagccccattttgtctatgtaggaacaagttgctagaaagggtagataatgaattttttaaaagcttacgctcattgatctacattatcagtatgttgaaagactaagggatgtgaagaaaagacgattcacttcaggatattcatgaatgacacgagaggatagtatctcgcaaaacacgcgtaatcagtcctaacattatgaaagaacgagaagagcatcttacatataatatatgcctcggtaaagaaactaccttcaagataaacacaaaaagcggttgccagtaaatgctgtgaggcatagaaacttagtcagtataaccgttttggataaagacaaaagcagttatagcacttatatctatttattctatatgttgtaaatatgaaatgtgagaatcatccacattttatgaacgattatgaagataagatcaaaggataataactgtcaccccaaacacctataaagtaggggaagaagtcctagattcggggacaaccaaattgggaatcttaagcaaaaatacaagagcattatactattaatattctataaactcatcaaattttaagaatatgatggactcgtggattaacttcaaacccatataaaaatcttcttgtttagtattattattgctactactactattatttatattatgaaatatatttattaaattaaagctcatttattagttaacaaaagtccaccttaaaagtatactcttcaaaaaaaaaagtattttgctacattcttatctattttagcattaaaaatagtttttagtctaattctttatttataacctcttgtaaatttttaaaagatcctaaataatttaggtatcaaacaaaacagatagagtctacacttaattttatttttacactacaaaattattaaaaaagaaaaagaaatatatcaatcaatttctatgcaaatttaactttacttatcaaaagagaaatgttgaaaatatagttgcaatatataaacgcctaaat

SEQ ID NO: 261685 - DNA, 805 bp, Cannabis indica
gttcagtcctgtggtgaaagcttgcacaatcagaattgtcctaactattgctgtagcaaaatcatgggaggttagacaacttgacataaataatgctttcctaaatgggatcttacagaggatgttttcatggcacaacctgctggttttgaagataaaaatcatcctaattatgtttgcaaattgtctaaatccctgtatggtctgagacaagccccaagggcttggtttgacaagctaaagcacacacttctcgagtggaaattcagcaattccaaggcagacacatctctgtttttctaaaaaaatgcatctgatattgtgtttgttctcatctatgtagatgatataattgttacaggtaacaactcaaacaaactcaagcaattcacaagcaaactcaacaaagtttttgctttaaaggacctcgggttgctgcattattttctgggaatagaagtgtgcagagatgatacaggaatgtttttatcacaggggaagtacatagcagagttgcttgataaaactgatatggcacacctcaaaccttgctcgactcccatgacagtagggaaagctctgtcgatacaagatggcacactaatgaagaatcctacagactatagaagcttaattggggcactccagtaccttactcataccaaaccagatataagcttctctgtgaacaaattaagccagtttcttaaggctccaactgatgttcactggtctgcagcaaagagaatcctgagatatttaaagggcacacaagaccatggcttgcacatcaagtacagtgaca

SEQ ID NO: 261686 - DNA, 957 bp, Cannabis indica
ctatttcataaaaatgagactgacagacaaggggaaccaacacctccatcttcttctggcagatggaaccgacgagataggtggtttttgcaagttcgggtaatatttttatataattatttacttttgtaagaatggatccaagttaaccttgatggcgagcagttgcttgtcgtttgacttctcgagactaatattgttttaactctcataattatattttctggtgtcgagatgatcttcctcgcatgcataccttcttctagcgagataaacacctcgctgtctcttatcttgactcgccacactatccacactcaatttgtatatagtgtaatatacgctgtgtttttagttttaccgtttctctcccacgcagcgaggttgtggcctcgtcatgcacgcgtgcacccacatggtttctcgtcaatgcagaatgtagcagttcgtacatttctacctcgcagaatgctgttcagccagccgagttataaacataccatgcgaattatatttttaactagtcgttccatgctaagtgtacttttcgtttgcgtgtttgagttctttgttattcccacctcgacacgtgtcttcctctgatgtggttaccgaattttgggtataacaattaccccttaaaaagagctttttaatgattacaaagggtattcatttttcccttttttgaaaagacacatatcctctgattttggcaattttgcggttttgaggtacatcataattaaatgaccatcttttccacttccacttttaatcatgtccataggatcaaatatgagaaaaacctttttccacttccacttcctcattttctccatttcaaaaagtctgagaaaaacctaaaggttcttcgtcaaggatcaccattaattttattcgagaatttgcatgccatctctgtgcttgaccgttttcctgcaagtttcctctgac

SEQ ID NO: 261687 - DNA, 1216 bp, Cannabis indica
cttatttcaaacttgttgtcattgtaattcacttgtaatagacactgcattcaaaacagttgtcatcatcgcggtatcaaaaatattgactaagcattatcaaaattaatataagcaaaatataataatactattttaactaattctttttactatacataaatatattataataaataagattttaccccaactataattattgtacttcaatcttctatcaaataaaaagtatacataaaactcattataattgtttaatgaaatgatatatttacttactcaaaattagaaaaacgtttcgtcatgatatttattgtgttccaataaatatcatatttttctattctcaacatttgttttatttagtaaaaatcactaaagaataaaaatattaaaatatacataaaataaaattattttatcgcctaactctatagttcttttggctgtgtttcttggggccggttgttgtgtcctaatgcttatgtattggttttgtctttaattatctttagtcaaaaaaaaaaattatttaaaaaaataatagtggaacacacatatataatatacactcatacccgatcaagtaatatatacatcttgagttgtatataagttttccacttaaatgctttcgaaaaagatatgatagtgttatacctaaaattcgactggaggacacatgtcacggtaaaagggaatgtgaatcggtgtcgtatctttttatggaacaactcattaattgcgtaagtacaagagtatatttgcaacccgctgactgaaaggtcttaagagaggaatcaatgtacgagctatcatttattgtattaacgagaagccatatgtcgctaaaggaaaatagcgaggcaccggagaaaagtaacacataccttagctacaaaaagcaaaattaagtgtcaaaatcggaccggctcgaagtacaagaatgcgagatgaccatcttgctacgaggaaacttcctatagtttcatccaactaacggaagcgagactcataaccctggcaagtcagaagatttccatatacctgcaatcgacgtaaaacatatcatgtcgacctcggaaagaagaagggttccagctcgccattgggatcactacaatcaagtttctatcgagacatcttcagatttaacaattaaagacgtgtttaatacacgataattctgccccggtaaaagcgggaaaatcac

SEQ ID NO: 261688 - DNA, 1408 bp, Cannabis indica
aaatcgaggacgaaatcggttcaggaacttataagctaaaaaggatggatggaaccattgtgccaagggcctggaacgccgatcacctctgaaaatattaccaatagtccaaatatgtaacttaggctttgtttaaagggtttgtaccgtctaagtgtatgcaacctctgtattttaaataaaactgagtgccttaaaaactaagttttcatggccactcaggggggcactaaggcataccacacggacagacaaaaaacaggccaaaagtaaaacatctgaccgaaagggcaggtccagaaagaaaaaatatatgtgcgtcaaaagaagatcatatatatatataaaatcctggccttaagggcaggataaaaaaaatatatacaaagggcccggggacaggccttactcattgtctccccttagaaaataaaacagctattaaataaagattgtcttaaataaaagcaaaatagctgtaaatcaaaaaaaaaagataagaaaaatcttggttgaaatgggctggattcggaacggcctaatcaatgcgaggaggaaggcgaggaccaatgcgcgcctcaagcatggcgtcaagcttcttcttcttctcccggaatttggcaatcatctccgcaggttttgggtagaagtcaagcttgatactctggccatttgttgaccaggccatgtagacgccgtcatcgaagcgcttgatgcaacggctgcaggagataggggaaaggagctcatctttcttagccttcttcaaggcttggtctttaaagtccttgagctccttcagctccacaaccaagttagccctggactccaagtccgcctggtgcaattcctctaaagacctcaccttggcggccatctcgtctaaggcctccttggcctcccgaagctctcgtttggccttggcagtagcctcgccctctgccctcaacgcttcccggtgcttcgcctccagcctatccctccgaaggacctcctctcggatcatcgcctccgcttgggcttccctttgcttagcctcttcttcgaacttggccttagcaagagcctcctgccgcgcagcctcctcttggaacgcccgcctttcagcagacaggtcctgcaggatcttcacgacttcgtctatgcccctaaattcggacaagacgaagccgtggttaattatggttttggaaaggcggtcggcctctgcagtaatctggaaaaggaagcaagagtgagtgaaggccttaaataaaataacaagaaaagaagtaaatcacaaagtacttaccgcggccaaggcatggctgagatcctgaacttggaagacggagttcaaggatgcacaagcagcgtaccgcttaggcgcgcactgagtcagctaggagacgtactcaccggtcatctc

SEQ ID NO: 261689 - DNA, 691 bp, Cannabis indica
aaatagaattattttttttttcgggcccggtaattgtggaaatttagcgatgtggttagtaatgtcacgacgttaatggaagaattattttgagaatattccggattaggttagaattttattagaatgtcgggttgagggcttagtgaaattaccaaaatgcccttaggttattttagagattttttttagctttgtgggtaatttaattattctttaaataattatacttttattcctttttatttttttatttaggggctgagacttttttttaaaaaataaatagaaatagaaaagaaagaaaaagaagagaaaatcttattatttaagttacttggaggctaagtaacttcatcatcttcaactcctctcattccctctctcgggcaagcttgagccagccattaggagacttcttttcctcagcaaatccaccatttcagagttgaactcaacccccaagccaacctagaaccttgaggtaagttcctccttatgttcttggtgatttcctaggttttaagctaggtttttattagttctttatgggtgttcatggctgtaggcttagatgagttctaagcatgatttcttagttgaattaggtttgtttgtgcatgttttatttgatttcatggctgttgagattgtgttgtgtttgaagaagctaaagaaattgattttcttt

SEQ ID NO: 261690 - DNA, 349 bp, Cannabis indica
acttatagtggtttttcaaattgatattttcattattttaatgcaaaataattcctaacctaaacctagtagttacctataaatagaaagtgatggctcagtcaaatcattagttttcagcatagttttgaataaccttttctgacagaaaattctctcttcagaaaaactgagccttccctttctctctatagccgaaatctctctctctcttttcttcttaaaatttcgaaccttagtgatagagtaagtgcccacacacaggaagtggtaactcaatcataaattggaagactgtgaagaatgacatataaagagaaggacagttgggctcagatcttgataatac

SEQ ID NO: 261691 - DNA, 660 bp, Cannabis indica
gctgtgtaacctcatgcgaaatcgttcaacatgcgttggtgttgtgtgagcttgctaaagcttcttcgtatcacagcatggtcgacgtcagggctggggctgcaacattcagcagctggctgttggggatctttggcagagggcacaaatgtgaaatggaagatgtggctgtgatgagttgggctatttggcgtgcgcggaatgaatttttttggcaaaagaagagttggtctgcatcaaatattgttgcatctgctagaaaaatgcttgatcagtataaatttgctcaaggaaggaagggtctttcgttgtctccgctgcatgatgggggcgaaatcttaagcgttggattgcacctgagttaaacaagatcaaagttaatgttgatgggactttatttgaacaagaaggacgctttggcatgggttgtgtagctcagaatcatcatggtgctatggtagaagcattcacgaaggggaagattggttgtgttcaacctgaaattgctgagataataggtattaaagaaacttttagttagattgcaactcattcgtgggatagagtcatattggaaacagatagcttgttgtgtgtctaagcgattcaaggcggtatttttatgcctttacagtttggtcttattgttcaagatgttcg

SEQ ID NO: 261692 - DNA, 939 bp, Cannabis indica
aaaaggaatgcaccgatatatttttacttatttcgtcagtctaattttttttataatcgtgtaccttgtagttatttaagttatattgcaaaattttgagacctttggagaaacttaacataccgaaatcaaataatatgttgcatacactacaagaaatgtcacttttgccagcatatttttgtgcttgcaaaagtttggtattgcactagtaaaatagaatttacttctgatttgttggtaaaatgagttcgcaaatcaacgttggtattagaacttttgctagtataaaataaaaaacgctggcaaaaataattttattactaactatattttaaattttttttttcgaaatgaggccctaagcgttggagggcctggcggccgcctccttcgtctcacctcagggttggccctgatcttaagactaatgaggactttgttttgggtagtaagtgtaggatttttacccttttgccctacaccaacaagaccttttaatatcagtatcaaggtcaaaatcgacctttccaagtctaacttaagctttagacttaaacggcaccgtatgaccaacacgacactcaaccttgtgtcgtttgatcatcagaattttaaatactctgagaagggtctagaaaccctagcactcaatcactcagcctcacaaacccacaagtcgaaaccctagaacttgctcgattccaaacccagaaaacccagattcaaacacacacacccatagattttaggtttagacaaatggaaaaacaagtaataggaaagaaatcactagatttgtttcagagttcaccccaaaattagggctacgtctctgtcaagctcgtctcagatattagcttgatatccactagatcaaaggcaaaatacagtcatttggagcttcctgtcacaggatctgatcaggtaaactcgatt

SEQ ID NO: 261693 - DNA, 604 bp, Cannabis indica
tttttaaccattaatcagtgagacccggacctgcacctaaatttgggacccgatcccaaacacagactttgacctagatagggatccagatacataccttgactcggaccaagacccagactgggatcgaaatgctggacctacatctggaccgagatcctgacccagacccaaacttgaacccgcactcaggacccaaacttggacgtggacccgaacctagacacagatcggggtccagacctggacacaaacctggacacagactcggacccgaactcaaacccacaccttgaatcagacccaaagacttagacccagaactgaatccacactcagatctggattggaacttgggactcggacccgacctataccaagacccaggacgcgaacccacaaccggagcctgatctggacctagactgaaatccagacccgaaccaaaactcagaccaggactcgaactccgatccgaactcaaacccaaacgcgaactaagaattgcaaatggaactagaaccgaactaggactaggaccaggaccaggacctaaacccaaacccgatcccagatcaaaacccagatagagacctaaacccga

SEQ ID NO: 261694 - DNA, 587 bp, Cannabis indica
aagatgtaccaggtggtctctaaacttaaatctcttaaaccggtcctaaaagagattaacaaagctggtgtttctgatatacatacgactgtacagagagctaagggtgaattagaaaatgtgcaacaacaactacagcaagacccttttgatgttgtgaagattgatagagaaatagctgctagagctaagttaattcaagtgcagcaggactattcagcctttttacagcagaaggctaaggttacttggatacaaaatggtgatctaaatactgcaaattttcatgcaagtattaagaaaagggcacgacacaatcagattttctccatagaaagcaagaatggcaccagaatcaatgatccaaatctgatctctgcagcctttgttgattactataaggatttgctgggaacaagcttgactaacagaagaccagtgctaaagaagcttctgagcagaggtgcggttttgtccacacaacaagctgagaacctgatgatgcaattcactaaagatgaggttaaagctgcactatttgacattccttggaaaacccggattgttattcgagtttcttttttcaa

SEQ ID NO: 261695 - DNA, 669 bp, Cannabis indica
ttagtatagtatatatatatattagtaatatatatttttcttattattattgttagtatatatagtgaatggtatatgtattttttgctatacggtatatcattttttgaattatatttaagttttattttctattgtattttttttaatattatgtataattttattagcatcctatatatttttatttttatttgttgttattatatatattctgattgtaaggtatatattttttattatatagtatagtatatcattttattttagattttaattttaattttattatttataaaagtgatatataattttagaagtatggtataattattttatgactgtatataattttgttaatatgatatttacaattttttttaataattgttatcctaattttttctactctgacgtggcatcacatgatggtgacacatggaatcaactttgagtatcttctcggagggtatagtccgaacaagatgcctcataggcatgtctggagcaaagcgatcagcaatccgcgcagagcgatcaacacttagtgaatttagctttcgcatcgtgagtcatcaaagaaatccctataacttggggattagatcatagagatatggccagctgtctgaatcccacgatcagtgtattctgtatttatcatgcaat

SEQ ID NO: 261696 - DNA, 785 bp, Cannabis indica
aaaatatctgctatttgcttgcttgtttcaacatattctaaggcaagagttttattttccacaagctctctaataaagtgatgacgaatgtctatgtgctttgtgcgggagtgttgaacaggattttttgaaatgtttatcgcactagtgttatcacagaaaatagttaaagttttcaaattaaacccattatctgccaacatttgtttcatccataacaactaggtacaacaactacctgcagcaatgtactcagcctttgtagtggacaaagagattgagttttgcttcttaccgtgccatgaaacaagattgtttccaagatataaacatccactactagtgctttttttatcatttgcattacctgaccaatcagcatcactaaaacaaacaagatttgagttagagtctttagaaaacaaaatcccaaaatcaacagtgctatttacatatcgaatgattcttttcacaatagaaagatgagattccatgggatttccctggtatcgtgcacaaacaccaacactataacaaatgtcaggacgactagtagtgagagaaagcaaactgcctatcatacttcgatacaaagtttgatctatctttactccctatttatctttggttaatttcaatgttggtctcatgggagtattggtatgtttggcattttcaagaccaaactttttcaccaagttctttgcatacttgctttgggagacaaacgtacactcatctgattgcttcacttgaaggccgagaaaataagtgagttcacctac

SEQ ID NO: 261697 - DNA, 1477 bp, Cannabis indica
aggtaaatgttgtagtgtatatctatgacagcactcccacactcaattataccactgagtttccaaaatgtaagtattggctagacagtaaggtaagcttgtagcaaacaaatgaaagaactcaaacataattagcttaaagcttaatcatctcaggattcatatctaatgaccacttactaaaagtataaataaccttattgttgattaccacatccatataacttcagtgcactgataaatcatgtgactaaaaatattcgaagcatataattataattattttttactgtgatgacgtcactataattatgaataactataagttctgaatttaataaatttaagtattaaatttataatcatctaaaataaacacgtgaaccaagtatttaactaagtcaagaaagatttctatttcttttattcataaataataagattacatagaatatattttatttagggcataaaatcccaatacaaacttagtcagttcctttcatcatcccacgtgcctcatttacatgttgttcagaggatatttcagtatataaattctagtcctagtttggggttgtttttccctaaagattttgaagttaaacttaaactttacacggattcaaactggggatcatgtcaagcaacaagaagatcgatctctagcttttgtattcttcttggatagtctttagttttatagaaaagcaaaaaacaacacaaagtgtcgtgatcatcaaccgaagacgatattgtgttatggacaacaccacttgtaaactttttggttgctatccatgttaaagaaacttaaacaagatcgcattatagaaatgttatgtgacaacaaggtagcaatccacattgcggccaatacaatctttcacaaatgcacaaagtatattgtgatagattgtcatttagtcagagaaaaagttcaatctagactcatcaaaaccatctacattgcttcgaaagatcaactagttgatatctttactaagactttgtttcctacacaattcagctacttaaaagtcaagatgggacttcaatgcatatgtagtccaacttgaattggagtatcaagattagctagttcagtaagagtaagtgagttgttagttagagcttactgcaactcttgattctttactcagtatactttataagtactaaaagccttgtacatttcattttgatcaataataagaaagctcatttcctcctttctttctttgtaataataatatgttgataatggtcttaaagtcatgtgagatttgaaattgtggttactaaaatattataaataaagacctctatatgaatttcattttgtatcacttagtttctatcaagagaagacattgtcagaaacattttaggcttgataaatttttaaaactattttcacttcttttcttatttaagtgcttgtgataagggaaataagtttttggacaaatgtgta

SEQ ID NO: 261698 - DNA, 737 bp, Cannabis indica
ttcaaagaataattcatttgcaaaatattgcaaatcaattaccagatgctttcactgacccaaagaaaattacaaaatcccatattccagctgaaaatgctccaattcgaattgaagtcccagaagtgattctaaagcacatttgaaacgtggtagaccacttggttccaaagataaaaattctcgaaaaagaaagggagcaaataatcaagatggccttaatgaagaggctgaaaattttgaggaagatattgacattaacaaatctcttgaagagattcaggtacctgaaaatattagaaataatgagatctcaataaattatgtcaatacatgaaaagaatggaaccgactcgaagtaattgtcaaaatagaaaagactggccaaaatggaaagaatcaattcaagcagaattgaattcacttgctaaacgcaaagtatttggacctatagtcaaaacacccgaaggtgtgaaacccgttggatacaaatgggtatgtttacgtaaaagaaatgagaaaaatgaagttgtgagatacaaaaaagacttgtagctcaaggtttttctcaaaggccaggtattaattatgaggagacgtattctcctgtggtggatgcaataacattaagatatttggttagcctggctgtgagtgaaaaacttgatatgcgattaatggatgtagtcacaacatatttatatggatcactagataagtgatatttacatgaagat

SEQ ID NO: 261699 - DNA, 681 bp, Cannabis indica
atttcagtttccaagaatgcattgaacattcattataactttcagaagttgttagaaccattttttgtcaatagatttgaacttgttaatgtatggaatatgagttttgtattgtgtgaccagaatccacttggactattctaagaactctttgttgtaacttgacctaagtcatcaaaagaccacagccacataatatatatggcatttgcaccttgttcatagtggttttgacaagataattctttaaaaaagagaaaatatgcctatatccacttgacagtaggatcatctatattcgaatatggatgtacatccaggggtggatatgaattatcgttaaattcttaaaacgatcgctctagattttaccttatgcaaagaaattgaaatgtttgagaaatttcatgaatttctaacaatgttgaaaaatattaaggtaagtggttaaaaatcttgtgaactgatagggttgaaaaatatttggttatgcagtttaaagatcattaagtttaactttcaattgtatccaaacttaccttcttaaaaattccaattgcatattgatgaaagtgaaaggtctatgattaattactaatagttgtctaagtccttcaagagatttatcctagtgatagactaatttcagaatgatagattggttatgtactagtgtaaact

SEQ ID NO: 261700 - DNA, 7043 bp, Cannabis indica
agaggaagtaagttgactgaagttcttagagactcatttgttggtgattcgcgaactgttatgatatcatgcatctcaccgagttcaggatcatgtgaacacacactcaatacactaagatatgcagacaggtagtttttttttcttttaaccgtagtacgagcaaggaaatggatgatttcgaagtattagttctcatatatgtcgtactctatttcacttttccccttttaatgtagggtgaagagtttatctaaagggaacaactccaaaagggatcaattgtcttcatcttcaatccttcgagaatctaccacactgcacttatcttccactttaccaactgaaccagcctttgaggataacaaaatgtatgttaccaatgaaaagagcaggtttggttggtccaaacaattagaaaaagaaccttcaccaccatttatggtggatcgtgttcttagcgggaggattgaaggaaattttgctgcatccgaatattcagattattataaaggtgaaaatggtggtccaaatggcattaatgaagatgaatttgattacactggtcaggcctatgaaaaagataaaccatcgcagttgaattataaaaaggccgagagcaacgaaaaatcacttctggaacaaaagaggaagattggtgcacatataaagcagaggaatgatcaggagtttggggctagcaattctagttctgatgaggatcttattgccctcctcaaggtaaccacatccttgaaatcaagttctatttttagaattaaacactcatttctaagaaattcttatgtggatgccaccaggaagaggaagatcttgtgacagctcatcgaagacaagtagagaagaccatagacattgttaaggaggtccgtgaaattttcttttcaaatgcatttttgtctttgatacatgtcttggactaattatgattattcttgttcaggaaatgaatctattggttgaagctgaacacccaggaaatcaactatctgactatatctcgaagctaaactccatactttcacagaaggctgccgaaattcttcaattgcagacccagttggctcaatttcagaggcatctgaatgagcataatgttttgcagtcttccagcaattgatttcatctggaggagagtgcgtacttgaagtaatttttgattggtacaacatgagtttcgtgcctttcgccagtctgttgatataatttggtaatgcttagaggtctggttttgttcatgtggcaacttcctctggttgcaagtcatattttgtgaggaaatcagtcgttttgggcttgtttattttccttgctgcatattctgctcgtttgtaaaaatcagtgcaaaacatgctgaaagaagaagagaggccatgcttgagttgctaagaatattttggttccaatatcaggaattaatttcatttctcgatcccattgtttgagttttcccatatccttgctgctatcctgagtcgcgtgaagttataatatattggcataacgttctatacacacatttggttattgtgaccctttgtaaaatgatgtagaaattttttcattataatattatatgtaagtcttgttttccttgtaaagtttggttactgctgtcatgtgaaattgtgggttaaccttgagctggtaacttcatttctgccttggcctttgttataatttgttcaaaatttttagtggattgactactcccaaatcccaatgaataggctttacagtcaccacgcaattactaaagtaactcttcatgcatccttaatcgttttaatattatgatgtaatatacatacatatttggttattgggacagtttgtggattaacatagagttgggtaacttatttgtcttgttcagttttttcagtaaattgactatcactcctatatttagttgttgctatacatcactactggaaaattaagcaaaagtttacaaagatgcatgtggtatagagtactattctagtcattcattaattaatcagacaccctaccctattgatagaatagtacacggatggtatcctaccacgacaactccctaaatttacaatcatagacaagtaacttacatgcactcttgaaatagttatatacactattttggcaaccaactaaagacgctttactacacaagaagaagatatttggcgagagagagagagatattttatggcattgtggcttagccatgtgtttcgtaatttggtgttccggctaggtggaaagccaaccttgtaaagtggcattatactatttttgatttgtcattagtagttgtagggtcccaaaatggaaattcgctttggtataatggtaaatacattgaacaacaacaacaacaataataatgatcaaattatagtgtgaggtctggataatgcaatgtcaaactgacatgtgtcatcaccaaagttgtcagcaagtgtcactctccatggtttttcatcatatatcaacgtcaaaatgagttatatggcgcttaggcgatctctcattccccaatcaaattcagtgctttttcactctctttgtgcttgaatttttcattcattcattcatttgattgtgacaattattattattagctttgtttcgggagacagatggcacaaaactctgcaagcctcttactttgtcgacacaaaatgtcttaccacaatttgctatactcatgtgagattacacgaacctagacctactcatctcatctgcctgcatttttccacctaatcaccagtaaatccaagttctgattttgaaactagaagtggtgttaaaacgagtcattgaaaggaccctctcctacttttccatgcaaaaacaggtacacatgccatgagtgttagtgttacacctttcctcttctttacaaaaacaagtgaaaaaaataataatcaactatttttagaaaaataaattgtgagtgatacattaagaggaaaaaaaatgtccattaaaattgggaagcacaaaaaaccgaactctaacaaatcaaaagcctattatatactatgcgcccgaaaccaaaacgattgacaagcagttgggcccaaaatgtccaaaaagataatccaaaggtctaaactgataattaaccatcgtccacttggatttgcttcattgttgatcatgtgagaggaacatgacaggtctccttgtgctttttaagctcattggttgggtacaattttatatgacaccacccaaaagaaaattcaacgagaaattaatgaaagaaaaagatgtagaagtggatggactcattccaatttttttttattctttttaaataagggcttgtgagtgagagagacattgaatcaatttttgttgttttcatgatgatcagtatgaatcttgaacttacccaacttaattctgatcagttttgtcataattaagcattatttctaattcatctttatttgccaaaacatttgtgtgtgtgtgagagagagaggcttatattctaaactgtatgtatatatgtcattatcttaaaataataaaatttcataaagaaagttatcctttttggtcacaatttgtgagtgtggctaatgagcttgacacttggtttccagttccatcactcagcttaaagcatcaacaacgaatacaaatgctcgaagacaatactaggcaaccaatatgacacctacacacttcacataaaataagattatttttaatatatatttatggatatagttttctttctgtactgttaaagatatacctagtacttggttttgttattgcaaaaagctaatgtttttcgcttgcctgttattcatcaaaagttatttttttttccttgaaaatcttattcatgaaaagttagtaataagaggctgtatagattattggaggcgttatatatatatatatatatatagttaagtagcatgaaacgacaccctcgttgtcgttaatgactcgttgcattgtctgtcacaaacacctggccaatgaatcaaactaagcataatttaatagagtggacctctcaaaactttcctcagcattgactccacatgcttataatttctcatactcttattccactttattgattggaattatatgtataataattgtaaataattaggggtttcattacaaataatcaaatattgtttgctttatgttaagagaaagcaaattcagtgattaatcctatgaaagtatgtacaccaatatttttttataccaacattgtaatagctcgagtgattgaagatatttagtgttgacgtgtatttttggttataaaatgagtatataattattagagaattttaattgttagaatattctcttggatttgtggggacaataataagagtcgttaggccactaattgtgtaatgataaattattttacttgtaaatgaattactttgactctttattgaaatgagctgagttttatcaaaattattttctctctaaattttattttggtatcagagcttctaggcccctaccatgtcgaccccacaaaaccgtgatgatagaaacactcaagctcgttggcattatagtcaatcgaaatggtggatcatcttctcaaaatcaataccctcaacaactcaccacactcaaccaacccactaaaacttgacaaaaacaactacacttgtggaagacaatagtctccaccatagtttgaggacacaaatttcatggctacctgtatggaactaagccatgtcccttggaatttctgcctactaactcaataggagaagaaggtgccagagaagaggttcaggtcgatcctaaattccgataatggatcatcaatgaccaaccactcataagatggttgtatagctccatgactgagagcataacaactgaagttatggaattagcttcagcagcttagtcatggtgtgctctggaaagcctatacgttgcttactctaaatccaaaatggatgacacacgcacctaattcaaacagtttggaaaggctccactccaatgcaagagtacctcagggaaaagaagaattggtcagacatactagctcttactagcgatccttatctagaagcacatcttgtggctaatatgctatttgggcttgatgccgaatatctgtccattatggtttatatcgaagcgagaccccaaacaacttggcaagagcttcaggatattctcttaagctttgacagtaagatcgagaggttacaaactctcaacacaagcattaaagctcttggaacctcaactcaagaaaatatgactgccaagacaaacctaggaagctcatcttatcatggttgtaggttttagaactagagcttcaatggtggaggacgtttctcaagtagtcaaggaagtcttggaagatctctaggaaggggtcgcattaatggtccaagaccaacttgccaaatctgtggcaagtatggttactctattgcagtgtgttataatcgttttgatgagaattttatgggaacagatccaaacaaccccttagcgcgcagactaaaactagacaaggaaatcacaatgccttcatagatactccataaattcttggatagtgataacttgtttgcagacagtggtgcaagtaatcacatcacctccgaggcatccaaccagaataaaaaacaagaatataatggtaaagagactgttgttgtgagcaatggtaataagcttataatttctcatattggcaatggctctttgaatatcaaaaatgggaattatttgatgttcaaagaaatacttcttgttcctaaaattgcaagaaacttaattagtgtatataagcttacgacctataataatgtactaattgagtttcaatctatccattgtttgatgaaggaaaaaaaaacaaagaggatgctgcttcaagaggttcttagagatggtttgtaacagcttgttcctttaaaattttagttcacaaaccaccttccatcatgttttagtttacaatcttagtccaagccgtgcattgtgtccactactactaataattaggtttttctaatgtaaattaggttacacctgataagagtctagttcctaaaattaatgtttggcacagaaggtttggtcaccctttctttcgtgttgtgagtaaagtcttagagccaagtcatgtaaagctttccaagaatgaaatgaacaatttctatgatgcatgccagtttggtaaagctcatgctcttccttattccttatctttaaatagagttgaatttgtccttgaacttttacatatggatctatggggtccaactccaattaacgctaatacaaatcacaaattttatatacattttgtggatgattacaaaagatacacctggttgtatccactcaaattcgaggaagatgctttaaatgcatttatagaattgagaatacatttgacaagaaaattaaaggtctgggggtgaatatcaaccatttttttccttggtaaaagctcatgaaattgagtttaacaatccttgtccacacacttctgcccaaaatggtcgagatgaaagaaagtatcgatatattattaaaatgggcctcattcttttagctcaagaaagcatgccactcaagtattggtgttatgattttgaaataatagtgtatctaggcttcccacaccaatcttgaataatgtatcaccctttgaaacttaatttgacataaaacctgattatatgcttttaaaagtttttggagatgcttgtattccttgcctcagaccttacaagtcccataaattctaattttactctcttaagtgtgttaatatcttggttacaacaactcacacaaagggtacaagtgtctcactcccactagaaaaatctatatttctaggaatgttatcattaaagagttggattttcctttccaaacaagtttcataaataactatcaaactcctcagtctatggctatccacaatacctcttggtcctctcttcgtatgtcctttgtgttggaaattattt

SEQ ID NO: 261701 - DNA, 1599 bp, Cannabis indica
tcttagcctaaggttgaacttgaaaaaaaaggcatacaagaactctagcaaaattgtgctaatattcgaaaaataatattaactattggactagataaaattaactattaaatcatgtaaaaaactttggtgagttggtgttatttagatatatcttattactaaatatatcatagttttttattatttaaattcaagcaatttattataagcatcacacttgtgttttgaccaatttctcaatctaacttatagagtttaaaatagtattaggtgcttaaattgtgtaaaattttaaaaaattcaaaatatataatttttcaatacaaaaagtagaatttaaacataatatattttatacgcgtgtaacaatagagacacacatgaaataaactatttgcactttatattcgacacgttaaattattttgaatttctaaaaaatttgcaaaatgtgtcttaaataacaacaatgtacattgtgattaagatcgattttgaaatttagtgggtcataaaaaaaatattaatcccttatttagagtaaaatgtgatatttttcaaaatcaataaaaaaatgtgtaattttaaagaattttttttgtgggctaggtggaccctaggtacatgcctaacccgtatattcccaaggctggatctggctgccgtataaaaaaatgaaaattaaaattatctaaatatcaaaaatatgaagaagtgtatcggtacacccatttttaacgtgcaccttagagttttccaatttttttttttaaaatgaccaatacaccccatcaaaatgggtgtattgatgtaacccctaaccgttacggtatttataaaaagaaattagtctaattttttttatagtcgtgtacgttatagttatttaaaacatccgataaaattttaagaaatttggaataatttacaatataaaaatcaatgtttaaatcgtctatttcacatgcatataaaataaaaaagtcacacgtgcaacaaactcttttaatactatttttgacgtgttaaatttttttaaatttctcaaaattttgttagatgtcttaaataactatagtgtatacgactataaaaaaaaattagactaagtatttttttttagataccgaaataaatgagagtgtatcgatacctattttaagaaagtatattgtagaattttccaaaaacaatataagaaaaatagtaagcatattaaaaatgtgagccattaattaatttcacgataaggacacctcacatgcagcccacgtactcactcattttctatctttattaatattattctctctattattaaatcattaataaaaatgaaaagtaaatcgtggactcatatatttattattttatttttctataaaaaaatatacatttagttaatcaaaacataaaaatatgtatttattttattgaattttttagatgtgttttaatatcctaggaaaattattttatatatatatatattttaaatttacggtttgggtttttaaattagtttctcaggtagtttatgtttctatgtgagttgctatacaatttgtgttgtgatttagattgctccgctagttg

SEQ ID NO: 261702 - DNA, 558 bp, Cannabis indica
tggccaatacagaactctgcttcagaatgctaaaatgcagggatctttaggtgactatctactcaagatcaaacgattagtggatcttcttgcttcaattggacaccagatatcacctgcagaacacatagaagctatattcaatggtttaaccagtgagtataatgttttcattacatcggtcaataccagatctgaagcatactctgtagctgagattgaggctctcttgatggctcaagaagttcgactggaaaaagccactcaagatttggatataaccaaactagaagcgaatctggctcttactaagccctatactggtggacgtggtaccttttcttccccttattatccttaacctactcaatctaatgtctcaccattgtccagaggctctactttcaattctggacaatactcgatgcaacatcctccaccaggtttcggtcctgcaactcaaggccgtggtaattcatctaggcgtggcaatccctcaacttctcgaggtgctcatactcacggtcgaggataatacactgcatggggacagaaagt

SEQ ID NO: 261703 - DNA, 465 bp, Cannabis indica
agtacacgaaacataacaatcaaaatgactaatagattgagaaagtaaagtgatagttacatcattcgaccaaaataaaagcaagcccccgcttctacctatcctaggtatttccaaaccggaatcaaaatggagcttgtgctttagattgtcgacagcattcttagcaagcctagattccataataaataagatagtaggattacaaaaagaaactaaacaggagagattacggaatgcacgatcactccctaatccacgtgcattccaactgacaagcttcatggtggcgggcaggcctgctcagtggcaaggcctgcgtttccagaagaaattgcagtggcctgtgggttgtcagagcgggagcgtttgatttgatgacggagctctccattgaccatttcagtttgcctcttgaacttgtcctttgaatcaggcttgttcattttccttgaggcttttgat

SEQ ID NO: 261704 - DNA, 1292 bp, Cannabis indica
gtgaaaagacagggccatggatataaccagcctagtctgcccaataaccgaaacaaccaggggttacaatctcttcctattgaaggagaagacatcctggttattttgggaaggaccacatatcgtaggggaaagcaataacgcccagaaatgatatgtgaaagagataaagaacgagcagtcggcatttgcctcacaaccttccaagaaggtgaaaacagaggaacctcccattatattgacggaggaagatgagaaaaatgtgagatatcctcacgtcgatccattggtgattaccattccactagccaattaaaggatcaagagagtgttaataaacaatcggagctcggtaaatatcctttattaggaaactctaaggaagatggggctcgaaaaagacaacttgagtccttgtatggtaaatctttgcgaattcattggagacagcattgccagtcttggcatagtcgagcttgttgggctttgttccctaaataaaactctactttaatgtaatcttctctattcaaatatcaataaagaaacagatttaatttcattacttgtttaatgtgttatttggttcatgagatcatttatttacttatttgattaataaattcattcaaatctttatcacagtgatattcttgtttattgtgttgtcaacacagtggaaagtaaacaagattgtgtgattaaatgtattcctagatttatcagttcagaggcttaactgatatgataatctaagacggagtttagttgcaccttggataagtgttatatcctttctagggcattagttaaagtaagcttgggttggatgtatggaatatgcatcggaagggaccgatattgaacttgaactagatatgataatcttaccgtaatatctattcatttcaatatcacctagttgatcctagatcaaatgatctcaatctaaagatggttaggttcgatctcaagagtgttattcatgttcttggatttgttaggtaagcctactttttggtccaaatgatacgtacattttgggaacacggtagtacaattgaatgggagcgctaatcatagatatggaatctatagcttctatccaaacatagaagtgaaacaatgatttccttcgatcttggctaaatagagataaatgatagagcgctcattttagtgactgtattagtttactaaaatatcatttataggtggctaagtgttttaaggataaaatatattcagccattagtgattgagtgcatgcccacactaaaattcttcttctt

SEQ ID NO: 261705 - DNA, 603 bp, Cannabis indica
acagaaattagaaacagctggtatccacgggtctgttgcagcaaaaacattgtaaccattcccaattttatatcgaagtcctttgataagcaactcacgtccccaacaaattccttgccacgttagagacggagaatgaccaagattagcatccaaaaaagatgattgagaaaagtatttgtgctggagtaatcggctcagtaaagaattcggcatttcaaaaatttgccaagcttgcttagccaaaagagcttggttgaagtgaacaaatgatcgaaaccccattcccccttcaaattttgacttgcaaagaagattccaatttttccaatgaatcttgttgccatttttgtttgaaccccaccaaaagtttgccatcatagactcaagttggttgcaaaatgttatcggaagtttgaaacaactcatcgcgtatgttggtattgactgaacaacagctttcaaaagcacttctttacctccgatagagaataatttttctttccaagcattgagcaatttccatatacgctccttaatgttgctgaacatttcttttttgtctctacctgaataagcaggtaagcccaaataacgttcatg

SEQ ID NO: 261706 - DNA, 691 bp, Cannabis indica
atattttggaaatatatttaatatcacatatgttattatgctatttaatgtaaattacccaatttctgtatttgtgttcggaagctgtgggaagcgacgttgggcctttagagagtcatatattgtatgttatagcactttattgtttcgaggctttaatgttagggttattggtatcgggttttgaccggaataattcttataactaaaagtccttagaagtttttattgaattttggtatttacatatggggtgattggttatttaatgtttcttttattattattcttttatttttatattttattcagcctaatagctaagtctattaagtaatagatttatataaaaatccattttctcttgaaagtcctagaaaaaaatatcaaaccatcacttttctacaatctctctctcttgctctcgatttccctaggagcagcttgaagctgtgaaatttcaactcttcaacaagaactccagctgaattcttaagcctcaactcaaggtatctctatttagttaccttcttcatgcttttcttaggtttaggttgaattgtgagggttgagttattggttttagtggctgtttgttcttgagtcattctaatttgtaatctggtgttaattatgtctttgctgctggtttggatcaatttaagggggggttaccttgttgtgagtcaat

SEQ ID NO: 261707 - DNA, 898 bp, Cannabis indica
attgaatgaaaagtggtgtctatctagtatttccctcggtgttaaattattattgattaaattaagtatcaagtctaatataatttaatacaataatttttaaaaaatatcgttaatcaattacaagaagacacgtctaaaaagtgttaggcatgatcactactacacaataacatattttataatacatggtctaaaattactcattacttttcaacgtgttcgaagattgcttgctgtttggggttgttgactatttaattttgagcatatatagtgatcccatagctatccatggaagttcttcaacttttatgttttacaatttgattaatttgttaaatacttaagtttaactctcaattgtaaataactctgtaggtacttaaccgttaaatgataagtcattatatctacgtgctattttttattgatatatttgaactaattttttaaaataataaaaatttaatgacttgaaccaatcaggaattgccacgtgacaatttatttaaccatgtacctacagaattccaaaattataacttaagtattattactgccaaaaattaaacttaagtatttatttgcaactgagagttaaacttagatatttatgccgcaaattactctttcacaatttaaagagaaaggccaaacaaaaggtgtagtgtatatagaccggttcgctttttattttattttgttttcttgttcatttaagattcacttttttttcatctagataaatcttatatgtccttacaaactagagtttttattatttgtgcacttggtgtgtgtgggcacctgcacaccatgaacaagatttttattaactaagtttatttttgttttgttttcttattttcttaagtttcacaatcggtattcatcc

SEQ ID NO: 261708 - DNA, 6218 bp, Cannabis indica
accctatgataataccagtgtcaaacaagtggaaaaaaattgtactaaataagattaatcatttctcatcagaaatatgtagaaaaaattcaatggcatatcaagtgtgtttttatattttgcatgtttattgaattttcccacggatacaatatttatattttttaaaacaagatgcctctgaaaaccatacaatttaataattatcgaccccagggcattggtgtaagggcaagggtgtcttgagtaaggtcatctcatgttcgaaccccagccactacactaatatcctgatatctcctgggacctgctggtgaggtccgtggggtatccccctggattagtcggggtggggcctaaccatggttttttaaaaaggtgttctgaatattatttgatacttagagtaaattcggctgattttagattctagaaaagtgaagctttgtattattatttttcacattttttagatccttgagaattattttttggttaaaagcctgataagagaattaatttcagtggctaacgtgtcaactgtctagtctgatgaatcgtacatactctgttgagtgaaagcttatactagtatttttgaaaattctttgcagattacggatgctccagagatccattccaatggctttcatgtcaagtttgatataagtgaggggcagattggttttgttctgccaacatccatacctcctcgtgatcttaacctgattagcaggctggcatctagtggcagtgatcgattagatattaaatgttgtagcacttgcattgtgcttccttttaggtcaaagttatctgaaggaacagtggtgaaaaacattatcacaatgttttctgatcttcatccgtccttgttgctttttcttcaccggctccagtgtatcaagtttagaaacttgcttgatgactcactgattgtcatgaggaaagaaatcatgggccatggtattgttaatgtctcacatggaaatgagaaaatgacatggtttgttgtgtcacaaatacttcaggcagattttattcgttctgatgttcaaatgactgagatttcagtagcatttacactgcaggaatcaaatgatggcggttatagtccacttcttagccaacagcctgtatttgcatttcttcctctcagaacatacggcctgaagtttatacttcagggtgattttgttcttccttcatctagagaagaagtagatggaaatagtccatggaaccagtggttattgtcagagtttccaggtttgtttgttaaagctgagatatcgttttgcaatcttccatgttttaaagatagtccaggcaaagctatatctgcttttatgagctttgttcctcttattggagaggtgcatggcttcttttccagtcttcctcgtatgattgtttcgaggttgcgtgtgtcaaaatgtttacttttggaaggaggtagtgaatgggttccgccatgtaaggttttaagaggctggaatgaggaagctcgttctattcttcccgctgatttgcttcatgaacatcttggccttggtttcttagataaaaatattattctatcagatccccttgctaggaccctaggtgttgaagagtacggacccaaaattctagttcaatttatgtcatccttgtgtcgtaaagaaagtgtcctaaaatcaatgggcttgagctggttatcttcttatctaattgaactctatacaatgtcagtccattctgggcgaactgtactagatgctgaagtagaatcggattgcatagataatctccgaaatatttcttttattccactttcaaatggtacgtatagtgcggtatctgatggtacaatttggctgcattttgatggctcaagctctggtactgatggtgagtatggaattgaatcttttccaaatctatatgcaagacttcgaatcgtaaatccagctctcctaactgcatcatctgtggatagttctcgtactgatttgactgtatctgacaaactttccatgatgctttataaaattggtgtccaacgactgtcggcacatgaaatcatcaagttgcatattcttccagcaatatccgatgaaactattatggataaggacaagaatttgatgacagaatatgtttgttttgtaatgtcccacctaaattttggttgccctaattgcctcgtcgaaagggagtacataatttcacagttgcaaaattcagcctgtattttgacaaattatggttttaaacaaccatccaaagagtcaattcattttagtgaagaatttggaaattctgtcaatgttaataagttgattgaagatgtcaatattacatggcatgaggtggatgtctcctatttgaagcatccaataaccaaaacactcccttctggactaatcaagtggagggaatttttccagggaatcggagtcacggattttgtcaaagttcttcaggttgagaagagtgttgcagatatatctcctgctctattcaaacatttcatgtcagaaggagaattaatttcccaagaatcaattgttaatgattgggaatctcatgagttggtgaacttattatccttgttatcaactggtagtggtaacagaacaaattgtgaatatctcttggtggtttttgataaattatgggattcttgcttcagcgacaaagtgacgggttactgcactaacaaatctggtctagatagtaagcctttcaagtctacgtttctaagcaccatcactgatgcgcaatgggttgtatcaaccttggatgataaacttcactatccaaaagatttgtattatgactgcgaagcagtgcgctctgttcttggcacatgtgctccttatgcttgcccaaaggttagttagctgtagattttaattttcttttttgttttgttttggtgatccgactgaagacaagaataatgtgaaacgaagatcactgcataatcaaacttagttaatgtttatattattagtaaatattttagctgtgatgatgagaatttctaaacaatagtctaaattcaaatttaggaatatttggcaatttctttacaatcttacattcaatgatgggttttaatagtaaaacctgtaatttttgtaaactaacatttatgttatgcctctataattgcattcgcttacacatttttgtgctatttatttctgtaacgatcatatgcttttacataaaacaggtcaaaagcgagaagttggttagcgacattgggtttaagaccaaggttacacttgaagacgttcttgaaatgttagaaggatggaggtccaactcccccttcatggtcaggtattgctacaacttcatgatgtttaagttcgctttttatcgtacttaaaaaaagaaaaaattgatttcatatgtgtaaagagttttggtgtcacttgtcatctctgttaatttttctatggatgtaattaaaggagtggtaaggtatacacaggaagggtttcactggcttaatttgctgttaagttgttaaaagaatatttcctcttcctctaatacgaaatatctttctgatatgtcagttgtcaggattacttattatgcatttcaatgactctttttacttttttgcttgctagcataactcaaatgtccaaattgtataatttcatttggcatgaagtagctgtttcgaagaaactggcaaagaaattctgctccgaaccttgcatatttgtgccatacacatctagttctagacatgaggatgtagtatctggtatatttttgtctcctggtgacgtattttggaacgatccaactggagctatggagcaaatgaaagaaatgcttcctcaacactcatcctcaagcagtgtggcctcttctcctttaaacaaaacgttgtgcaatatctatcctgggcttcatgagttctttgttaatgtgtgtggagtgcatgagaaacctcctcttccttcatacgttcagattttgcagcagttatccagtgtcgtgttgccacatcaagcttctaaaacagtaagttcaaatctcagcattattacatttggttaatgcatgttctgctgcaaccttaattttctgcccatgttcaggtttttcaagttcttgtaaagtggagtgaaggactaaattcaggattgactacgaacgaagttgctgacatgaaagattctcttagcaaggtggaatgtacaattcttcccaccttacaagataagtgggtgtccctacatcattcttttggctttgtgtgctggtgtgatgataagaaattaaagaaccattttaagaatttggacaagattgtctttttacacttcggtaagctgggcaaggaggataaagaaatgatgcaaacaaaagtatctgttctcatgagagctttaggaattcctgctctttcggaggtaagaaatttccgtcatttcaatatttgtctttgcagtgcttcggtgaagattttaaatgctcgtatgatttttttatatattagcaattacggcttccaatttttatatattttgtttttagttgggtcccactttttgatttgtaacaaatggtataagagcaagctcctttgaatgggatccaagttgtggaaaagcaagttgagaaaacccgtgggctggtgtggttcatcagtcctaaagggtggtttggtgttaggatctcacttcgactaagtaccagattgggtagtggttcatatccgctagggcatactctgtctccgggctagtcttttgggattgacttatatccaagtagaagtagttgttacggttttacctatgataagaacattacatcccggagcattttcaattaattgaatgtggttatctctgttctgttcatctccatgtgacttaaccattgttcttaccacttagatcagaagtctaatgtcttctttagttggacgaaaaaatactgtggaacgtattgggtagtgggacctggggaagttataaaatgaacaaataagtttcaaagaacacctaaaaactgcaatgtgaatgtgcacgaaagtaagagagaaagtaactattctttctctgactactctctctttttctgttttcataaaagagaaagtaattttttttttagaggtttggatggaatcatatgtcgtgacttgaaaatgtcttttaaatttcttggttatatatgcaggttgtaagtcgggaagcaatatgtcgtggtgtagcggactccagctttaaagcttcattgattaactgggctcttccgtatgctcagcgttacttatctgctttgcacaccgataaatattctcaacttaagcagtctggttatgataatctaaacaagctacaagtagtagttgttgagcaactattctacaggaatgttgtaaagggttgtagcagtaaatcggaaaagcgggttcaatgtgactgtcttttgcaggtttgtcatacacatactttctttttctaatttttaatgtctgtttcaatatcaaacttcttttattcaagtacttgaaacttacacaatggaatcgagatgacaaaaggccgaaacctctgcataatattaaaaccacaatattgtagaagcatattgtctccatatcttatcctttcctaacttttacagggtgatattttgtatgcaaccccagaatcagatgctcatgctttatttatggagcttactcgtttatttttcggtggaaatcctgaactgcacatggcaaatttccttcacatgatcacaaccatggcagaatcaggttccagtgaggatcaaacagaattttttattttgaatagccaaaagatcccaaagcttcccgagggagaatctgtttggtcccttgtatctgaaccaacattgccagagtgtgataaaatatgtgattcagaatttgcttcaaagcttaaaagaaaagcaccgatatcatcaaagtggccacctttgaattggaacaatgcacctggtttcgactatgctcgcggtagcggtttcaagacacaggcatcaatggcacagaccagttttgactcacagaagataatgatggatgattgtcaaaacattgaccaaacatgtaatgaaattccgatgttagctgagaacggttcgaccaatgacgattatttggcagcaacatccacagctttaaatttgcaagatcccaacggtttagaacattatgg

SEQ ID NO: 261709 - DNA, 560 bp, Cannabis indica
gaactcgggcccggacacggtcgtgtacccagaccagaactgagaccctgacctggacctaaatctgggaccggatccctaacacagactgggacctagatagggatccggatacgaacctggactcggaccaagatccagactaggatcgaaatgctggacctatatctggaccgagatccgtacccagacccaaacttgcacccgcactcgggaccccaacattgacctggacccgaacctagacccaaatcggggtccagacttggacacaaacctagacacagacccaaagctagacccggacacagacccaaactcgaaccctaaccaagattagaaccaaagtgttagacccggatctgaatccagacgcagatctggattggaacttgggactcggaccgaaccttgaccaagacccaggacgcgaatccacacccggacggctgatctgaacatagagtgaaatacagacccgaacccaaacttaggccacgactcgaaccaaaactcagacccgaactcaaacccaagacgaactcagaatcgcaaatgga

SEQ ID NO: 261710 - DNA, 1340 bp, Cannabis indica
ctgttgtttgaacgggaggtacaacaacattttggccagaggtagaagcagctgcctcggtttcaccataagctacttgggaagcccagaactcaaggttcatgtccttagcttctcccaagtagttgaagtttgcctgaggattagccttccaaaagtcatagaagagctcaagaccggctgtctccaaggcatgaactttctctttcagctttgtcaccgcggccgtaagctcctcctccttagctttcttgtcctcttccacccgacgaaggacttctcgaagagatgtcctctcatcttgcagactgttcacttcagcaaataaagtctcgatggtctcctcaagtcggtcagaagcctcaagattcttagtcagctcagctattttcttctgggtggtaaaaagcttcttgttggcttcacccaactccatccgaagagctctgagttccaccctggcatcttcagcatccttcctggccatgtccacctccaccctcatggtgttggacaaagttgtgttcttggaagaagcagacttagcccgggagtaggtgtaggccaacttcagaccggcctgcacacaggaaaaacttgagtatttgagccaagtaaaggggattaaagaaaattgtcaagaaagacttacccttgtgaactccttcaagactcctcccaccagcagctctagagaagagtcattatgagcaccatccagctgctcactaacctcaagaaccaaccggttcatatagtgggcaagcatctccttgcctttcttggcctccggaagcaccggtaaaggtggagtagaggtctgcaccagctcagacccacctctcagttcgtcagacctatccaaagtccctcctcgagactcctttgactgggcaacttttggagtggagggttttacaaccgttagctcctcagaaagatcgatgacctccccggcaggtgtcttttccttggaagagcttccctaaccgcctttagacttcttggctggaggagatgcgctggagcctctgccgattctcttcttcagagcatcaagcatcttctaaaagcataatagtcaagaagcttaaaagcaggacagagtaatatgcaagatgattgcttgagcaggcctcaaaagtccattgcacctgacatgcctcttatttcggacataatagctttcccttttccaagcacgggaggagacggccgagcaggagagatgggttccctaatgcgaatttcatgttcaacaggcctgggctgggccagaaatttcttccttcttttgagcggagtcacctgctcttcctcagcctcatctttaggattta

SEQ ID NO: 261711 - DNA, 569 bp, Cannabis indica
tagatcgacctaaatcctgagtaatcatgaactcttgttcatgttattagtttatttaattcacttgttaaagtttctcaaagaagatgattcttacaatttctttttaggaatctaataatgtggatggttgggagcatgatctacaataatggaattttgactttcctaacggatagaatgttagttccctttatgtgttacctctgaaactgaaaagttgtgcacaaatttagatttgatctaaattatactttcactagtgaattaacagtactaaagaataaagaagtaattgcaagggtaaaatagtaatttaacaaaaactaatcaagaaacgacacaaggaaggttaatcactggaattaattatatcaatagacactatagtaaaacgtagtagatataggtctataattagtaagagttcaattccatatttgtagtagcataatcgtagaattaataaatgagattatttgattaatgagattcgataaataaatttaatttactggagcatagaattataggtccatagttcccggatcgacaccttgaaatactgt

SEQ ID NO: 261712 - DNA, 645 bp, Cannabis indica
agagaaggtgtgtactatgaggataatttttgtccagccaccatgctcaaaatccatcaaaatacttctctccatagctggcgctctcgattatgagattttgtaaatggatgtccagatagctttcctcaacagaattcttgaagagaccatctatatggatcaactcgaagactataagattccatgataagaggataaagtctgtaaactaaacaagtctatttatggacttaagcaagcttctcattcttgaaacaaaaggtttgatgaaatcataaaaacctatggcttccaccaaagtgaagaagaaccttgtgtttaccaactcaaggataatcatgtgatagtttttttagtccttcatgtagatggcatcttgatcattggaaacaatattaaaaggatgactaacatagaggaatggctcaatactcagttcaaaatgaaagacttaggtgaagctaaattatgttctcaagatccaaatttttagagacttgaagaataaatcactcgctttcgtgcaagcagtttatatcgataaggtgcttaaatgcttctcaatgtctaatgccaaagttgcttgcatgccttctagacatggtttgcgtctatctaaggaacagtgtcctactgatcctc

SEQ ID NO: 261713 - DNA, 552 bp, Cannabis indica
cattgtcgttggctaaaagtgagcttaagagatttctatgatttaatgggggtgaaatattctatgttttggatgctcaacacgcttcgtttgtgatcaaaaatcaagtctgaagcttcaagctaatttttgactattattacttcactttgaggaaaactattatgaataaaattactagatctttttttcagcttcctaaaacatcttgaatcgttcaattctgaataatatttaaagagttatggccaaaatattattaatcctcatactaggaagcttgctgcccaaaaatagccttcaagtgtcgcggcatggaaggtcaatgtcatgacccacttgttcggttttgtgccctaaataaaatccatttcaatataatcaaataaagattagaaatcacattttatgttgtatggttcacgtgatttatttcatgtgtttaatgtataaattccattaagtccagaacatatgtatttgttcatgattatactgttgtcagcacaggactataatcatgtttatatgttcgaaagtttaattccctga

SEQ ID NO: 261714 - DNA, 1223 bp, Cannabis indica
ttctaattacttatttatcctttagtaccattaattcactagtgaatgaaattttgattcaatctaaattagtgtgcaaccttaaagttatagaattaacaattaaagggaactaacattcgattcgttaagaaagtcacgattccataactatagatcatgttcctagcgatttacattatgtgattcccaaaacaaaagttttaagaatcatcttttctgagaaactttaatgagtgaatcaaagaaactaataacatgaatcagagttcatgattactcaggatttaggttgatctactattgattattgttatgttatgaattaggtctttatagtattatatacaacactttcacttaatatcatactacatcagtgaaccgtagtagcaacaattgattaatgatttcagaactttaatgttgatggctattttattcgtaggtaagtgatcttagatctctataaaactacaagtgtcaacctcatatatgaataaggaatatcctaatatttatataaatttttcaataataaatataaataatttgacattcatgcatatgaaaaaaagttttactctttattaataattaaaaatgtctttagaggctatttagggaataaatcataacaatctcccagtagtcctaaaaacaaattaggcttctccttttgttgacctcacttttagccaacgacattgagtctaatttgaaagcgacaagtagtataataggaagatcaaataataaagcaaataaagacacaggaatcttatagaggttcaatctcgagcagttcggtaatagcttaatcttcttaggttgtattgacttaagaataaggagaatggttccttttcttacagctctcacaataatatctctgaatatgaattctaagatagatttttgaccctttgcccagtgagtatgaatcactatttatagggctttaagcttgggagggaagtatttcccttctgattacaattgatataagtggaaagattgcaaagtaaataaagaatacactaatcaagggatttggacagcttgccatatctttgtgatctgatcccaaagttgtagggatttcttcggtgactcacgaagcgaaagctgaatttgcttagtgttggcatgctgcacggattgctcactgctctgttgagagagcttcgtccgagcaaatgtatgtggtgccctgtttggca

SEQ ID NO: 261715 - DNA, 502 bp, Cannabis indica
ctaattaaatacttacttttattcgtaaaaagaaattacatatttttctcgtaaaataaaaataatgtgcttgaaataagttcaaaggaaaggtatcgaaaaataaatgcacctctgacctaggtctctctcccgtccatggtgaggaagaagaaaccaggtcgcaggccgggctttagggtggcgaagggctctccgacgattccagatctggagaatgcgagctccgagtgctcgcgtgaagatggacagtcgacgttcgttcctcagccgacagcgaacagggacgacgaagctttggtttctgcgttcgttcctccgacgacaaagaatagggacgacaaagactccctaatttctgctaggaaaacctgggctgatgaaatggacttgcaatcggcagcacagtcacattggcagcagttctcaggaggtaaaatcctaaactctgatgctaaattgatttatactgaaccagtgattaaagagggtagaaagatag

SEQ ID NO: 261716 - DNA, 858 bp, Cannabis indica
aaccatggtatcatcaaaagcagcttctctgcagtggcacatcctcaagcaaacggtcaagttgaagcagtcaacaaaaccttgaaggatacgccaaagaagaaactcgaagatgccaaaggaaactggccaaaagaactccaagaagttctatgctcataccgtacaacggaaaaaacagcaaccggtcagacactatttacaatggcgtacggttttgaagctatgttgcccgtcaaactcgagccaccttcccacagaagattgatgtacgatcaaggtaccaatcacatactccttgcagaatcacttgatgaaatcgaagaaagacaagcaactggaaacttaaagttgatggcccattgattacgactcaaatttgtatattttaagtccttatttatgcacatataattaatataaattaaatattccttattttttaatagtaaaatttatttaagtggaaatatttaatttattttaattttgtgatatttttcagatttgagtacattgttataagtgaaaataaattcttaagctccaagtgtacaaaagcccaacatgaaggaatgactttgtggccttttacttgaagacatacatatgtgtatgtacatacatacctacacccatttatttccaatctgaagttgggtttcactttcttaagttattttatgggaccacgtgagttgaagccaaatgttgaccgagtccaacacaccaattttctccatcaacaaatggtgcctcttaccatgaatgtggtatttaaacgtgaccaactattcccacattctccgtctgttaatgcgcggatccatgttctccttttgccaagaaatccatgcc

SEQ ID NO: 261717 - DNA, 616 bp, Cannabis indica
tatcgagatgcttaacctatcaatagatcaagtctaaacatcagagacaggcagggttgttgcagcctttaaccctacctgagtggaagtgggaggatatcacaatggactttgtggttgggttacctagaaccaaaggtttatttgattctaattggattgtggtaggtcgattcatgaagtctgcacattttctaccagttaaaacaacctatacagtggatcagttagcagatttgtacgtcaaagaaatagtaaggctacatggtgtgccaaagtccatagtttcggatagagatcccaagttcacctccaaattttggcagagtttgtaatgggctatgggtaccaaactgaaatttagtacaacattccatcctcagactgatggacagtccaaaaggaaaattcagatactggaagatatgttacgagcctgtgttatggattttgaaggatcttggagtaagtatttaccattaatagaggtctcgtacaacaatagttatcagagtactatagggatggctcagtatgaactgttatatggccagaagtgtagatttcccatccattgggatgagacaggggaaaagaaatacctaggtcctgaatc

SEQ ID NO: 261718 - DNA, 527 bp, Cannabis indica
ttcggtctcaacattttgagttgtattttacggttacctgttgtttaaaaaaaatttatatgaaactttatgtgtggtaaatgttcttttcaactaccttttaaaactcgagatcccaacctataaggttatataattataataaaattaattttggtttagcaaagttttaaatacgggcgttacagacctatcctaggatgttaggcccccgacgttatttctttcatgtcacgtgttaaaaatagtgtcctcgtcattaagccaactttttgggtaaaaaatttcccccaagtcagtattttctgctggtatactgttgaattgcagacgttaacattgcctacttgttatcacgaagtaacctgattggcattattttttacactagctgcctctagcttaggctcctctgcatcttaactcaattccataacctcaaatcgggggtcaaaatcttccccatgttagatgtgttgggttttatgccctaaataaaattctatttcaatgtaatctttatcctt

SEQ ID NO: 261719 - DNA, 624 bp, Cannabis indica
ctatgaggggattatgcattttggaaaagggataagcccaagatttataggtccttttgaaatactggacaaagctggtcaggtagcttaccgtttggccctaccgccaacattagcagaaacacataatgttttccacatttccatgttacagaagtgtgtacatgatccgacaaatgtgcttaaatacgagaacttgaacttgcagcaggacaagagttatatggcatgccctgtgcgcgtgatgaaaaaacagtaaaggtcttgcgaaataagactatacccttagtcaaaatcctgtggagtgataattctgatagagaagcgacatgggagttggagaaggacatgtagaatcggtaccccgagttattctcaagtaagtaaatttcgaggacgaaattcttttaaggagggtagattgtaataaccaaaatatttttattacttcgttacctgttttctcgatgtggaagttagtgattacataaaatgttatttctgttgatatgtaaaagagtggtatttttaagaatagtacaagtttgtgttagtttctaaattaaaatgttttgattattaatagttatttattagagcacataatggagacttaagctcaag

SEQ ID NO: 261720 - DNA, 1556 bp, Cannabis indica
aatcttattgaatgaatcaaattgtattacatatatacaagtgtcttgattaagagtaagctaactaaactagcattaactaatgccttatatactcggcagttagttaggtacaattagttaggaagttaactaactcctatgacacctagacagttaggaaataactgtcaaccgccaacagtaagtggcaactacttcacaattatgtgtgtatttatttttctacacttagttctttatttatttactaggctataataacagaatctccatcttgatctgtacctacaatatatttgtttgagtactaattttattatttcacatttaattaattaaataataaattggtaattataaaatataaaattttaacaataatcacttttcatctccaaagtatacatatgtattgtacttaaaatttattggtagaatttaagaaaaaaagaaaagaagtgatgattaaaacaagctcatttttaataactgtaatattaagcaaatttagatgcaatgttcaccaaaacatcacaagtttgtttaggcttggaaaacattggcatgtgatccgctccttgaatctccacaacgtccgaaacgccaccgttttggatcatccatttctgaaattctagtggtattcccaagtcttggtcacaaatgacaaaaactataggaactgacccatatgaattttcagataatttctttgctttgcacaagtcttcaatgaacagtgaccctggccttgtcaaactcatagccaactcaagatcctacaacaataattcataataaaaaatgttgaataagtcaaaactttatttcttgtatttaaccatgtgaaaataaagcataaaagaaagtattatagatagtagatacctcctttggggtgagttgatagagtttggtagaaatgaagtctggaccaaaaaacattgatgtgagtggtcctttcggggtttcaattggcccaaactctgtgtctagccatccacttggtggactcctttcacaatactttacgtattttgaaaaaaaaacaaacaattatgtaaaattatttaatgatagaatgtgttaatggaaaaaaagtaataataataacaacaacaacaacaaaagttcaacttttaatacaattaaacttctttttataaaagaaaaaagaaaaacctaatgtgctgccaaataatattaataataccaaatctaatcaattgacaaaatctttcattttttttttcttcacaaagaagatctgacacgtaaagtttgtaatttagtatggtcaaaatttgataaacttttctaaaatattgaatattacactagtcatgatcatgacaccaccaatacaatattatttatttattttgagtacaacaatacaatttgaagaaaaatgatgtgacattttggaatttctaataattaaaaataattattataaaattaaaaggcagtgataatatatagtattaagaaaccgtttggtatgagataatattttaataggaataataatctttcatattcttacgttt

SEQ ID NO: 261721 - DNA, 447 bp, Cannabis indica
aaaataaaattaaaatttagtaaaaatagtacaattacttacaaaatatgaataattataaattccacttaaatcgtaatttcgaaccaaaccaaatagttcttattggtttggtttgatttgagaaattttttggtctcatttggtttctaatattccaaaaaaccgttatactggtttgattcaaaaactataaaaattcggaccaaaccaatttgtaaacacccgtaatgtaatgttgaagatacttaattattaccttaaaacttgttttaagagaactaccgaaacactttttgaaataggtttgtttagaattaagtttagctgctttagacagcttaccaaatattgacttgtttatctctatatctattaattaatggcacgtttaatactgctcagtattcagaatcgaaataaattaataaaaaatagggacttttt

SEQ ID NO: 261722 - DNA, 485 bp, Cannabis indica
aaaaaaaattaagaaaaatattagaagaaaaaagaataaaataataaaataataaaagaaatccatgagaattatattgaagaattatattgaaggaaacaacgatcacaagtgttgtcttataattttctttactattaacaaagtgttgctaataatgttttttctagtagtctatcttttccttttttgttgataatttaatgttttagattgcaatagaaggatttctcggcagatcatccatttttatattattttcgttcaaatacccttagctacaaaattatgatgaaattttgatcaaatgaattaataatttagaactgatataatcgtaccgtgctccctcacatttcacttttatattttcaagtaaaaaaattgaatttgtttctcaaatttgatcttactcccatctcatttgctataatcaacatctcatcttgatttatgtcaatagcaaaatggaaaatgagtgtgtc

SEQ ID NO: 261723 - DNA, 689 bp, Cannabis indica
ggttcccaatactggggctcccgatgccaacacatccggcactggtaagtctcctttaacggtccatcatgttccgtctgtccaagagtattcccggtataggcctatatagttcgacgagcgtcttgttaagtttaggatgccccctactcggtgaggggatcatgccaaggccttttacttttcccatttaggtcatttcttaggccggtcctggatgggtttcggtcatcctgaacccatccctctggatcacttagcttatttgtctttctagctggtttctcctctcgaacagctttcttagggatgacaaagctagtattgtagttcaagacttttctagggctgagttagatagtcggggtaggactagctttgttgttttgttttcaggcgcatgctttcttatagccattctaacacttttttttatttctttttgaagcagccatgccaatggaagatctcttggcgactcttgccgaaacctacagcccgtacccttctctccctctggcacctgccaagatggtgaccccggggaggtcatcttccagttcccccttaggcacaatcgtcttgattaatgaggatggggaggtcgaggaggagtaggaggaggaaggcgagattgtggctccgcttgaccgaaagcgaaagggaaagatggtagaggctgagtcttc

SEQ ID NO: 261724 - DNA, 755 bp, Cannabis indica
gaaaaagtggaagcatggacatttggcgtcattgctgactctcatgaccgtcatgacacggttgaaccgtgacaagtggtcgcttggatcagagttcccggtataagctgccatttcgggcatcttaaagttcttggggagctccgcctccaggatgtgcttagcacatggctcccggtcctcgcaatcttagtcggagtcatcccctttttgctttttggagactcgggcaatgtcttttcgaagtatggcgagggcccgtatcttttttggtcaaggtgatcccggaggtcaccttggttcccattgatttgatttctcagatcaacgggaggacatctctgtcctcttctccctctacctccgggctcttggtgcacggaaacgctttttcggtcctctcgatcctgagggccaagactccctttttggagcttgcccctctgcggacctttccctttagggaaatctgagcggacctttcgcggatcctgaacctttttctttcaccctggggtggaggtacggtttttcgtctggttcccttcagcagggtaccttataaggctaggctccctggacttctactgtcgggtactaggcgaggattcctctagttccttgccaagtccagcagccactgccttgggatgcacgtgaatgccagccgcctccatggcctttagcattacttcttgcatcttttggtttgtgctttttgggcttcgatcacggcttcgtgatcgatagctttt

SEQ ID NO: 261725 - DNA, 1117 bp, Cannabis indica
caggaggggatagactatactgatacctttgcaccagtaactaagcttgttactgtgaaactagttcttgccttggctgccatgaaaggttggtatttacatcatttggatgtaaataatgcctttctacatggagatcttaatgaagatgtttacatgactttgcctcaaggatataagggggagctaccaccaaacccagtttgcaagttgcaaaagtcattatatggattgaagcaagcttcaaggcaatggttttccaagttttctagtgctttggtggatgagggctttcatcattcagcaaccgatcacgctcttttcatcaaacactttaatgggaatttcatattcctattagtgtatgttgatgatatcatccttgctagcaacaatcttgaggaacttcaagccttgaaaattagactaaatgacagatttcaactcaaggacttgggaagtaaagtattttcttggcttagaagttgctcgatctgagcaaggaatttttgtctctcaaaggcattatgccttgcagctgcttgaggatctagggcacttaggctgcaagcccatgaacacacctatggaacctaacctcaagcttggacaagatgaaaaagagaaacttgcagacccgactcttttcagaaggatagttggaaaattgcagtacttgacaatcactaggcccgacatttcattctcagttaacaagctgagtcaatttttagcaacacttcgggtaacacatcttcatgcagctgaaagggtgctgcaatatatcaaaagcagtcctggacagggttgttttttgcagccaaatctgaggttaagttgcatgcctataccgattctgattgggcatcttgtccagacacaaggaggtctactacaggcttttgtattctcattagaacatcaatgatatcatggaaaagcaagaaacaacatactatttctagatcttcttcagaagccgagtatagggcaatggctaacacaacttgtgagattgtttggcttttgtctattttgaaggagcttaaagttgaacatgaagggcctgcacttttgtattgtcacaacaagtttgcacaacacatagctgcaaatc

SEQ ID NO: 261726 - DNA, 1109 bp, Cannabis indica
agaggaaatcagaaatcacatttgttttccttttatgtgtttgatttcgaacatgtaacgcgagaaccacgtggctaaccttagcagttgagcattgactgctttgttttgtttgaacgtgagcatcccttgaaatgcggcaaaatatgtttccactaagaaattgtgtccgatgaggtggaactcgaattttgcgatggccatttttactgctagtatttccttaagtgaagaatggtagtgcagtttggaatctttgaaagccccacttttgtaagtgcaaattttgcattttccacgatcatcttcttccagtagaactgctccccagtgtttgtcgcttgtgtctgtctgtaagattccttttccgtcaaagggaatctgaagggggggctaggccttgcatcacctcctttagttttttgattgcatctgtctattcttgtccccaacgtgaagatctttttttgagcatttttgataatggacttgtgatcttggacaagtggggtacaaaatcccttaggtaatttataattctgaggaattgttgggtttgggtctttgtgaggccttcatttgtgaattttaacagctcttgagctatgtgtgcttgggcctcgtattttccattgtgaagtttcattccaagaaattcaatgtttggtcgtccaatacacatcttcttttcagaaagcattataccatacttctaagtgatattcgtaaattggcccaagaggattgtgtgggtcttgttatttggtgagaacaaaagtatatagtctatgtagattagggcttggtttaggatttgactgtagatcttagtcattgccttttggaacagggatggcgtagttttgagaccaaagggcaatattattgtccattgaaaatgatgatttgcaatgtaaaatttcgttttgggtttatcttcttttttgatgcccaattgccaaaaccccgctcttaggtcaaattttgaaaatatgtttgctttagagatgctagagaaaaggtaatttctgtttggtagaggaaatttatcatctgccaaaaactggttcaatggttgataattgattaccaaactttgttttcctcta

SEQ ID NO: 261727 - DNA, 774 bp, Cannabis indica
tagtttggtccagctaagcttggaaaatctctctatatataaaataatctctatataaaataaaatatgtagtctcaaatctcaactttaaccaattttaatccctcataataaaaaaatggcaataaaaaaaattctgtgtaataggttgagtagtcattctacgaataaattacccccttaatttatatcactgttgacttaaaatccaaccacacaaaatttgatctactatcttctcttccatgccaaataagactcctaacaagtatactaaattttattatgttgattgagtcaattttgtatgtcatattttgcagtttatatgtttgaaaaaatgactcaacgaggcttttgtggtaatctgtatttatttaattttagttattatatatacttgaaataatgtgcagtcaaaattttttatttgaatatacaatttttcattaagagctgcactatcatttttgtctttaattttcatcatcacactggttctgtcttgaagcttatcgcttcatgatttgaatttcattgtattttaatataaaaaacaagttactgttctcattattatataatatataatttaatatattgcttcagatatataattaaaaaaatttatttatatatatatttttaagactgataagattgatcatattttttttatataaatctttatttattaattttttttttggttaaattccaattttctctatgatataactgtgtaagaatctcatatttaaaaaatattataat

SEQ ID NO: 261728 - DNA, 813 bp, Cannabis indica
tgtaaaaatgaaaaaacctctttattttattttatttgcaattctattttctaagctgcataaagttattattccttttttttcttcataattctttctatactttttcatatttatatagagactaattttaatcttaaatttaattaaacaattaacaaaattcttttaaaaaacaaatgaaatcttaattataatacaatagacacgtaattattattattattattatatttttgtgtgtgtgttaaattttcactattgttccatgattattttttagttgttctattgttgttttaatagtctgttttgttgttttactgttgttttataaaagacagtatttttgtaaaaaaaatcatgtgacagtaaaatgataattttttacctaaaatgtaatattattgtaaaaaccctaagtatatagtacacattttgtgtagttgcttagttcattatttatattctgttaaagattctaataattatatggatatatttatttcttttagtcaataaaaatggaagctgttatagaggaaaagcaatgaaaaaaaataaaaattaatattaaagtaaaaacattttaattaaaaagaaatttaatagttttatgatacaaaaatcagtttagtaataattttttatttagatttttatttttcaattagaaacgtaaaataattttaaaaacatgttgtctaaaattgttttaacttattaattttttaatcaatttaaaaattttgaaaacaaaaacaaatcattttaaattttatttcaaacatatttttttttcttaatcaatat

SEQ ID NO: 261729 - DNA, 575 bp, Cannabis indica
aaatgaggagtataagctatatgctgtaggctttgagattgttttccctatcttctagtctatacccgaatgctgataaaactacaatttattgcagcaatatgcagtaggaggatataaacctgatcttgcatctgtctggtttacaagacaggaccttccttttacctacctggggatcccaatttgttcaaagaaaatatcttggaaggaatgtgaactcttggcagaaaagatgactgctagaattaaaagttggagctcgtggaatttgtcctttacaaggagaatcactctaataaattatgtgcttatttctatccaagcttattggagccaaatgatgattatgccaaggaaaggactaaaaagtatagagtcaatatgtagagcatttctttggaaaggacaagcagtttttcaaggggctggagcagttgcttgggaagatgtgtgtcaaccaaaaatagctgggggattaggcattaaaaagctggaagagtggaacaaggtagccatgtttaagtacatttaggccactgcaaatagacagaaagtttatggatgagatgggt

SEQ ID NO: 261730 - DNA, 847 bp, Cannabis indica
gtatataaaatcaaaattctcttgttatttgtgggactctttgagtttcacttgtacaattgtttgtacgtattctatgaaaaaaaaagaagaaagaattttatatcctacttataatcacataagaagattaaatatttaatgctatacacatttaaattgtatacatttattatgcattattaattacgtatttatattcttaagcaagattatattatttttaatttacatattattttatgtaagaagtgtgtgtaatttgagtgtatcccaatataaagagcactctaaaattttaaatactttatactagtgaatatataaaattaatgtaatttaaataatataaaatttataatataatataattgcaccaataacaataattgtattcctaatattaaatacaatgccatattaattaattaattaattaatattattattattattattatatttattattattatttgaaataaataaaatgccttatctagaccaatcaattacgtatattaaaatgaaagtgtaggttaacacctaaattaattttatgtagtgtaccataggcttattattatcatttttaagaagatattagagtggtggtaggctagttgcattaatttcccagtttaatttttgagcatcttgttcatataactagctagttttccagttgaatttttgagcttcttgttaatattattatattactagaaaaaataacgtggttttaattattaattatcatctttatcagctttggccattttttattgagaaactttacaaaaatattagaatttgagttaacttttacaaaaatactgtcacacgg

SEQ ID NO: 261731 - DNA, 564 bp, Cannabis indica
ttataatttgttgaaaggtcaaactataaataacctaaactcattataagatgagtctataaataggtagtggttcttaagaaacataagggtttctgtattctctccttccctatcagagaaaatactttaagaaatagtgtattcttggaagataataaccttctgtaaaatctccaacaatggcttcaggttagtgcttatgttcatctattatcatcatcttcttctttaatttagcaaaggttctataaatttatgatttaagattttctttataaaagcactattaggaatatgtttagatttgtgatacatatttcatgagtgtcttataaatctttataagatacaccaataatattggacaatagatttttttatgtataatgtgttagagattttattacaatgaaagataaatcaagatatatacaacttaattgtaaaaatcataccacgtccttaatctgtatgtgtgacctgaaccaattggtaggctttaacgaataaattgaagacataaacaatataattaagattgaacctaaccatatcaggatt

SEQ ID NO: 261732 - DNA, 761 bp, Cannabis indica
gggaataataaaatcccaaaccaataattgaaatccaaattgttgtaaaattaaaacaattaattcaaaaattataattaaagaagattctgagcttcatcttcaatcttggactatctccacccatctgtccaaccatccgactcaactcgctaggatagcaatccaagttcaagcagctggagctgaaataagaagaaaaacaaacatggttagtaggtccagaattaataacccaaggggataataattctctaaaacacatgagtttatagcatagaaagaaataccttgtttctttgctagaaacttagggcattggggtttccagtggcccttttcattgcaatagaagcattttccttttggcttatctccggaagtagcagcctttttctttttaactgttttcacagcttgaacagacttcttgctattcttccacttcttgttgttgttgggtttggaagcaaaggcaatgtttgcctcagcattagccgacccattagcattctcagaattaggagctttatatcctcctttctgtggtcctccaatcaaattttcaaatgtctgaaggttgttgaccaactcgtgaaagtcaagctccaacttgttcatgacataatttgaagtaaagggtagaaaggctagagtcaaactgttaaagtagatcagactcacttgagttgtctgatccataacagctccatgattttcaacttcttggaagtaacttgtcatttggagaaggtgatcac

SEQ ID NO: 261733 - DNA, 2269 bp, Cannabis indica
cttgtttttttttttttcttttcgagaagaggtgtagcaacaaatttacatacttccccttctattatctcaatttttaatgattgtacaattcattcatcttaagaaaaaaaataatgaagaagaagaagtgcagagttcctatgctttcgtatgcacaaaactatgaaaacgtgttgagggtcccacatctcgcaaaatggtataatgtttactgtagtcaataatctttaagccagttggggccaactgcgaaacactaaaattgtccaaataaaaaaagtaataaaaagatgcgaaaactattacaaaatgtggatcagaagagaaaaggggtttaatgggttttgttttggtatgaataattgtaggactatggtgtgtccttgtcatactaccgagccacatatttggtggacatagacatacttcaagggaagagaattctaaaacttgacgagatctcgggcaatggcaatgcctggcgcaacgccgatgtgctgtcgtttaacaccggccactggtggagccacagaggatctctccaagggtcagtaaactttgtctcttacctctaattatgctttacttgctacatgttttcttttttgattccattgttctttaaggacacgtacatttagcttagttaaatagaagaggatcatctatgtcattatagtcctgtgttttagcttaattaattgttgaaccttcctttaatactcattcgaattaaggtcaaaatattatcagtaaaagatcgatgtctgtctcagatccacatattttcaaaatcgatgatcccgtacataaatctaaacacaacacaacaacacattgtttcagaaattattttaacaaacttaatggaaaaacgggagaagttttggaaaatggaacatagcatttatctaattaccaaaactctttggaaaatgggattttggtgggaaagaaaaatgtaaggaaaaaaagtgaaagaaaaaaaaaaaatcaaatttatcatgtttatttgaaatttttggttgaatcaaatttagttattttcttacctttcttttcatcccaataattttttcattattattttttatattccataattttttccttacatttttcttactttgttttccgatcaaaatttaactaaggttatgtttgattgattggaatggaatgagttttcctaaagagaatccattcacttctttggtttgctatttataattgaagaacttattcttttggaattgtaattcatgttgagataggatttgtctttcctaaacaaaaaacaaaatgagttgaaaagtgattcctttccaatattatttaaaggaaaaatagtgacataaatattttaaattttaagtttgtaagtagcataaatctaataatttttttaacggtataaatacttaatgtatgtacaatttcgttttgaatttattatgaagatttagaagtaattaatactataatgttcttttcaaactcaaatgatttattatctaggtcttatatgtgctttgtttaacacaataacgaagtctgtattgaagaaacttgaggataattactttacaaatattagatatttttgccgtttaaaaaattattgaatttatgccacttacaaatttaaaattttgaatacttatattgctatttaactttatttgaattatgctaaatctattccatttcccaaatgtaagaaaaaatttactttagaattttactaattagagctttaagaattagacgtaaataattatatgatgattaaattatataaatgatatctatattaatatttaaatataaaatatataattagctacttgttaatatgtaattttattattttatattttattattagatctaagaaaatataatcacaaattgatacttaaatttatatgatttatttgtttaatttgtaaaataatagtagtttgataaatcaaaaattactagaagagtaagaggtaatttagtcaaaataataaaaatttcactccattctataaaataccaaatataataatctttattctgtagtctttactaaatagtcattctattcctattcttgttactattctccattcccatttcatttttattttataaccaaaagtcattgtattgcttttattagttctaatcaactcaattgagttctaagtttctttcttttcttttctttattttttttttttttgaaaggggggtctttctaaatttctaatgtgtg

SEQ ID NO: 261734 - DNA, 849 bp, Cannabis indica
gttggaaaagtcatagggataggaactctcaattttgaagggcttcctagactaaagaatgtcatgttggttgatggactaaaagctaatcttcttagcattagtcagatttgtgatcagggttatactgtgagctttgatagtaatcattgttatgtgtataatattcttgatgaaattgtcttgcaagggctcagatctagtgacaattgttatactctcactacatatgctacttgtcattctgtcaatgataatattactgatttatggcatgaaaaacttggtcatattcattttaaaaatctgaggagattgtctaatgcaggaattgttcgaggattacctaaattaggtaaggagtctttaggaaaatgtggaccatgtcagcttggtaagcaactgaaaatttctcataagagtgtttctaatgtgaatacttccagagttctcgaactcctacatatggacttaatgggtccaatcccggttgaaagcttgaatcgtaagaggtatatttttgtgtgtgttgatgatttttctcgtttttcatgggtggattttttgagagaaaaatctgatacttttgaggcttttaaatttttgtgtttgaaattaagagttgaaaaagattgtaacattggtaaaattgttcagattatgagtgatcatggaaaagaatttgaaaatactatatatgatgcgttttgtaaatctaacagtatttctcatgaattttttgctcctaaaaatcctgaacaaaatggaatggttgaaagaaagaattgtactctaacataaatggctagagtaatgttggatagcgagaagcttacgaggcgtctttgg

SEQ ID NO: 261735 - DNA, 518 bp, Cannabis indica
acttattcccgtgtgtcaagtatactgcacttattcccgtgtgtcaagtcttctgcaccatagtccatttctcattatttttacatgtggtcttcactctttccctattcccgtgggtcaagtcttctgtgtaccatagtccttttccataatctctaccatcggtcttcattctttcccgattatcctacgtattttgcgaccttctcacttccccttcttttcccaaatttctttgccataacttcgtgcactccctccatagagtaggtaaataaattaatttgatgggttcaaattcatattctcgtctgctcaagaaaaatcataactgctcctctactgaatcaacggtgagtttttgtaattttcgattgcatatgttatttgtaatttttgggcttaaggtttaatttcgaatcaattttaatttagctaaatgataggaaattctgtatgattaagctcttcctgttctttcttttttctatctgaatttattgctttacaaagtaaaa

SEQ ID NO: 261736 - DNA, 581 bp, Cannabis indica
gtttttatatttttatatctttgctaaatagttgttaacagttaaaaaaacctattggtaactagtatcttttttcaaatccaaatcaagaacttcatcctcgaaatcagaatcagatacaacctaaaacattaggaagaaaaaaaaaataaaacacactactaaaaacgtaaaaaagaaacaacaagaaaaaaactaaaaaaaaattaaaaaaaaaccaatcgaagccttatacccttaacagatttcgaagacttcattgtctttgctttacaagcttcaaccttagatggaagtggtattttaatataaccagaagcctctggaacatcagagatattagacattcttttatttgcaatacatttcatacccattttaggttcaccttcaaccttcagattagtggactttaaaggagttttcttaagtttcttagagatttttttaggagcagaggacatcaaacctgacctagtagttccatttatacacaacaaaataaaaataattgagaaatgaagaaaaaaaaaaaaagagggaggttatggaagagagggattcgtgactgaaaaataaag

SEQ ID NO: 261737 - DNA, 509 bp, Cannabis indica
agactgctataaccactgcaaaactacttaccatgttgaacgctatggctcgcactaaaaagaagagtcgggttggcttttctgacaatcctcatggcagaggtcatcactaaacggagggtatctgacaatcttgagacgggttccgacaatggagccatggaggagatagtcagagagtttaagaagtgggtggaagaggaggctaagaataccctccacaaagttgccaaagagaaagaaccagccgagggttcccaaccagccactctcaaaatcagagagtttgccccgagagtgattaaggaggttcgcacttctcgttgcaaaaccaagcagaccccctttctggccccctctagcagtcttagtgagacccaattccaatatgtggaggagatgactgtgaatggcaaggattaccagttaatactgttggaaatattttaccaggatctagatttactaccatgtatgttgtttaatatcctaatatgaattctctaaaa

SEQ ID NO: 261738 - DNA, 1136 bp, Cannabis indica
ggataaattctggatctccactttgaatcaaaattctcacttgaaagttggaagtacgtatgtaaattaagatctaaggcttaagaaaataaaattaatatacaaacttaatgcatcaaaccaactaaacaattttcttaattatatatcattattgaaaatataatgttttcaacagacatttatttaagttagatacccgtaaacactaatgttcaaccatatcgtttgttagtttgctttcaactattcccaagcgttaataagctttaatttttatttttagattatatataagcctaattaatgagagtgagagagagtgatggtccaacaccaatgttgatgactggctttcctattgattataattcaagacaatattaattaataataaacagattaatctattatcaactgtctgactacggatcagcagtaaaaacaagaatatgattatgaattgcatggaagtgaaattgtggtagtagttacaactagttggtacaaccctttcttctcttttttttttttttttaagaaaggcgtacttatattaaaataaaatttgttagacttcgcgatcattacaaaatataatatcaagcaaagagaaaattggcacaaaatcaaacctctaatacgaaaatgcccagttggcacaaactctcaggctctcatctaatatgccgatggtccattaaatagaagatgaggtagtatgaatatgaagctagtatatatgtggcatactgataggatgggtgtggcaccacgtcattattttgtttggtaaggtgcaccgcctcattttatatatatggctagattttaactttgtaattaatattggtaaaaccaatccatattttttttggttgaaatgaggtaaaaccaatccattatgaaagaagaaacgccacacaaaattatttataaagaaaaggaaaaaatataaattaacagcgtaataaagacagttgtgattcgtgagatgaatttagaaactataataaaattgagggatatttataagttattagttttatacacttaaatactacatgtttattttcgacggattaaataccttaagttatattttcgttacttccgtcactacttttctgttaaat

SEQ ID NO: 261739 - DNA, 676 bp, Cannabis indica
taacccttgatcctttctattgtggagtatgatcaagatctaaacttagatctcattcaggtgacaacatgaactacacaatctttcttattatgctagctaggtattgctttgagatgtgtgggcatattctcaatcactataggctttgaattattgagaagagaagaggaaggaatttgaaaataagggctctctttattttctatttatctgacaaaaggagctagtctgatcatcatctgaaaaataaaagtcatcttattctatttatagggtagctttttagggtcaagtttagaattaaaattgaattgaaaaagataaagaatgactttattaatcatcctgggcggaacccttaatgggcctattggattttaatattgtcattttatttaaactcatctttttttttcttcacaaataccatattttaattttaactctataaatgtaaattctatctatttaataattataattatttatcaaataaaattaccatttaacttatttattgattagactttacaaagtctcttaattaacaaacaaatcctaaaatctcttttcttctcaaataagtcattacttagtgaaaattcataaacaagacataatctttatttagaatcctaattgattaaataaattaattaattgagactacaaa

SEQ ID NO: 261740 - DNA, 1135 bp, Cannabis indica
ttgatgaatcttttgctcttatgaagtatgaagtagtttatatacttgttgaatctatttctttgattatgtttgactttaccgagcaaatatagatactctgtgaacttgcttgcgaaatattcaagaaaagattagtaacaaataataatcaaatatttgtttatcatcaaaataaatgagtgaatgacttttggtcaacactctcaactatttacaacaagcaagagatggaacaaattatttgcacactttggtcaatatggatggaaagaaatcgagttgttcatggttctactgcaaaaccagcaccaacaattgcttcctttgttgtcaattatttatctaattttaggacagccaaagggaagaagtatcatactgcagcaaccaacaatgctacacaacctgcactagcagctgctaacgcaacatggaaacctccaactggtacggacctgaaattgaatgtagatgccgcccttgatgctaattggaatattattggagtaggggctgttgttcgtgatgcaacaggtcatgttcttgctgcacttgcgaaaccaattatcggtaattttgcatctcatgaaatggaagccaaggctatgtttcatagccttaattggattattcaactgcaactgccgattgcaatagtgcagactgatgcacttgtggtagcaaacgcgttgcaaaatggatctactgcaattacttcctatcatgatctattacttgatgtttctagtcttttattctttttccctcaagtgaatgttgtccatgctaaatgctcagccaacatggttgcacactgtttagctaagtttgctataggggtggatgagacttgctcttggttagaggatttacctctatctttttactctgttattataaatgacattccagtttaatttataataagaagtatcttttcccgaaaaaaaaaagttatttgagaatattgttattaagcttgtattataaagcaattttcaatacatttttaaaataatttataaatgtactcttaagcattataaaagaaattatattttaaaataataaataataattattataataataataataataataaactaaaaagtgacatttatgtatatat

SEQ ID NO: 261741 - DNA, 643 bp, Cannabis indica
tttatatatataaatatcaaaaaattctgtattcatatatgaggatgtgacttgtattatacggagaattaagagcactcagccacgaataaattagtcagcaacatattaaaattttggaatctttaatcaacgattgctaatgttgttcacttatgcctgttattcagtgcaaataatctcaattcggattattaatttgcatgtatataatagaaattatatatgacaatgatcgatatgtaattaagctttctttatcaaatatgtcgtttactataaagacctaataaatatcataaagataatcaatagtgatatgaatcctgagtaatcatgaactcatgttcatgttattagtttctttaattcactcgttaaattttctcagagaagatgattcttataacttttatttgggaatctaataaaatagatggctggaaatatgatctacaattatgaaatcttcactttcctaacggatcgaatgttggttccctttaagtgttaattctagaactaaaaagttgtacacaaatttagattagatctaaattatgctttcactagtgaattaatggtactaaaggataaaaaagtaattagaaagataaaacgataatttgaccaaaactaatta

SEQ ID NO: 261742 - DNA, 949 bp, Cannabis indica
agatctggatcccaatctcgggccccagtctggttccatttctggtgtagggtcacaagctgggtcctaggttaaagatcgggtcttggtcgggtactaggtcccggtccttgttctgtttcccaggtctctatcctgattctgggtctaggtcccggttattgtgttggtttgggtcccgatcttggttcgggtttgggattaagtcctggtcctggtcctggtcctagttctagttcggttctagttccattagcaattctgagttcgagtttcagtttgagttcgggtcggagtttgagtcccggtcagagtttgggttcaagtctggatttcagtctaggtccagatcaagctctaggtgtgggttcgcgtcttgggtcttggtctaggttgggtccgagtcccaagttccaatcctgatctgagtttggattaagttctgggtctatgtccttgttttttatcctggtctgggttcgagtttgggtccgggtccgggtctagctttgggtttgattctaggtgtgggtgtttgagttcgggtctgactctgtgtccgggtttgtgtccaggtcttgaccgcgatctgggtctaggtttgggcccaggtgcaagttcaggtcccgagtgcgagtccaagtttgcgtctgggtcaggatctcgaaccagatcaatgtccaacatttcgatcccagtttgggtcttggtctgagtccaagttcgtatccggatccctatctaggtcgaagtctgtgtttgggatctggtcccagatttaagtccacgttcgggtctcagtttcagtctgggtacacgaccgtgtccgggctcgagttccagtctcaatttgggtctaaggctaggtctgtgttcggttctaggtctgggtcttggtcctagtcgcggtcctagtcttggtttagggtcctggttcggcgattcttgt

SEQ ID NO: 261743 - DNA, 875 bp, Cannabis indica
attttatttcaaaaaaaaaaataagtattctaaatattttaaaaaatatatagaagtattattaatgagataaaatatttaaaataagtaaaatatataaataatgatattttaatgatattgagaaaaaacatagagaagctaacgtatgatacaatgtaaaagtttgaaataaaatataaataaaattttaatgaattattttaaaagatagagtaaaaaagttattaggagtgctcttatatataattttaacagttaagtccataatttttttttattggcaaaattaccctaatcgaaacatactaaatacaaatagtttttttgttagcaataggaaacttatacgcataatcctcttataagggacttgtaactcatctacattgattggatcattggtaagcaatatatcttccttattcaacccttaacctaaattaattagaaggatactagcaaaggtatccctacactataccacacaatcgagtaaaatattagcaatttagatttgaaaaaaaatacttgttaattctatttttgtatattttatgtaagaaatatttgaaatttatttatcattttcggccatatatatatactagtaaaaatttacgtgcgatgcacgtatactaattttatgttagggattttttactttatttaaaaaatataattaacaattaaagaaaaaaatattattacttaataggtgagattattattatgtatatctaaataatgtaatttataattttgacaattaaaactaaatactgggtgtaatatattatagtgtttaagaaaacttgataatttaagtgtaatatgttcttaagataatctaaaaataaactaaaaattcatgt

SEQ ID NO: 261744 - DNA, 3785 bp, Cannabis indica
  modified_base (91)..(91): a, c, t, g, unknown or other
atccatcgcctagattcacatgtgatgtcaacgttagacgctcgggtgagtgggcaaacctatcgagtagtttttttgtttttttttttangcttaagtgatattttgacatcacttagtctatttctgtgttttgacaaagctggtcaccagttctcggaacgagagactcaaaactactcagtttttcagtaattcaccttgttagaaagtaaaatatgaagttgtgaatttgacttcatagtgatgagtttgggatttcgggctcacgaagttggctcgttccccttttggggcgatgcgcgaggtacagggatctcaaggtgttggtgccttgatggcgatattttttgcctttgcagactattctcaccgtcaggtgtgacgaatgcagttactccatcttggtgtgtgtgttagattcttttcacgtaggtttccccctcctcttgtttgaggtacttggctgttttggccaacttcttcagccatgggtgttggtggctcttttctggaggtgatccattgaatgctgtcaaggcaaacctccatttcttggagacggcgagagcgtctaggcattttgaaatgattatgtatgaggaaacaacatgactttagcctgtcgttcccatagacggcgccaaactgttgacggtgagaactcgtcaactaacttgtcttttggaaaatcaaactccactccaaactcaaaactaagatgaagaaaaagatgaaagtataaattcaagtgtctatcttaaagtagagagaaaataaaaactttatattactcgcaatatggtggttacaagaatgattttccaacctcctctcacatctaaggaaggagtatttataggctctaatggcctgaggtaatagtggtcccaaaggggacaagttgtcactttcaggctgcaaatcgaaggtgtaggaggtggtcttgcgcctcgtatccttgtctgttgacaggtggtctcgggttgcgagggtaatggctgtagtgtaccctttgtcagctcctcagaccttgcagatgtactactcgtaccttcttactttcaaagcttgcagaaggcagggccgtactctcctcgcgtgcaattaccttgtccttgtgatcgtatccttgtcacttcactcttctcttgcttgggaaaattccaccaagttttgacgcgttacgcccgagtgacattctcaacgtcacgaccgagtgacatcctcaacggcatggccgagtgacattttcaacatcatgcccaagtgacattctcaacgtcatggccgagtgacattctcaacgatggctgagtgacattcccgatgtcatggccgtgacatttgtcactcttgaggaagagtgacatcaagccactcttgggccaaggtgacttccgccatatcgtccctcatgccttgatcagctaaccttgaaaattacaagtgccaattccctcatttgacttttgcaaaaatagctcagctgatccactctatcttaattggtacacactgcttttggatgagtatatttttgactccctcgatcagaaggtatacttgtatagtatatagcctatggataaactagaacctttgtattttcgaaaagataacaatgacttaattagcttgtgttgatagattgatctaagatacgaatggctagaacctctttagtgtgtaggaatcgttgttccaaaagagatacagtttttctttctttcttttatagatcaaatgcaatgacggtagggagcaggggaggcttgtaatttgtttggagctgtagcttttgttggttgattaatgaaattttttcaaggttttggtgagaattggtacttcacgctcgatataattttgagtctcacttacaacaataattccttctgtccaaactctcctcctgtggttgccatgctattctgatagtgactttgacggagaaggtgattttctttctttcactttcttgccatgaccttgccctccatccttcttcttttctatttttagataattcatccctcttttttctacgtctacgtgaacatgcaagttggatttttgtaacataacttgatgttgtatcactgaatatcacatcccctaatataaattttttatagatcagaggaagctccctcgtaatttcccaatcagttcatccatttgaggatttgtttatataaacatatttatatataaatatataatatttatgtataggtgtttttgtttatttcttgtatgtggcgtgtgggcggccatgaattaattaatattcaaccaaagataactttaagctctgtaatattatatgagtcgtacctaagatctattagtccttttcttgcttagaaaattccaacaaaccaacgaatactacttcccaccattcttatatatttccgttgagaaatagaaaaagtaaatcaagaagaagaaaacattcacgtatctttctaaataataataatagttcttatttgaccttatatgtttttctaaatcatcaaaacccaagccccttcttcatgagagcttagctagccacttgcacaccatgaagcttctcttgaaacctcttgtcgcagtcatcttcttggttatctggtccagtagtttggattcatatcaaggccaacaattagagaaagataacggtaataaattcagagcctgcaaacttccgtacgagtgcggccacataaaaaagcttcttttcccgttctggggaggcaacctacccagctactgtggctacccggacttcaaagtttcctgtgacccccaaaaccgctctattttcaatatccaggatgtcaagtacatcttatacagtatcaattcttctaatcaaaacattacagtcacagcggcgagattggatctgttggagggtccttgctctgggaatgttgacattgttagcggaaatttgacttaccgatacgatgttcccttttacttccctcaggaggtagaaaatgtcactttgctctatggctgcgacaattcagaaccagaacgactcttgaagaacaggtttttgtgccctacaccagttaaagggagtacaattgtttattatgcgaacgattctgtgatcgaatccctgagatccagttctggggaggagttggattcgtgtgaatctttaagagtttctgtatacaaagatgctttaaatgaaagcttaagaagcctgggtggcaatgaagagaagatacttgcaattggtgaagcttggaggaagggatttgaagtagtatactctgaattgacatattgtaaagattgcatggattctggcggcatatgtggctacaacgacaattctattgagatttttagctgcttttgcccaaggcattatacacaacgggcatcttattgtctacatcctggtaaaccatatcctttctcttcttttaataattcagttatttggacgattagagttactttaagtaagttaatatatatattaaacccaaaattagtgatagctaataattgttaggctacatttgataagacgatgattgatatagtcatttaggaaggaagtaaatggcaaatgagtgtccagacaatccttggagtgaatataaattatagttgtacggagacacaaccattccagtggacaatattatcttgaagaaaaatactaaaagatactaattatgtaccaaatattggtattagtgtaattaagtatgtagtctcatataacttaatgtaaacatcgctaactaatcctaaaacac

SEQ ID NO: 261745 - DNA, 805 bp, Cannabis indica
aattggagcacttgattttggtgtaagaatccaaaaaaactttcattgcaccacaagtgcaagtggtaatgggttgaaattctttcaactcatcccaaagagatttcaattttgtaaaataggtagaaacagagctatcaccctgctgaagccgagtaagctgagtttgtaattgaaaaattcgagggccattgccttcgttgaatcgctcagcaagatcactccacatttcagtggctaaatcaaagtacattatactttgtgcaatttcaggggaaacggaattaactaaccaagacataaccatattattgcaccttaaccaagagtttagattggagttaccaggttcgggacgagggatagatccgttgatgaacgcgatcttgttcttgaccatcaatgccattgtgatgcctcgtttccacggttgaccatcaataccatcaatcccaactaattctaagaaaatgttagttctcaattttcaaaaataatttttttgtctaagatattatattttatatttttactcacatactcggattctagactcggagccaaatgggttcatattattatatggtgttaaaatattgattttttttagtaagaaaaaaattaaaaataattttaaaaaatttatgccaaacaccatcaaatttttaaaatgacaaaaactgttttctattttcacttttaaaaatacaattttaaaaactgaaaacacaaccaaacaagctctcaatgtttcagcaacaatagagataaacaactaatttatgtccaagtacaagaagaaaga

SEQ ID NO: 261746 - DNA, 535 bp, Cannabis indica
acataaacaatcactgaaatagtaaaattgaatgaaattagacaaaagtcagtaaattcaacaatcttaatagttcagggggcatgatttggtacatgttaaagttcagaggaaaaaaaatcctaattaaccattttgaaatgatataatatgagtttttttttttttttttttatagatttatcaattgtactttaaaataatataaggacattagttttgaaattatatatgataaatttctagatttatcaattgttatattttttttttaaattctaattcaatttattgaaacgatataatatttcgaaaactaaccttataataatattcatctataataaactatttaaataagaattattttaagttcaaaatattttgtacaatattagtttatttttttttattattattaagagtaagaagtgaaaatttagtagaatagttacttattttattaatatatatttatataaaatatcaaaatttgaagttttatattattttatcacttaattatcattaaata

SEQ ID NO: 261747 - DNA, 642 bp, Cannabis indica
gccctctatcaaaaacccaatacttgaatggcactagtaaagcaccaaggttaaacttctcatccaccaaaggtattttatttttgcctccaataacatgacaaccttcaccatttatgagcaaaaaagtcactttcaagtgttctttcccatctcttgtctcatgattgtgaatgtaacattttgggtaggacatccaaagttgcacccctttaaaaataaaatggcccatttttttgtttaattgggccatgaccacaacttggtcaaagccatataaactttggaatgactgggcccaagatggagtaagtaaatcaaattgacccattgggttaattttgctcttgtgggccaaagctgaagtacatcttaaggaattgggcttgggccttacttggtagggtttgagtgcaaaaaagctcctcccaccatcagcctctttgccagccgtccctcttgtgcgactgctcctcgggacttcgccttcaagctctgaatctccggcgaagcttccagcgtccacgcctccgtcttctccgactccggcgacgacttccgtggtggattcggctccgtcactgcccacgacgtgatcgatcttgggatcggcaatgaaatccatcccaacaccaccacccg

SEQ ID NO: 261748 - DNA, 506 bp, Cannabis indica
ttaatttttatttatttaatttagtaccactttaaatttaatagctatttggaattttataggaacatgggaccaaaaaaaaaatgcaattgatatccctaatagaacccaatcaacgcgaaatatttcacaacaatcatcgagattctcattactactccgtctttactagtttcaagagttaataattccactacaacacaaccaagagagagtactcaaaatgtacaagaggatttagaatcatgcttttttttttataattattattattaattaatttgtaaattaataaattttgtattaatatatctttatcaaatatttctatgagatattttttatttattttaatagccccaatcaagaaaagaactcttggtcaaaatagaagtataggcacaagtaaaatagttgcggatacaaaacaaaagttgccagtaacaactagaaagggagaacttcacccggtaggagtcaatgcttcacgattagcatcagaaatt

SEQ ID NO: 261749 - DNA, 1889 bp, Cannabis indica
aatactctaattttttttagttttcaaataattataaaaaatttaaaaacgaagttcggtttggtcagcttaaaccgaccaaaccgtagattaaaaaggtcagttattttacatttgtataatggtcggtcggttttcggattataaccatgaaaaccgaattttagatttttttttgtgtaaaaactgaccaaaccgaccgttgctcaccccctaggctactccactcatcaccaatttgttttgagatgaaatcgcatgattattgtcgtggtatcatagccatatctccaacgggctttcgatccatgcctatccagatggttagccaatcctacgagatttaaatggtgcaaagacgcttgagatctaaaaaaaaataaagcgagcaaataacacaccttgtgataaggtgattcaagattggtgagaaaaaatatccactattttgagaagagatattggagaatattgtctcacttggattaaatataaaaatactgagtcatgtattagaacatgtgctactccactcatcactaattaattagtttcgagatagaaccgcataattattgtcacgtgtggtattcaacactttctggattgctgcgggatgggttgtcgagagacgatcactttggtacagaattatgaggttgacctcataaggaaaatagtggtttaatggtggtggttctttgatacttgtctttgatttattttgcctttgttttaataatggtatttttcaccacctaactagattagcatggattgttattattctgaaaattagagaggaatttgttttcttttggatagtcgggtttttgtcgattattttctgggatgtccttatttctttctctcatagtttttcagatctgactattgacgttgtgttttgtggtacttcatgttctttttggttgaatgccaaatcatagttgccatttgtttatttttcttatttatgatctaaataatataattgttatatcctaatttttattggaagtcattggaagatatccattggtaggtgaatttcatcaaatattcatttagtttgaagacttaatattcttcacataatgttttatgtttgattgatggtgacttattggatccttagttgagattgatgttaaaattttcttctagattattgtaaacggcttggtatgtctattattgttgattttgttctatgagccatatcttcatgtaatggactttctttgatttttcataaaaattcccattttctctccccaccccccaaaaacaagaattaatatatcttttctttataaatcattataattaagaataaattatagcataacaccaaatattttcacttcactagcaattaactcacaaaattcaaattttatcgataaaacccctcgaaacccacattcagttagcatttagtcagttccatctatttttgacatttaactatcatcttggttgtctatatatacatagagtattgtctacgtgaacacaatgaacatatgacacaatattattagctcacgtaaataaatatttaaaaataaaattaaagattaaaaataaattaatttaaaacaaaattataaattattttaaaatataaaaacattttgttttcttattttgttttctttttttaattttccctttttctttcttctttctttttgaaacccttaacttaatgaccaccattccaccactgaaacaaccccaccattacacaaccaccattataccaccaacactgaaaccaccctcaccgcaaccacaccaccaccatcccaaccactgcaacaaccactactactgttataattttttaaatccaaatcaatactgttaaaatacaaaacaaa

SEQ ID NO: 261750 - DNA, 1417 bp, Cannabis indica
acacaatgttgacttcttttaatttacaaaattataagtaagaagaacatggatctagggttcaagcagctccgttgaatgtaaagaataacatgagagatgatacctgggagacagcaacatcttcaaaaattcttacacctggaagtaagaagaaaattatcaataaggccaagtaactcaaagtaatattaaattgcagaaagcatcttcattgtttgagactcaaaaagataaagcaacttgatgatcaaaagtacttaatacttctcttttaaaataccctcgatcatgctattgtaatgattcttctagatttttgaggttattataaaaaaaatatatatatatatatataatctgtgtttcccaaaatgaaaccccaataacaccaaaaaaaaaagcttcaagtttcaagcacacgtcctagtaccttttctgcatgctactttcagcaagagaaagatgaatctcagtaaaattcaaggaaattaattgcatcacaaaaatagtaaacctttatttttgaccatttatcctgctccctatctttacaattccataaaataattttagctacaaaattgaggttacaagataggaacaacttttaacaacctgaatgctctcattattagcaatgagcagtaagctcggcaacctgtaggtaatctaaaagacagccaccaatcaagagaacaaaaatccattaaccctttatctaggtttggtctatcatgtatgctttaaaaggctaagaaatgataccattaactgttcgaacacatttccattcatgtgcctcgatcacgtcaccaacctccctgtcaaagaatccatctgtcccagcactagcagccaagtgtgaggactgacgcaaaagtgcatctggaccttgcccgattcttatcagctttttcaatccatgtgcataccgcctaactctaggtcgatgtccttccagattgatccttccacaacacaatttttcacaagatttacactaaatttcataagaaaatattattcttcaaagtctgaatgaaaaatattaagaacatgaaagaaaacaaaacagctccactagtaggaaaagggaaggctgataaaataaaacacataagataacaaggataacccagtccaaagcatgaacaatatttaaacaataatcaacaatgtctggaccaaagataagcatcaaaatcaaagataggtttttctttcctcaactagaatgctaacattatgttctattagattgaaccagtagatacaacaaaccaatttctgaaaaggagaacttaatcatgtctttaaccaaataaaataaaagctctttaagaaaaacaaaactaatgagcatcaactataatttcatatttcactcctagcttgtgtgatttaggaacctccc

SEQ ID NO: 261751 - DNA, 376 bp, Cannabis indica
atgatatttcataaaactaatatagttactaaaatgagatctcaatcatttatctctattaagccaagctcgaaggaaatcatcgtttcactactaaatacttataaaagttataaattccctatctatgattagcgcttccactcaattgcactcatgttctgaagatgcatgtattcgtccgaccaatctttaacaaacaactctaagaacatagataatacatttaagcagaacctaaccatatcaggattaagctttattgagctaagatcaattaactatattgacttagatagatatgtgttgggttttatgccgtaaataaaactccatttcaatgtaatccattttatttaacatcaataaagaaaca

SEQ ID NO: 261752 - DNA, 2182 bp, Cannabis indica
cctttttggatgaggtacaatataagaagttacaatttttgcctacacccatataatctatagtaagaaacataatcaataagattatgaaacttagatcgatgatttataaaaagaaacacaagtcaaatttgtcaaactaacaatgtgaaaaactaaaatttacaaaataactttacttaatttactctatgcgaccatgatgcttcctaaggataagagataaagagctaagagagagccaaaaaaagatctttcgtgtataatcctgcataatctcgaatgttatcagttcgagtacctagaccaaataatacaatgcataggtggggaagtaaaataaagccttgttcatacataggcttctgagcctcttttgctccagcccaagaggatacatttaatacataagccccgcacaagaggctaatgcactaatattatgcctctctcaattatttatgcataaaccaaatatccaccaaatcccaaacaacttcaaaacaattccaaagtgaaacaaagtacgcaaatttcatttttgttaattagaaaacaaaaacaaccatttggaaagcaaatgaaaacataattataaacgaccaccattcatcgttagaagtttgcaaggtgtgaagggctcaaacgaaagttacctgtttgacatgacgaacagcaactctccgatgattcgcttcttttagagcttcaatggacttaaaattaccatccaaacattcttcatacataatcattaactcctcagctacccatttataacccacaaaagctgaaaacatgagtattaacactgaataatttaaaaacatgtatgcgtttagaaagtcaaaatgtaattcgatttggatacattcgattttgatataattggaggtaatttcataatttagtatatttgtctgaacatgtaattatactataacaatataattagaggtaattaaagagttctaattacactcttcaattctaatagccttctatgagaatccagtgtaattacaatgtgtaattactaaaatcttttcattttatatatagattactataaaatattaagaattcatatgcaattatcatctcattttaaagtgtgtttggaaatcacagtataattagatttggatataattaaatgtaattatacaatttgacatgtttgtctaatcattttatttcattataactgtgtaattatactgtataattattaaaaaaaatattttaaacactaactactaaaaaatattattttctcactaattattttgtcaagaattcatatccaaacacacatagtgtaattacttaaactcactaattaggacggtgaggatgatgatagtgatagtgatgatgaagaacaagatgttggtgtgggtgattcatcgaaaatggcaattacggttagctcaacgaggaccttagaaaatcatgggtcagaggatatgcaagtagatgatgagcccaaagccacaccctcacttacaaacgctgcagtcgaagatgacgaatgggtagtggtcgggccaaaacggggtaagggaaaaaggaactaggttggtttgttgaatgaatctgaagggtgatatatatttatacaagttattcttttctttttccaatggaaatgaaggtttagtttcatagtcctactctatttatagagctagtgcattatttaaatagctttttgtattcaaaattttgtacctgttgatcagttttggttctcaatttttgtgtctggtttattgacttttcaaaaaacccttcattctttagtaattttaattcgaatatggacatgaaagaaatgtaaaaagtaaggagcaacattcttactttgaaatgatttacaatgtaattgatacaacacttatcattagtaatattcaccaatgacaaaattgtgttagaactattttgatcttgtcctttgtaaaagttactaattacagtacgaataagattttgaacttaattttaaatatttttcaatttttaatacgaataaatataaaaaaaatataattaattttattataacacttttatacgaggttattattaacttttattttacaaaaatattaattcaagtattattttaaaaataaaagtacaattagtaattttataaaatataaaatttaaaata

SEQ ID NO: 261753 - DNA, 566 bp, Cannabis indica
atgcaacacaaaggttacttgtgtcgaagctccacagggagaacatatattgctcgaaacgtcacctttaatgagcaagaatttccagcaaaatccatctcccaacagcaacaacaggtacaatcctcaccctccacattatttccaactacatccttttttacatttcccatggaacatacaatctctaactcaaatcctattgttgttgacacacctactgctggtgcatcatctggaagttcccccatctgactctactgatccacagcatgctatttctacaccagatgcacccatttgtgagaccactgagcctcatatacatacaccagatgccccctctaccaacacaataaccccaaacacaataccattatcaaccacaaatccaacccctgctcagttaccacctcctcaccaatccacaaacactcaccccatgacaacaagatctaaaaatggggttcacaaacccaaagcctatcttgccactaatcacccctacctgaatctctcactccaactgaaccaaaaaatcttaaacaagccctggccgatcctaa

SEQ ID NO: 261754 - DNA, 769 bp, Cannabis indica
cgccaaagatgaagagccacttcccaagaaagaaacagatgttcaacagattcttgacccacaccacatagggggcagctcgtgtcctctatatggaaacgttttcctataacatctcttaccgggagagcattagataagatgctccaccacatgaccttgtgtcgctccaagattttgctattccacagtttgttccaaagcttaggagcgacatcacaatgaggagctctttccagggattgggatagataagcagacttacacgagaactgcccgttgctttccagcgtccaaacccatctatctcgacctacaccagaggggtgaccccctttcaagatggccgcaattgtgtcctgctcaaacaggagcttcaacttttgtaagtcccaacgaccattgttaagaaccacctccgctacacgattaagattggtaggggcaccccttctacgcttcgggcaaaagcctttagcatgaggaatccaggggtccgaccagatttccgttgattctccattagcaattaacttacaagccccttttttaggatagagttagccttgacaacacttttccaaaaccaagaatcagagtttttgtacctgcaagagaggaaatcttttccccggaggtactttgcgatcaaaacttgagagcataaagattggctaccagtcagaatattccatccccatttagccaagaaggcctggttcatttctttagtctttcagaaacccaatccacctaacgatttagggag

SEQ ID NO: 261755 - DNA, 637 bp, Cannabis indica
acacaaccaattatttataatgatcaaagttttaccagcgcttatctgaagacagtcacgcgaccatgagccaccacgagcacaggccagtcttctctctctcgtccactctttctcgtaatttctttattattatttttatttttggatttatgtatttttgaaatttttgtattttacagatcctaaaagattttggggttgtgatttcggcagaagcatggcccttatctcgactcttaggggctcttaaggccaaacaaaacttctatcttgagtgctcgccaaagaagataaaggatcatgtgatgaatgaaacattagttaattatatagttgatgatgtttaaaaatcgtggcttatatcactataatcgacaattttaaactgtagcatatattataggcgacggttttacactgtaggctatgctattccttgactgtttttaacatcgcttattctactcagtattcgcaacgctcgtataggcgacaattttatgaaccgacgagaattctccatcgagaattattctggattttttagtagtgaacccacaaaattatatctaaaataagaaaatactcaaaacaaaaatatacaaaaaaaaaaaaaacgacaaataatatatac

SEQ ID NO: 261756 - DNA, 662 bp, Cannabis indica
ccattaagcaaaagagaagttcgaaattggccttgagaagcaggattggtattaggagaaaagagaattgaggatttatcacgattaacagattggcccgaagcttggaagtaaagaagcaaaattctgtttatggcttcagtggagtgagaggtgactggggcaaaaatcatactgtcatcggcaaaaaggaggtgagagattgagggtgcacctcggcaaattttgaggccagagaacagagcagcatcctcatgaatacggatggctgcagataaaccttcagccacaagtaagaagagatagggagagagggggtcaccctgacggatgccacgggaagaagagaaaacagttgagagttgaccatttaaggaaagctggtaggtgacagtggagaggcatttagttataagagagataaaattggaaggagctcctatatggtggagaaaacaggagataaaggaccattcgactctatcaaaagccttttccatatctagtttgatggcggcccaaccaatttttccagatttcctggtatgaatggcatggataatttcattagcaataacaatattatcagagatttgcctaccagttaaaaacgcactttgattggggctaataatcgagtgaaggaccgatttgagacgatt

SEQ ID NO: 261757 - DNA, 634 bp, Cannabis indica
ggcctgtagttctacccatcactatctctaccccctcccctctatatatatatatatatattatgacaggtatagatggtgagggtgacaatggagtggaagcggaaaaaaatggtgtgattgatatgttgatttggaatttcaagtttcagctccaaacattttaaagatttggaagatcgttgagtttcagccacacatttttaagtcttaaaagattagttttttttttctttttttttgggggggtttataccaaaatcaaccttgtgtttgttttcaccaattaccagtttggaccttagacttttataaagtaatttttgaaccttgttttcaaaatagtaccaattacgaccttataaccaatttgtatcaaaatatatattaatatgaccaaaataatcctttacttttttaatagtttcttttagaaatattggcggtaaaaccatctaaactttataatttttaacaattaactgcataaatcgattttttgactattaaactcacattctattttactctttacactcatatctaaaaatctctgttaaatgccacaatggattgacgatgtgtacacaagtgtacacgtgacccatttttatgaatccacgtaatattaaaa

SEQ ID NO: 261758 - DNA, 2330 bp, Cannabis indica
cttctaatgatagttcaacttcaaactaacatgccaatgtaagttctctttgtcctgtttgctggtctcatgatgaaacagttctccatagcctagtcacttgtaaagtgattcaaacttgttgtaatagagttaggattggtactttgataacatcaagtgtttcttttatagactggtgcaatacagttttttagtaagtgaataaagagaactgttcaatggctgctgtgtgttgggccatttggggggctcgaaatgatttagtttggaagggtaagacgatgcatgcataagatattattgtgtttgcacaaggctaccttaatcaatagaataatgctcaaaaatataaaatgggctcatcgtggtctagtttttaggcgagtgatggtgcagagcattgaactttaccacatgcaaatagtattaaggttaatgtggatgcaactttgtttgatggggtagttcttatggtttgggattggtgatgcgagaggatattgtatgcttattgagggtcgcatttgtttctctcatggctcgcttgaagtagtgttagctgaggccattgggattcgtgagaccttaagctggatcaaagagagacaatggcaggaagtaaccttggagacaaattgtctttgtgtcgtgcaagctttatttgtatgatctctttgtttggtcatttcattcatgattgcaaaactttgcttgctgttttaaagaatgtttcaattgtttttgttaagcagtgagctaatgtagtggctcatagatgtgctaaatttgttgttttgtattttgatcgttattttagttttgagtctgttccgactaaattcttaccttgtttggtaacagagattattagttaattaagatgaatttttcattaagaaaaaataaattcttattattgtattagaatataaaaaatgtgtagaatttgagtgtgtatttattgtaattttatctaagactaaatatcgggtggttgaccgagttttggttggcaagtttcggttaaaaaaagtgaactcgaacccgcccgttcatgtgtcccaggttggcgggttagggttgggattgacccgatcaactttttttttccctaacattcacctaattatttataaacatacttatattttaatatataactaaacctaaacactaacctaattatatataatcatataactaaaccattaaatttaatgaaatacatatacacaaactttcaacataaagaaaagtgtatgttcatataatatatattgtattatgtaaaaatagtcatataatatgtattgtattatgtaattatttttaggaataattaatattattatatttgaggtccaatgtatgttaagtgtaaacttgtattattattaaagtttaggtaaaagtaaaaaaacattgggtttacatgtaggtccgggtatcgaaacccagtcacctaaaaaattaaacctgaaacccacctgagaggtccactaggttgaacccgaccgtccaaaaggtctaccggtttggcgggttggccaagtccgagtcgaacctggtaaaaatgttcggtccaacttttacctaaatttgtaacctttacttatgatttatttgaatgaaggtttttaccctaaaaaaaaataaaacaagggagatatttgacttccaataataatattaacattaaagttaagtacaacatatttgtctatctatcctttgtattaaagtaaattctaacaacactgaaatgtagggttaggattacacaaaagtacttgtactttccattctaaaacctagcagaaaacaaaactcataaagagaggaggcattttattagcaattgagtattgttttacccaaattgtagaatattgataaacactgaacttaaaaatcttagaaatatatacacttttacaaaaattaagaagagtgactatcaaacatgcaaattgtacataaaacaaaccctcattatagtcatatgaaaaaaccagatataatgaatgagatgttgcaaaaacataactacccccaattgaagacactaggagtaggagtagccatcagcccaaaataaatgtttacccaattatcaccatagtcataaaactaaagttttaaggtttctcttacattgttataggttttatttccttttgcataataatttatcttgaataaaaccaaatagttatattattaattttggcaatccataaactatgttaaaattactcttttcagaggaaaattccaccacaaaatggccaatctcaaagtctgactctgacccaaaaaaagaaaaa

SEQ ID NO: 261759 - DNA, 602 bp, Cannabis indica
caaatccttaaggctaaatacttcaagcgcaatgattttttgcacgcacccactggccactctccttctttctgctggagaagcattctttggggccgggatcttctgatcaagggccttatctggaaaattggggatggtacccttgtcaacatttctgaatccaattggcttccttcccatggtaaagctgttttaaaacctggcctctcccctccctcccaaaatgtttcctatttcctcactgaagaccgacattgggacctttcaaaactccggtgttattttgatgaggagatgtgtaatgccattcttgctgttcccatagaccctcataacaatgatactctcatctggaatcatcaccattcgggttgtttcacagtaaattctgcctaccatttggctaattcaaacctttcctcacctggtccttctaatcctgctacctacaggcgttggtggaccacagtctggtcttctaacatccctccaaaaatcaaacattttgtttggaaagctttccaccacattcttccctccaatcttaaccttttccactgtaggtccactccctctcctttttgctccctttgtctatc

SEQ ID NO: 261760 - DNA, 1270 bp, Cannabis indica
cattcactttctctttctctcttcatcttcttcttctttcctctcatctactttatattattttataacaaaaatcaatatcacacctgtatataatatcaacattatatagaatataaagattcagtaatgaaccaacattgctgtgtagtttgggctaacaacacataaaaaaaacataaaaaaagccataagcaatacaccaaaaactgctttaagttctggctaaacaacataaaaaaaaacacatagagaagcctacagcaaaatatcaatgtattatatcatatcctagctaatcaacaaaagataaacatagagtaattttcttgaattcaaatcacttcgcttttgcccccgctttccctttagcttttgccttcgtcttctttggagatttaggtgggctttccggctcactttcaacattgtcaatctgtttcacaagtccaaacttgtatagcaacacagaaagcctaaggcgatactcctcaacatcgaagtcagctggaatattctttccctcaatgaaatactcagcaaaagcagcaacaaacgcaccacaatcactagaaacaacaacaaacaaaaaatcaatgttagatatgttaaattaacataaaaacaacaaaaatataacagaacataaacaattaacattcgtacttatccacttgttcaggaagtacttcagcattgacaatagggaaaggtgcaacaggattcacagatgctggtaaggtataaggaagctcatcataaacacccagcaaagagaaaaacaatggcaacatgacagaataaggttccaaagcaagcaaagaagcagccgcatacttcggtgtccttagagaattatacaaatatataattctagacttcatgtcaagcctacccataacccaatgactaacagtctttatgtgcaccaacaacaacacatggtcagcctgactccaacgtgtaccacatcgaagacgtttaccctttatgaaatgagcaatttggtgcttggaatgaacaagagacatttgttcattcatacttacatacttctcatgcaatgacctgatgctactattgaaatagcaatctgtagttgtgatcttcatgtttgttgcagtagaatacttagctttctttctcaaataataaaaaatcacatccatatgctgaaaaaattgaaaaaatgaataaacataaacaatactgacaaaaaacataaaaacaacaaaaaaacaacacaaaacttacagaatcactaagaaac

SEQ ID NO: 261761 - DNA, 625 bp, Cannabis indica
acggattgatgatctgcctttactggatttgtacagaaaagttgcgcgttgtgattatcattattaggagttgtagtagtactagtgtcgatgatgtcgtgttgatgatgattattattatctaagatttgggaaacgacgtcggatgatgatggcgcagaacagtagatgtcgaaagctctagagagagtgttgtattgatccatggagctaccgttgagacagtcggtgtagctagtaatattactagtattattactcatcatcaagtaattattattattattattattcgaattaatattaggaatattattgtacataattgaggaactttgattgttgttgttgttgttcatcaggaatgggaataataagctactgcaagatcgaccgtcgatctcgtagttgaaaggatcgtacggtcgatatggatcgtgatgatgatgatgatgatgattattactttcttggacattatctgacattgaaatatagagaagaaagaacaagaagagagaaaaattaagacaaaacccccaaaaattagaaattgagaaagaaagaaaaagagagagagaattgaaaattgaagctttaggttagtagagagagagagagaaag

SEQ ID NO: 261762 - DNA, 717 bp, Cannabis indica
aagtaaaagtttaattttaacgtacttaactacaatcctcatgggatcgacctcactcttggtgagtctactacttgtaaacgatacgtgcacttgcgtgttcaataatattacaacatccacactcacactgatacacactaaagcacatatttaaaaagttacaaaatatgagcaccaagacactttaaaacttggccaccaatagacactctaaacttggccaccaagactcattttctcacaattaataattatccaaaaaaaattacagctttacaaatatagataaataaataaataatttgagtcaaactctaatattacggacatctgcacttgtgctgattagattttatttcacatgtaaaagtaactgatctaatttaatatgcgcttattattatataaaattcagtacgtaagtatgcgtacgtaccgtttcaagtattaaaataatggctaattaggaattttacctcccgaattttgacatgtaccaaatcatgccccctgaactttcaaggttgttaaaaatgccccataaactattgagattgttggatttaaagacttttgtctaattttagtaaaaaaagtctaacattgatgaaaattcagggggcatgatttagtatatatcaaagttcgagggacataattttgtagatatcaaagtctagggagcatggttttgtacataaacaatcactgaaa

SEQ ID NO: 261763 - DNA, 779 bp, Cannabis indica
gttctaggctagtacaaagaaaaaggattaaagatggcaaaatatttagagaaagttcagaagaacttggagaagtttggtaattttaagattaaacaaattccacgagaacataactcaaatgctgatgcactggcaaagttggcctcgcaaaatgaacttgataagttaaatcttgtataggtcgaagtttttagcaacccaagtatatatgaaaaggaagaagttgagacgatagatgccttgccggcatggatgacacccatactaaaatatctactcagtagagaacttcctatagacaaaaatgaggcacgcaggcacccagactcttgtattttatacctcgttatacaatagtcgagggtaaattgtataggaggggttattcaatgcctctcttacggtgtgtactgccaacagaagctaacgaaataatcaaagaaattcacaaaggcttttgtggagatcatgtaggttggtaaagcttgtcaaagaaaattatccgtcaaggatactattggccaacaatcaacaaagacacataaatttgtcaagagatgcgacaaatgtcagaggttttcacatataccttgtataccaccaacacaactaaggatgatgaccttgccatacccatttgtaatatgggggattgatctgattggggcattacccacatagccaggaggcacaaagtatgcactagtagcagtcgacttcttcacaaaatagatagaggctaaacctctagtttctataacttgtaaaaaagttct

SEQ ID NO: 261764 - DNA, 2881 bp, Cannabis indica
agtactcaatcatagtgactaagacagtggtaaccaaacccaaaggagtgaaagagatacaagatcagatcttgataatgatctactacagaaaggaatcaagggctagagatcttgaacggaaggagtcattatattccgctacaatcaatgtaaggttttcttaaactcttatgtgtttatttcattattttagagaattcatttttaggatgttaatcaacatacttgttagtaaatctagatcctggtaaaatattcccaacaagatatcccatgaaagactacatagatagggtagatgaaattgttatgagccctagtaattcggagacatcctcaaatactattagggtggatcctttcttgaccatgacattccctaacttcacggaatatggtagattcattggtcaaagaaatataatttcttttgctcgtggggagacttatagatactcactgaatggttgcacccatgcacaagccttcttagtatattttgttgttttacagttgtgtcttcatttgttttgacttggcttgtatcttctagtgctgatattgtggttatgcgtgtagatactccagaatctaggatgttgaagtcattgagctataagatagctgcctttctggccaaggcgggagacacccaagagaaggagaagggtatcgccaagcctccaggacaccaaaaccatgtcctccctaaacttcatcatcattaaatgtctaggaaattgctcctcccacaatggcgaggtctacatctctggtttcctccgcttctgttggggtggacaaaactcataagagtactaggaaggcatctaaggcaccagttgctctgagggagcaagccttgggggaaacttcagtagccgagggatcaacttttgccattctaatgaatgtgggaggtttagatgacagccttcaggggcctgtctttccgaggaagggtgctccacgaagcctaaatgtagagagttaacttcttccctgagcgagggtgccaaaaaggctaaatcttcaatttcaattaatactccatctgatccattatccgcaacaccatcactattgaaacaacaacaacaaaaacaacatcaataacaaaaacaaacttctcaaaaaccacaacaatgacaataaactccaccaccacaataataacaaaaataaattgttctatctcaactaaatttgccacaaacaaagccgtttcccccataaaatccattggagcaacaaatttctaggctaacatcttccagccaggctcccagaataggcactcccttgggcaacatcctaccattggacttttccttccccatgagaccagccattcttagcaacgaagttctaactaagatgggcaagactgttgtcccccaaaggaggcatcatgaaagcgagcagttagtactttagaagagatctgcaaggctttcataagtgaagacagttgagattgtggaggggatccatcagccttcaccatcacgcgtagtctttgacatgatggcagtgagacaaaacttggtgcctagggttgggagagaggtggcaccttttggtgcgatgaggccttcataactaggcacgagcatgagtgaactcacttccgacaagtgggctattagaagtagccgagacccgtacaccctttctgtggtagcagacaacatgcggcaggagtaagttctagttttcgtgcattatccgtgttgtttgtttttttggttaggcactattatgtcattgaatctgttttgtgttagatggccttgatcgtagagaggacatctaaagaggtgggcaccttgaccattgagctagggtagctccattctaggaacaaatctttggtcattgagaatggagctctgcgcacagaggtggaacaagccaagacccaggccgcctaagatgtaaaagaagtctaagatgcatgcacggccaagtttaccctgatgaaaatgaacttagcgctaaatattggaagctatattaggaccacaaattcgtggttgaatggaatatccaatccagtttgacatctcttcatgaggaccttccccaaactagggaagatagtaaaagtgtgtggctaggctggtctcttaaagcgtaactttaaagacccaaatctaagaggttaactccctaaaggaggaaattcacaagaaagacttggtcattcaaggcctgcgcgatgattatgactggctacagcagttgaagaactcattgttagtcaattatgtccacttggatttgcactacaaagctacttatgccaccagcattgcatgcaaatgaaccatcgagaagctaaagaaggaggttcctcaaaactgtgttaacataaatgattctaaaaagcaagtgtcatagtggaatcctgacaactcctcgcaaaactaaatgaatgaactttatggaagaattcaagaatctaaaacctcgctcagtcctaaccctaaagtcctagagatgtgaaaatcctatgcgttgctggttgagataccctaactggctacacgaccgagacactcatagggtaaaaatatttctgcatataacccaccataaaatcctatttttactaataacttataatttaccaaaaccatagtgtgttctgacgtagcttgaacttaacactcatataataaacatgaaatagtaaaaactcaacaatgtattagagaacttactttatgtttggatagagtgtgggaagtcgtcatgtagatgtgcccaagactgttgtgtttgaatttattttaccaggatcttagatctactcaaaagtatgttgtttaacatcctaaatatgaactttctaaaatgataataaacacatata

SEQ ID NO: 261765 - DNA, 552 bp, Cannabis indica
tccaagtttccaaggatgagatctgaaggatgattctttttaaccctgtaggagggttccctctgaattggatcagtgattgaatttgaaggatgctcagattcttttgttgttgaagtttccgtagcaacagaatcttgcagtgagcctcgacagctgcttctgtagctctgtcaacttccttttcctcagcagcagacttttccagcaagtcttcaatttgttcttctactgaaaactcaaacaaatcctttagatcatcaacaacaacattagcagattccataacagtttgggttctcatgttatacacatgatatgccctactattgatggaatatcctaagaaaacaccttcatcactttgtgcatcaaattttctagtgtaatcacgatctcttaaaatataacaaacacacccaaacacatgaaaatgacttacatttggtttcttacctttccatatttcatatggagttttgagaatacctggacgtaagaacactctgttgatagtatagcaagcagtattgattacttcggcctaaagac

SEQ ID NO: 261766 - DNA, 767 bp, Cannabis indica
tcttcgtctgggttccggtcctagtctgagtcccagatctaggcaccgactacgggtctgttctaggccctgttacccgaatcccaagtcaagatctggatcactgtcacggttctcggtctggttttggttcaagtcccaggtcccatttctgagtttgggttcgagattgtgactagggtgcgtttctatgtccctagtctggttccatgttcgggtctgagttcagatttaggttcgggtcccgagtacaggtttgggtttggattggggtccggctcccaatttgggtataggatttggagtccgggtcctggtccagttacagttctggatctatgtccaagtcctagttccagtcccagtcaacttccggttttggttccaattttgggtcacagggtacgggttggggtctacttttgggttttggacatggttcaggtccgggtgtgggtttgggtccttgttagtgttcgggtccaggggcgggtcccaaatccagacaccgactaggggttttgtccaagccctgggtctagatctggatccatatctcgggtcggagtctggttctacttctggtgtcgggtcttgaactgggtcctaggttcaagttcgggtatggatcgggtactagctgtcggtcctagttctatttccctggtccatatcctgatgctgggtccaagtccaattttttgtgttcgtttgggtcccggtctaggttcgggttcgagtcctagtctcggttcgggtttaggtct

SEQ ID NO: 261767 - DNA, 508 bp, Cannabis indica
aagaggggcaagttaagccctaggttcattgggccatttcaaatactcggtcaggcaggcagcgtatcggctagccttaccaccagtgttatcggctgtccataatgtatttcatatttcaatgttgaggaaatatgtttcagacccgactcatgtcttgagttatgaagcccttgaactatagtaagacttgtcctacgaaaaaaagccagttcagatccttgatacaaatgaaaaggttctttggaacaagaccatagccttggtcaaagtgctctggaggaacagcaaggtggaggaagccacctgggagttagagtctgacatgaagactcaatatccagagatattgaggttagattttgaggacgaaatcctttaaaaggggagataattgtaatgatcacattttagaatatggattagtaaaggcaattaacattaattattgataattctctaaatatttattaatttatttaattgtgggtcccatttttagaaatgg

SEQ ID NO: 261768 - DNA, 520 bp, Cannabis indica
ttttttcttgaataatggagaaatagagggataatagtgcataattggtcgtatcatatcccacaagtacagggataatatagtactttttttgtcttttgtttttttatggggaaattttatttacaccccaaaattttttaaaggcacccccattttaataatttttattttatataaaatttttatttttaattgtactaatttttttttaacttttttcttctaattcataatcttaaaaaatatacatgtcaaacaaaattaaattatattttaaatattatgccaaaagaattaaaataaaaaattatatgaaattttcttagaaaaaaataaaaaatatatataaacatgagttagaaaaaattaagaaattgaaatcaatattttataaaaacttgttttataaaaatgttttcacttttttattttttaatttgagaattaaaattttaaaaattttgaaaacataaaaaaattactatcaatatttttaaaatatttttttttcttaatt

SEQ ID NO: 261769 - DNA, 731 bp, Cannabis indica
tgaaatagatgcattaggaaaaaattatgttggctggtgtaaaaagttgcagaaggaaaagaggttgtcggattgtgtgaaattacctgattgttgctatgatgtgagttgtgttggccaggaaaagtgccttcatcaaaaattacatttcttgctatgtaaatcctcccttgattattttcacataagtagcctttgtgataagatgagtatcccaagaacaggcactgttgggatctcatgtccatcttgtgagcattataaggccttaaatggggaaaacaagtacatccgaaaggtttaagtatagagtaatcaggttcttgaccaaatagacattgaaaaggactaatgtggccaagaacagttgttggcaacctgtttatggtaaaagtggcacaagagaaagcatgccaccaatatgtgagatcaagtcccgcatgagcaagtaaagtaagacctgtttcagtcacatgtctatgctttctttcaactcgtccatttttctcatgagtatgagggcaaggatggctaaacaagattccttgatctgtcaaaaacttggcaaaaggtttatactcaccacctccatcagcttgcacagctttaataggcaactcaaattgtttttccaccatgcttttaaatctaatgaacatatcaaaggcttgagatttaacttttagaggatatatccatgagaatctactgaaatcatccacaaaaataat

SEQ ID NO: 261770 - DNA, 1199 bp, Cannabis indica
gatgaagtctacacgcaacttgagaagtcccgtatagacttggagggcaaatgttgtcccaatttttgcactctgacatggcatcacacgatggtgacacgtggaatggactctgggtacctgctcacaagacacagacaaaacaggacacctcatacatttgctcacacgaagtcctctagactgagcagtgagcaatccgtgcagcacgccaacacttagcgaatttagctttcacatcgtgagtcatcaaggaaatccctataaatttgggattagattacagagatatggcaagctgtccaaatcccacgattagggtattctgtatttactatgcaatctttccacttatatcaattgtaactagaaggcaaatacttcctctccaagcttacaaccctataaatagtgattcatattcactcgccaagggtggagagattttgtctaagagtttatattcagagatactattgtaagagctctaagaaaataaaccattttccgtgttcttaagtcaatacaaataacgaggattaggctattaccgaactgctcggggctgaacctctataaaattcttctatctttatttgctttactatatttcatttgtattaaactacttgtcacatacaaaattagactcgttattgttggctaaaagcgaggtcaacaatcacaaacatcattttaaatccatatttcatgaaagtaaatcattaccacggctctaagaccagtcgttggggattatttaccagaatctggatttactaccatgtatgatatttaacatcctaaatatgaatttctaaaacaatgtaatttaaacacatataaagtttaagaaagcttacattggctacagcggaattaaattactccttccgctgtgatctctaacccttgtatccttactgtagcagagtatcaccaagatttgagcctgagtctccttcacttgaatgggattcttcacagtcttacacactatgattgaggactcacttgttatgtttgggcatgcactcaatcactaaggcttgaatttggtttgtgaagatggcaatatgatttcgaaattagaagaagaaggaagaagctgaagtctcagagattctagtatacaccactatcatctaacatatatgtaacgccctaaaataattaggcacgctacccaaaaatgctta

SEQ ID NO: 261771 - DNA, 3076 bp, Cannabis indica
gttcttgtgaataaaaattggatcgacaagcaatcatcatagtctgtttattttgcacatgtcgtacctgtttctgattactagttttaatatcagctacaactgcatgtaagtggtccacttaagatagtgtccatataaccttttaacaagtgccacctgcataccaccatgaagagatttacatttaggagcgtgtggtggaagcgtgctcattccaccacctttggagaaaagtgccattgtaaaagagctaataaaaaaaggaaaaaataaacactcaatggcattctctacttctcttctggagaaatgtagaatactttgtcccattatttcacctgctcttttgtcattggtacactgcaagcttacctctttggctctttccctaataagaaggtattacattacattattaaatggaaatattgtttcatgcttcaaaatagatacaaataaccacacaatactcttaagattaccattaagatcaaaataaatacattattaccttaaatattttcttatgaaaccatattttataggcatgtggatcaagggaggaagagtgcttataacaattttattttccttttatttaggaagaaaaaagaaaattgtagtttaatgacaagttgaacaaggaaaagaactatttttctaaatctgattgctgtattaaattagcaaggtggttcgaatgtgcatttaaaaagatttcagaacatggttaacaaaatcacaagtaagaagatttttgagtatttcaaaacatggttaacaaactcataagcaagaagatttttactacccatgataatggtgaaactaggaaaacttaagcaatagagtcatttttcaaatttcgtaaaatgaagaaatgtaataattatcatttttgaaacatattatatagtgcagaaacatttgagaaaagttgatagatatcaccacctgtgaggtcagattgttcttgacacacgtcaataaaagcttttgccacttttcctttgcctacagccgaaaccgattatgtcattcccctattctctggatcctaacaaggaagacaatccttatcatccttttcctcctgaatcagaatctcttttatcaccatcatctgcaaaagtccttcaccaaaaagatggtactagagaaaaaggaataagcaaaacaacaagcctggaagacattgaagatgaagggtcttcttcttcattttctcacaggaaaattgcaccaatcaacagatacgttcttgctggtgccattttggcttccaccaactctgttctactaggctatggtcagttttctagattaaaaaacagaaatttatagaatttcatcccagaatgtcaatttttgatcttgcttttgtatattattacagatattggggtaatgagtggagctgtgcttttcatcaaagaagacatgaaaatcacatcgactcaagttgaaattttggttggttctctaaatgtatgttccttaatcggttccctagcttcaggcaagacctcagattggatagggaggcgttacaccataatcctcgccgccgccacattcctaatcggcgccatcctaatgggtctcgccccatcatattcaattctcctcgtcggaagattaatcgccggaataggcgtcggctactccttaatgattgccccggtctacgtcgctgagctttccccaactctgacccgcggattcctcacctccctccctgaggtcttcatcaatatcggaattttactcggctacatctccaattacgctctctcgggcctaccagaaactttaaattggcgactgatgctaggacttgcggcggttctagcggtggtggtagcgatcggggttttgacgatgccagaatcgcctcggtggctggtaatgcgaggaaggagagacgaggcgaggaaggtcctaatcaaaacctcggagacgaaagaggaagccgaactgagattgaaggagatcgtcgaagcggcgttgttttccctcggcggtgcttcttcaagcagtgcatggcaaggagaaggagtttggaaggagatgattttcagaccttcgagacagcttcgacggatcctaattgccgccattggagtcaatttcttcatgcaagcttcaggaaacgacgccgttgtgtattacagccccgaggttttcagagacgctggcatcgcgaacagaagacagcaagtaggagtgaccgtcataatgggccttgccaagacctcattcgttttaatttcagccttttacttggacaagtttggtcgacgaccgcttttgttattgggctcaattgggatggccttgtcattagctgggttgggcctgggttctaagtatctccagtattcagatgagaagcccatttgggctatagttctttgcgttgtagctgtttgctcagcggtttcgttcttttctattgggcttgggcccataacatgggtgtactcgtcggagatctttccaatgaagtttcgagcccaaggttctagcttggcaatttctgtgaacagattggtaagtggggttgtgtccatgacatttttaagcatctctagggagatatcgtttgggggaacattttttgctttgtctgcaataatggtagttggtaccgttttcttttacttctttttacctgaaaccaaaggtaagagcttagaagagattgggaccctattcgaggatcgagtggaaaatgaccaatacaagcttcttctttcttgatctaatttgttgtttagagaaatgtaaagagtcccgcagcaagttttgtataataatggaaatgtcaagagtgacactccaatttcttgtaatatttacaatttattaactttggtctagttgtggtagatggaggaatcaatcagtgtgggatatgattagttttcattccttctttttttttttaatagtgggaggcacacgtgcgccggacgtgtattcaacatgattttttattttgaggggactcatttaattaaatatatgaaaaattttatttgcactcgataaattaactccaagaaatgtc

SEQ ID NO: 261772 - DNA, 896 bp, Cannabis indica
caaagtaaaaacagaaaattcgatattggggatatggtcttaagaagagtcttcccagccacccaagaacccggagtgggggtacttgggctaaattgggaaggaccatatgaaatcgaggacgaaattggttcaggcacttataagctaaaaaggatggatggaaccattgtgccaagggcctggaacgccgatcaccttagaaaatattaccaatagtccaaaagtgtaacttaggctttgtttaaagggttagtaccgtctaggtgtatgcagcctctgtattttaaataaaactgagtgccttaaaaacaaagttttcatgccactcagggggtactaaggcataccacatggacaggcaaaaaacaggtcaaaagtaaaacatcctgacccaaagggcaggtccaaaaagaaaaaagagtatgcaccaaaaaagagcatatgtataaacatcctgacccaaagggcaggtccaaaaagaaaaaatatgtgcataaaaaaggatcatatatatataaaaatcctggccctaagggcaggtcaaaaaaaatatatatacaaagggcccggggacaagccttaaccattgtttccctcaaaaataaaacagctattaaaaaaagattgtcttaaataaaagcaagttagctgtaaataaataaaaaaaagataagaaaaatctagggttgtaatgggtttgatttgtaacggcctagtcgatgcgaggaggaaggcgaggaccgaatgcgtgcctctagcattgcgtcaagcttcttcttcttctcccggaatttggcaatcatctccgcaggttttgggtagaagtcgagcttgatctgtggcctatttgttgaccagggccatgtagacgccatcatcgaagcgcttgatgc

SEQ ID NO: 261773 - DNA, 1462 bp, Cannabis indica
caaagtattagccaattgtctcttctcatccatgtggttgcttgagtcattagtaattagtcatcaatgcattatggttgttgcatcttaatgcaatctgctgctaagaagatctcgtccagttaagggctaagatggcctctatcactgctccatttctcggacatagtatggtttttttttttcaggaaggtaatgcagcatttggaagtgccatgtgttgttaagagtgaattgttccttatttatgataaaatttttaggtacctaagtagaataagatgatgatgatgctttcatcatagttattatgtgtttttcgtgttggattagtctttagctttataactcattattatacttttttttttataaaacttattattttaatttaattagatggagaagaaaaaaaaatatttgtactaaaagtgatgtagcagtaccacgaggtaaagcaatatggaattctgagagtgtgaattttttcttggaattctgtatcaaagaggttgatgatgggcatcgtcctactacttatttagataaaattggatatcaaaacttgattacaaatatgaaaaaagcaactgaaagagattacactagagcccagctgaaaaataagtgggatggattgaaaaatgaatggaagctttggaagcaactcaagggaaaagaaactggtttaggatggagtatgcaaaagaatacaattgatgcaactgaagattggtggaatagtaaattacaggtacattataatcttgttaaatatttatataaaactaaaagacttttttatgaatggtacatttaattaacaaaattccttttgtagactcatcctgatgctgcaaagtttcgcattcggggaattgaaccagaagtagaggaaaaattagataagatttttatgaacactgttgctacaggagagcatgcttggacaccttcatctggaataattccatctgagtctgaaaagccttttaatgatactgaaaccttacatgaacaacttgagagccacttgagaaacaaaataaaaaggtgaaaaataaaaaagggaaaatgaaaaagacagggcctgtaatgatatttgaacaaattggtcgccttgctgatgtcgtggagacaagaagtagaaatattaaaatagctaaagaggagaatagtaatgccgaagttatgaaaatgctaaattctttgcctgaaatcgaaaaagagagcaacttgtatttatttgcaactcgcttgtttatcatgaaagagaagagagagatgtttgcttcattggaagaacttgagttgatgcttacttggctcaagaattagtatactttggaatacttataatgcttaaatcgctcagaatagtagtatttattttctaaactttgtgttatgactttaatatatgtttgttatgttatttttttaattgtatttgctatcaaga

SEQ ID NO: 261774 - DNA, 521 bp, Cannabis indica
tcgtgttgtgtcgtgcttaaggatatattttttgtgttgtgtcgtaccaatttgtaatatcgtatcgtgacgtgcttaaactcgtatttttttgtacttagtcgtgctcgcgccttctaaactcgtgctgattttgtgttgtgtcaaaaagtctcatccttatttacaacactttactaagtacaaattatatgtataggtaccattctgccaatagaacaaggcgatatggaatccaagtttgaaaaaaatattaaaatagtgaacatttatatatgtatacatatatgggtatgctcttaattggtattacccatgtatgggtattttattcttgaccattggatcaaatatctaatggttaatatttataatcattaattaaatattaaaaaattaatatttcttattttgttattatctatattcctaaaatagataaaactattaatagaaataaaaaatttataaatggaattgttatttaaaaaataaaacacactaaaaaaattaacaaacta

SEQ ID NO: 261775 - DNA, 710 bp, Cannabis indica
caattccccggcaacggcgccaaaaacttgttacgaaaattattgaatagtacgcaagtgcacgtaatcaagtagtaaaatcacaaaggtgaggtcgaaccagagggaatttgattgaataccgctagactagattatgattctatttggcaaaccaatagtttttaagattataaacagaatgtaaattcatgaaacttaagtagacaaataaagattaatcaggatgagaaaatagggaagagaatcctgttgttttgtttacccaattgttaatgcctatttgttatcattttcttgatgtgaatgacagattatacaatttaacctgactcttttaagatcttttaggttctaaatcacatgttttataattaaactcttaataagaatcacatgtaatcagccttaagcaataatctaagtgtcgcataggttacgcaaatactctcgtttcacataaaacatagattatccaattttagcattttcaattctcacttttcagattttgaattgagatcatagaacatgtagaaggtgatcaagcttacacatggaattaaacacaaatatagataatctcaaaaatcaagattaaaggaatggcaattgacattaaccaggcaaaatttaaaacaacattcatcatcctccctaattgggaatttagttcatagaaataaaataaacatccatgattaaatctg

SEQ ID NO: 261776 - DNA, 681 bp, Cannabis indica
cgacttgaaatatcctcttgatcgagagaatagatttgaagtttttgagaagtcaaggaatcctcccgtctgtaagtatatatatatatgtatgtatttgtataagaaaattatttataatatactataaagcaagaatgaagaggagaattaagtactttcataccccaaaggatgcaattgtaggaattggtccaactggaatggtagtctgaattgatccactaatggcctcatcatggctgctatttgctaagcaaggcaaacattgcaacttgtgatttgtatgagtttcagcacctttttcagataaattactaccccaacatgcatcacctaaaacactttggtgaccctccaaaaaagctgacatcatattattcgatatagacctagaaggaacatgacactcaccaaccaagccatgtccaagagggtctacaggttgtgtttcttgtgaagttttgtgtgccccagttttggtggtaagatcctcttcttctgtaggacctatcaaagatcaggtagtgattaatatatataaatatgggtatgcatgatatatgcatagtcacatatataaatgtgaatatgacaaagtgatgaaggcataaaaaaaagaggctgacattattaatacataaatatgtaataaaaagatatgcatgataagaaaaaaat

SEQ ID NO: 261777 - DNA, 586 bp, Cannabis indica
gtttagatcagtgaagtctatacaaactcgccaagttccgttaggctttggcaccaggaccagattggctagccattccgggtagtaaacgtcgcggattatgccgagcttatccacctctttctctaaggcctcggcctttactgaatcgaggggtcatcgcttttgttggaccggtggcatgtccgggttgacgttgaggacgtgggtgatgacatgggggcttatgccagtcatgtcctcttggcaccatgcaaaaacgtcgatggcgcccttcagtgttttaattattttttttcctccgggtctaggctttttcccagccaaagtaccttggtggggtcgaggtcacacaccgatacctcatcgacgtcctccattggttctacgattttttcggaccccacgcggggatccaactcgtcttcttcagccatttctggctcaatagtttcccggaccatcagcatcggtaggtgggaggcgacgttgtagcattgccttgcctccccttgatttcctctcaccgtccctatcccagcttcctgggttgggaacttcaagcataagtgtcgtattgacgtga

SEQ ID NO: 261778 - DNA, 1616 bp, Cannabis indica
taattaaggcgattgttcaagctattcctacgtatacaatgagttgttttcgtttacctaagaagacaattaatagtattcatagtatggcagcccggttttggtggggatcgtcggaaaaggatgcaaaaattcattggtgtaagtggtctgttctttgcaagcacaaggagcaaggtggtcttggatttcgggatttgggtctcttcaatcaagcccttcttgctaaacaaatatggaggtgtataaggtacccgaattctttgtgtagcaaagtattgaaggctagttactatccgaatgtaggggtgttggaagctaaatgtgggaatcatgcgtctttcgtgtggagaagcttagtgtgggggaagaagattattcaagcggggtatcgatggcgaattgggaatggcaattcggtgcgagttctggatgatccatggttgcctaggccggttactttcaagatttatgacaagcctccgttaccggataacctgcatgtcattgatttgaagaaagggaatggggaatgggatgaggagtttgttagagctgtcttcaatccaacggatgcggagttaattcttcaaatggctacttcggaatgtgacattgaagataagatattatggcactacagtaaggatggtgaatattcagttcgtagtggctatcgtatggcggcggctttggaggttagagatatccagtctaatacggaggctactaatcggtggtggcgacaactttggaagctcaaaatcccgccaaaggtgaaacactttgtgtggaagatggcccattcttggataccaaccaattcggctcttgctcatcgagaagttcagattgagccttactgtacacggtgttcaagtggtgcttatgaaaatgtctttcacgcattatggagttgtagagtgaattgtgatgtgtggaaaatttctgggttctcaagcaaaattaagagacaaggtaaagaggatgtccttgcttttttgatgagaatgtcaagtagtttggctaaggaggactttgaatattttctggttttgacttggaacctgtggtacatcaggaattcggttaaccacgggggacacaaacccgtggctgctgccattgttgaatggtgcagcaagtttctcgctgagtttcgggatagtaatgtctcacagaaggctggagcagcgagggctgctgctcgttgggttgcaccagttcgggggtcctatacaatcaatgtggatgcgggagtgaaagtgggagaaggtttggcaagtgttagttcagttatgcgtgatcatgaggggcgagtaaaggtggctgctgtccgagtagtggaaaaagaactttctccccttcatgctgagcttactgccatagcagacgggatcaaggctgggttgcagcagaagcttccttcttttcatgttgaaactgattgcttgcaggccgttaatttggtgttgaaagacgatgggggctgtagggatgttgatggacttgttactcaaattaggtgtcttttgcaagatgtaagggttcatggaatatcttttgtttatagggaagcaaatcaatttgctcatgtattagccaatgaagctttg

SEQ ID NO: 261779 - DNA, 613 bp, Cannabis indica
acaaccaagctttcaattgagcaagacaatactcactaaagcacactatttcaaaagttagaattcatgacaattctaaaaatgctatctttagggaccgtcgttaataaatttaaataagtattttaaagagtcggaaaaaattaagtattttcgatagtttagaacactttttatagaaatagacgacgattttaagttaaagtaggaatttttaattgaggttatacctgacgatttaaaatcgtcgggtataaccaagtccaataaaaccttacacactccactttataactcatttctctcgatcccagcagcaaccaccaccaaccacgctcgtctccacactacaagaaatatcacttttaccagcatatttttgtgctggcaaaagttggtattgcgctggtaaaatagaatttacttgtgatgtgttggcaaaaggagcttggcaaatcaatgttggtattagactttttgccagcataaaatgaaaagcgttggcaaaaatgacttttcccagtgcgtaaatgtgctggtaaaagttagattttagccactgcaaatgtacgctggtaaaactttgacctctttgccagcgcagtttgcgaaa

SEQ ID NO: 261780 - DNA, 401 bp, Cannabis indica
atccttcgagtctgtttttcagtctgtccacaataaacccgaaatcattacatttgtttcttgacagggccatgggatttcccaaatagaagcctccaaaattcgatttaggcatttggagaactcgttcaatatccctctttctaacggaagaacacccagctgagaaaagaatggatgacttgttcttgctacacatttgtcccgaccacgtctcatacttctggatcaattcttcacacaatttgcagcctgcacactagctcggacacatatcattgtgtcgtcggcgaacatgaggtgggaaataggggtaacacccctggctattgagatgcctttaatatctccattatccctggccctaagacgaagcgggataacacgatcatgacacaaga

SEQ ID NO: 261781 - DNA, 1480 bp, Cannabis indica
ttttttaaaaaaaattactttatcatcaactttaaatttttgttttttgttttttcgtttttataatgtggcatatgtaagtgggattatagtaaataatttttgaagtacttgtcaattattagagtaatttttgtttaaaaaatataataaatcttatatgagagagaaaataaaaaaataatatgtatttattattttattttttttatcaagataatatgtatttttttggtaactataagtattaccttattaaaaatgctctaacactactatgaattggttatattgattgactatgtatgagtgattaaaagagaaatactaaaagatataacataatattttttttaatgtcatattagtattattgtaattaagtagtgtcgtataagaaaataatttttaaataactaattatgagacacgaattctctgtatcaactttcaaacacgtattaatactatcccttctttttcttctttcttttgggcgacacaatccgtttttttaggtaatttgatcaaaattctgagagccttacgatttggcgggaagaatgagcaggaggggtgacgtaagcgatcagatccggacacgtgtggggaaaacaactgtcgggattcggggattacgaggacagatatacataaaatattgggttaggttttttaagttgatttttttttctattttatgaacaaagagttgatttttttagtattttttttattgattgaattagtaaaataataattaaataaaataaatttgtaacagaaagcacaagtggctggcgtgagcgtgcgagagagctgtcagacacgtgtgtgggtcgctcaaaggacatgaaaatgggcccctcattttaaaatcttaggcccacacaacaaaacgacaattaaattttgtgctcgccacgagagaaatttcaattcaaaatcttccacttactcttttttttttctttcatactttgttttcaggggaattaattcactaaatttgatatcattcacgtcctcaaagtgaacaataaagattttcatttattattatttattgggtcaataatattttaaatactgtattttacaaaatttattaattaaatttttttattttattaaataataattcaaattatgtatttttaaaaatagtacaaagtatactatgataataattttcgtcaaattaaaatttaataataactttatttagaagtattatgataaaaacaattatatttttcttacatctagaaatgagttgtaagtaaaaaaaaaaaattaaatttaatgtctattttatactattttaaaaaatacaggattcaaactgtaatttagcaaaacagaaagtcaaatctctaactttttcaaaacacaggtccaaaatgaagaaattacactgtatatttcttattttaattttatttttcttttattactctttaatttatattcaatttta

SEQ ID NO: 261782 - DNA, 636 bp, Cannabis indica
ttatctcatctaaatgaaacaatctgtctcaacaatcattgatcctttatagacgatttacatattaagtatagaaaaattattgttttgaccttcaatgtattttatccttgtaacacttagttacttgtaaatgatatttcgggaaactaatataattactgaaatgagcgctctatcatttatcatgttaagccaagctctaagaaaatcatcatttcacttctaaatagttatagaagctataaatgttcatatatatgattaaaactcccactcaattgcactatcgagttctcaagatgtaagtattgagctggttctacgttaagcttgttacgaacaagtcaaagaactcgtgcaatacatttaagctaaactttaaccatctcaagattgagatcaaatgatctatgatcaactaagtgatattgacttagaaaatatataacgggaagtttatgatatctttttcactgtcaatatcggtccaattcaatgtatagtcgatacatttgatgctagtttactttactaatgacttgaaaaaaaatacttacacctatccaagtgtaagtacgatctatgtatatctatgtctagtgtaaatcttgtgtactgataatcgtgagactt

SEQ ID NO: 261783 - DNA, 1042 bp, Cannabis indica
tactaaagtcaggatagagttttactgttagactacagttaaatacaggatattttcttggaattgcaagttgttgcttacttgccctctattaggaggaacttgatttctgtatctattttggatagactaggttatagttttcttttggaatcggaaatctgattttgtatcgtgactctatgagggttggtaatggaagttcatgtggaactttatatataagcttgatttatatgatgttgtttctgctacttctccctcttgcctttcttcttcttctcttaatgttgttgttggttccaaacgtgcaagattagaattgaaatcttccatgctttggcataaacgtttgggccatatttctagagatagaatggagagattggtgaaagatggtgtacttcaagatctcgatttctctgaattcactgcctgtgttgattgtataaaagggaaagttaactgataaggttagaaagagtaagtcagataagtgcacagatgtattggagcttattcacactgacatttgtgggtcctttgttccacctgctatgggcggctataaatacttcattaccttcattgatgatttttcccgatatggtcatattgagctcattcgtgagaagtctgaatctttaaatgccttaagattttcaagacgaatgttgagcttcaaaagggaaagaagattaaagttgtcaattctgatagaggtgaagagtattatgggcgttatgatgaaactagaaggaaccccgggccgtttgccagatacttgcagaaacgtggcattgatgcaagatatatatataatgccaagtacaccctagcagaatgaaattgctgaaagaagaaatcacacactgcttgatatggtaagttgtatgttaattcattctagtttaccatagtttttatggggtgaggtattaaggatgctgcttacatcttgaatcaagtgcctagcaagtcggttccaaagacgccatacgagttgtggtcaggcaagaaatcgagtttgcattactttcac

SEQ ID NO: 261784 - DNA, 2185 bp, Cannabis indica
ttcaaagcagtctactatatataagtattgtgttaaacataggtgactgaaatagagagagactagaaacgaagggagaagattggaggcatttgagcgggaaggcaaagagagtgaagcggtggctatgccggcggagggaagaaaacgacagccaaaaaccgcacaagtaactggccatggaaactgaaagtggagggaggaagaaggtgtgatgtctagaaccacaatctgttacgatatacatgtaatacttcagtttggcattttcacaaacacttggtagacattggattcaaaaactagttcagaacgaaaagcatgaaactttacagcctttctgttgatgggttttcccaaatgtctttggtaagaagaacttggctcgtagaatctttgtttggaaaccagagcagattcatgaccactagtaaacgggtccaagatcgaagcaagaccaagagagttcatgatcttgaaatagtgacagagaagtggaagatagcttttaaagctcttttattaatggaggttctgaagcaagagcctgaaatggtaatccctgtaaggtctctacaacagtacaggaggcagattaatcttccaaagcctcataaggtttctgattttattcgaaaatcgcctaaacttttcgagctttacaaggacagaaaaggggttttgtggtgtgggatgacgaaaagagctgaggatttggttgaggaggaggagagattgatcaaggagcatgaagacaaggctgctgagcatgtcactcgattactaatgatgtcaatcaataaacgccttgcattggataagatttcccatttcaggagagattttggcttgcctatcgattttcgaaccaattgggttcacaagtatcctcagaatttcaagcttgttaaagatggtgaaggtgctcagtttctggagcttgttgattggaatcctgcttgggcaataacagagctggagaagaaggtaatggggattactgatcccagtgatcacaccccgggaatgctttctctcccttttcctttgaagtttccacctgactataagaaagtttatagatatggaggaaagatagcacattttcagaagaggtcttacttgtctccttatgctgatgcaagaggacttgaggccggttcacctgagttcgacaagagggccattgcggttatgcacgagctgcttagcttcaccattgagaagagattggttactactgatcatcttacacattttcgaagagagtttgttatgcctcagaagcttatgagacttcttttaaagcactttggaattttctatgtttcagagagaggaaagaggtttagtgtgttcttgactgaggcttatgaaggtacagagttgaaggagaaaggtcctttggttctgtggaaggataaagttcagagctttactggttacagagggaaaaggaagaacttcgaatgttttgatgatgaatcagacatggaagaagaagaagaagaagaagataatggctcggttcggagcaattctgaaaatgagagcagttgtttggaagttgaggaagaagaatgtggtagtgatttagaggagagtttagtagctgataatgctgaaaacgaaatggagattgaagaggtttgcaatgcgtacaaggacaaggagtatatatgaaagtctttactttattataatacagttgattttgtttttttttgttctgccagtgttctagaaatttaatgcaataatatacattacttttcccagaacaatgtaactagacagaacaaaagatataagggaattatgactttaaactaatttcctcagtcacctatgtttaatataattcttatacatatatagttatgacttaaatctaatttggtaactaataattttcaattatttatttattagttatatataacttttgttagaaaggatgtgtcaaaaaaaattgtttgaaaggagaatatgttagaaatttattgggggtcataactatacatatgtgttgggtcataaaaaaaaataagttaaatttatatagtctattttagaataaagtttatgacttaagggtattattattattattttaatatgtggatactttaagggtaatttttagtttaatgaggggccaaatagaaatagtcaataaatatta

SEQ ID NO: 261785 - DNA, 1334 bp, Cannabis indica
agcgagtgaagctgctatgttgtgttggagtatttggaatactcggaatgaagtgcaatggcaaagcaaaaaccgaactgctttggaagtggtaagatcggctaaacatgtccttggccaatggaaaattacaaaatttgagtctcctaatgctttgtttgctacgggggtactacagatagtaattgttggcgtaaacctgatgtttttacggtcaaggtgaatgtcgatggtgcgacttttgaagctcatcataagtttggttttggttgtgttgctcgtgatagtcatggcaagcttattgaagctatttctgggagtagatggggttgtgtgtctgcagagatagctgaggtgattggtattaaggaggcgcttagttggataaagcgcaaagggtgggatgaggtggttcttgagtctgatgctttggttgtggttcaagcgattaatagctcagttcatatgccatcccaatttggtttgttagttgaggactgtcgtactattttatctagtttaaataatgtccttgtctcttttgtcaatcgatctgcaaataaggttgcccattgtgttgctagggcatcttatttatcgtcaggttgtatgtttaatgagctgaatgctccttctttcttgtgtgacattgttcagactgaggcctgatttttaatgaaatccttgattcaatatatatatatatatatatttcactataattttagtaggaacattagaagttaaccataattcatgataaatttcaaagattaaggtagacttattttatcttaatgatgtaacttaaacctatcatagttagtttaataagataaaaaaatacaaagaaataaaactgggtagtaataacaattagtaaatataaaatttatcttatatatgcgactgagagagaatatgaaaaatatataagcttatatatatgtattgccatttcataattagcacaaaaaatatatattctaaaaaacgtaaaatataattgacataatttataaatactataacattagcacaaagcatatatccatagagttagattaggtaatgaagaaaacaactacttttctcaataaaagaaaataaatactataatattatagttgtataaataagttcttctaaaaatttgaagggttatttgcggcaaaaccctctaaagtatgcaggtttttgcaactaaccccctaatctaaaattttggtggtaaaacctcctaaacccagcttctgttagcagttagccatttccgtctatttttgggtgttaagtgtacaggttggaatgtctacgtgtacacaatgtacacg

SEQ ID NO: 261786 - DNA, 560 bp, Cannabis indica
aacatgaatgcatgttgaatcttttcaagatccgatcaatgtaagttttttaagacaaacaaagaataccattggccctatcttgaaggatttgaatcccaaacacataagaagcatcgccaagggctttcatgtcaaaaggtcaaacaagagttgttttgtctcagccaacaggtcagaattattagatgcaagcaggatatcatcaatatgtagtactaagataatagaactgctcccactgactttcatgtatatacattgatccaccacatcctccctgaaaaacattttgagtaaaaaccatatcaaccttgagataccactgccttgatgcttgtttaagctcatatatggacttcttgagtttgaaaaccatgtgttcttcgccaaatttctcaaaacctacaggttgagtcatgtacacatcctcagataggttaccattcaagaaggcggtccttacatccatttgtttgagttctagatcagaatgggcaactatagccacaatgattcgcaacgaatccttggtgtaacaggcgaaaagtttctttgaa

SEQ ID NO: 261787 - DNA, 873 bp, Cannabis indica
aattcgaatatgagattaatttggggttttatgtttttcgtttttttttttttgagtaattatataaatatgtgtctatataaattgattcttgaatgttggctgttcttgtagccctccattcaacaggtttatagtcagatgctttccttacctaatttgaagatgaagatgtattgggcaagaccaagttgaagatggtgtcaattgaattttttgtttcttgaggctgttaattttttttttggtgaaatgtagaatatggccactgtcttttttgaattggggctcatttttttgttgtatgatttgctcataattcgttatgaattttttatattttttttttaaattaattgtaaatttttttatgttgattttttattaaatttatagttaaactaaaatatattaattcataattaatatatatggttaactaaaatattatgaaattataattaattaaattattattgtaaattttataatatagaagttgaaattagaaaattaaatattaatattttttattgaaaaaaccaggatatagtgacacactttgagtgtggttgttattagaaaaataattaaaataagtaaataaagtgatatagtgacgcgctgtttgtgtagctattacttttacagtctaacaaggtgtgactctaaaagattatagttacgcacgatgagcaactctaaaagggtttagtgacacacactgaagtgtcactaaatagtatttttccagtcacccacattagtgacacgcagtgaagtgtcactaaaacattttacagtctctcaatgtgggtcactgaagcccatttttgtagtagtgggtagcggttgattactttactaagtgga

SEQ ID NO: 261788 - DNA, 565 bp, Cannabis indica
tttttaggcattcctcatgactttttttcatatttgttagattttttttacaaaaatatcatatttagggtaattaagtttttatgtcatatatatgaaaacatatttttattttctcgtatttttgtaaatagccctatattttgtcatgacctattactacacaataggaaaccatctttattgggccacgtcaaaactatagctaaagtaaatttaaatgtcaagagcaagagataaatgaaatgatagtcaacaaatcaaacatccactctgcaagtaatcttcagctgccacgaagccgcctatttctctcctctcttcaacagttgatgaccgcatgtctcccacttctccactccgttttacacaagcagtcccctccacttgacatgagtctctctccagctgcaagtgtctcaactggtgctttctctccaaccaaactagcgtaaatatacaagaagtgtttcacttttctcagctttttgagccactaaacctattaagtacactaaaataccattttggagagcaaagtgtgactataaatagtaccctttgg

SEQ ID NO: 261789 - DNA, 768 bp, Cannabis indica
cggcagaaattttgtacttttatgagctcgtttccatccctaaaaagggagataaacttaaagacggtttttacggcctccgggcccatcctttgaatgaggacccggtcccttacaaccagcagaagcacgtgaaggaatatcgtcaccgcttcttcttctcctccggtttccaggccatggaccacccggagcttctcacggagtgggttaggatccctccttacatgcggaccgagcctactcaaatatttctgcaacgagccaagacctttgccacgtacgacaagaaggacctcgatgtcgggcagttggtcacgacagagcactgttggaaggccaagttgatcttggggcaccagtcggtggatgacttcaatctctctaaagtcatctgcccgaacgtgagagctccggccgcagagaaggtgttctgagacgaaatcattgctatggcagaggacaagtaccagaagtacctcttcaagaggcaacaggagctggcttacatcaaggcccaggcgaccgccggaagggcccttcgtattggagctctgtcggagcgaaggacccctagacccaagcccatggtcccagtaccaaatactgaggctcccgatgccagcacttcgggttccggtaagtcccctttaacaatacattatgttccttacgtccatgagtataccagccttaggcctatagggtttgatgagcgtctccgtaggtttaggatgccttccacccggtgggggaatcatgccaagg

SEQ ID NO: 261790 - DNA, 987 bp, Cannabis indica
cgaggatcgtacgctccaggcctaaccgccttgacatgtacaatcttcacctgctcgctctaacggctcatcagctttatccttgcccttacctacacatagcaataacactgtgagtcgacagactcagtaagaaaagcataacataataaacatactaatatccctggttataatcaggcgcccatacacctaaccataaccctaactgaatcaggattgatcttgacaaagtatgactaaccgcgcatccagcttatactcagtactctaatcgtactgacgtggtaacagttaatccatctatctgatagcctagcatatatctgatggcatctcggtgcaactctatgtacacctcactgttgccctgatatgctaatctgatggctatataaatttgcctaacatatatataatatgttattctatcggcaactaacatgtacgctaaacatgtatatacatatgcatgaaattatactaatcttaccttgattctgaattcaggtgtaccggccaacctgagtggaaaaactggtcggcgaattacaggctcctaaatcacattaatcataacataggtgagtgacacgctaagtcactttccggggtcttaaacttgaaactaaaagttttcctatcgataattaacatggcaataccctaaacaacaaaaaaaaaataggaaaaactagggttctcaatattgccccaactggtagaccggttccccaaccagaattccggttctgtggggattcctgggagccaaccggaattccggttcctacaggcccctctgaaccggaatttcggttcagtgcgggaaagatcgaaaattcccctatctcaaccaaaacaatcccaatccacatgaaaccttccagacctgttttatgcaacctagagagcatatccaaggcaacaaaatactactacatgcacaaatacaaaaaccaccatgagagtgcaaagtttgagctc

SEQ ID NO: 261791 - DNA, 580 bp, Cannabis indica
cgcctaaggtagttagggtgttacattgactctcgcctaccgggacaacgttggattctcattttgatcgaataaaaggttgctaaaatggttttattttagatgagctgactactctattcaactaatgttatctttgactctcgcctaccgggacactgtatttcattatgttggaaaccttggaaaataaaatatgttagagttttagtatttttgcaaacatatctgattacttgttattttctgaacttgtgtatgaattttgaaccaaaaacttacttctgtttattgatatttgtagtgccgaaatgtacaacccacatcccaacactcatctagaaattgcctttaggaatgaacttgaagatgtgaataagactcctggtcagagtaatacttcacatgtgctcatgatgaacatgaaattccagaaagcagataagctgggaattgttcactctgaagagcaaatagttcatagctccatcaatcctactaattcaagctcagttgagaagattagagaaagtgattccacttcctcaaattatacttcacaacagatagaaccaacaat

SEQ ID NO: 261792 - DNA, 623 bp, Cannabis indica
acattaagtttaaacaaaattaaatatacttattggttaacccgtaacttttcgggtgatcacatggacattaatatttttatatttagacattataagattaaatgaagataaacttatttttataaaactaaaaataatttataaataaattgaataatatctgaaacatcatatgagttacattaaaaaaaataaatattaaaatagttattttattatttatatatgtgtaaaattctgaaataactttttttaatggaaaagtaactaattgatatcttattcacatcaaaaacaactaaatgattgtctttttcaactctcctaaaaaacgaaaatttgtggaaacgagatttttccagtttttttttttttttttattttttatttctagtaataatagagcgtattatttgtagttaaaattaatttttaagtttaaaggttatttttaataaaattaaaaatttaattttaaagtataaataattaaaaaaacttacctaaaaaaatttatttatttttagttttttaaaactaccgaaacaagttaaagtagtgggaatgctagttggtacgacaggcaacaaacgaaccgtgaattgattcatttgagctgg

SEQ ID NO: 261793 - DNA, 593 bp, Cannabis indica
ccttatagctttcttaagctttcttaattattatattatattggttgccgaaaacctcggtcaacatacccttagttatataagggtattattaacattatattcattctccaaatagaaacagaagctttgctccaaaatctaaatgacaaagcctccatctccttatttttttccagttagtttagatttcttcaatttttttttgtaaattatcgtgatttctcccaaaaggtgatgaaatatttttctctcattcatttattcgattcattcattggatccaatcattttccccttaattcctcacaatcgaaagcgacgaacctctgttcatttcttgttcttcttctagttttctcacatctccaaattacaatgattacccccatacaacgaccaaagtcagacccggccctgggtataggcgggctaggcttgtgcctagggcccacctagcccaggggcccaaaaaaaaatattttccttttaaaattatacaattttttttactgattttgaaaaataccatatttttttctaaataagggcccaaaataattttttttttatggcccactaaaagtaagggc

SEQ ID NO: 261794 - DNA, 432 bp, Cannabis indica
aagactctcaaccaccaaacaccaagagcatcaggaactctactaaagtgggagcgagaatttattcaattatagcatccactatcaataagttctcaatatgaataagctagtttggctaaggtgtgagcaacaccgttacaagacctattacaataaacaaaactaacaacttggagcaataatataagtattattattaagggtaaagaccattttggactatgtgttttgtaaaagttatcagttagaccctctgttttgttaaatgacaaaatggaccatatattttccaaaatagtaataataggaccctgagctcaattttcaaaaaaaataatttttaatataatcaacttttagacaattttaacacgaacagatatagaaaatgtaacaaattttgtcataacatctctagatcagattatt

SEQ ID NO: 261795 - DNA, 1027 bp, Cannabis indica
gaggacaaagtacgctagaaatactcgtatttgtctatagggccattcgtcagtctaagaagcagccagagtgacgtactcgtgtataagagccataaatccgtgggggaagacccaatggagacttaaagaagggatgtaacaaatatgactgtcatagtttaatattaaaatttaaattagagcgatatgttgagatgctatcaaacaactatcattattaaagaacccacaatgttattgttgttcaacccatgagtcgttttcaaacaaaactattttgatatataatataaatgtactcaaattaatgtagcccaagtgtgagcatgttagactttttatttgggcttttattaacttttagttttaataaaatatgagttgattaatagttctttgttgtgttactacatatttttagtgatcaatagttaatgagattaataactgtgtgtaattaaagtctagttgaagcagaagtagacttttctagttaactaaagagcattgctattaggcaccagtggtgcctagcactttctcgacatgtcgcgttgcgattggctagcaatactccctaaaaactattatattaaattatatgggacccgatacttagttggaccaataacgatattgacacataggagggtgctaagcaccactggtgccctttagcatttctcttaactaaagtatttgatgaacatatccaattcaattagagttatgtagctaagtattctccctaactctataaatacatattatatatatttgataatcagataaaataaatttatttttaatttaaagattaaaaaaaggctaattaggatttttgtcccctgaactttgacaagtaccaaatcatgccccctgaacttttaaggtcgttaaaaatgcctcctgaactattgagattgttggatttaaggacttttgtaacgccctaatgctaaggcacgctacagtgattttttaattaccgtgcattctttgctaatcaaagaattttctcgaa

SEQ ID NO: 261796 - DNA, 971 bp, Cannabis indica
tttagttgaacatcattcaaggttttgcttgcatagtagatagtccgaaataccttgtcaaccctttgtcccaatactgcaacaatagcataatcactggcatcacacatgatttcgaaaggtagctcccagtttggtgtagtcataatcggcgctgaaattagcttctccttgagagtttggaaggcttcaagacaatccttcccaaattcaaaaggcgctctattagcaagaagattagataagggtttggcaatcttagagaagtctttgataaatcttctataaagcctggcatgccctaagaagcttcgaactcctttaactgatattggagggggtaagcaatcaattgttgataccttggctttttcgacctcaataccactttttgaaatcttgtgacccaatactatccccttttttaccatgaagtgacattttccccaattgagcaccaaattagagtcttcacatctcattagtaccagttccaagttgcttagacattgatcaaaagatgagtcgaataccaaaaagtcgtccatgaacacctcgatgcacttttcaattagatctgaaaatatcgccatcttacacctctagaatgttgttagagcattacacagtccgaatgacattctctgaaaaacaaaagtaccatagggacatgtgaatgttgtcttctcttggtcttctggtgcaatggctatttgatgataacctgagtacccatcaagaaagcaataatactcttggcctgccaacctatcaatcatctgatcaatgaatgggagaggaaagtgatcttttctagtggctttgttaagtttttggtagtctatacaaattctccactctgtgacagttctagttggaattagttcattctgctcattctttactatcgccattcctcctttctttggaaccacttggacatgactcacccatttactgtctgaaatagg

SEQ ID NO: 261797 - DNA, 1464 bp, Cannabis indica
cttcggatcagcataacttttcttttaaataatatcttcccttttttttattaaaacgtttgtatgttacattaatgtataatttaagattcaaacttaagatctctaacagataccgaaatctcttataaccacttgaaataacctctaggggttgatcttacctatttttgttagtcgttgaaaatggtagttgacaaaggatatgaaataagaatgtaattttgtaagtagtgcatggggcaataattttgaggattttaagtattcatagaaaaatgcaaaaggagcaaaaagtgaaaaagatggtcgttgtggttccaaagaagcaataaataaagacctaaatgaggtagaaatgcgtgacgcgcggcgagtggttgaagaagtggacgcgccagagtggatggaagaagaacaaagttatgtaatgtaagtttgtgacatgtgtcagaatgggacccacaaggcatattgtttgtgtggtattggtgtttcaacgtgggtcccactcaaatacaatagaatagacctctttttccttttccttttcctctttctatttctatttctaaaagtaatactcaatacaatactcatgcttttttcccaataatatttataggtatggtggacccacttatagtaattctaacctagcatttctttttcttttgttattgttattaggtcatctcaaatgctaatagtattaaattaagaagtgaattcaaggtacctaaaccacttgaggctagctcaagtggccatagggggtgtgtgtgttggaggtcttgagttcgactcccaaattatgtatgatgtaatatataagcgtttaaatcaaaaaagaattcaaggtacctaaatgataaaatgttcatttttataaataattatattaatttataaaaatataataaaaaataaaaaatatttacaacaaatcattttaacatttataatcattatacatatgatttcaataaaaaaataacagtaaaaatattttattttacgattttgttatagtgtgccattttttgattgttaagtgttaattaaatctgttaagtgacagcttataaacacgtaaagatatattactttaatttatttaatacatagtctcataatatgtcgacacatatttatgagttgacatttaatgaccaaaaaaagagtatgactgcaacaaaatcataagatctggccaagtcgaggtgagaaagagaaacttcaaagaatggttaggtctcgaggcttagagggaggctaaagggttggatttgtaagatcagaaagttagtttttttggttcgtttgggttgaaggtggctagaggtgactttctgaagctgttagagaaggagaacggaagagaaagggagtgtgggtggaaattaagttagggttacaagaagaaaaatgtaaaagaaagagaagaagaagaaaaaagaaaaa

SEQ ID NO: 261798 - DNA, 895 bp, Cannabis indica
taccaccgtcttactcactatgattgagtacttgacttgctatgtgtgggcacgttactcattcactcaaggtttcgaatatggagaacaatgaaggaggtgaaatctctatagaaggaactctctcatctaggttggttgaatagtcaagtttgacattaattagatgagtgagagtatcatgttccttttatagtgtttcaactagggcttagggttgaattatatggattaaaaaagaataaaatattgggaaaaaatcaacttaaggacgtacagattaaaggattaatttctagttagatttttgccactctatttcaaccacttattcttctttttaataataccatattttccaattcaatcctataaatgtcaaaactatttatttaataatataattaattactaaataaaattgtcatttatgtaagttattaattagaccatacaaaatctcttaattaacaaattgactacaaaatttcttttcttcacaattaagccattgcttagtgataattcataaataagacttagtctaattttagaattataattgattaattaaaattaattaactgagtctgcaagcaatattatctcaactagtgaggggaccatgtgcctatttaactgagctttcaataagtagatctagaattcactaagtaaattctcaacttattaattccgccttgcgccactatagatttggaattgaatagcactctcagttttatagaatgttctatatttaccatgatatagatacgttatgattatccattgatgcaatcctaatagtcaaggatcctttatagatgatctacacttaatagggacaaatttaccgttttacccttcaatgtatttaatccttaaaacactt

SEQ ID NO: 261799 - DNA, 886 bp, Cannabis indica
actcctccccggacattgaaccaaagcatcaatatgtccaaccgaatatgatttaaccgacacctcccaatcatcattccacatcaacaacaaatctccactcttgcccacacaatcaacatgaaaactatttggaaaattaacatgtcgtcgaacaccttctgcccacccaccataaagtttagtttcagataagaaaactaaacttggggaaaacttacgaacaatcgttcgtaaggcagtcaacgcaccagggttccccaatccccgggcgttccaacaaagaagactcattgctctgggcgagcctgctccgcaggcctcgccaatacaatattctcatgctcaggaaccatgtcagattgctcctccaaacgtccctttttcacacttgcagaattaacatccatctccatcttgcgtttcccacccccaccaaccttaggactcaccttacatttggcatttgcaacaatgacatgagacaacttaggactaataggaaaagtggccgccttagataccccatgagggccacggccctttacagaattaagacgcttccaagtcttcgatttttgtgcttgaattatcggctcaaagtttgttggagtgcttggcgaaacgagagctcatcttgatccgaatgaacaatcacaccctttcccttgtggtctttagtgacctttagcactcggtggtcactcacttctcccacaccatccacctttccactagttgaaccaccatccacatccgaagaaaacaccttacccaactgctccgtcccactagcattatcggccatcaccacacccacacccggcacacataccgaaggtgcagaagaaggcaagagcacctcctcggacaccataggatcacc

SEQ ID NO: 261800 - DNA, 2118 bp, Cannabis indica
tcttcatcttcttcttctttcttctcatctactttatattattttatattattttataacaggattcaagttttatgattatatatggaatgaatacgttgacataacgttgaccatgctattaaattatttattagtgataatgtatctaaatagtaactttcttttgtaactaaaatagtttttcatttgtcatatataataagttaataacattgcaacattcaacactggggaatgatttagcttaacattataatacacaaatcataagagaactaaagaaaaaaaatagtgcacacaacaatatccaattcaaacccaaataaccccataacaataaatcataataaagtataaaaccaaccatcaaccatgttagcaattaagcaagctttcagtcttttggattgacagcaaaccaagtttgaacagcagttaaagaaagcactattgcagcagccataagacctatgatagtccatggactactaaaatattgctgataaacttgagtcatccaaatagcacatttcctctcacaatgattttgtatcttagtcttcacatcagaataaaaatcatgtggcggctcactaaaccgcgaccctaatctgttaaacaaatcggctacatctgcatcgctgctaagtctattttgaagtactcgcgacgctcttaactctctaacatcttgttctctatcgatgagaatatccataaattttacataagaaataagcatataatgttttttaaagaacttctcataaagaagaagattatgtagcttttcctctatccacctatcaataattaatggaggaagtttaagatgtcctttgaggttaaaacattttccattgaatgatatggttgccaagcaagaactagtaggctttaactctatccctgttgatttaagttcctcaacattgcgaaaaaacccttttggatcgttgaaattcggtctttgcctgcgaaaacaagaacaagatattgtactacaacatctaagaatattattttcttcattttttttgttggtagagacaatatttccatcactagatgtgattagcaagtagagaatgtgcaggagatgaacatgtttatgattttcgattcgaataatgtcatcccattgtttaaggaggaaattgttggagcttggaattggcaaatcctttgtgatattgttaatgtaaatgaatttaacaatatcttccttcaattgatttgggttattagttaagttaaccaacaactcaatcactctaaatgggatttgattatcaaacctaaacaaatcttcttgtatctttcttgctttagcattatgaataccaaacaactcatctaattcattaagaaaatagctatgtatgaattgtaaaattgtgcacccactcaaaaaaagtgacttaatcatcaaacctttgttaccattctcatcatgatatgataactttagtagatctttggtatttgtagtgaagtcttggagtaaactctttccaatcttgtcattgctgaaggatttgatgaaatttgcagctatttttcttggcaagtcatgaggcagaattatcaagtttaatctataaacgaaatcgatttcttgtgatggattatcaccattgttttggttgataagatctaacaaccattgagtatcagattcagaaagaatgagttgaggttgatgaggatgatgatgatgatcaacaacatgttggatttcgttttggtctatcattgcatgatccacattcacacaatgttcttcagccatcttttactctttactacaaaaatacaataaaattagctagaagaaaaaagctagatagtaatttttgttaatataattataaattagacattgaaaaattctaaattacaataaagaaattaaatatttaaattttattttcgatgttgtaaattattctaaatttttaaaaaacgaatagaatgtaattacaatttacacaagcatataaaaaatttaaaatataatttctctaaattctaaaaataaagaacaaactaccaataagaataaaaatagtgccttaatatccataaaaataaaggaatttttttatttttaca

SEQ ID NO: 261801 - DNA, 849 bp, Cannabis indica
tgtatttaagtctgatacttaagattttcttttattaacgttgtattttatggctcttttcagaggaattgcagaaataaaatttatttttgcttaagggattattttagcaatctcatttccatttttatgcttaggacccaaggcaaaatttgatattaatattttttataatacttataaacttttacaacttcttgtatagaaaaaaagaaattgatatttttctaaaaagttaggcttaatttaaattagttgaatatacgtacaaataatctcaaataataattaataatatttttttttaattatttattgtattatttttaaataaagtagaaaatatctagcataaaactaagtaccgtgttggcgactgtactctaacaatggcagaagcgatctttcaagagcaacacaaagtgaagcttttcaatcgttggagcttcgaggatgttcaggtttaggaaggctcagtgccctatcgtcgagaagatgccactcgtattggatctgctggtgtggtcaggcgtcaagctattgatatttctcctcttcaaagggttaaccaagctatctatcttcttacagtgattcttcactttgttggaaaaactcatcgtcaaagttctcgtctaacataaggaatgaaaagttcttatttagaataaaaaaggtacaatcattgtatatttaattttcagaaattcatcgaaaaattatcacctgatgagtcaaacttaatatttttgtgagatccagaagttttccaattccagtttgtttggcaacatttagtgtcgcatcaagtattcaatcctctccagtagtgcaagaactagatcatta

SEQ ID NO: 261802 - DNA, 692 bp, Cannabis indica
ttaaagcccaagctttgagttcaaaactcaaacttggttaaactccacaacatgcattcaaacctcgcttaaaactactcaatcatgcataataaaactgcaaaaatcaaacccacgcacaaacaatctctgcatcaaccaattcctcaattttccataaaaatcataactttgagcaaaaattccaaacttgctgagaatccactaatcatgcattacaacctgctcaaatcaccatgtttcatcataatgaaaccccagaaaacaaccttaaacaatagtaacaactacagcaacaaaaatcaccatttcaatttaaaaatcataattttgagtaaaatttttcaagcttgaatcaaagcaactaacatgcatcataaccagctctaatctactcaaattaacatgattaaactttagaaaacaacacctaatcacagcagcaacaacaactcaagaactacacatgcaacctttccaatttccttaaaaaaatcaagaaaacatcaagacaagatcaagaaccttaccaacaacttgattacacttagaatggttgaaaatgcttgagaaactaagagaaatgtccagcttcttgcagctcaaagagggccgaaaatagagagagagagtttgggagaaaatgatttttctttatctttggtttttctcaatttttctaacttttaata

SEQ ID NO: 261803 - DNA, 595 bp, Cannabis indica
aagatttaaataaagatagtattgtgaatgttgtatcacaggtgaggtgttttggtttcttttatgattgtaaattttttatttttagtttcatttgttatcatgcaataattttatgtgattttgtttttgtagggtcatgacgatgaggatgacggtggtggtggtggtgttgctagttcacgtaacctagatgacattagtgatgatgttgaggtattatttagtagtttttagattttttagttttttcatgtatttgtatgttgtatttttgtgttattagttgggctatgatagtatggtgctatttttagtattccttattatgtgcttttttgggttatgatgttgttattgataatgtgttgttgttatttttttattgtagcctactgttaaggggggatggtgaagatgctggtgatgtgaaggatggcgaagattgtgttgatagtgacggtgatgtttataaggtttggtttctttttattattatttgatattttctgttataatatttgctacttaattgtttatttcctgattatattttgcaggttattaaaaacatatctgagatgtctgtgaaaga

SEQ ID NO: 261804 - DNA, 824 bp, Cannabis indica
taaattttaatacaaattttaattagcctaccctaaaattatatcctgagtccatcactgctaaggaacatattcaatatttttaggcttatgtagattcacatatattggatgttaaattttattatctgatctgatctaatgaatttcagttattcaatcgatttaacatccaatatatgttagattaattgaatgattaaaatgactttaacatccaatatatgcgaatctagatataattaattaaatgggagaatttatccatttatggatataattaattaaattgcttgacccgcaagtgcatatataaaaaaacttttgaagctatattaatgaatgatgaccaataaaaaaaatatttttttagttgtaatataaattttttgtaattgaatatgatttttagtcacaacaaaaagatacttgtgattaaaacatatagtatttaaatacaagttgtcactaatttacttttagccacaacaaatattgtgactaaaaatacatttagtcataataagttgtaatttttgtgactaatatttttagccacaaactttttagttacaatataaaaataataatttacaattagtcacaacttttttatttgggttaattggggcaaaacccctaatagtttcactttgcttgcaattaactcccaaaacccccaaaactacaatactgttagcaaattacaacttctatccaaatttaactgttatctgtcaggttagattgtccacgtcaacacaatgtacaagtgacacaatttagtccacgtaaataattatattaaaataaataaaaataaa

SEQ ID NO: 261805 - DNA, 1608 bp, Cannabis indica
tcgttatccattggatcgaatgtctcatccaacatccaatccgatccaattggatttttaaaatttgcatccgatctaatttaattatgattggatatccgattctattggatcggtttggattggatcggtcggttgggattggatcggatgactttctgcacacccctaaaaattatggagatgtcgaaaatccatacccctagagtctttaggtgcagccatacgatcccaagacatccagatgatgccttgaccattggaactttttgttttccactaaaagtttgccataattttctcaatgtcttggcaaatacccaacggaatgaggaatacactcatagcataagttgggagggattggatgacagttttaagcaagatttctttccgagcacgagaaaggaatttaccatcccaactgttaattcggttaataattttgttcttaagaaagccaagaatcaccgtttttttccttccaatgatacgtgattcaaatagtatgtttggcaaaagtgaatttagaaaagagtgaaagctatggagtgaaaggtgtaaaaatgttgaggggtgagtatttatagcaagatatgttgtgtttaatgaaactcataatttttttcccattcctacttttaattcatctgccttaagtaataatgctaatgttaatttctgtcactttggcactatacccctagttctcatatcactccatatgctccatgtccaaccacattaccaaacacatcatctcccaacaaccacaaggttttgtgcattcttcttatcttaccctatgtgcgctatctaactatatggccttaaacaggggctcctagagcttggaatgataagttgagacaaaatttactacattggggttttcaaccatcccactctgatacctcattgtttgcctatgattctggtcataagttgatatatctcctagtataagtgatgacatatttatcacaggtcgagactttcaatttactcaacaactaacatctgatcccaacaactcctttgctcataaagacttggaatccctgcattatttggttggattaaaagtttgtaaatattctactgatatgtacttatctcaaactaaatgtattactaatatttttctcaaattgcataggaaaagtgctaagtccaaacttcaaatagccaaaaacccgttttcgtactaattaattagccttattgtaagttagttatttgctagttgacattagtgagccgtaaaagttttattgtttcctctagatttctcgtaagctttcaaagagcatagctcatagcattaaagtacatttaagtacattagatattataatttaaatttcattcatatttttgattaattattacgtaagcagaaaattactcacattgtaaaacgagaaacacagaatcagaatatttggataaagaaccatttcatttctcatttaaaatggattttacaccacaaattacaaaaaggaataattagaaaatatagaaattaactaactaataacaataaaaagactttacataacaaagatataaaccaaatcagatcagatctaagagctggtgaac

SEQ ID NO: 261806 - DNA, 661 bp, Cannabis indica
caaaatgatatttctgttttatcgttggatcatattgtggcgcaatacattattgggaaaaagattttatgtgctactccttggcacttaattgatcatgtcgtttttcctattaatatgaaagagcaagagcattagatatgtggatgattaaatgtttctgagaggcgcatatttttgtataactcactctggtctggtaggtacgagaaacctgtaaaggaggcttgtaagcctttttctgttattctgccatattatttttctatgttagatttcaaatatcttaagaatgaaataaggttttctactatggagcactttgagattgtcccttatttctggattgcatgagcagaatacaacgtaagtttttaatgctttgttctggttttgttttgttttgtttttttttttatttttattttctattttatatttgattttgatgattttgttttctggtgtgtttttgtcagcgatcgtggtagttttctagccgtctttgcagagttattttattaacagtaagcctaatcattttgatgattttgatgttgaagtcaaccgtgatcgctggctgtttattctatactatggtctgaagaagcaagtggaaaatgttaacaacgactcagaatgttcatgatttgtctaacag

SEQ ID NO: 261807 - DNA, 926 bp, Cannabis indica
attagggtttcataatcatttttgggtagcgtgcctaattatttagggcgttacaatttcaagacatatcacaatgctattttactcaatgttgttcctttggctggccaaaatccaagcatttagagacattcatggttcagatttagaaaattttggcttaatgactctgaagccattgatttaatactgcaaaattggaagagaaatctcactggttcggcaatagagaatttctgtaccaacattcaagcttgcacaagttctctccaaaggtggcataataaaaaatatgggaacatgaaaaaaaaaaaagatctcaaaggctcaaaaagaagtgaaggagcttaacaatgcggctgtccgaactgatgcttctatgtttgagctgaaaaaatttgaagacactttggaggaactactagcacaagaagagacatattggcaacaaaggtcaaggggcagattggtttcaacgcgatgatgaaaatacaaaaaaaaaaatcacgcttatgcctcttctgggaagtcaaataacaccattaagtccctgtaaaatccatttggtggtagcaacttcaaaggaagaatggacagaaattatatgtttttattttggtgagttgttcactgctacgggtactgattttgaagctttgaaccaggttctttactcagttccaaccgcagtaacatatgaaatgaatcaggctctactgtgtccatttacaaaaaataaatttttgaatgcacttagttcgatgagtccagataaaagtctaggaagcgatgggatgtcagcaatgttttaccaatacaattgggaacatgttggctcaggtgtaacgagtgtggtactaggagttctaaatgaaggccatgacataagtatcttgcacaagtcaataatcactctaattccaaaa

SEQ ID NO: 261808 - DNA, 623 bp, Cannabis indica
caattgaacatttgaaggagataggcttgtttcagcaaaggctgaaaggtgtggacgtgtgttggaaggaaaaaaaagtccttgaccgggggtacgtttgagatattgaagcacacaatgagtggcttgaagatgtggtaccattggagatgtgagaaattgacttaggtgattgacggcataagagatgtccggccgtgttattgttaggtagattaatttgccaatgaggctcctataagtggtgtgatcgggtaagagagctcccttgtctttgctaagtttgagattcatgggagtggaagcaggctttgctcctaggtaactcgtgtcagtgagaattgttgcaagaggaaaggtctttgagaaattgagatacctttgtttgatcttgcgatttctagaccaagaaaaaaacgaagtggtccaatgtccttgagaaagaactttttatccaagaaggatttaaattgagtgatggcaacattattgttgctagcaatgattatgtcatccacataaatgaggatggcaagttggaaggtgggagttcgtttaatgaataatgagttgtcagataaggattggtggaaacctttggattttaaggtggtactcaattt

SEQ ID NO: 261809 - DNA, 1001 bp, Cannabis indica
aaatgattagattttgattttattcaaaatctatagaaatttaggtatttatgccaaataagagaggttaggtgatgtcaaaaacaattggagattttgattttataattttaacattaaattgaaatttcaatcaatataaaataatatgaatgactgagcaaaacataaaatattgcttccgaaatcaatgaagatgagacgatggaaaagagggaatagaagaacaaagagaagtgaagaagagatgatgtaaaataaggtagaaagtgaagaagagacaatgtaaaagagggtggaaaaaccgcatgacatcattttgtatatgtataatttatttagttcgatctaactgacatattttgatgaaaatgacatactggagttaaataagctaatttagaaatgttgatcctagtggttagaagctcaaattatatttttggtctaggcagacattgcgtacaataagtggttcgttttgtgctacaccactgcggaaagagagtatgtcatattgtagactctccttatatatgtattcgagtgaaaaaatcctatccgtgggtggaggtggtgactttctgttagtggaggtgatggtcgttcaggaaaatcaacttcaatgggggagttgtcagtggaggagcaagcaaaaaattgagagttttgatctaataccaagaggggtggttcttttgtggtttgggtttgaacattgagggtgtataggtgctaaaatatcattgtatatgagtgacatgaaagtatttttcgaaagaatgagagaaataaagaaggaaaaatgaaaatagataaagtaagagagacaaatatgaaattatgaggaaagtatttttgtaatttataaaaagatatatttttaaatgttgaatatgttataaaataatataaagtagatgagaggaaagaagaagaagatgaagagagaaagagaaaatgaatgagaatttttgagttgtttattccaatggggtgaa

SEQ ID NO: 261810 - DNA, 576 bp, Cannabis indica
tgacacctcgcggagatgccttagcattatgtgagcttccgggagcaccttgagctccatgtgccttctccgggacctatgtccgggacgttaccttatggcataagaagacttagcaaatattgtgaattgcttgatccacgtgtccctgtccggttggtaccgtatctcattatatcttatcctttgtcatcaccatatcttactctaaattttaaactttgatataacatatatgtgttatatctaacttttaaattttgatattttcttatataatatttttaataatattatgattaattattttaataaatttttcatattttcttactaaaaataatatatactgtaaattttaattttttaaagattttactaaaaaatacttagtttagaaaaatatataatttgaataaattaaagtaaattttataagtagttaaagtatattttctaaaataatatatgtttgtataaaatccattaattataatgagaaaataaataaaatcatgtttctaagcaaatttaatttcatatggtacgttatagatattttttaatcaaattatt

SEQ ID NO: 261811 - DNA, 609 bp, Cannabis indica
gtatgaatttcaggtgcggcaaagacattgaaagtctcttctcttccttttgaacgcgcaactttaactccccttttcgcacatcaaaattatagctttatcagagctaagattttcatgattggtttcaagctctagtgaagatgaacaatggtgaccagaccaaagaagctctaatggttgcttggtctatttggaatgagaggaacaacctgctgtggaaccaaaaagtctcaacagttgcagaagtagttttttcagcacgatctaatctcaccaatggaaaagtgctcaacaaaataaacttgaacctctcttagttcacaatgaattaggaactgaggtggagcactggactaaaccagcaattaacatggtgaagataattaaatgttgatggagcttatttttaaggctaataggtcattattcggtttcagattcatagcttgaaaaaagttttggtgacataattgaagttgtttcttcgagtaagggtgtcctgttagaaataattggggtcacaattgtatatataaaaagtgtgttgggtcatcaaataaataagtcaaaattatgtggtctattttggaataaagtttatgactt

SEQ ID NO: 261812 - DNA, 897 bp, Cannabis indica
cacatatatttaatattgagaatgttaaatgattaattaggcaatgtgaacctgaaagaaataaaagaattaataaattaaatatattaaaatctaattctgtatttttatccaataatgatgtgatgctctctgagatctgcaactatattatgcagagggtctcgttcatatgacttagaatgaatagtccaatgagatataacgtctatatgagttatggaataagatacacttacttttagcgcaagtggaagattattgggatttatgtcctaaaagcaagtaattaataaatagtatattagagaatatatgaaatacaattataatttaaatgatatattaattataagagtataattactaaatatctaaaaattccttattcatatagagaatgtataatcttgtaaggatgtacaagagaattaagattataagatatgaataaaataagtcggtagtgtattaaagttttgggaatctttaatatagaattgctaagtacggtttactatacactataatttttgtgtttgcaattttaatttagatcacatatatagatggacatatagtaaatgtactgtgtataattaaattatgcatgactgaactaatatgtaatagacatctttcattaacttgtcgtttaccaagaaaagagttattcatatcacaaagatgatcattagtagattagcctgaatcctaagtatacatgacctcttatttgtgttcattgtattttttgattcgctcgttaaaatttctcagagaagatgattcttacaatttctattttgggagattaataacatgagtggttgaaaacatgttacacaattatggaatccaagctttcctaactgatcgaatattagttctattata

SEQ ID NO: 261813 - DNA, 458 bp, Cannabis indica
gcaaaaaccgtgggggctaaaagagtagaagtctacagcaactcctaactggtggtaaacaaggtgtcgggggaatctcagacacgcagagaaagaatggctgcatatgtagcaatagtccgggaactgctccacgagtttgcgaactataaagtagaaagaatccccataggaaagaatgctcacgcggactgtctggctaagttagcttcaaacagcgaaattgagaaactgggggtggtacatgtggaatgctcgacagagccaagcatcaaaataaaagaagccataacaacgattgggcaagaacccagctggatggtccccatcatcgactacataacaaaagttgagttaccccaacaaaaggcattgtccagaaggattcagtatcaagctcaccattatgtgatgatggataaaattctctattgaagaggactcagcatgccttattt

SEQ ID NO: 261814 - DNA, 1006 bp, Cannabis indica
acaaaaggaaggagagaaaggtaaggatcggatagataaaatgtcttctccaaaaaaaaatcattactgatgctccaatcagatgaatttaaagatcaaaggaaggaacttctaacctgatgacgaaaattccaaagcaaacaagctcaagaacataggaagaactcaagaaatttccagaaatgtcgaacaaatatttttgaatgttttatagcaaagaagtttggaattaacaaaaaattaagaatcataggtcatacgcatacattcagacccaatattaagaatcctaagttctaatatcaaagaatattttaatttgagcctaggttttacaaaagagatccaagcaaaaaataaaatgtagaaaatcgaaaaaaaaaatgcataaagattataaaacttgctcattgttggaagtttatggatgatgagttgacttggtttctagaaattgcttcggggttctttgaagcttcaaagaagaaaaattaagaaattctgaagagaaaaagaaatttttgctatggtcttcaagtttgaaaatgtgtaaacaaatgggaaggatacccaaacccccttttgtagtttactgaaggggtagtttggtaatctcaagttttaaaagttggatttccccccaaaaaataagtacaatcattacttgtcggaaagtacaattgtgagtgtgcagattaatgtccattttcaaagcgaggtaataaattctcaaaatacaaaagggcagctgaatctttgtacctcgtgatccgacctcatcagaactaggcaaacaatgggatccagacatgtgtcacccattcaagacctcagaagccgcataagtccacatatgagcaaatggttcccacgcgaacttgagaagtaaatgttatctcaatttctgcataggattatgtggtgttattatgagtgacacatggaaaaaattctcaaacttggacgggtagtatataccttactgtattgttcagggtgattcatg

SEQ ID NO: 261815 - DNA, 1096 bp, Cannabis indica
ttgtgttttgtgtatttgtgaaataatcccttttataaactataagttaaatactatgtaaaatttaatataaaaccaaactaataacaataatagtcagggccgaccctgagttgaaatgggttatagacaaaaaaaaatatttggcccttattataaaaataaatagtatttttgaaattattaaaagaatatgtatatttttttatttgggcctctcaactgagtgagccctaggtgcgagcctagcccacctatacctagggtagaccctgataatagtatgacatctcaataatgttgggtagtattagtgattatctttgtttaaaattactatgtatattaattagtatgacatcctgcgaccacacaatatttttggaatgattcgtatttttttaggaggtttaggagcacgtgggttattaggttcaatcacttttgccttccccttatcctgtgcaagagtagagattccaacattggccggattttccttagtgtttcctccgacgtgctccactaaagggtcatcgtcaaaatcttcctcatctagatctccaaacttggctcaaagacaagccatcattaattttttcattttatgagaaaacttctcttgacgggctaactttttttggttttgagtagctcgttagacactcaggccactttggggtcttgatcataatgatagttgtctttgtagtatccatctttgacgcaatctttttcgtcttcttcctcttcatggttctcagcattcctattgtcaccaacgtggtcacgctggttgtctaagtcatcctctcaatcgttcacgttagacgtattaccacctctcgcattgctcggctgggcatgctctggagagagggggtctacttcttccatggaatttttaaggccaccttgaagagtcttttttagaagcgtctttttcatgaacaccatagcagtagcagtggtttacgtctttcttcagctctcaatgaaaataccaaaatatttatcaagatttttggaaattaagtatttaagagctaaagaaataataattttcagaaatgaagaggtgaagatttttttacgt

SEQ ID NO: 261816 - DNA, 936 bp, Cannabis indica
ttttttttaatttaaaaaaacttattttttttttatcaagaaattattttgattatgtagaagtaaaatttaatatgaatttttaggttttttatgatattccttcttatatatttttaaaggtttctttttttaactattatatttgatgcaattaaatttgtatgacatatatattaatttttttttctttcatatgtttgtaaataatatattacaaattacacatattttattaacaaaatatcgctaaccaatcgtagagtgcgacatatggaagatgttgacagggtcaacccaagcagtttgggaaccttagacgaaaaattaaatgtaggtattttattaaaaaaaattaccaatcaactcatatatttagtttttttttttttaaaaaaaaaatacttcataaattttaaaatagtcaagaattttagaataatgtgtattgggacctataaggttttattagtttttttaagttgcatattttttttagaattgctaaaaggtattaatagtactaagcgcattctttcgtgttaaactgctattggtgtaattaagttgcgggtcctatataatttaagaaaattacttttaggaaatatcgttaaccaatcgtaagatgacacttatgaaaactgctgcacactactgttgtctaatagtaatgttctatttttttttttataatcatttattatgtatattatattaaaaaatatttattatattatatataaggatgatagaaaaatgtcttgttgtgtaatggtgcaaactatttaatttttaaagagcttgaataccactcatattcaataataatgctttttaataaaaaaaaacatttcattaatgagcctccaagattgacttcaattagtttttgttgattctcttcagccaatgaaagctcgacatcttgggaac

SEQ ID NO: 261817 - DNA, 938 bp, Cannabis indica
cccagcccgtagtccactcatcttccccaaaaacctaattaactctctttctctctgaagcagcctgaaactgaaacggacccattgaagcgtggttggctcacctcctcgccatttctctctctcttggtcactggttcaccggagctacctcctcgcctttcctctctctctctctcagctgtcctgttcctgttcggggtaagatctttcgacttttgtctcagttggtttttctcacgggaatgggttttagggtttttctcagttggtttacttgtagttttcagaaatttcttcgttcccttttttccaaagtttatttatgttctgttatcacatggttatgaacttactgtccagtgatcttccaaaattatttgacattgaataaaattacttatagaatcatataattaattataaattaatattgattatagattaattaataatattaaagagttttcttgaagatgcatcatatgcatgtataactgatcaatatatagatcactcttccctatgtgaaaactgattaagtagatcgaaaatcaggcaaaggctgctctgctctgctaagctccggaggtaaacagtaaccacgggccaagcttttttctttaccttttgtttgctgaatggaattatgaattgataaaacacacaacatcttgcaatcaagtgaaactctacactcttttccttatattctcctttcactttttaactaaattgcctcaaaatcttcaatttaatttttaagttggcttgatgtgattttttttggagcaattttgtttgaatcttaatttgggtatttattgagtattgaggttttaaagctttagatttacttggtatatttgcttttcagaaactgaattcattgatattggtaatatgcttgtattatagctttgtattttgtgtttgat

SEQ ID NO: 261818 - DNA, 557 bp, Cannabis indica
tatagttatgctctgagctttcccaacagtgaggggtgggcgaattttccctagaggtgcgactccttgaccagagaaaccatacacatgcaggagacagggggttagatctttgagctggagccccatcttttcataggtagtcttgaataagatgttggaagaaattccattatctatcatggttctggcaaccatcttattagctatctggacctccacgaccttcgggtcattgtgcggaaacctgatcttgacagcatctttgtcgttgaatgttatggtgggctcccctgcccgtgggattttaggctttgcccgaatctcctgctatgtgcgggcctcaaacaatgacttggagatgcccatttactggtagaggtaacaagtcttggttattatcacctctctgattttgatcgtccttgacatactttcatacatgcgggttatttttctttatcaggaattcaatttcccgcttcagattgttgcattcatttgtgtcgtggccgtagtctccatgaaattgacagaacttggtcatgtctctcttg

SEQ ID NO: 261819 - DNA, 465 bp, Cannabis indica
aagacagtccctccagccaagaagaaactcaagactaatccaccctcggcctcttcaaagtccagttcagaagaagaggatccaatggaagtttcttcagacaaatcagtgtctcttcattctgagaaggacagtgaggacacagaactcgagccagagcctcctcgatcaaaatctgcttctgcagcaaaggcctctgctgctgccaaaggcaagcagcctatggaagaaccttcttctggtaatgtcccttcatctctttctggctgccctcgattttattatcgtgacaatgaacgtgactggaatttatatgcaaaccgtaagtttgaaagtgagaggaactatgatttgcatgctcatcgtgtttatggtattgtaaagtttattcaatttcatcaatgggaaaacactctcactggtttcattggatacattgcaaacattgttaaggatttttatgct

SEQ ID NO: 261820 - DNA, 525 bp, Cannabis indica
gggtccaaaaataaataaattcataaataattaaaaaattaacagaaattagtgctaatttcctttactaatccaaattactaaaacggtcattacaattatcccctcgttaaaaggatttcgtcctcgaaatctaacctgaatagctctggatgttgagtcctcatatcagactccaactcccaggtggcttcttccaccttactgttcctccagagcaccttaactagagcaatagtcttgtttcgaagaaccttttcttttctatcaagaatctgtacaggttgctcttcataggataagtctgattgcagttcaagggcttcataactcaagatatgagtcgggtctgacacatattttctcaacatagaaatatgaaatacgtcataaacagccgacaacgctggtggtaaggatagccaatacgctacctgcccgaccttcttaagtatgtgaaatggcccaacgaacctatggctcaacttacccttcttcccgaagcgcctaatacccttcattggt

SEQ ID NO: 261821 - DNA, 1541 bp, Cannabis indica
cacaaatgaatgaaaaatactattgttactttatgtatattgaataatctggattacattgaaatatagttttatttagggaataaatcccaacgcggaccacttcgaagcattccacgagatcctctgcatgactctcatatgcctttgatttgaccaacatgtcgtccatgtaaacctccctgttccatccctaaaggcctttaaacatccggttaaccattctctgatacgttgcaccagcattttttagcctgaagggcatgtccaagtagtagtatatccccttatcggtcctgaagctagtgcattcttgatccgcaatgtgcatcttgatctggttatagtcggcgtaggtatccatcaaggatagtagcttgaatctagaggtggcgtccaccatctggtcgatccagggtaaagggaagcagtctttaaggcaggctttgtttagatcggtaaagtctatgcacactcaccacgtcccgttcggcttgggtactagtaccggattggctagccactacggataatacacatcccagatcaagccattagctagtaggttgtccacttctttttccagagcttcttcctttactggatcaagggggcgccgcttctgtagaactggcagcatgttcggattaacgttcaagacatgagtaattacatgcagacttatgccggttatatctccttggcaccacgtaaaaacatctgtggccgcccttagtgctttaacttttttatctttttcctccaattctaggctcgttcctagtcgaaggatcttggtggggtcgaggtcgcacactggcacttcctcgacatcttccataggctctacaatttttttggatcccacacagggatccaactcatcttcctctaccaattctggctcgataccttcacggaccatcaacactggtaagtgggccgcgacattataacattgcctggcctcaccctgattgcccgtcatcatccccactccagcctcctaggtgaggaatttcagggataagtgccggattgacgtaattgcaccaaaatccaccaggaccggtcggccaaggattgcgttgcatgcatttgggcagtctaccaccacaaatttgcagtacttgaaaatactctgggttgtatccgggcacaaggtgactggaaaacttttcccatcggataagtgtggttccattgaatccagtgagttgggaaccgcttggtgatagatcccggtctgtgaggcctattgctgcgaaggcttctttaaataacaaattaacagaactcccattatcaatcaatactctagccacgatcttattggcaatgggagtttctatgaccaggggatcatggtgagggaaccgcaccaaccttgtgtcttcttccgtgaaagtaattggctgatccatgagtcggggcctttgcgctggaagctgagtgacttcctaaacctcatcatgtttaatggccccagcatagtgttggaaattattttaccaggatctatctactcacaagtatgttga

SEQ ID NO: 261822 - DNA, 716 bp, Cannabis indica
tcttgtaatgagaatttttccaacagcttccacaatgatggtggattttcttattcttcttctcctcgttgctgttggagtttggcattctcagtgttctcggcgaaagtatggctgctgtccagttcaattaagaattggtaagcagatggttaggggacatggatccggaaagagggctggattgctgttctctagcagtggtgccattttctcaaaccatttgctactgtatcgttgaagaaggtaggtttcatagtggatcccatctgaattttcaaggcacaaaaacaacataacattgtcgtaaaaatgtctcgtggtttttcttaatcgacaaagtaattgagtctcttaccagagtcaccaaggcatataacaggaggagtcacatagctacaaacaaactaatatagtaagtttaaatatggcatctataaaatacagtagcatctactttataaaacaatatagtaagtttaaaaaaaattataatttttataatttaaaattatacacttataatttaaattttattatacttgtaatcttaattttaaattattatacttaattatttaatttttttatttaaatatttaaaaaataaaaagtgaaataatttgaattttttttaaaaaaaatagctacacttgtttatcgattgactaatttgaggcctcatacttaatttatttaattctaacaaaataatt

SEQ ID NO: 261823 - DNA, 548 bp, Cannabis indica
acgatacgatttgtagcatatttaatccacatatgcattaactgggtaaaaacagataaatcacagctgtgtgattttcaaataataaccgtatttattttacgtgggacgtaatcaaatcccacaattttatgggattattgttgtgggatatcaccctgattgtaattaactgccctcctatgtaactataaataggagcaggatacactgaaaaaggcacagaaaatgctttatagaaaaagccctagttttgtatgagaaatctaataagatagactcgtggactatgcagaattttaactgcaaaacaacgtaaaaaagcttcgtgttatttgttttccttttactactattatttctatgcagctcgatcacaaaataggctttaatttagttaacgaaaatctttgttaacaggtcctcacccttcttggtcgagcatttagagacataaatggtgaatgagtattttgatttttttttctgagtaatacatatctcaaattaattattacttagtgcatatactaacttctaacactagc

SEQ ID NO: 261824 - DNA, 703 bp, Cannabis indica
agaggaaaccagcagctgctcgggaaggttacaacattgcagtggccaaggctaagaaggaaatgtcctctagcctagagcacagacaagtgaaaaaacatttccatgtagggaacttcgaaggtggggatgaaaatgtggatccttaacttggggaaccaagcagcaatgttggacctgtagaagaattagaagagatcgagattgatctagatatccttaccagaaagctaaagattggaaaaggtttgttgctggaagtaaaatcagaattgataaaatttctgagagcaatcctagacgtttttgcgtggtcacatgcggatatggttggaattgatccttctataatttcacatgttcttaatattgatcccaacttctgaccagttcaacaaaagcgaaggctgctggacaaagaacgagcagtagccctgaaggaagaagttgaaaagctacgcaacaacaacttataattgaagctttctacccggcttgggttgcgaatctcgtgttagtgcccaagccgaacaagaaatgtagagtctgtattgatttcacaaacctcaacaaagcatgccctaaagactgttttccactaccaaggatcgatcagctcgtagatgcaacggtacggcatgaaaattagattcatggacgcttactcaggctaaaatcaaatcaaaatgcatccaccggacca

SEQ ID NO: 261825 - DNA, 585 bp, Cannabis indica
ctcacacctcaaagcactaactaacaaatttctcattccttaaggtaatcatctacttccaataattattgtcatacaaccactattaaaattttaaatatatatatatttagttgattatcacagcaagtacacccaagatgaataaacacaaattttggctcaaagtgtgtgaaaagtgtttgttggattttaaacttggaagctcattaatctcacttagataggttaggtgtatgacataaatgctcagccaacttgattttttgagtgaaaatcgagtttatatagtgttgaggtgaaaaatagctgttggacacgaaaaacgagactcccactgggaaaatcagttcaaccgatttttggtgaaccggttaacctctttaaaatcgattaacctaaatcgagactgtgggaaaaagtctaatttttcacactaaaatggtcataactctctactcgattatccgatttcaaaaattctaatttgattctcttagttaaatgaaatgtgatttagaaatccaataaaaaaaattttgaactatcgagtgagaaaacttgttgcacaagttagtgaatggg

SEQ ID NO: 261826 - DNA, 1711 bp, Cannabis indica
ctgaacactttgcaagtcttccagtcccagaaccagcatttcccctccccatctcccgacatgacaaagcgcccatcaggtgagaaattgacttggcaagcataaccagcaacaacgtgcccggcgaacctctttttcttattaagctgaaacttctctctggtgctgtaaataagaatctgattgtccatactctgcgcagcaagccaatttgagttcgggtgaagtgatattgagggcattgagtgcatatgcggttcgctaatatatttgataacaacaggaatgccaaactcccaaacacgaagcgatttgtcatcgctggaagtgacaaatctccgattattatcaacaaatgtaatggtattcacagctcctaaatgctgatcatactcttgagtaatctgtccagtattcatatcccactgaacaatcttcttatcactcatcccagctaataaaatattctgcttatcttcatcaggattaagcctaacaacataaggaaccttccctgttgagaatgttgatatgacttgcccagtttccgtgtcccagtacttgatattcttatcataaccggcactcaaaaacttagtcccatcatttgaaaaacaaatatcacgaacggctttggcatggcccatataagttctcatacacttaccagtattaaaaacatcccaaatctttatctttgtatccatcccagcagacagaatcaaatggccatatttggggaagaatcgtatagcagaaacacccttggtatgtccactccatgtatgaactaacctctttggtatataacaatgatcgtttgtggccttcgcatccttcggaggcgcgatccaagaccgaccctgataatccttttcttcctttccatggaaagtggtcttatcagcaacaacctctcctttatcagcaccagatttctcctcccctttcttcttcgcatattcttcggcgtatttcttctgctcttccgttaactcagtaggcagaccctccttcttaccagcccaaggactcttcctgttcttcatcaaccaagcatcagtcgaagggttttcaacttcactcacgtcaacaccagcctcttcttcatcctcattctcagtagattccttcttcttctccagctttctcttcttctgctcgtgttgcggaatgttgtatacagaaatggcgtcgttcttctgaagggcatcaaaatctccaacgtaattgtacccagcagcagcagatgggtcggcggcgtagccatacttgtggaaagtattgtattgttcgtcgaacacaaagggctcaatagaagcgtcctcgacaaagccaagcttgtgatttctcataccttgagcgataccgtccttggcgtaagggtgagatgggccataaatgggagcccagagctgatcgtaagtgggattgaaggcgacagcgtgctgagtgggatcgataggtttggagagagccttgtggccattggtgccactgacagtgagagcaagcatggtgtcgtcgaccttgggggcggcggacttggaggtgaggaggcgaggtggggaagcgtcaggggacgatggattggaggtagtagggtttgggtttgggggctccgggatcggtccattttcgtcgtcgtttttggtcctgggtagttttcgaaggagatccatggtgaagatgaatctgggatgaatgagaa

SEQ ID NO: 261827 - DNA, 663 bp, Cannabis indica
tgtccgaatttgggggcatagacgaagtcgtgaagaccctgcaggacctgtctgctgaaaggcagacgttccaagaggaggctgcgcggcaggaggcccttgctaaggccaagttcgaggaagaggctaagcaaagggaagcccaagcggaggcgatgatccgagaggaggtccttcggagggacaggctggaagccaagcaccgggaagcactgagggcggagggcgaggctgttgccaaggccaagcgcgagctccgggaggctagggaggccttagacgaaatggctgccaaggtgaagtccttagaggaattgcgccaggcggacttggagtccagggcaaacttggccgtggagctgaaggagctcaaggactttaaagaccaagccttgaagaaggctaagaaagatgagctcctttctcccgtctcttgcagccggtgcattaagcgcttcgacgatggcgtttatatggcctggtcaacaaatggccagaacatcaagctcgacttctacccaaaacccgcggagatgattgctaaattctgggagaagaagaagaagcttgacgccatgctggaggctcgcattggtcctcgccttcctcctcgaattgactaggccgttctgaatacaacccagatttttcttatcttttttt

SEQ ID NO: 261828 - DNA, 753 bp, Cannabis indica
ataaaaatatggtttgaaagtaatgttcggtaatggatttcattttttgattttaaaattaaaaaacaaatttaaacaaattttaaaaacagatatttcatgattttaaaaatttttaaaatcactttcaaaaaaaaaaaaaatttaaaaatcacttttgtctcatttctctctctctctctctctctcgattccattctgaaattcatcaatggcttcaactatgtcttccttgctcagttccattctgaaattcatcaatggcttcagatccaggtaaagatttcttcatctccatatttctctctctctctctctcttcctcaaattttttctaggtttgaaaaaaatcttcatctccatatatgctctctacttagggtaatgctacacttcatttctaatttttctcactcacacactcacagatctctctctgtttatagtttaacaatatgaatttctattattatatggtttatttacttttgctagtctagattcattgctctcttcttcttttcccattcataactcgctctagcttcagtgcctcacagtcagataactagacggagctgctatttcttccgaagacacatattcctccataaatctaaattctgcttgtaagtgttatttcttccgactagaatttttattgagttttcttttatcatgctgttaaattattatttgtgggttgttttttttttttaatgaatttacaatggttatacttgattcttgtaa

SEQ ID NO: 261829 - DNA, 793 bp, Cannabis indica
taaatctcttgtgttattgtgtctgacagccattaagattcatttgtgttatatttttctagtttaatgggtttgttggtttttttgttcttgatttgtttgttttgattgaacttttgtttgtttaagtgtgatcttgaaactggaattacagaggttaattcctatgtatcagagctaaattttttacaaatcagagcttggttcttcgatcatcaagggagattcaaagatcacttgcttccgcaccaagaactcatcaagaattcatcaaggaattctacaagaacacagattgaaggaggatgtcgatggctaggttcgaactagagaagttcaatggatcaactgattttgtactttggcgagagagtttgattgggtactacttgtgcaccaaaaggtggcgaaggtacttagggatgaaaagttgctggctaagaagaagtcagaggaaattgcagagatagaggagatggcatactacaccatcatcatgtacctgtccaatggagttagaagaaagctaattcaaaaaaaaaacaatcgcaaaaggattgtggaacaaactagagcagctatacatgacaccatcaatatcgagcaagattaatcttcttaaaagattatatgggtttagaatgaaaagcaatcatattgctcaaatcattgccaatggcatatcaagaagttaaaccatcaatcaaatatggaagggatgtgatctcgttagagggtgttcatgtgccattaaagtcaaaaaactttgaattgtaactcgagaaggagacta

SEQ ID NO: 261830 - DNA, 1931 bp, Cannabis indica
gtatgtcataataagaatacgtagtaaagcaataataataagacacagaaattttatagaggttcagccccgagcagttcggtaatagcctaatcctagttagttgtattgacttaagaataaggaagaagattccttttcttatagctcttacaataatatctctgaatatataattcttagatagccttagcttatagcgtttcggcgtacgatttctccgccctttgcccagtgaacattcctcactatttatagggcaggaaacttgaggaggaagagtttcctctctcgttacaatgcgcataaacagaaagatcgtgtgatcaatgctgaatgctaggatcatgggattgaggctgaatacactgatagtgggatcgtgtgtatgccacatccacgcaagttgatccctgagttatagggattgagctggtgactcacgatgcgcttggttgaattcgctaagtgttgctcattctgcacggctcgttgagtattccattatggacatgccagcatgttaatccgaccaggtgctctaagtagatgccacgtgtcaccattctcgtgatgccacgtcagagtgccaattttaggataacatttattattagaaattgttacacatttctacaatactcaattaggtctagaattttttttacatatttgtagaaaaacttactctaatttttttagataattgtaaaatacttcaaaattttctagacatgtgaaaaatacaatagaacataggcatttttagaaaactttagtctaggattttctagttatgcatgtttaaaaaatatgtaaaattgtatggataaaattcttgaactgaaaagatctataacaaataattctagcctcaaattcttgaagattagaaactatatatataaatactcatcaagggttccaaattgtaaccaacactcaaaagccaaagctacaaacttttaataagagcttactactttacatacaattctctcttctaagccaaattatttttttataataaattaacaactactcatcaacatcactaattcaccacaataaccactaagcacaatcctacatatccacctatttaaaataaactaatacaaatttattctcaaatcataaatggtataagagctccgtgctaaatcgctcaaataacagtatttcgctgagacactatgcggttaaacttactcaatcattttggatcaagacctattggcgcagtgtacagtaattcttgtacatctctcctaattaggtggtatccagaatgatcctacggtctgataggtaactaaaacttgttatatggtggatcattcaaataactatagtttgctaagataatatatggttaaacggactcgatcgttctggatctagaccattggcgcaatgtgtaataaatcttgtacacctctcctaattaggtgctattctagaatgatcctatggtccgattaggtaactgaaacttgctacatggtggatcgcttaaataactgtagtttgctaagacacctatgcggttaaacttacacgatcattatggatgaagacctatcggcgcaatgtgcaataaatcttgtacatctctcctaattatggggtattccaaaataatccaacactctgattagataattaaaacttgctacatggtggatcgctcaaataatagtagttcgttaacacactatgcaatcggacttacttgatcgttcgggataaagaccttacggcataattatgtgcgataaaatttgtacacctctcctaatttggaggtattctaaaacaatcctatagtccgattaggtaattgaaacttgctacatgatggatcactcaaatagccatagctcgctaagacactatgtggtcaaacttactcgatcgttctggatcaa

SEQ ID NO: 261831 - DNA, 506 bp, Cannabis indica
gaacactacaacccaatttttcacgaaagaatcgccccgtatgcgtctgtaattggtacgcccttgatttccaccttaaatcctgattaggatctagcacatttcatgttcatgttgattgcttttgctgttaatcttggagggttggttttagtatcaatatatcatattgatatatgtttggtttgtgatgttttattttgttcttaaagtcaaattgtatgttttcttgggcagtgaattgcatgtactgggagaaaagatttcctcgattgttaagtaatgaacagcttcaggagttaatgaggaaaggatgccctctggttggactgtgtgatataacttgtgacataggcggttcactagaatgtgtcaatcaaacaacttccattgactcaccttttttcaggtttagttattattctgtgacataattcaagttacaccattttatcaattatgctatattcaagagacaatcaaataataaaccatgtttctcctca

SEQ ID NO: 261832 - DNA, 1284 bp, Cannabis indica
tttggaggtggtgggttttgttttattaaaataattatctctagatgtatcgttcaatctttgttgttgttaatgtttgaaattgatgtctccagttctcagtgaaatccttcgttccgggtttatgataaattcctcactcaggcgcaggacccatttagttcaatctttttcagtcgtcttcctctactggttttatgttttctcataaactacttctcaatcctcaccaccattaataattaattacaactactatagtaatagtattaccacttaattatcttctttctttttttttttagttatctgggtcctgcgtctttaatttaaagcacctaattattatactgttaatatatatttatatatatatatatgggttcgtcgagtggaaactcgtcccaggggtcagaggaagatttgaaggttttaaaagatgatgatggagaggagatgaggaaaaggaaacgaatggaatcgaatcgggaatcggcgaggcgttcacggcagcgaaagcagaaacaattggaggagttaatgggtgaagtgggtaagcttcgaaaggaaaacaaccaaatcatgacaaccataagcatcaccacccaacacttgatgaccatcgacgcccacaactcagtcttgcgagcccaaatggtggaactcaaccacaccctccactccctaaacgacatcataaaccacatcaataataataataataataataatagtaacagtagcaacagtcacagtaataataatagtcttcttcatgatcaaaccacgaatgaattgtatgaatgtgatcctcatcatagttttatgatggaccaaatgaatatgctgcttcgtcttaaccatcccatgctggtggcggccactactcctgatatgttgttttattaaagtaattattattcttaacaaatttggctagcctccatccacagacacacatccatatggctcagttttcttctggtcttgtggttattttattgagctatgtttagagtatgatgttatagatattccattagcacaggtaatatttggagaaggaaaattaaaaaagaattctcaatatatataataggaccccaataataaatgggtcctaagttatgtaaaggtaattatggatttaagtggtgtgaaagactatattttatttattaagtacaaaaacttgaatgattgtttcttctattattacaagattttattaatttttagttaaaatataaaaattaaaatgtaatatatttatttaaaaactta

SEQ ID NO: 261833 - DNA, 1468 bp, Cannabis indica
ggctaaaactatcttagaattacatgtatcctccatctagaaacacgaaaaagatttacccctaagccttcagaactcaagaactcaaggggttccagatgtttgtctttaaccttccagatggcatgagggtatgtggacattaaaaaggaggaaacctttgtgaattccaaataaatttatttattgttaatagcttcttgctttttgaaataaagtgacacgtgtcattatttctttggctcatgagaattactttcattaatggagtgtgtgcatcatagatttatgaaacgacgactaatcatgttagtgagtattctatagagaatatcatcatttaaataccttggttccaagcaacgcattaaatgctaatctaacatctcttccggaccgttggatgtattctgtattttctaaaatatcatcttagcccttgatctgagctcacgcgtatcaccatcctcgttgtataaatagagtaaaaattttccatttaccacttttgccaaattttattatgagttcaaatttttagagagaaaagagcaaaaatttctttcggtgaatgaatcattgcttcgacaagtgtattaatcttcgtctttgaatttatgagggacaataccttgaagcaccaccaccaatcttaattattgattcttctacaccatatgaaccactggatcttcaagtggagatcgaagcacatcaacaaagcttgctccctttagattaggcttgtgcgccttgatgaacctttccttgttagaaatttttttgaggttgtcgcacaacattcatattccctctctgactcctcggccttctctgagttcttcatcaagtaagtaattttggcattttctggaattctaggtagtactgaagttctagtttttctttcttgatgattgcatgttttccctaggtatatgaatagaatttagaccatcaggagaaattttgaacatttctttgaaatggggatattttctgtgcatattgcttgtaaacatttttaggttttgtgatcttctatctttattagtaaattgtggttaaaatagctaaaattctataacaaccaaggctaaaattaactcctctatttgagcccttgtgattccagatgacacaccctgtagcttttgtttttgcctttgtgatcctgatctgattgttctggaacaatattcctcgagatttttttttgctggatgtaggatccaggtgggacatctccaagcagtaataaggaaggactctcccgtaccattgctatcttctttagttttggtatttaacttcttatcctttttttcctttttcttcttttcctattcttgccatgacagaagttgttcaagttggaaaagtcaaaattttggagcaagaggaagtagcagctccaagaatggtgtataattcatctttctaggaggtggatgttgggttttgtgcc

SEQ ID NO: 261834 - DNA, 553 bp, Cannabis indica
cgagtcaataaacgtgatagtgttcctttttagttagttcattttgattctcctatttcgtctcaacctagtttcagatattttgttgctttcatggatgattattcttgtgtaacttagttatatttaataaaaaatcgttctaagctgttttctgtattctacgatttttgtattgagatttaaaatcaatttaatgtatttgttcgtactttgagaagtgataatgccaaagagtacacatctactcaatttctatcttacatgatctctaatggcatgcttcatgaaaaatcttgtgttgatactgcacctcaatattgtgtcgtagaacataaaaacatacatattcttgttaaaatcgcacgtgccctcttgttttaaatgaaagttcctaaacctttttaggccgatgcagtttccacaacatgctttcttattaatcacatgccatcttctgtacttaatggtgaaatcccatttaaaattatttttcctcataagttattgtttcaagttgctcctcgggtatttggcagtgtttgttttgctc

SEQ ID NO: 261835 - DNA, 2414 bp, Cannabis indica
tttttcttttttctttttagtaaggaacttaggacaacttttaattataagaaaaaaaataaataaataaataaataatgagcaggtgaaccacttgtattagactatgagctgtgttcaataataatgctgtccctctcccccacatccacttttgactcccttatcttcttctctggattctcttgctgcccttttgtttctttatgcattattatgtgaatttgtcaaaccaaacgttttaccaaatgtattgtataaaatatgtttattattatattcatatagaatgaaaatatttaggtgggtcgtcatcagtttagttatttatgctggcctctttgtctagttgcggtccagtgttcatattgaccaactagtttgaagagatacaatgcaagagtttaattattattattattattatcactttttctatatgaggctttttaattagagatactgaagttgtgtgtgctattctttgatgtattctggtcgggtgagtcaagaagtaaaaacaggtcattatcttttatcctatagttttctttgttgggctctctttgtttatattcttaattatctataatcttctcttaagaatctaaaagctatgcccacttacaccttcctttgtttaccatttctctccttgttgtagttttattcaaatttgccattttcagcaatctaatttgttaactcagctttattttcaactttagctatgtccagttttgtggccattttgttgttttccttggttttgtctagctttaatttcccaagtattttatcaaagttcacccatagtgatattattctcataaactgtggttcatcttcaaatgtatcagtaggcaatcgtgtattcctagctgataattctgattctgagaataatatccttgtaacgtctgaaagagtttttctcagcacaaattcaacttcattatcttcatccacatttggttcccagttgtataaaactgcaagattattcaaggggatttctcattacacatttccaataaaaaaaacaggtgtttattggattcgtctctatttcttccctttcttttctcaacagtacaacttgagtttagccaagttctctctttctgcaaaaggtttcacccttttcaaagagttgcaaatagagaatggttcaaaagtcatggagtactctttaaacatagtttctaatagcctggttcttacttttaacccttccactgattcctttgctttcataaacgccatagaaatcatgctacaacctgatgagcttcttcctaaggctgcaaaaactgttggtttgcatgaaagtcaaaagaatttgcaggaacaagcattagagacaaccatgagggtgaacatgggtggtcaagtagtgtctcctcaaaacgacactctttggagaaattggttttctgatgaactctttttggtacacaataatgcaaagtttatgtcaaatataacacttgtcaattatttgaagggaaaatcaactgaggagattgctccaagaattgtttatggcactgcaactaagttggacatagatggaggagaagctgtgtattttaacatttcatggcagtttgatgttgattcaggtttttgaatattggtgaggttttcacttttgtgacattaaataaatgcttctcttcaaaagtccccccatttagtgtctatatcaactcctggtttgtctctacctatgctgatattacaaataaaaaagaagatgtggttggtgccccctattttatggatgtgattgtgaagataattgacaactcaaaactaaaagtgagccttggtcgtaatagtgctggggatatgtatgcaaatcccttcctcaatggcattgagatcatgaaaataagtaattttcgtagaagccttgatgtcttggacactttcacaattagcaactctaaggggaaagttcttgttttagctggtttggctgctggaatatttgtagttgttttggctgttgttctcttcctgttttgcagaagaaggagaagattgagacttgttggccattcaaagacagatggtgttgctgtgaatgataatggtgcttttttgggctcagaaaatgtctataacttccctctattggtgattcaagaggctactaataatttcagcgaaaacttggttattggggttggtggttttgggaaggtgtacaaaggagttcttaaagacaaaatgaaagttgctgttaagaggggtgtttctgaatcaaatcaaggccttgctgagttcactacagaaattgaaatgttatctcaatttcgccaccgccatttggtgtccttaattggctactgcgactatcacaatgagatgattataatttatgagtatatggaaaatggtaccct

SEQ ID NO: 261836 - DNA, 563 bp, Cannabis indica
tggacacgtagtccaccacatctctttttcatgccataccaccagaagtagggtttcaaatcctaatatattttggtggttcccagatgcaacgaataaggtgtggtatgagcttcatctagtatctctttcttaagctcatcaacattaggagcataaactcgagctttgtataacaacattccactattcgagactgaaaagtctttaggccaaccagtcattaattcgtctcgaaccttaactagctcgggatcttttagttgtgcctttctgattctctccaacagatcagcttggaatgtcaaattatgcaatttctcaactacgaactcaatccctgcactaaccatttcaaaagctagtagaggggctatcataaccgtggtacaaaccccccccggaacctttctgcttaaagcatcggccacaacattggctttcaacggataatataaaatttcacagtcgtagtccttaaccaattccatccaccttctctgcctcatattcaaatctttctgggtgaaaaagtatttgagtactcttatgatcagtataaa

SEQ ID NO: 261837 - DNA, 2294 bp, Cannabis indica
aagatgatgatgatgatgaagacatcttaggtagttttgtgatgttggatagtttattagccttgatgaagtctttccttaagtttttgttagcagggcaaaagaagagacactggcaaacttcatttctacaacttccgaaacctcttatgcttggatgaatgtctccacatagctggctgcactctggttgtttacagtaaaacggtgcgttgtgaatcttctttcctttgcataggttccatgccttgtggttgttgtcatcaccactactcgttgctataacatgtgcttagaagttagagatcataatatattattgtataaatattgtatataaaaattataaaacctaatatatatgtttacctttagatgtagaggagaagagaaccacgatgagaactagaaatgtagcaatgtgtttcgtcatttttattattattattgactagaaatgagttgggtttattattcttaaaatttgtatgtcagaggaaaatagaaatgagttgggttttatatgtttttgtgtgagcaagatgtgagatggtttttggaggttttggtgtttgtgatgcattattcatgatctatctgcattatgaattagttctgtcatggaatttgcatatatatgtcatatgatagaatataaaatatttaactcatacattgaccatgtttataaattagtataacactagtaaaacaaatcaaataaatcttatatatatgcttaataaaaataaaaagttattattatatatataaaaataaaactcatcaaataaatatgagaaaaatgacagtaaaagtacttaatctttaaaatttgatgatttggtatattttttttttccggtcaaaagtacccacattatatattttattcgttatgagttaatatccacgctaatataagtgataagtgctagaaaaaattgcgtcaaacatacccatttttttttttttttgggcaaaagtgctcactctaaaagagattttaagggtcgccttagcgaccatgctggcataattggtcaattttattttattttttaatcatttatatcaattttaaaatatgaaaaattactaaaaatatattttaattaataaaaaaatatgactagtttaaataattatttacaaatttataatttggccaaatgtgagaagctcagatggcatgggaagggtgtgtatgagttagggggaagaagtttgatcccgatgtaattagtatttttgtaaataaaacttatacttttgtaatatatggtatttttactatattttttttaaaaaaaaaattaaatatttctaaaaaattcacttaattgtatctactttcattgaacattgctattttgcatttaatggtattgaaacatgttgatctcgtttctaattaatgacgcagagtaaataaaacgataatgtgagtatttgatcaataataaagattattaaaaattgtaaatgatacatgaaaattaaaatttcgtattttaatatttccaattttattatttaattgaatacttaattaaatacggaataataaaattagtaatgaaactgtttttctgtagctacagaagacaactctataacttcagaaccagaaaaacaaacagtgcagaaaaataaaaacacacaaggtttttgtatgtggttacaatctattaagattgttactagtccacggggtcatgcccatagataagattcattagatagatctcaaaaatataaaataattgacttatgcataaatagattccctcttattatatgccgcaagcttgatgtattctatcttctaatcgattcttaatgaaactttaagagctcgaactcccttcgatctccttaaagagtgtttgcttcctcccgatgcaagacttgaaagacaatctcccgaaagcttgtaaaaccttctcccgaaggtagcactgttgttcttcttctttgtagacttgaatatagactcaagacaatataaaatataaataaatagagtaagagtcgaagaagctcttttctacaaaacaaaaacactctttccttaagatatgaatacaattcaaagtgtatcaaagggatacaagacctagctgctataaggtgtatttataatcaacatacaccttattgacagaccacatcccactagaaaattccctaaaatagatcttcaatcagcccaagaatttctatttctgtacctacagaatcgtgagcagtaagtgcgacttttcttttatagaaaaggaaagttttgctcc

SEQ ID NO: 261838 - DNA, 1943 bp, Cannabis indica
gaaataaaagagagaagaagagaaagggggtgatgtaaatgaaggggtattttagggatattataaaatgtatcatatcccacaaatatcaaatattatgagtttagggaaaaaaatttaactatatgtaagcataaaaaatcgaattttcttattattattatatacatttaaaaattaaaattatattgtatataaaaaaatttaattgaaatttaaaatgcttaaaatattgtaaatagttttaaccgtccattattagtttaactttgaattaaaataaaagacaatttacacaatgtttcaccacgatatcttatattttatctgtaatttagcttaaaaaagatcaaaatctcaaactttatttaaaaaaatatatatgtatgcattgcacctacaacttaatatatatttatgtttttggaatactttttttttttctttttttctagaataagtagaatatatgaatgaagatgaagtaggatctctcatctctcttcctcttaaaaatatgtgattgtgcaataaattttgttgcacaggtacaaaaagaaataaacaaaagtacaattgaatttttaaactctatttttaatataacaaattatttaaaaaatttaaaaaacgaatgaaatatctactataactataacatagaaggtgatattaaaaaattaaattttaattaatttcttgaaatgcaaaaaacatccttaattacccataaggataaaattagtggtcactgaaggagctagttggagactacaaccttcccaatttcttttccatgttttcatatgtattgattaggtaaaaaaggaatattataaatttgcccccttccctcccccaatttatcttttctttacagtttgccccaatgtatgtctctactataattttgttctaaattaattattttgtaaattattaattaagcaataattaatataatgtgcagattttaagagccctccaccgccacctcgtcaaaataatcccacagctccaaagtagctaaaatggttccagccttttaagcatgaataataaattttaaaatgtagaaaaagttttagaatatctataatttaatttgctttttattaaatatattaaaacttctttattttagaacatgtgatgtgagttgcgattaaacaattacactaatgcaatcaaaaacagaattcaacaacacataaaaatttcagtaagacaagctataacaaaataagaaattaattaatgaagcaagttgaaaagaattagctcgatagggattgaatctggatttgaaaaaaataagccgccttcatggctgtagtggattaacacctcttgatcctcactgtttagactcaattcagtgagcaagaacacaaacaattcaaacaaacataacttgaattaaaccagcaatgacaaataaactaaaactagaaaacttagcttgaaatttaagggataaaatgaattgaatctttattgatcattagcactatatcacaccagttacaaaagatcttacttggggtacccttgatcaaaaacataagggacctgtactcactttattttaaagggacccttgatcaaaaactattatggtagggattgggtattttacctatcaataggggatagtgatttatagcccttgatttaatccagctcaaatcaactcttgaaaactacaccaaaattaatatattttttttatttataattaatctttaatattattaattgtaggttcaactaacaaactccaaacctaatgtttttatctttctattttatttctatttaaaatttaattttaattatattcttttttatttcaaatttacataaaaaaaatattttaattaaatttatttttaaaacaataattatacttataaaaacctataacatattcaacttataat

SEQ ID NO: 261839 - DNA, 900 bp, Cannabis indica
tcgaatgcttgcttctcaaagaaagcagaaaagttatgttgatctgaagcgcaaagatgtcacatttcaggcaggggaacatgttttcttgcaggtttcaccaatgaagggtattagacacttcgggaagaagggtaagttaagccctaggttcattgcgccatttcagatacttgagaaggtcggacaggtagcgtatcggctagccttatcaccagcattatcggttgttcatgatatattccatatttctatgttgtggaaatatgtttcagacccgactcatattgttttacctttgtccactctcaatggcaactacgcaatgctttgatagccttaatcacatcaactttatcttagatggaataggatcctttgttaagtttctttatctaatttcctctctgtcactaaaattaaaacatatcatttaattaattgtaaaatgtatcattgcaaatggtttgttaatactgtttcaatattttatttattgatttattttaattgtttgggcccatttctttgatcttaatagaccctatgatatgattctgttagatcttgcacaactaagtgggtttattttttatttttttaatcacttttttgtcatttaatacctcttagcaaactagatatataattggctcttagtatttttaatatatatctctcattcttttttctcactttacatactaagtattcactcttttctttcctccaccatctctaccgcaacatcacattaggtcaattctttttttttttattttctctattttcttttctgacgcaacgtcaccatcaacatcacaatcatctttcttatccaaaaaaaaatatcacaatcttttctttattatatataacgatttgatattatgtatatat

SEQ ID NO: 261840 - DNA, 521 bp, Cannabis indica
atcaagtatggcagggatgttattacattggaagatgttcttgttgcacttaaatcgaaagattttgaattacagttggagaaggaatccaaaaaagaagaagtgtatttggcaagagaaagatcacccaagaaagcaagtttgaagattaaacaccatcactctcaattaagatcaaagtccagagagaaggacacaaggaagtgttacttctgtggaaagtctggatacttgaaaagatcttgcaagaagtataaggagcaacaaggcttcaacaaatcttataatggagataggaaggaattccagcaccatcaccatggaaaagactatgttgcaatcgcagaaaatagtgatgaatgttccacggacggagagttgttctctatctcggagtcttcaatgaacatggagtcgattctcgactctagatgcacttatcgcatgtgtcctaattgaaagtcattttttgattataagtcagttgatggaggtaaagttctaataggtaatgatcattc

SEQ ID NO: 261841 - DNA, 1306 bp, Cannabis indica
cctcttgttcaaataaagtcccaacacaggtgcaatccaacgctcacagtttcgccccccatcattcaaaggagacaacgaaaggcccttccttttctgagcaaacttgtattgatcaagtatgattctagctgatgttacaatatttgaagcaagtcaactcttcttttgccaaacaaagtcattccacgcacgccaaatagcccaagtcaccatcgatgcttcctccatttcaacttcgtgcccctggtgaaaattctcaacaaccagctgctgaatgttagagccccagccctgacgtccactatgctatgatgccaagcagcctttgcaaacgaccattccaccaacgcatgttgaatagttttagtactagagttatacaaagggcagtcagcattgacatgatcgtgacgtttttggagttgaaaataagttggaagcacacccgaagcagctcgccataaaaaattactaatcttaggaggaacttttaatgaccaaagtcgcttccaaaaatcagttggcatctcggcaccaagcacccgtatattctttcaagaatttatatgcacttttaaccgaataatttccacaagtctcaagtcgccaactccaaccatcactagcggccgaatcactaagctgaatggacaaaataaggtcctgatcacgggcaacaaactggtccctcacaacatcctcatcccacgcgcgagtaccgacttgaaagaggcagctaaccgacttatttacaagagcagggtgtcgtgagacaacatagttgtttgaattatgtggaagccaaggatcattaagaatggagacattttccccgttagctattgtcctttgagcacaggcgtggataagatctttagcttcaagaatactacgccaaatgaaactagaattgtcttctaatacagcagaaaacagattaccagtagcataatatttagctttataaagtctactaaccaaagaatcagcattaaccaacaaacgccaatactacttccccaaatgattaactactattaaacttcaccaaacttatcaaataataaaaatttaatgtcaaattacaattttcaatttgatcacttccttcttttattattattattattatttctcgtttgggccacaattacaatatctcttaacttttccctttaagtaattagataatagtgcatgcatatatagaaagcaaagtccaagcatctcactctctctcacgagtcaggtcttcacggctttttatatattagctcattagtttatttattattattattat

SEQ ID NO: 261842 - DNA, 805 bp, Cannabis indica
caccttctaatcgaatcttgttgaaacatcaagtactcgaacacccttcaatctctttgaagagtgcttgcttcctcccaagggaacacttaaaaaacaatctcccgaaagcttgtaaaaccttctcccagaggtagcactgttgttcttcttcttttggagacagactcaagataatacaaaatatatataaacagagtaagagacaaacactctcttctatacaaaataaagactctcttttctaaagatatgagtgaaatacaaatatgtaaaagagatacatgacctatctgctataaggtgtatttataatcaatatacaccttattgacagctcacacacggtctgaacaagaccctagctcactagaaaattccctaaaatagatcttcaatcagccgaggaattttcgtttctgtacctacagaatcgtgagcagtaagtgcgacttttattttatagaaaaggaaagttttgttcggttttctcctcaagaaatctgatcaatcataataagaaactcacacaatatcagattaacacagttggatagataaagagaggatgagtcaccaaacttaccatttataaattattttccataaatcgaaaagtaggcaactttccttacaaaaattaattaattaatataaaagtcaaatacacaaaatataaaaactaatttaaatacctcagtcgaatttaaataagaaattataaaatatttttttcacattaaagatgccaaaaatagaattaacaatctccccctttggcactttgattgacaaaacattttat

SEQ ID NO: 261843 - DNA, 816 bp, Cannabis indica
atttagtaatttagggtatatacgattattcgtggtctactctatcattttaaggggttattaatttgtgagtgacatattttttatcatttaaacttttgttgtttacttgtactttatccatgtcaagcttttagctactggcaaagttgaaatatacaagtgacaatcactaaattttttagttattatatttaggctttattttaagtatactatcactctcaaacaaaatatagataatgtttggtggaatataactaataagtaacccatatatattaaaagatatgaaaatagtttttaggatagaattttagtgactggattaatgctacaaaaacataaaatagtcaaaattatgaggaagacttacacaaaatttgttttacatttatattttttttttccaaaagaaaaattaataataattaatgactatatatgttttgagaaagaaagttcatacttttttattaatagaacgtaagttagtatatttaacatacaagtagtatatttagtattttttttgtgttgtttcatttacctaattattttatttaattctatagttttgattgttaattatttagcatagttttaggttagttaattagatgttacatagttattttaatttattaattattgttaatttgaaatatttacaaaaattaaaatatctataatataaaaataattttaactaaatatatatctatctatttatctagatataagatggtgatatgtcactctactctaaatagtattatttgttcgttctttaattctcttattttttgaattttt

SEQ ID NO: 261844 - DNA, 1165 bp, Cannabis indica
ttatttattgtcactacctccccatgtcagaattgagtaatatttgggcacctgctgccttccttggatgtggtagccgtttctcaagctccctctccgaaatcgaaccctaattctccgtcactcgtcaccaccatagtagaccactgtcctactatcgacagaatatataatttcatatggattacaggattaggatcagttaattaccacaaaagatattacatatgttataattttttttgattagataaattatacatgttataattgaattatatatgatgatgaataatattaattaatgctggccttcaaagttcatcatatagctaatctacttgaacccatccctatactgattaatattttagacctataaaaagagagggaaagagttgttagagaaagacatatatgccttttttctatttacagtatccaaactaataaagtatctattaatttattccaatttgaaagtcatatatatatatatatatatatgaggattcctattattattatggtcaatactatacgagtatagtttattaattaatatgtgaaatttaatattaaattacactgatacatatatgttattttttgtagtgattgattttttatagtgtgtcacttaacatttcattcagtactatatatgtctggattttactacattttatatcattgttaattaaagctatgtatatataaatattcataggtatatgaatttgcgttagtacgtaccctaaacaatggtcacaaaaaggaatctgttttttgattgtatatatataattcgatcgattgacattaactcaaatttgatgcccatccatactttatctaataaagccaaaaaagtacttatatttcattgcctcgttctatatatctctcctatatattattctatgatctacaaaattaaaactccactactcttagctttaaaaataattactgggttgagttgttttataacaattatgagatcgattaaccatatattatatacttataagagctagaaattaattgcttttgactaataacaagttaattatgaacttgatttgtcatgatcatgaataaaaacattacattttgtaataagactgaatgtttctttgaaattctttttattaaaaaaaat

SEQ ID NO: 261845 - DNA, 1180 bp, Cannabis indica
gtggtattatctctttgtagagtagcaaccattttgcatcaataataaaacacaaaaatcacatacaaacatgataaaacatataaatacaataggtattagcatagaagttaaagtaaatatgaagctcaaatatgtcataaaagtaattcataatgaaaaattcttaaagagtaatttttttaatactctaaacaaatgtcatcaagaattgtctgcagaaatatgaaataaggaataaatctcaaattaataattgaaactaaattgttcataaactaaaacaattaatacaaaaataaagaagatgcgagcttcatcttcacttggacaatcttcacccttctgtccaaccatccgactcaactcgctaggttagcaatcaaagtttaagcagctggagttgaaataagaagaaaataaacatgattagtagatccagaattaataacccaaggggatagtaattctctataacacatggaattataacaaagatagaaatatcttgtttctttgccaaaaacttaggacactggggtttccagtggccattttcgttgcaatagaagtactttcccttttgctttgcctttgaatcaacaacatttttaatcttattagttgtgttaacagctttaagaggcttcttgctatttttccacttcttcttcttcttcttgcagggtttcgaagtagaggcaatgtttgcctcagccttggccgtaccattagcagtgccgaaactaggagctttgtttcctcctttctgtggacctccaatcaaattctcaaatgtctgaaggctgttgattaattcgtggaagtcaaaagtcaacttgttcatgacataatttgaggtgaaaggcagaaaagctagagtcaaactattcaagatcaaactcacttgagtttgctgatctataatagctctatgattattagcttcttggaaaaaactagctatctagagcaggtgatcacccacgttctgatgaggcttaatctgtgcattgataaaattcttgatcgcctcaaatcaagcttgatttgatgccatcccaaacagttcagtcatctggttcatgatttctgtagccgtgagagtatttgcaaaccttgtcttcaaggtgtcgaccatgctagacagcataaagtatcgagctttgttgttagcatt

SEQ ID NO: 261846 - DNA, 651 bp, Cannabis indica
cctcccaaaaaaactggaggtgcttgcttgcggaacctttcatacaggggttacatccggttcattgtaaccccaggttcggcctgcacagcaggggcaggtgcctctggtatttctggagcatgcagtgcaggagcaccctgctatctcaaacgtcgaatctcatcatcttgttcattgatcctggcttgcattgctgcaaacctgttttccaaattttgggcatcttgagtcgcttgggcagcttgggtagcctgtggcgagttaacatcaccccggccacgtgccctgcccctgggacctctacctcagccacggatattaaaagaatttgagctccctgaccaccactggatccaaccgaattaccctagctcctagtacttcggctggcgtccatactaattaagaacagcctgcgtaaccaagagctagtttggtcagaccatggtcaaagaaaacttactaaaaccgcttatttggaaattaaaaacatgcgcctattatactatcaggctactaacatgcttcctaacaggcttttgttaaatcatactattaaaataaactactaaagcaataaaagcttactaaaccgtgaaacgagctgactactgatgatgattgtacatgtcgtgacgatcttcggaa

SEQ ID NO: 261847 - DNA, 612 bp, Cannabis indica
ggtcacagggtacgggttcgggtccacttttgtgtttgggactgggttcaggtacgggtgtgggttcgggtcaagggctgggtccctaatccagacaccggctacgggttttgtccaagcactgggtccagatccggataccaatcacgagtctcagtctggttccatttctggttctttgtcacgagctgggtattaggttcaagttcgggtcttggtcgggtagtaggtcccggtccttgttctgtttccaaggtccttatcctaatgctgggtcgacgtaccagttattgtgtgggtttgggtcccgttctcggttggggttcgagtcctagtctcagttcgggtttagctctccgtctgggttttgatctgggttcgggttcggctttaggtccttgtcctggtcctagtgctagttcggttctagttacatttgcgattctgagttcgactttgggtttgagttggggtcggagttcgagtcctggtctgagtttgggtttgcatccggattttagtctagttccagattaggctacgggtgtgggtttgcgttctgggtcttggtctaggttgggtccgtgtcccaagttccaatcccgatctgag

SEQ ID NO: 261848 - DNA, 2377 bp, Cannabis indica
cagttgctaaaacaacagtagcactactacaacttaataagaaaactgtaatttgtaagatcagatcgatggacaatctaaaaacaacaaagtacaatgtagtatgactaaaaacaaataggaaaacttaacttcaagggttaatatattataaaatagtgatatgtgagagatgtgaccttttcagctaaccccttttcccctcttgtacaatattagtaatttagtagtagaacaagtatagtaataatactagtgtagtactttgtcaagtcctataactataattatatatatatatatagcaattaaaataaagtttcttataatggagaaagcttataatacttatcatcatcaatataattatatgatgactacgatgaaatcatcatcatcttcatgggaagaaaaggcttttgcagaagagacggttgggggttgcatatggccaccaagatcttactcttgtagcttttgtatgagagagtttaggtcagctcaagccctaggaggccacatgaatatccatagaagagatagagctaggcttaagcaatgcctaaataatattagtccacccaacaaccctcatgatcatgatattattctagatcaacatcaatatctttcttctaaaccgtcgatgatcttgaccttagataaaccgtttcttttgccttgttttgaccgaaaagaagaagaagatgtagaaacagatttgtgtgtgggccatggcagcaggaacaacaaaccaataattaatagtactccccagatttttcgtgatgaagaagatgatgatgatgatcatagtaataataatatcgatacaacaatatccaaggctgctgctgatcatgatcttgtttctcctcttgaggttttcttcaagccctcttcttacattcatgatcattctcttcatcgcggattgcaggtaattgaggtcaacgcttcatataattccaataataatatggatgatttggatcttgagcttaggcttggtcaccctcgtaaaatagtcaaatagttatatattgtgtatgcagtactttcgtactataaatatatcatcatgatatatgtgcatatatatgttaaagatcaaattcataattaatttactagctatatatagctagtaaatactgatcatatatatatatttatctaatttcaactattgatgatcatgagaatgatatctaataatgtataacgatcatttttaagttctctataaacttttctatttctatatactgatgttatcatatttaatgatgaatttttattgtttatacataaattttgtttacattttctaataattaagatggcacaggtatacataattagtaggattattcttggtgggtccaaaagggtaatgtcattaatttggggatggtgtatggggaaaccatttgactgaatttgcagaagaaaaactcaaattctggtacacacaatagccataagtagcactcttcaactattcaactgccactttcttacgaatctctagacaaataatgtaatattggacagagtgaaagaatagaaagagagagaaagaaagaatttaagttacaggggctgtaggttttaaaggggtgagaaaaaatgacaaattactgatcttaaagtcatttctgctgcatatctgtcgcatcaatacgtgaaacccttttcaccacagtttcgtatatttaaaaaaattatatttatatcactaaaatatcaccattataaacatgattagatgaaactcttataacaaaaatagtttatactctaacttagtcggtagtaaaacatactaaattcaatattttaacgattacattttttttattgaggtaataacgttttttcttttcagattgtttgtatgatggtgtttattagtcagaataattctttgttttttaatttatgttctagataatttactacgatagttatttttttgaaccggctatgatagtttgttatatatattgagcattttttttttaactttctataccagttgaagaaagaaaagcaaattgtttgaacgaacatatctttatgaaaaaatcagaaaataaaaatatatattttggatgcttcaattaaaggtgtatttggatttaaaaaaaaaaatgtgtatcgtattgataaaatattttgtgccacctccatgtatgcattatgggtacaaaatgagttttgtactaattaccaggattcacattatatgaagacgatgaaattaaaatttaaaagcatcaatttatcaattacttgatccattattactaattaccggttctcttcatatgataatatatgataatacgtttatttattatttttttttatt

SEQ ID NO: 261849 - DNA, 2483 bp, Cannabis indica
tgcatgagtattgcactgtcttgcaactaaagagatgatttgttctgccatggagaaagacaacaagacaaaacaaacaagtatagaaacaaagagagacaacgctggaaaaacgtcgctggagttggagaagagccagagatggagaaacctgagagaggcgatgctggaaaaacgccgttggaggctgccacgcgcgcccacgcgctggcgcgtggagatagtcgccgcggatggaggtggcgcgtggggcccacgcgcagctcggatgatcgccggatttttgggtttggccgatcggaggtgggagaagcttcttgggtcggaggtgagaatagaaaactccttttaattagttttctaagatagagcctccaaaccctaattttaagaaccctaattttaagaagggaaggaatgaaaaaaaattcttttgaggagcttttacatgctctgataccatgtagaaaaatgagaaaaatgagagaaatgatttttattttctgatgatctcttttagtgtatacaaagggtatatataatacaatgtgaacacctagtaatactagagtaaatggaaaatacattaaatgtaaatttacaactaattgctagcttgatttcctacacttgtgtatattggaaagattacaatttttctttttttgtgaatgagtaagcagccattgtcttagactggccacttcccgttatttattgagaggcctcacttgtggcggtggaaaaccgtggtctcaatattttagcgacaaattacactaaaacacaccatatccaacaaaaaactaagaatatgtaataaaccataaagtttccaatctctacatcaatgatttccattcccctcaaatacaaaatggttggttttgaaaactcaagtagctgtccagaatttaattttatcctagatatccgcttcaaaacattcagatccttcaaatattctcgtgtttctttctatccaaacaacccaaaatgtagccaagatcacagtcctccaaagctttgtctttgcgttttgcaaccaaccacttactcactatcatttgtttaatagagtttgggaaaatccaaaacaactcaaattccttcggcaatttaaagcataatctacggatgaaaaaacaatccataaacaagtgttccacatcttctttactccttttgcagcaaacacaccagccaggggataacgataaaaaggggcgtctcttttgcatcctcccgtaaacattcactttgcccaaagccactaatcatccaaatactttaatttttgaaagcaaacttcttttccacaatatcttaggccattccagccctctataactcgggtttgatgtaaaccatccgaaggctgattttcaagagaaaacacttatagaatctggtctctaaattatgcaatcctccacaacactaatcttcttacatgctctagccgctgtaacaattctagaaaactaagaacttccctttccaatgagtttcttctaaacttgaaattccaactcgtaactctattgcctatttccccctcactcgcaacaaattctttaatactaccactcttatcccatcgaattctgattagatccgaaaagtcactactcgaagaattcccaatccacatatcgttccaaaaccaactactatccctttttcccactttgaaatttaccaactctatgaatgcttcatatagatttgaaatatctctctaaggcccctttggagacattcatactccagagttttagtcccacatattgtctgccttgccacatcgactcacaattactttgtgccaaagtgatttagattctaatggtaaacgctaatgccatttcataagcatttcagaagattactaattttaattgaataaggacttgacctatatgaattgtataaatccgaactaagactccaatccttgacaagatcaacacatattgtatttgtaaaatatggtgaatagattgcatatcttattcaatggatttatatacaatactagagagacaaaaaaggaaactagagaaaaaataggaaactaactaattacagttattcctaattctacaacttatatattctaacaacccccctcaagttggagggtaaatgttaatcatgcccaacttgttataaagatatttaaaccgcatccaatttaaagcgtttgtgaaaatatctcctaattgttatccagtcttcacatatcctgtggagagcagacattgttgaattttctcacgaacaaaatgcaatcaatctcaatgtgcttaattcgctcgtggaatacaagatttgagataatatgaagtgcaacttgattttcacaccacaattttgctggaattgaagtcttaaacccaactttagtcaaaaactgataaatccacactatctcacacatagcctgtgccatagctatatattctaatcagattgccgct

SEQ ID NO: 261850 - DNA, 880 bp, Cannabis indica
taattctttaagctcttattaatcggttttaaaaaagctcagtaaatagaagatatttcaaagacaaaaattcaagcaacatttattcagtaaaggctacatcagttcaaacatagctagtaagtcctattcccacatatgtctacacaggaacttggggggaaatatatcttgatttttgcccacatgacgtggcatgcttacatggatagtattagggccacgtggtagtatagttcaccaacaagaaggtcaagtcagcaccttagccaacgaggcccaccactcaaacgggatgacgagcgacaggctagctacctcataggggctggccggccacccctggccgaccctatcactggccagcttctggaaagcactaagctgatcaacctacatcctccatgtgcatggctggccaagattgaacctcataggactttggtgcaaagccttacacatatactgcaagctagactgtgaattgggccataacagcccacaaaagtcttgggttttgtgccctaaataaaacccattacaatatgatagttatcaatttaagagttttgaagtgattatgattacatgtattttacatgcttatggtttaataaatatgtaacaccctaactaacataggcgtattacgtgatttttaaacatactgtgcagctcgttgctaatcaacgaggtttatggaaaaacgtgattaattaaaatttttgctttttaattaaacttataaaataatattacaaaagactcgggatcccgattataaaatcatttacaaaagatttaactgtttaactgatacataaaataaatgtcatctaatgaccagttaaaaaaatcagcctcgctgtcccgatgatcg

SEQ ID NO: 261851 - DNA, 1529 bp, Cannabis indica
acctttgtcgatctattcctcacgcatttttaggccacgatgacttataggtcgccctatactactctggctaacatcaagcaagaacccggtgagtctttgcaggactattttaaacgttttaatggcgagataacaaaagttgagaaggctcccgagtcttcgcttgtttgtatgctaataataggtgtcttgccgatttttggaaggagctacaggctcaaagaccagaatcgctggtcgagttctttaccgtggccaaaccgcataagagaattgagaattctctggcagaattggagaaaggcaaggacaagcgtaagtcactagtgccgtggtcacgatcccgcagtccccgagggaaaaattccagaggtcgaagcccaagaagacgcagtccacggagagagcgaagcccgaaattggccaaatctcctccaaagaaggagtcctcgctgaaaaggaaaggtggaccgcacttcgtgaattatactgagctcgcggtaccacgagaccatatctacgccattgaggagaagaatggggtcttcaagaagccacccccgatcaggggaaaccgcgaaaaagagggatcccaagaaattctgtaagtaccataaagatattggtcacaatactttggagtgttgggatttgcaggatgagattgaagagctgatcagaaggggaaaattcagcaaatacaaaaggaacgaggaaagtcatccccgagcggatgacaaagaggaaaaccaaaacgcgagtggctcaagaacgcctcgcaatatattgaccatcataggcagaccccatatcgcaggtgactccagaaagtcgcaggagcgatatgcgaaggaagccaaggagaagctgctcaccaacgtgaacaatctcagtgagcgaccagagaagttattcaagagagaatgcgacgacatcacattcatggagagtgatgcgagatgggtccatcacccgcattctgacgcactggtcattgtcgccaatattggcggagacaacgtctaccgtatactcgtggataacaaaagttcagtaaatctcttgaacttccaagcctttaaccaaatggggttgcatgagaaggatctgcgacctgttacatcgagtatatacggttttaccggtgacgtcattgcgttgaaaggaacgattaagctcccaattaccttgggaactgcccccgtagtagccaagtcaatggccgactttgcggtaatcgaccaatattcggcgtacaatgccgtgattggttgaccaatcctgaaagagatgaagatcgtgacgtcgatatatcatctcacaatgaaattccctactcccactggagtaggctctgtgcgaggagtccagtcagattcgcgagaatgctacaatgcagcagtcaagctcgcagagaagaagtcagtaaatgtcatctatctgttagaggcaccgcctcctcgccaggaggtccttaggattgaagaagtgccgcacaaagatggaccagatttggatccgaggat

SEQ ID NO: 261852 - DNA, 768 bp, Cannabis indica
tgctgctcatgtcgagctgaagaaggcatacgagaccagccatgtagagctgaagggtggtcagaacgtaattatggagcagctcagagacatattggccatgttgaatcgtccgccaacgacagcttcagcaccggaggccccagcagatccatctaccccaccaccagctgcatcacccccagtagaagaggaggaggtcttccccgacgggtacgatccttatgagggagctccagcgactcccatcgatacaggtgttatccatgtacatgacaccgagtcgcagggtgagattctgtcgatagaggcacaacctgcagtggttaagagtcggaagaggaagagaaatcctcctgtatggttcggtgactacacggagatgaagaggagacataggccatcttcgacgtttgatcccctggagccaccggatgagaaattgttagttactttccgaaagtggtgtgttggactcattccgaaccaccgacttcgggatttgagaagtggtgattacggtccatcattcttttggataatgctcacaccaaaggaatggcttacagatgacgtaagtaaagtattttgcaactaacgagttcaggttcatgcaacttgaaagagaattttgcaaaactggtgtatggccggctccaccacctgggttccccgaaggatgccgtcgttgcaaactgggcatcttcaacggtaaaccggtgaagcctggaacattatgcaagtattgcaaggctcacccacaagcca

SEQ ID NO: 261853 - DNA, 663 bp, Cannabis indica
ctcagcttaatttttgtgacaactttttttttaatataatccacttgaaaacaattcctaatacgaacagatacagaaaatgtaaataattttatcataacacttttagatcggattataattaaattttattttgacaaaaaatcaattcaaggtcttatttgtaccattttagaaaatacagggttcattttgtcatttaacataacagagggtccaatttataacttttgcaaaacacagtctaaattagtatttatccttttatatttatgacaaggaatcaaggttttcttttttcaaggccccatgacagaaagagcatgcaatctatatagtaaaatacaatttgtatttctaattgtctaattactaaaaaccaattttaataattatttgtggcaatcataagaggggatattggaagctgagaaaaataaacaaagaaaacagttggaaatagtttaactgccacccaacaacacaaaagatttcttaataataataataattattattaatcataaaaatgggttagacagtgatgttgcaaagattttcccagaccaaaatatttgaatcaacaaataacttcttacaaagctctgaggtggccatgacacaactgtcatacacccaatttttttgtttgtttcttcttta

SEQ ID NO: 261854 - DNA, 655 bp, Cannabis indica
tcgcttatcaaaaagactcattgtcgttggctaaaagcgaagtcaacattttggtgctttcattgagagcagaatcacagatcgctctttttaatattcaacacgatggtacaaactcgtagaggcctgcctgacccatcaagctcacagacgctggatccgacattgcaggacccaaggagttcaagggttccacccgctgtcaatcttggacagacgggaagcgtaatgaatggggtgacaactcctgttactgaaactgcgcctggtgtgcaagagactgggaataacagttccacacacagccagggcgttcataacacaactattccaccaggcatcagtgcccagacgaccatcggagacgcaaccgaattgcgaaacctccgcgctgcgctcgaactcatgcagggtcacagcaataccctgcatcatgatgaggaggaattacgtgccacagtaaacctcgcgtttgacgaacagaggcgtatgtggtcgagtggagggacaaagagatggaggcattaagggctcacccatgcagaagtcgaagatcgtagtcggcaagctactgtgctgatacgaagagcctatcaaactgtaggccagcaaacgccgagcgtcattcccctgggggaaagagaggatgacccga

SEQ ID NO: 261855 - DNA, 1629 bp, Cannabis indica
  modified_base (1592)..(1592): a, c, t, g, unknown or other
ggaccacaatttattttctttttctgagaaatggaccgtaatttacttaatggagtcaacaagacctaacaaaattatttcatcaaattaatatgtttcatcaaaaaatatatacaataatagagaaatgaattatgtagcatgtactatgtactatgtacgacgttgtatagtatttttcatgttcaaaatatggcatcacatgattcacatccacagtcagtcattaggggtcctacaattaattaattatcttaaattattatttgagtgttctccaataagattccaaatcaaaattagaaagcaaacatcaatgataagtcaatgaagctcgtgtttatctctacacacatgtgtttcacactcacttttccaattacatctatactacaaaaaaaaaaaaatactcacaaagtcagttatctttaccgtacactcttcaacctccacctgccattaatgtacggtagtcttaagttttcagctccatctcttttttctacttcctattgctaccctgttttccttactgaagactacgtaattttatatatatatagttaagaaaagagaagaaaacaatctaccatgcccatgaattcttctaacttagaagctcggtatgtttttcaattctctcttttcactttgatttagttgtgaaatgcttgatttgtagtttttcatggttcggagctgggaagaggtattatgacaggaaaacaaaaatcatggaggttatagtgccttataatatatagtgttggtgatctagttacttagtgttattataattacatatatttatatatgagctgagatacatagaaagattctcatagttcttggtggggacttgtaaatttcatttatttcttggtatttgatctttgatttctctgtttttctgggttttcattaatttggtgctaagagagctgaaattaatattttgaagttgttttattgaattttataatagcatctgagctatgaaatttctgaaaagagataagtgagcagtcaatttcttaggataatgattgcctgtagaataatattagtggaaaagtttttaacatttgtttaagaagaaatgcccaaaaaatttatctgtattattgaataaacaactctctaagtaccaatgagcctgaagtgctctcaaatgaatatgcaattcttttggtccattttgtctgcagaacattattaaatactcctttagattaaagcaagatctgttctgttttatatacaaatttaataataagttaccgtttcaatactttatcttgtttagttgacttatattctctctctctctaattttgcgtgtgtgataggtatcttatttcttgcaagaagcatgcggtaattcctaactcagcagtacaatcattggtttctgaggtcagagttcataaaccaaagaatgagaagtatggcataggtgttattcttgaccagctaatggatagtgatatatctccacttgtagatataataatggcctttgagagctcagatatggatgcagttgacttacttcaagaatcaaatggtaccctcagtgaaagaacatcttntggctttgatgcgtgcccttgactttaaacttcgtag

SEQ ID NO: 261856 - DNA, 710 bp, Cannabis indica
agggagacctcctcgagggtagccaggcgcttaccgctcttcttagatgattttgagccagaagcagacatgtctcgattctgtacaaagagttaagattccagcagataggccccataccaaaccctaaaccaataaaaagggaatgggggtcccctaaccgctggaaagaggccccctccagacacctgtcatacaggaaaccctaggaggattccctggacaagattcgggtgcaattaattcacagaagacggtattgcgcactaaagaaaaagaaaaggcagaaaatagaaagaaaacactctatcctatgccctaagcgaccattatacggagaacgtatggtcttctacaaaaaataacaacaaatgcgtgacaatagtaatcctatcactagaccagtgaactcaaactgattatatgaaggatcaaaacatttgcattcccagaaacttcgaatacaaacccagaaaagaacaagcaaataagtaacagcatgccaggcatattaataatgaagcaaacggtgcaaggaacttacaatgaagtgttgagactgggggtcctgctgtgaatcaaatgaagacaagaaggactgacagtaacaaacgaagaagaactcgagaaaattgcaaagtgttcaaaggtgtttttctgggtttgagaattttttctctctgggaaatttgagcaaagttggcaagaaa

SEQ ID NO: 261857 - DNA, 6665 bp, Cannabis indica
ttactaaaattaagtaaaaaagtttttaaactccaacaatctacaattagtgggtatgaattggtactcaaagttcaggcaaaaatcctaattagtttttttttacaaaattaaagtaattattatttaacaaatgttttttttttttgaaataatttaacaaatattttaatttatttgaggatgaaaaataggtttttatttaggaaactcaatccaaaagtatattcttttacccacttttccacctaaaaccgaccttggagttctataagtggtgggggacaccacaacatcacctacatgtgacaataaattcttcaccataacgcgaaattcgccgttgcttcataaacataatctattatttcattcatttctaccctgaaccttcttcttcattcattcatatcatattatatatattaatttaaagagaaccaaatattggtaataattgagataatatctcacagatatcaatcactcctctctcaccggtgtttgacttcttccagagatttctattcaaacaaaaaatggcttcttcaatcaatatttcatccccttctacaactactctctcgcgaccccagtaagcctttttatcctttaatcccttgattatggagtttttcatggcttatatgttttttttacgttaaaccccatctgggtttttcatttcaattgggatttcttcgctgtaatctgtttttggagtctttgaagtttattgttttaacagagtttgatcatcaaagtttttgattttggagtttttcatggcttatatgttttttatgtttgttttattatcattaattttttggtgaattttcttaaattgttcagagtatcagatccaacttgtttattcagcaaagcaggtctgagttccatgacaatggttattatgagattatggttttggagaaaattgttgaaaagagaaaatataaactagcatattacttaactgaagtttgtttcaatttggaggaagtatgaactatgaagtagaaattagaatagaaacaaaaacataggacaccataaagctgacaatcttttgcttttgatagcatattattaagagcatgaacaaatagacctctctttcattcttccttataaatttgagcaatgaagattcagttttgggatgatatatgcctatgttgggatttggtttaccctgacttttatctttttgtctttgtcattggtcacaattactgtgcaataggacataaaatctaaattcctcaaggcattaccacatggacattgtattggcatgtctgtccgatttctacatgtttgggtagacaaatgttattgttactatcagccataaacagtaatgtttagaaattagtttttttttgtggggtggagtgaaacttttggctatttatgggattttccccataagttctttctctttctttagcaaaaggcaaaagaacagcagtgctcactgcttggctctgctttcacatattttcttgtaattgataaactattggttgcattagtaattttatgtttaaactgtaacatttgtgatagttcttttcctgtttgagtaatccttttataaaaaatgtgtatcttaccttatgttacatgctttctatcatttgtagagcaagcaaaaacttcaaatggtttagtggattgcacgctcaaaatgtttactttgcaaatggtcatacctccaatttatccatggtccggctgggtggtaaagtttcatttagtaataaaagtcccgggatgactagagctgcattggtatctggagagggtgaccttttggcttatacaaatggaaataatatactggaagatagtactcttcttagtgatcatactgttgggattgagatgcagcctgatgcagtttcatttggagcactttcagcagatactgctccaacaagtagcggtttttctgacgacaatgatgaatttgatcttgatcggccaacagaaggttttgcttcaattccagaggccattgaagacattcgtcaaggaaaggtgagcattggtttgtgctttttactgttaaagattctcgtattgcagtaacttctgtttcaccaattattttcacttatacattgctaatttaaatatggagctacagattgtagtggttgtggatgatgaggacagagaaaatgaaggagatctcataatggctgccgaattggctacgccagaggctatggctttcattgtaaagtatggaactggcatagtttgcgtgagcatgaaaggagaagatcttgagaggttgcaaattcctttgatggtacaccaaaaggagaatgatgagaaactttgtactgcattcactgttactgtggtatgtattcatatctgaaatttaaattttgagacaatgaaaaatcttctcatttttctaataagcttttcttctacggggtagtttgagatgcgaatttttagtcgtattaacatactagattttcactttcaatatttcatatccaatatctttcgatgtttttcattgccactctttctcgtgtttcttttttgtatgaatgacttgtttttgctctttcataggatgcaaaacatggtacaagcacgggagtgtcagctcgtgatagggcaacaacagtattggctcttgcttccggggattctaaacctgatgacttcaatcgaccaggccatattttcccactgaaataccgggaaggtggtgttcttaaacgggctggacatacagaagcttctgttgatcttgcagtactagctggtttcaatcctgctgcagttctttgtgaggttgtggatgatgatggttccatggctagattaccaaagcttcgcgaatttgcagcaagggagaacttgaaaattgtatctattgctgatttaataaggtaaagctattacctcacttggtcaggcgtaattcttcattgttttttttcttacctggattttgtatttattatacataaatgaaccaccatcctctaatgcttttagagttaagtgattgctaactacaatattttaagatcattgaatggcataaacattaggatgaacataaagaaactatttatctttctttttttcttctctatgatctttcatatttctttagagatcatgtagtggtctgttaatttttatggacttgtgctaaattcttatagtcacaagcatttaaataagcccgttttctctcagctgattgtgatacaaacaaggtttgtagaaaaatttgcttgaatctttattggtgtaagaacagaaattacagttccaagaattcgagaacttggaaatctcccactgacctttcactctgttttacacaaaaataatcagatgcctctaaatgaggggctaacatctatttatagggtatcaaggagagacttaggcctaactaacagttaaaacagtccattataataagctaacttggacattcacatcagcaatacatttaattaagcctaaagatagcagaagctaaactgaataacacttagtaaaagttactcagctaagcttctgctttgtagctttcttcctcctagagtagattgagcgaatttcatgcctaacagataattttgcaggagtgagtttatatgaaagcttttactaagttaacaaaatcgtattttatatgttgcattctgctaaatttgaaacagctttaggagtactttggtggggatttggaagaaatttgttggtttcacctttaagtgactttaactaatgtatctatgttagtggactttatttcctttcttagaatctaatgaaacattaaagatattgacattttgtttcttttactcttgacaatattttttaagggtataaaatatactttcatgttattaaaaactctttaaagttatattaaaataaaccaaggaatgaaaaaacattacactggtgaggaaacaagtggtagttctttagaagacatgcatgcaaataacaaactgctctcacaatgctcttgatattatcgtgcagtccttgttatgtcatacatatgttacactgatgtggaaaatgatattaagaaaacaattcctatctaaaatactagttctggaggttttctcttgttcagttgttaatcgtctagatttgttctaataatttggttcaattttgacagatatagaaggaagagggataaattaatcgtgcgttctgcagcagcaccgatacctacaatgtggggacctttcacatcttactgttataaatctatcctagatgggattgaacatattgcaatggttaaggtgagaaatatttgttttatcccagactcacaaaatagaaatccatttgaggctaataactcgagctgatattttccattaacatctccaagactgcttaatgtctgttctgatcctcagccaaaatgtttgcttaggatgacaattcacttgttcaaaatttgattactcttcctttaattgtttgaattgaaaatagaagccttaccagaaaatgttcgtgtataaactaatcttactttacaaacagggcgacattggggatggacaagatgttctagtaagagttcactcagaatgtctaacgggagatatattcggatcagccagatgtgactgtgggaaccagctagcacttgcaatgcaacaaattgaggctgccgggagaggcgtcttagtgtacctccgtggacatgaaggaagaggcattggattgggtcacaaactgaatgcttataaccttcaagacaaagggcgtgatacagtggaagccaatgaagagctaggtttgccggtcgactcacgtgaatatggcattggtgcacaggtaacactaattctgctgttgctgtgaaatgttacttcaccggttctccaagctcgcctttattatgttgtctcaagtcacaacattgaaactctgacaagttcataaaattaactaacttttttctttgaataatgcagatattaagagatctgggtgttcgaacgatgaaactcatgacaaacaaccccgcgaagtacatcgggcttaaaggttatggcttggctgttgtgggaagagtcccattgttaagtctgattacaaaagagaacaaaaagtacttggagacgaaacgagcgaaaatggggcatgtttacgggtttgagcccaacaaccgtttgatcaacgttaataacagcaatagtaaacagggtgtggaaagttcatctgatgctgtctctaactcataagctcttattgctatctattagaagaacacatctcagttgtgatatgcagacaactgtataacttgacagaaaggtgatggcatgatattgttcccatttgttattctaattcaatttatttttacactgagttcatctgagaatatgattaaaaaattttgcttagtgcaattgttctaagaatgcctttgtatttatgcttaaggaatttcaataatgaaaattctgatcatcttgtattgttcattgtggatttttggatcctctagatggatggaatttgaataaagaaatatagattatatgggtccaactgggttgtgctttttaagtttttattctggctagtagttgagattgttttatcttcacctgcaaggttgtttgtcttcaaaataattttcatggtttcttttcatttttgatttcatcatgagactccatattggcatctttccactcttgtttgaattcatgcttgttttgtaagattatctatgatagaatattgaagagaaaaaagtctaatgtacttgaaaccagtgttgcaagtgataatccgggtaccatggacttataatactaaggtccaataaattacattattttttaatctcaccaattaaataatcatatttattaattctataattactccactataaatatgaaattgaaattttattaattatagaattaaatttactgagttcaattgcagtgttcattgatataattagcactccttgtgtcgattcataattaattttagttaaattatcgttttactcttctaattatataattattttttagtatcattaattcactaatgaaagtataatttagatctaatataaatttgtgcaaataattaatacttaaggggaaccaacatttgatctattgggaaagtcagtattctatgattgtaaatcaaattcctagccattcatattattagtttccaaaaatagaatttgtaaatatcatcttctctgagaaactttaacgagggaatcaaagaaactaataacatgaacatgagttcatgattactcatgattcatgtcgatctactaattgatcatcgttgtgatgtgaattaggcatttatagtaaacgatatatttgataaagataacttcggtcctatatcatatataatttctattaaatacttttccttcacttaaaagtctttctacattagtaatctaaagggagattgcttgcatcgaataacgagcatcaatgaaccgtattagcaaccgttgattaaagattctataattataatatgttgctgactatttattcatatttagtgatttttaattcttttgtacaatacaagtcacaccctcatatatg

SEQ ID NO: 261858 - DNA, 819 bp, Cannabis indica
tttttaaaaatagaaaaatatttttcatggaaaaaagttttgtacgaacacatacattcatcacataagcacataaaccaacatgaaaccatccaaatcaacacttgattggattcttcacaatctttcacactatgattgagataccacttgatgtgtgtgggtactcactctatcactcaaggctgaataatatgaagaataaaagagaggaagtggtttcagtttttctataggaaggaggcttaaaattttactaaaggaatgtgatgtatcatcatcttttctcttaatccatcactatcaatttatatgtaaccacctaggtttaggttagatttaattagcattaaaataatggaaaaaaatggtaagttctacactaagtggccggccttaggatgtggattggcccccactttgcaattttaccattttgtcatttttccatcatattttctcaaaaacgctaattttcctatttaatcacgtaaatgccaattccaactatttaataactaaaaattaattattaaataatattgtcatttaatatatttattaattagacttaataaaatctttcaattaataaataagacctagaatctctttcttcacaattttgcccttgcttagtgaaaattcataaactagacatagcctaattttagaattataattgattaattaaaattaattaactaagtctgaacttaccaagtaaactcactgacttattaattccttgttgcatccacacatagaacttggaattgcactctcagtcatatagaacgccctatatattccacgata

SEQ ID NO: 261859 - DNA, 2422 bp, Cannabis indica
ttcttcaactttacttttgtttattactatctttgagaacacagatatcattagcaaggaatcagtataaaaaacagcttaaaaaaaggcccaaaaactggccccaattaaacaacttctcaataaatgtgcaaaacttctccatacaaaagtgtatggattacatgtttgatacaacaacaacaataatcttattttagattctctctttcagaaaatgttaaaactaactttctaaagactggtggcaatggcatgaccatagcgactagaacaaaattagacatggatgaacatgatcgaaaatagataaaagaaagataagacattctcaagactcttctttgttgagcttaccaagtgccctctgcgccgcatagaattgcttttcccgagcctttttagcagcaagctcttcctcgtcaagcactttgattggagaccagtcaggcaatttaaaccaatctttgtgcttttcctccgatgcagattcagtataatctttcaattcatcttttagtttgcttaaagcatagtctaacgttgtaccggcgacagcaaacatagccgagtatcgggcagcaccaactggaccagctacctcaccaaaaaaaaaaaaacaaaaactcaacaatctatcttggcaactttcaaattgaaataataatcagtaaatgtgcacgatagataatagtaacaacttcatgtaagaaaactagacctatatccacactcgcattggatgacatcttctattccaggaaccaagttccactgataatcttatctaagcatccttgaagacataagttttggttttgatctaaatcagtagtttaatatcagcattggatgcgagttttataatgccgaaagcatgaaaaacaagataaccaaatcctgttgatgactcctaatgtaatccatgtctcattaaaaagttacgactaccctttatctcaaaactcaaacagtaaaatatcactgtgttctcaggttatatcagagcaaccgtccaccatattgctagagaaaataactaatcaattgactatccacattctattctagagtaagataataatagtgcaaattagtcaattttactaaatgatcaacattttatcttggattgtcaatgtataaaaacattaaattatatccaatgtaagaacataaatcatctcaactttttgtgaatcttaaatttaagcaaacagaagagcacaaatgagagtgaaatatgtatctatgtatgtatgtatgtatgtatatggaatgaagtctaaccctgaagacggccaaggatagcaccactaaaaacgccagcaattgcagagttaaaaagatcatcacggtctgatttacgagtttctcttaccaattcacgcgtccctatcaaatcaaagaaaccattaaaattgcagagtttaaaggaccatctcaacagaaatcatcactcaaaacctcaatagcaagcagaaaaagtcaaaagttgagagactgagttcaaaaaggaatggaggagattaccgcaatagcaagcagttacgatagcgaaattagtagcataagtagcagaaatgttggcgagaccatgaatttttcggtgcttcgataataatccaactccacctccaacaacacctgcgcccccatatcatcatcataaatattattgtgtaacaattcacaaataattgtattgctccaaacaatttccatagtattaaggagaaaagagaagagacctgcgaggagagttgggatgaaaacctgctccttccaattccaaccgccggaagaagaagaagaaggtggattctctggttctagggttttgggtgtagctgaattcatcttctgatcatgaaacttattaggggagaactctgaagaattggggtcggttctttttatatgctttgctcgccgagatcaacctttgtttcacactccattagagactaattagcctaaattataatgtgttttttcttttatttatttatttatttctttttgagaagtttcttttttttttataaggttatattgtgtttttttaataattgtttttctaattataattttttagggtatacgttagggaatcacttttgctttttaattacattagaaattataatataacttacttatttcaatatatatatcaaaaatagtaaaaattttattctaaaaatcctgagcagttcgctctacgtggctcacacgagttggtcaacacatctagatccttgtggcggatgtgtcagccaaccgatcgaacccgaatgtgctacgtgaatgccgttcaagaattttcagtataaaaataaataaataagtatactaacaattaataaaataaagggtcattttacaatgcttagaaataaattttagtctaatttttttt

SEQ ID NO: 261860 - DNA, 1042 bp, Cannabis indica
tatcaccaatgacagataagccatccttgagagttaaatttaaattatgtgcacaacaacggacatgtagtaactttcccttcaaaataaaactgtgaggctcaaattgtcctttcaaaagctcaattatggcatcatttgcagtacagttatctagagtcactgtaatgatcttgtcttctattttccattcatgaagacaagatcttaggtctcaagtagtgctggagcatcatgacgacacgaaacatacttaaaactcaagatctaactttgcaatttccgagaatcatgaataaaattagttgttacaaccatatatcccctcttctgataatttgtagtccacatgtcactggttatggctattctcctcctacttttttccaaactttgcttgcatttttttctcagttttattcattttcatgatatcagacctaaccgtattccttgacaacatttaaaaaatgggacccgaagtacttgaatattctataaactcgctatgcttaacaatggacaaggaatattcatgcttaacgatcatttgagccaatttgatccttcctaaatcaggatgaaaattaaaagtaactgaagggcttgcagttgcactaggattactggcaagcttggcctttcttactggacacctctctacatgagaatttaaattcctagtccccttagaactttctcccaccagcttacgcttgtagtaattgcaaactactttacttttgccatcaatattttgtcgcgtaaaaggatcccatgcactagagattctttttctctatgtctttgtagtcagattttaatttattgtattactaacagattatactttagttgctattgctggcaaaaaatcaacatcatcctcaaaattagaattgatttgaccagacattctattttaacctacattaacaccatattctcatatatatcaattaatgcatgcaattgcttagaaaatatgataaacatatccacgaaaaattgggcaacaatttctctattttattaacctaac

SEQ ID NO: 261861 - DNA, 1340 bp, Cannabis indica
attttctacaaaagtaacatcaatagaaacaagatatttgttgagatcaggacaataacacctataccctttctgaagacgagaataaccaagaaagacacactttatgccttagggtctaatttggtgacagatgggcggacatcgcgagcaaaacaaacactgccaaatactcgcggagcaactggaaacaatgacttattaggaaaaagaattttaaatggaatttcaccattaagaacagaggatggcatgcgattaataagaaagcatgccgtggaaactgcatcggcccaaaaaggtttaggaactttcatttgaaacaagagagcacgtgcagtttcaagaagatgtctgtttttacgttctgcaacaccattctgaggtgccgtatcaacacaagaagtttcatgaagcatgccattagaggtcatataagattgaaattgagcagacgtgtactctttggcattatcacttctcaaagtacgaatagatacattaaattgagtttgaatctcagcacaaaaagcacagaatatagaaaacaactcagaacgatttttcattaaatataaccaagttacacgagaataatcatccacaaaagtaacaaaatacctgaatccaggttgagacaaaataggagaaggaccccaaacatcagaatgaactaactcaaaaggaacactagcacgtttattgacacgtggactcaaactaacacgatgatgtttggcaaactgacatgactcacaatctaacgaagataaactactatattggggacacagtttcttgagcaaaggaagggatggatgacctaaacgacaatgagcctcaaaagcggaagcaacactcgaacaagcaatagaggttggcggaagtgggtcaagaacatacaagccaccagattcatgtcctttaccaataatcttcttcgtcataagatcctgaaacaaacaatgatcaggaaagaatgagatgcaacaatttagattacgagtgagttgactaacagaaagcaaattaaaagacaaataaggtaaatgtaagactgatgacaaagtgagcataggtgtaggaataaactaaaagttgcagatgttgggatcccaaaaacatttacaaaacattattacaagtccttttctttcagtcggcctaagcgacaaaatagagtttcaaaaacacaacactggtagaccccaacccgcttggtctgatatggcccagacatgtacattcttcgtccagctcctgcactcatggctaatcagcaatagtcttaccctttcctgcaaagtagagcacccatgagccatgcccagcaagacagt

SEQ ID NO: 261862 - DNA, 1197 bp, Cannabis indica
aaagaggagaatcaagaactttcttagaaaaaagagaagttgcaaccggaagaacattagataacattctccagataaacagtttaaccttgggaggaatattaggagaccaaacacgggaccaaaactttttagaagaagtgaaagaagaagaagaaggaatatccaggaaagaggaagccagatgataagcagatttaacagaaaaaacacctgaacttgtcttctcccaaatcagagaatccctaccataacaccctgcaactggcacttcaagaatatcatcaatgatagaattatcaaaataagcacccaacctattaacatcccaagtccctgaggcagagataaagtaggataaaaactgggaaggaggatggatagtactagagaaagatttatatttatgattaggtagccaatggtcagatatggtatgaatatcattcccactcccaattttccagataagtcccgaagccaataaatccataccccataaaatgcttctccaagtgaaagaagggttgtgactaggggcagcagcaagaatagaagaatgggaaaaataacgagctttaaggatcctactgagaagagagttaggattgtccataatacgccaagcttgtttagctaacatagcttggttgaaatgaactaaagaaagaaaacccaaaccaccacagaatattgatttacaaagggacttccaggatttccaatgaattttcctagactctccattagaaccccaccagaatctggccatcgcagtctcaattcccttacaaagcttaacaggaagcctaaaacaagccatcgcataagcagggatagcttgaattacagctttcaaaagaacctccttacctgctctagagaaacatttagaataccaagttctaaggacagaggcaactttatccctaagaaatgaaaaagaatgaaactttgaacgagacagacattgaggaagacatagatattttgacacaaaaggcttatcttctaaattaagagtgtcaaagaacatggtacgaatctcctgaacaatattaggagaaaagagaatagaagatttggaaaaattaatggcttgacccgatgccctagaataaatgtaacgccctaatgctaaggcatgctacagtgcttttttaattattgtgcaatctttgctaatcaaagaaattt

SEQ ID NO: 261863 - DNA, 843 bp, Cannabis indica
gcagattttacatccatttggaacagtttaatatcaagaatacaagcaatacacaagagtaaacgaatagattctaatcttgctacaggagcaaaagtttcatcaaaatcaataccttctacctgtgtgtatccttgtgccaccaatcgagccttgttcctcacaattgtaccgaatttatcacttttatttttaaaaatccactttttccaatcacattgataccttttggtcttcgaaccaaaatccaaaccttgttgcgaacaaattgattgagttcttcttgcattgcattgagccattcttcaaaagtcatggcttccttcacatttttcggttcaaattgtgagacaaaacaaagaaagctaatcaaattaacataccttcttcgggttaccatgctttcttcaagatttccaagaatgagatctttgggatgattcagtttaactctggtgcttggttccttctggatagaatcagtgatgatgtttggatgagtcgagataggctattctggttctcctgtatcagttgcaggagcagattcgtcaattgcgtcgccagaattgagttctgctgcatcagaatctacttttgctacttctggtggagtatccataaagctatctatctcagcttctgtggaaaattctgaaaaatctttaaaatcatcaacaaccacattagctgattcgaaaatagtttgacttctcatattgtaaacacgataagctctactatttaaggaatatccaatgaaaacaccaacatcacgtttagcatcaaattttccaatatgctcacgatctctagaaacataacacacacatccaaaaacat

SEQ ID NO: 261864 - DNA, 700 bp, Cannabis indica
gctgataggaattcttgcctggcgcttcaggacgtgtttaatatttactctaaggcttctgggaaagctattaatttctctaagtcctctattcttttctcccctaatactgatcctaatattcgtgctttatttttccaaacttttaatcttgagtatcgaccttttggctgcaaatatttaggtcttcctcagtgtctctctcgctctaaataccattcttttacttttttgagtgataaagttgcttctgttctcagaagttggtcctccaagtgtttctctagggtaggaaaagaagttctcttgaaggctgttatccaagctatccatgcttatgctatggcctgttttaggattcctgttagaatttgtaagggaatcgaggctgcgatggctagattctggtggggttcttctagggaagttaggaaagttcactggaaatcttggaagtctctgtgtcagtctaaatttaggggtggtttggggtttaggtcccttgtgcattttaaccaagctatgcttgcaaaacaagcttggcgtattttccaaaatcccaactctttactgagtttgattcttaaagctagatactttcctcaatcttctatacttgaggctgtccctggtcacagtcctcgttttcttggcgaagcatattatggggaagggacctgatggcatctgggcgtaattt

SEQ ID NO: 261865 - DNA, 768 bp, Cannabis indica
cttcgtttaaatccatgaaagaaaaataaatttcttggaccaacgaacaaacgagaaggagagatctttgcatacactacttttattgtacggcctgcgaatggtcctagccctgacctatgcaagaaccattcttgtcataaatttacaatgtcaagaaactaagataaggggtttatgcacttacttgatgcagaggggatagtcagtgccttcggaaagtttgctcgaagactctagagccagtaaatgaagcagtcgcagtctgcctgaaaatcaaacgttccagtgaagaactttgttggttcaatttaaagggagcgacacctggaaatagcgcccagcgtataacgagtagtcgctagattagatcctccaattcctttttcatgcaaaagatgcaagaaatggaaaaaagggagtggcagagaaaaaatgaagttttcaatgaaaagaattaaaaatagtaatactgccacaaacggtttttatttcaaaaaaggagaaagggctccaccagatcaacgaccaaaagaggttacagtgaatcgaatggctaaggaaacaaggggtcccatacgttgctcccaggacccataaaaatgtcaaggtccttttcctcacatcattcggccgccagaaacacccctcctttcttgctaagcacactctgccatacataaaagaagagcagaaaacacttcctgatgtattgcgtgttggaaattattttaccaggatcttagatcaactcacaagtatgttgat

SEQ ID NO: 261866 - DNA, 790 bp, Cannabis indica
atgcctttctttatctatgttctaaatcagaaactaaacacgtaatctggttttgctattccttttttcttttgcttctgagattaataatagtattctcttgtgaaactgcatcatagcatagatgtgctactccttttttccttgtgagattaattttcaatgcagagatgtggaactaatggagaagctagactactcatcaacagtggtattacttggttactctcttattgtggccatactaagaagttgtaacttgagggatgatgctgccagagtcatggttacagccccagtccttgcatttgtaaccacccatataatgtttcagaatttctacaaattaaactatggtattattcttctccttgttctctatttcataatggtaaagaggaaatcaaacatattttagcttaagatttttgttctttggttgcaatcagatttttgataactgtacactacaattagatgtatgatacaacaaccattacattcgaaacacaaacatataccaaaataaataagtgaatagtttgaactacttttctcttgttctagtatcttatacagtccaaaatttgaaactaagtatgaaacggtgttgagcgaaatggggtgagtttttccatgtcttatcgatggagtaataatatgtgtacgcataaatcacgcacaaatttaacacacacttatgtggcaaaagactttaataagtgggagtcgccttaaataaagatctattgataaatttacttgccacataagtaggtgtcaactttgt

SEQ ID NO: 261867 - DNA, 655 bp, Cannabis indica
ttttggttgtttatagtttatttatcattgtcgtgaaattgatttctcattatcctttttctttttctaacaaatattaattttgtaattttcaaactttacaagtatattattaataaaaaatttaggtcaaaaaaataataaaaaacaataaaaaaaaaaaaaaaaaaagaatattatgaatattcccccaaaaaaatgccagatacaaatttaaaataaaaagtagaatttacatagtatgggttttttaaatattttatgataaatatggcatagttgagtatggagatttttatgacttttttaaagtttggccatgttttatgggtttttaaagcccatacgcttggaatgtatttttgaaaagcccatattttattctttgtagtttcagtaggctattttagtaattttatgtatttaaattttttggttcaattttttatgtacataattgtttactttttatgggttttgcatataatcatcacgatttgatggttgcttccccctctatacttacttttacagttttcaattcactctagagtctaaaccgcctaatatgattatctctctccctctcttttttcatttcgttgtgtttcattttccctctttcttcatttcttcttcgtttctgttttttttt

SEQ ID NO: 261868 - DNA, 1047 bp, Cannabis indica
aaaaaaaaaaaagacaaaagaaatactcataaatataaataaaacaacacacaatgcacaacaataatctaaaacaaaatataagtgtgaaaaccagtttcaaacttagaaacaaaataataaaaagaaacttaaaataaaaaatatacaataacatcataaaataaagcaacctcattacaaaacccttaaaacctgtaaaaccaattttgaacttatgaaccctcagaaatcagatttgacactataaaaaattataacgaaatataaatgctaaacaataaagttaactgaaacaagtcatcagaattggcatagtcgccgaaatttctttcggcaccgggaaagtcgccagagttgctgctggggccaaaaaaatcatcgaaattggcattatcaccgaaaaaatcacaaaaaaattatcaagaaactagcaatttttttagtaatttttccggcgacaatgctaattctgacgaatttcctagagtttgctttcgataccaaaaaggtcactgaagtagttgccggtgtcgaaaaagtcatcggagttgctgccaatgccagaaaaatcatcagaattggcatagttgtcagaaaaaccaccggaaaaatcaccaagaaactggcttcttcatcaagaaatcagtttcttggtaatttttctggcgactatgccaattccaatgacttttctgaagtttgttttcggtgccggaaaagtcgtcggagtagctgccaatgtcagaaaagtcgtcaaaattggcattgtcaccggaaaaaacaccaagaaaccgatttcttcttcaagaaactagtttcttagtgatttttcagtgatttttccggcgacaatgccaattccgacgaattttttggcgttggcagcaactctgacgaattttctggtaccgactgctactcaggtgatttttcggcaccggcaccaaactccggcaaatttttctgcatcattgacaaataaaactacctaaacaaataaaaacattaaatatgagatttgaaaacttaggtgccgtttggtaa

SEQ ID NO: 261869 - DNA, 555 bp, Cannabis indica
ttcaatattcaaccatagtgaagtaggttctgcgaatatatgtgttgtagtgggatggatgaacaaactactgttaatcgtgttatttgtcattataccggtatgtttaaaatttttgggggcattcaattacagccgttacgctgccaaaatttccatagaatttggatcaaatttgatatattatgttctgttttgtttagggtccactcgctaaactgccttcaagacgtgatgggtcgaaagggaaagctcccatgctttctccagaaggcggtcgtgtacgggatgatgaattattctcgcaaaagaacatggataggatccctaaatagctaaaatggatggttgttgaattcttgaaccttaaagataaacatgatataatcacaattcttgtaccccgaggattaatagcactgcgtacccatatcatgttatctagagaggatttgcagcaggtcgcattgtgtgatttcattggcaaccagggaatgctgtttggaatgatgtatactcttctttaatctaattaaccttatatatcaaattcta

SEQ ID NO: 261870 - DNA, 1774 bp, Cannabis indica
aattgataaaggtcaataataagtgtaaatttcccataataaataattgattatcggaacatttcagaaaaagaaaaaagtgattaacgggaaacaatattttcactcatacaatacaaacacataaaaacagagttaacaaagtgaataatacaagtaatgggactaataaagagtaaataaaatatacaaaaataaaaaataaaaaattactagtgtacttcaattactttcctttttttaaaatgaaagtcatcatttattaaacgaataatttcgttaccaagctcggtaacagctcaaccggaacagtgttcaaattaaaaaggcaatcagagtgagatatagaggcccttgcaaaggaatgagtcgctacatttgctgatcgttttacaaaataaaaagaaacattacgcaaagtacttaaataaactcttgcaatcactaacaactttgccaaacaagaaaagcataaccacagaactacgaatagcttgtacaacagaaagacaatccgtttctaaaaccacactgagccacgaatgatctttgatccaactcaaagcctctcagaccacaattgcttcagccaccacaagagaaatcgaattatggaacaactttgtaccgccctctacaaaaaagcatgtgtacttcattactttattattcgaaatatgtgacttttttcaacatacaaaatactacgaggtacctgttaaaaacatttattatagaggatttagtctgttaagatatttgataggattagttagttgtagttaacaaaatctttttttaagcttttgccatgttggttctcatcagcttgtatataaactcttgtaatctagtctaatgagtatggcaatatacaaatgattcatatttactctttgcctcgatattaccaatatttttgaaatatttcaaattattcataattaatttttgtaactctgacttaggttattacatgttacgattaagttactgtgtgctaaatagtaacttacgaaataaattatttacaacttcttaactacgaaattaattatttacaacttcgtaactattcatccatttttttttttttttgaaagaattcatccaattattattcacttaatagtttggaactctttgttacaattttatcattactatatgctatgatttggttacttttaaattgatgtctttttgacaatttgtttgacttatgaaactaattatactaatcattttgtaactatgtgataataatattttcaagagattatcaaatttataagttatggtttgattactgtttgttaatcatttttgtgaattaacatatttttactcacaattaccatatttgtaacttctaagttacaccttaggtaccatatgatttagtaactacgatagttacatgttacaattattaatagtgacgtaagagatatgatacttttgaaaaggaaataatagtctcacagacagtaacagtataaataagataaataattccttcaaaaaaatgttcatacaataataaataaagttgatcgtttatgagctgggcttgtgccccatattcttaacaatatcatattttcagggaaacttacaaaaatattggattttgactaaatctttacaaaagtactgccacacggcaaaaataacttttatactgccttgagatttttttttcttttatactgtaaacatcaaaaataaaaaacgaggtctacatgtttcacacccgcagaaaaaaccacta

SEQ ID NO: 261871 - DNA, 992 bp, Cannabis indica
tgctctgatactatttttctgtcacgacccgagccctaggccgtggcagatatgtaatatccataacttgggtggtcaaaggtcacactttgacccttgtaggaagataaagcttataaatgatcctttaatttatatcacaaaatactaacttaaaagtaatggattaactcctatattaataagaaaatattagtaacaaaatcaggaccactcatcaatataaaagaacaataatatccccacagttatgtaatcaccaaatagatagatttaataagtcaataaaataccaaaataatacctagcatccatcattcctcatttctaactagtacatagctaatttaagtcatccagaccatccatttcagcttaaatacaaaatcagtttcattagaagattaaagagtaaaataagactaaactaataacgacttcctttcccaacggtaccatcctcatccactagcatcaaactgagttcctggaatgggagaaaatagggggtgagcttataaagcccagtaggaaaacaactaatatcaaaggacccttggtttaataaaattcctgcatggttagctttgtaaaaataaaatatctcatcaacagtatcaatatgtacaaataaagtagagagaccacaaataatcacaaatcaaacgtcaaatgcatatcacaccgtccactagacccctagctctcaataccaatcatagaaaacatccaaaaccgggtagtcgcatctgatatccaccataataccggggctcagatttaattcactccctgtacagattctaggtctttcacctacaggtgagtgcacacctgatctacctatgatgacacagagactaggtcgtgaaacaacaatatgcaccgaacatgatcaacatggctctcatcagtataaccaaagcaggcaaataataagcataacaaaagaacatattcctttttattttctagaaaattcggcagcataa

SEQ ID NO: 261872 - DNA, 1133 bp, Cannabis indica
ttgctcgtattatggtgttaaaaattttcaaatgggcgacaagatcagtggtaccatgaccatcatattgcaagacgtgtgaatttgtaaatccttaagaaaattgtgagttcaggatactagggtggaatggtttcattttttcatctgagttataccctagtagttttccatactctccatcctggtattttttgaactagtcttccaattgtattactcgcaactgaatgggatccataggctattgatttgcattttgattaagttggttacgcaaatcgagtgcattacgatttaaatgttcacgtaggtctggctaccttcgatttaatcgttcacagaggtcaggttcatgacgtctctggtcgtaattactcacggatctagtccctgagtaactttcaaattggtaaccacgcgagttactcatactttcttgatctataaaataatattgtgacctattcctgtctcacatttgtctatgagtcccagttgacctactgtgcccgtaagatcttgactcccctgtacttgaactagcttcacgtgactcgtgtcgcattggcattcttctctggaagagattcgatacacaaccactacttaggtatgtatgtgtattttctatgtctgtgcgagaaggcctttgtggatgcctcgggggttgacctgacccaggttgatttataggatttttcacatcatgccgagggatttcctagttccctattcgtgactgccttgcgtttacattcatgcgagatgattatgatatatcaggttgttcatttctctagtttgtaaatccatggaaagttcctaaactatcatgtcaatgctcttaatttcttgtgttgcttgcatttggttggttctctcgacccattgggatatcccttgtattcacaggttgttcttcctgtgtatttgtgggattcccttgaacattttcttgcctcctagtcctggaacctcagggtcttccccgtggtcgccttacaaatatctcaggttgagtttgaggagtattttcctgtgcaaccctggctgccgcaacctctcgttccaactcagcatttcttcgatatgattcagccaggcattgtcgaaattgcttattttctaat

SEQ ID NO: 261873 - DNA, 1572 bp, Cannabis indica
agatgttccgaaaagctgaaaacgatatatctacaacttttatatccaactccaagtctagttctacttccaaagtcatataaatcgtatatacgttcagttttgtcaaactgagctcgccggcttctactattctccactaaaatgtgctaaaatccctcctaaagactccaaatataagattagcctttaaaatagcctaacaaattataatcacactaatcaataatttaaagaatcaatttaagaatatttaacataaattggtcatatttataagataaatatcgacttatcaaagccttccttacttaggcatgctatagtgatttacaaatttctggcacgcctttgctaatcaaagagttttttcgaaacgtgacaaattaaactttaactttaataaatacataactttacataatttctgggatctcgtttaaaaatttacagctgtatccaaaatacatttttctcaaaagtgtcacccagtgactacaaaatagaagcccatgtcatcccaagaccgaatactttaggtctaaccatcctaatatgtacaatcatcctcaagctctatactcattgatgctcaacatctgtctttcctttacctacacatgcaaatatatctgtgagtcgacaaactcagtaaaaaaatcatgaaacatataaacatattactgacttgtatctaggtgcccatgcacctatttacaaggcttaacatatgaattaagaacattcttaatagaagtacaacatttataccacatgcactaagtactcgtcacatactaatgttggtagggttaatccgtacctcaagcacaactgagcattataccgcacacactccgtacttgtaccgtactagtgttggtaacaatgtctcatactgttctaaacctaaaggtgttatgtggtttaaatatttatactcgcaagtgcacgaatcaagtatggaatatagtgttcatgtaaccacgaggtcaaacccaaatgagttgatttatatctaagagagactttttaagctcaaaattaattaaactctaacctagctccaaatatttgatgagatttgtttcataaaagaaaagaaaataattaagcttttaaagtaaacaaaagggatttgatgaatagatgatagagaaaagattattaagactttagaatccacaatatataaataatattaaacagtgtattgactcccaaattttcttgatagttgaactcatccaaactatcattttttaaaaatatattttccatttaattataagttatttttaaaagatatgattttttttcactcaaaatgtataatttcataacattagttgtgaaataagttaatgaactacaacaatcaaagatattattttttaggcaaaaatataatttttatattctaagaattggatgtgaacaatctaatgaaccacacttaatcaaagttgttatcccaatttttgttctcatgacgtgacatgcttacgtgaacagaaccagtgccacatggtagtacagctgtaatatcccagaaaataaataatatttaaa

SEQ ID NO: 261874 - DNA, 678 bp, Cannabis indica
gttcgttctttactgttatatatgttatatgtgttaaacttaatatatatataaaatatacgtacgaaactgaaactgataagtttcagtttatattatataataataataatattaataaaaaattaattattaataattatcttatatttcttagccattaagaaatttctacttttagggtatttggtcaacttcgagtactccaaaataccccggtatttctaaaatcaacttatctcaataatcttatcaatatttttaactaaatccgttgtgacatttttggcctccaatcgggtctccagggtcaccgaacttgaaaatatttttatttcacaaataactcatattatatccacatatttcaaataaatctccgtaattaacaaattacacttatttatccacttatcgggtcttcaaggtcgctgaacttgaaaaaatttctattctacatatagctcatattacattcacacatgctatataaatctccgtaatttataaattacgcttatttactcacttatagcaaaatttaaattttatgttgaaatagattagtaggatcataatcccacttattacctgattaacacataatataaatataaaccttaattatttaccattacacttatcgggatattacaaccatcccctccttataaaaat

SEQ ID NO: 261875 - DNA, 397 bp, Cannabis indica
ctatttttttacagaacttaatatctattttaatttgaaatagctatgtaatttttaaaattgaaaaaaaaaaaaaaatcaggagcggcatcacctccttacgcgcgcggacaccccgtgtcacttggggttcacgctggttggacaaggccctatttgagttttctcagtcgtgataagcaaatctagtctgaatggggcttgtgcgtgcgcggacaggctgcgtacagtctccaactccgagatttcttgactgatacctcatcccctgcgcgcagggatggtatgcagtgcataccatctgcaccaaatccttaatttttttttttctattttttcatgatttttcaaggaattaattttaattttttttgtgtgtgtagatttttatctttgt

SEQ ID NO: 261876 - DNA, 515 bp, Cannabis indica
cataacactatttgaagaacctgaatattcctgggaggagtgaacaattttcctaaacaaaacctgtaccataacaccaaaaatatcagcaataatataatggttgtaattcttataaggttgagattttcctctagaacaaagacaaagacaagacattatgaaccctaagtcaactcaaaaatcaaggatcatgaagaacacaaacattaaacagtacaaattcctaaggatttccttagagagataaaacggaccgagtcaagagctttagtaaaaatatctgctatttacttgctagtttcaacatattctaaaacaagagttttattttccacaagatctctaataaagtgatgacggatgtctatgtgtctttgtgcgagaatgatgaacaagacttttttgaaatgtttaaagcactaatattatcacaaaaaaatagttaaaatttttaaaatcaaacccataatctgccatcattgtttatccatacaattggtacaacaactacc

SEQ ID NO: 261877 - DNA, 621 bp, Cannabis indica
atttttatcttctctattctacttaattttttactactaattgaatttggatagaatatccatccctatcataatacttataattggttcttgtgtgtccaccgaaagtataatttgtttcaaaattcttttgacttatctgaattaataattgtgatttttcttctctattcacctaacaattttgatgacaaaaaaaaatttaacgacaaaacactatatgttgttctatttcatccgtaacaattttttatttttgttcatagtgtattggagttgctttatcatttaagtggagatgttggatcaacaagagacaattaatgaatgccttattagagttgctatattatttgaatagagatgttgcatcaacaaaagacaattcacgaatgtcttattagagttgctctatcatttgaatagtgatgttggatcaacaagagacaattaatgaatgtttggttattcatgtctgcattttctaattcttacctcataagtcataaggtataaactttactcttataatttatcataattaattctacaatctccaatagaataaataaataaataaatatttttattgttgtaaaaataattagtttaatgggttaa

SEQ ID NO: 261878 - DNA, 647 bp, Cannabis indica
cattcactttctctttctctcttcatcttcttcttctttcctcttatctactttatattattttataacaatatgattattattttatttattaaaacaaatcatgtctaactaatatagactaagagataaatatttatttttactttcatctatacatttattatatttatgtttttgtaatatgacctaaaataatttagcaaaaaaacaaaagaagaagatctaataatttgtccaatcaattgtttaaaaaaaataaataaattttattttattatattcttttttatatgtatatatcacataaatattattattttttaaaaattttattttctctattttgtaatttttaatttatttatccttttaatttatttattgtgctctatttatattgtttttccttaaaaaatctaaaagattgccaattggttgtttaatagttgtcataatattattattatgtttttttttatccgtttagttcatcaattttttttagtttatctaattattatatttttttatttatatatgtttactttatctaattaaataatttttttgtctaaccaattattataaatttgaatacaaacaatttatattctcctcttctttgtttttattttttgtatttt

SEQ ID NO: 261879 - DNA, 1283 bp, Cannabis indica
ctaaccatgtcaggattaagattatttgatctaggatcagctaggtgatattgaattgaatagatattacgataaatttatcaaatctaatcaaagttcaatatcggttccttccaatgtatactccatacatccgatactggtaaactttgcaaatgccctggaaaggacataacactgatccaaggtgtaagcatacctatcgctgattatcatgccagtctaaatccagcgaactgagaaatcagaaaattaaatgttttgaacatatgatcatgattatattctaccgtgctgacaacactataatcatgtacaaatacatatgttctggacctagtagaatttatacataaaatataatcatgaaataaatcatgtgaaccatgcaacataaaatattatttctgatctttattagtaaatctgattatattgaaatgtgttttatttagggcacaaaacccaacatatgtatggaatacttcttaatgggtattacccattaatgggtaataaataaatttaactataaatattaatttaaaaaatattaaaccattagattttggtctgatagcgaataataaaacagaactttgaatttctatgcttaatttagctacttaattaaagaaaatatcaaaaaatacattttatgttggcaaaattatatctagatacatatttttgcaataaattatagttatgacatgtatattactaaatgatcatgctagaaaatagttattattattaataacgtaataaaagaaaaaaatgtacgaagggctttttttctgcgattggagctctgctagggcttgtaacctcagttcatatttgtgccatggagggttgagcgaggcctcgcaaactcctatctcagagatcgtgttctattgctaaggtgaagaagaaaactcaggggaagaaggaaggaaaggctggaaaacaatggggtccctcttcgtcggcgactcccctgaagatgaaatcgatggacgaaattcttggagttgcagaagctaacttcatagaggaagaatcagaggcggaggctgaagaagaaactcctgtcgaagatgttgtctctccaaggtatttgcttttgagggcactccgtgttcaggacatacaagagaattttttaaatttcttggatgcatctgaaaggagatccaagctgctccgttcaggtcaatctgtcactcctcccgttctacatctggttcattaaccgaattgaactcaggtaacttgttgcactctaatcacttaat

SEQ ID NO: 261880 - DNA, 1106 bp, Cannabis indica
ctttataaatacatattctctctatatcattgtacgttttttagttaatgtattaatctgcttttgatttgaaaatctatggagatagaggttagtattgcactactaatatttattatttctcaattatatatctcaatataatgactaagtatatcttttttatttaattaaattgctcataatgctctaaatataataaattatatgcaacaaaatattcgagcgatttatgtattctaatattatatgcattgttttttttttgaaaatgaaattcatcatttattaaacaaataattctatcactaaactcgacaactgctcaatcagacagtgtctaagttgaaaaggcaatcaaggtgagatataaagaattaattaacatgtattgacattgtcaaatatttaattttaaaatgaaataagtttacaaaataattattttattgtttagccaaaaataaacacgtgtaaagaagtttcaaaaataataataactagaaaccaaaaaattaaaataatatcttggtctcatttgaaagtcttctttttattatttttgaaatccatttgaaactctacgaagaagggaaatttccactagtttatttttcatataaatgatagaaacaagtgtctctccttgagcatcataccaataaagataagaaacttcttctaaaaacacttaaaaagaataaacttagcctaaggcacaagacaagccacactatgataaagacaagttaattaaatagcacaagaagcctaggaaaacacaaattaaggtggttttttttgttctttccaatgtaatatatataataacaaagttatgagaacaatatatgtttgatttctttttagaatgttaataggaattagtcttattgataaaaatatttatactttaaattctattgataaaattataaaattattttatttttatacaaatggtgtaatacttgtttatataaatagtataatagatgtattacaaaaatttaaaaatcaaaccaaacaatacaatttattaaaaatttcattacaattatcattataccaacacatacaataccagccattagtttttttttttt

SEQ ID NO: 261881 - DNA, 792 bp, Cannabis indica
ttagaccattttcaatgagagatgtaaaagttgagctatatttagcacaaacaatagttttgtgacattttacatcaacttttattattgtgctctaatgacattaattgtaaaatcttaaatgtaaaattgaatatatcatttgataccaagtcaataatttattaaaaaatacaaaataataataataatgtacatataaaatttaataataaaaataataataataatacaagtcatttaatgcaaatgaacattttacttaaaatttaataataaaatattaaaaatgacataatgataaatataaaaacgtagcatttactgtaatttgtattatgctatattgtaattcaaatttaaatcactttttgttatgtgataaatttgcataacaatttaacacaccattggagtagacttcttacaaagtgagttatattttacatctgcatcacttagttccatgttctttaaacttgaactcgacaccccgaatatgcatattcggatcggatctaaccgaacaactccgggttgtctttgtctcttttctggctttttcggcggcgggttatcatgcttttgagtgtatcagatccaaatgttcacaatagaattttgattaagctatgagtatgagactcaacatacaacaacttatgattttagttaaatattttcgaatagttctttttcatatatatgaaaagaaaacaactttatttgtatccaaaaaaaaatattaatagtgctattattttacatagattaatggttcttcttgatgag

SEQ ID NO: 261882 - DNA, 664 bp, Cannabis indica
caccgaaagaagcttcacctccgataagcatagatcatcatgtgaagataccttatcctcagagactccgaaagaccaatctagacaagcagttctcaaaatttctagaggtctttaaaagactacatatcaacattccttttgcggaggccttggagcaaatgccaacttacctgaagttcatgaaagaaattttggctaagaaaaggaagttggaagaattcgagacagtggcactcactgaggagtgcagtgcaattttgcaaaagaaactaccgcccaagcttaaagatccgggtagtttcaatattccatgctctatagggggttcggtggaaactaaagctctatgtgatctgggagcaagcattaatctaatgcctttgtctgtcttcaaaaggctaggattgggaaaagcaaagcccacaacagtgactttacaactagcggatcgttctctgactcatcctcgtgggataattgaagatgtactggtgaaggttggtaagtttatcttccctgctgatttcctaattcttgatatggaggaagattcaactattcccattattttgggaagaccattcttagccacggggcaagcattaatagatgttcaaaagggggagttaaagttgcgagtgcaagatgaagaggtcaattt

SEQ ID NO: 261883 - DNA, 581 bp, Cannabis indica
tatttctatactctaaaatctgatattttttccattgtatttagttccttttatagtacaaatttgctcttcaaatatggtattttcgtgtaccatttagtggaataaatggcacaaaaaactgagaaaagtgggggacaaaatgtcgcatttgcgtcatgcgaagtggggggatagagtgggtttgacgtggtacttgtgtctgcagaagaagtccactcgcctatgtgtggagctgataatactaacatatatataggggctgtttggaataggttaatgctaataagagaatggtaatgtgaaacattaccttgtttgtttggagggtttagccttggaatgttattcccctaataatataactacccttgaggagggtaatattgataccttaaaaaatggtatgattgaattattaccttccattatattaatttgaataacatttttgaattaataaataaatttaaataccaataatattatcatttattataaataaaatattacgatatatatatttagtccgtgagatcagttttttttttaaagttattttatattattagcaataacat

SEQ ID NO: 261884 - DNA, 754 bp, Cannabis indica
tatatttattatctatttttttaaaatatatataatttaaacacatttattttttttctttcaaatgtgctaaaatatatatcacttcaatcagggccggccctgaaatttagtgggccatagaaaaaaaatatttttgggccctcatttaggaaaaaatgttgtattttttaaaattaataaaacaaaatgtgtaattttaaaaggaacaatttttttgggcccctgagctaggtgggcccaaggcacaggcctagcccgcctctgctcagggccggccctgacttcaatatagatgttcttagtaattaaatattactttgatcgagttagcttacgttgcaaaaaaaatatttattacgtagagataaaagaattaaaattaatactgtgtcaaaatttaattaaaatttatttttaatttttattaaaataaaaggcctcatttcaaatttcgccctaggcctctcatcaccttaagacggccctgtcccttccgatgcattctccatatatccaacccaagcttactttaaccaataccctagaaagaatatagcacttatccaaggtgcaagtaaactacattgtagattatcctatcagttaaaccccgcatactgataaattataggaatacattcaatcacacaatcttgattactttccactgtgttcacaacacaataaacaagaatttcaatgtgataaggatttgcatgaatttataaatcaaataagtgatcacatgaac

SEQ ID NO: 261885 - DNA, 1443 bp, Cannabis indica
attgtccatgtactaaatcatgctccctatactttgatatctaccaaaccatgtccctcgaactttgacatgtaccaaatcaagcctcctaaacttttaatgttagactttccttactaaaattagaaaaaagtctttaaatcctacaatttcaatagttcagagggaatttttaatcgctaaaaaagctcaggaagcatgatttagtacatgtcaaagttcagggggcaaaaatcttaattagtaattttaaattttgaattttataaaagttatcgattggattctttttttttttttacatgagaaaaaggatcttacattttttaaaataatacacataggattttaagctcaatttttaataatttttttaatataaccaacttaaagataatttttagcaagcacaaatatagaaaatataataaattttatcataacacctatatattgaattattattaagttttattttaataaaaaatcagttcatgatactatttagtactattttaaaaaatataaagtctgatttgttattttataaaatataaagtctaattagtaacttttacaaaatataaaatttgaaatagtattaattgttctaatataaatgtataagataaaataaaaaaagtaagattttaataaaatattttaaagaataaaattagaaaaaaaaaattaacgtgatatttacgtatatttgtaaaattatagatacatgcatacaaaaatattttataaattatatgaataatagaaacaaaaaaagaaaacactagtaaggacatttttgtgtttatcaatattaacttagactaaaaatagacattactttattactactattgaagaaaactcacttgattgaggggcttagtggtaatttccaaaacaggaattaaatgaatataatagtagcttctcatgaaatgacaaaagtgaggttgatatgaaataataataaaaagtcaaaactatttccacaaaccacaccacaaggcaatgacgcggaatgacctttgaatattctttgcaaatattaaaaacacataaaaaaataagaagaaataccattggtatttgacacctttctaagtgttatatcgttattagtataattaaatatcgaatctcatataatttaatattataatttttagagaataaagccatgtgccaatcccgcaacatcgaaacctttctcttgaaccactggtcgtttcatacccacatacacttgcaaaggcaggcgcatccctggtttcgtacagatagatatgcgttttttaatctctaaactcccgctctctataaagtgtcacatttagaaggtattaagtattactggtgcttaataataagggattttttcattttcacacttcaaaataatttttttggcatttttacgaaattctacatagaaatccc

SEQ ID NO: 261886 - DNA, 464 bp, Cannabis indica
ccatcttaaaataccctctcatctcttccaaattgaagaacctcatgacagttaccactgttgacctcgactttagccataacaatcgatatataataaagcaatataaagacacaagaattttatagaggttcagccccgagcagttcggtaatagcctaatccttgttacttgtattgacttaagaacaaggagaaaggttccttttcttatagctcttacaacaatatctttgaatatgtattcttagataatttctttagggtataatctcgactaaactgtttgcaaccctttgcccagtgaacatgcatcactatttatagggctatatgcttggagaggaagtctttcccctctcgttacaatggatataaatagaaagatcatcggattaatgctgagtacaaagattgtggaattgatgcagaatacactaatcgtgggatcgtctgtatgccat

SEQ ID NO: 261887 - DNA, 710 bp, Cannabis indica
aatatccctggagtttaataaaatctccggaattgagaaattataactttaattcccattttaataatgggaactaaatcataataaaatcatgcattactataaaaaatatcaataattaatgctaattgcctttgctaatccatattctaaaatgcggtcattacattgggtgtcaccccgagcttgaacccccttataatcttgataccccgtggtacccctttagggggtcagggtatacatcccgagggaccccttttgggggtcggggtgtgtaccccaaggcttcactacccgaaacgcccaccccgagttgcaccatctttgggggtaggggtaatgtacccagagataccccttcaggggtcggggtatgtaccctaatacaccccctttcgggaggttgggtatgctcctttttcttttttttttcttttgtctgcgatcatcccgaggttggggtgataccccaacattggtgggtcggggtacaccccgagcaaacccgcctttttgttatttttttttgtcagttgtcggggcaccactctcaagtgagggtcggagtgtgttaccctgagaccaccttattggggtgagggtggtccatcccaagaccacccatggatgatgctcagtgacgaccgtaatgtggcctcgcgaattggagacgattggcgttattctacctctcggggtcttaaata

SEQ ID NO: 261888 - DNA, 1345 bp, Cannabis indica
ccatgtttttcaatatataaaattcatggaacttttaaccacataaaatgttgtttgctcaactgtcttcaaattagcatttacaaagaaaatttgaaaagtacataaataatgccaaagactcattttcacaaaagggtctcgaaatggaaaaatatggtgagcttaatatactaagcaaataaggcataccaagacacaagtcatgcaaacaaaaaaagtgaataacatgctaaagtttacaaggttgagtgttacttttgcttgtgagtctttaaatttcgtaaatacaactaagattactaaatgctaactaaacttcgttacacctaagtgggatatggatcaaatttaattgatcgagtttcagtatgtaagatcattacattttgctaacttgttacctcttaccagttccatttagtagcttacacgtgttctttttccccactaaatagaaacccctgacatttttccctcattttacttggcttcgaaaaaatcatattagttcctaattctttcaatgctgactaattttcgacgtataatcttatgaaaaaaaataattaatttagacataggtatagtggtctaaccaaaccccggattgtctctaaggccacacttgattcctgttggcctgccccatcctccatgatcaaactcttcaccatctggaattgaattcatttctacatccacttcagctttgccatcatctctctttggctcctctgcttgattaactgctgcaactccaactccattcctattcccatctccatttccattgccaactctattgacattcctatctgcaatatcattccctttccaattgccattgccattgccattgtcacttccattcaaatcaactctcctcccattatctctaccaacgggttcatccctaatccttctcctctgattctcatctctcaaccccaaaccccatcattctcattcctccttactccattcccattcccagaagctggctcaatctcagcccctacattaggcctagtacggcccaaaatggggtcgatctcgattttgggagacgactcatctgctctatgaccatgacccttctccaaatcaaacccacccgagctttcattcctctcagtggcactggtctcggttgagtaattagagacaaacccagttcgcttcgcccaagatctcagctctctaggattatagtggtctgctcttggcacaaaagggtcgacgtcaggaagcctggagtcctgtttagagccacggctacccttcttccctttccctctctcggccttatcttcagaatccaaggatgaccttttatccattc

SEQ ID NO: 261889 - DNA, 816 bp, Cannabis indica
gaggcccttgttgtggctttgctaagttttgagaaagtttaagttttgaactcgaagcttgatcaataatggaaagttttgatatagtttattgatgatgcatatggttggtatatgttatttatgatgtctataggtgttttgggagtttcggttcgatatggggtaaaattaaacttggagtattttttttttgtgctttttgcagaaaaatggtccactgttttttttttcaaaaaatggtgaatctttttcccaggcagaatcccaaaaaacggtttaccattttgagaatctaattcactggttggggcatttttaggagtctcaatttttacattttatcaatatttagggtattgtcacgctatttatcaatagggagacttttagttttgaatttaatttctcgaagctaagttagcgagtcacttaccaattttatataaattgtgacttagggcctttaaatcatcgagtaacaatttttagtcaggttgaccgacacacctaaattcaaaataaaaataagattagtataatgatatacatgcatacatgtttagcgtacttgtttttataattacctattaattagcatatatatcgaaaagagtggtattagtgtgtttagagttacactgaatatcgacggatatatgcttagcattatactatggattgatgctatcacataagtatgactagagtactgagtataggctgatattatgatcaatcatactgtcattaagaacgttcaaaacttatacgcgttggatgcaagatatagaatcgtgattaggtgtatgggca

SEQ ID NO: 261890 - DNA, 743 bp, Cannabis indica
tgctcggcgaattacaggctcctcaatcacatcaatcataacataggtaagtgacacgctaaatcacttttcagggacttaaacttgaaactaaaagtttccctatcgataaacaacatggaaataccctaaaaatcacaaaaatgggaaaaactagggttcccaaaattgcccaaaccggtagaccagttcccaaccagaattcttgttctgcggggtttcctggggaccaaccagaattccggttcctacaggtccccctgaaccggaattctagttcagtgcaggaaacacacaaaaatttactacaacctcaaatcaactccaaacaccacaataacttccagacctgctatttagaccacatagaacatattcaaagcaacaaaagacttctacaaacaaagaatcaaattctaccattaaagctccaagtttgagttctaaaactcaaaacttggttaaatccactatcaaccattacaactagctcaaaacaacataatctaacatagataaacctctgaaaataataacaaacaaccatagcaagaacagtagcaaaatcatcaattcatgcaaaattttactttcttaaaaaccaagaaacttaagaaggagttgcataaatgttaccttagcttgaattcactaaaaacctgctataatctgcttgaaatgctgaagagaaatccaaccctagctggttttaggagggttcaaaggagagagagagagagaga

SEQ ID NO: 261891 - DNA, 968 bp, Cannabis indica
cagtttgtcattgtattcatagatgatatattgatttattctaagacagaggaggaacatgaggagcacttacgtatgaccttgcagcgactgggagaacatcaattgtataccaagtacaaaaaatgtgagttctgcttgtccgtggttgcatttttgggccacattatcactaacgggggaataaaagtagatcctgccaaggttgctgcagtgatagaatggcctagaccaaagaccgcctcagaggttcgaagctttttgggtttagctggctattatagaaagtttgttgaggggttctcaaaaatagccacaaccttaacagaattaactaggaagaatctaaaattttcctggtcagacaagtgtgaacaaagcttccaagagttgaagagtagacttatttcggcaccaatcgtcagtttatcaacagaagagggacaatttgcggtatattgtgacgcatctacacaagggttgggttgtgttataatgcaagaagggcgggtaattgcttacgcatcaaggcaattaaaagaatacgaagagagatacccaacacatgacctagaattagctgcagtagtttttacactaaaaattcggcgtcattatctctatggagtgaaatgtgaaatctacaccgatcataagagtttaaaggactttttcacctaaggggagttaaacatgaggctgaggaggtggttggagttagtcaaagactacgattgtgagataatgtaccatcctggtaaagccaatgtggtagccgatgcactcagccgtagaggtcccggactagtttcaactttacaaagagtagcaagggaattattagaagacatggaacgagctggtatagagtttattacagggctgcttgcaaaggtcacacttcaatcaactttgttagaaagaattaacgaggggcagacgacagatcaaaagctcagtgaactaaa

SEQ ID NO: 261892 - DNA, 1688 bp, Cannabis indica
cctctataaaattcatgtatcttattattgctttattatatatatccttacgacatatcatttaccataaaatagattcattgtcgtttgctaaaaacgaagtcaacaatagtattagttattagttacatactaatttttttttaaaagaaattagaaaatgaaaaaataagtattataaaagtaagaaggtacatgccacatcaactttttaaaaccttcctttatatatataaatattgattgattagctcgagcattttacaattttaacagagatcattttattagtacctttggctttattgattaatcttgtcttattatgcctattggggaagaaaggttgtctttcaaaaaccgagtatttggtgacgtcattaaaattttagaatcaattttattcataattaaaatcattaaaaagaaatatcccacattatgctttacttaatataggtccatgaagtaaataatgggattgatcatgaggcaatatatgctttagttaatatatttgtgaggctgatgttgatgtctaacataccaaataggcaataccattaatatatgcgtgagatttattgtaagatgtatgaaatgttattttaaaattaaaattaattgatgagcgaagtaatccacataagttcttaatataaaattttataaatattttcactaattaattatttatatgaagccactaattttttttccttcgtaaaaacccacaatataattttagttaaacttatagccgaaaatataatatgatgaatatgaaaacaaagaaaaggggttatacatgaatcgataaaacatatataccaacaaatatgggagcttcatgataagttgtatgacattgacagtggtccaaacctccttcgtcattttcatacatatatacaatgtgtttgtctatatatgagtaaactttgtatagttaagtctttctgatcaagaagagattgttaaaccgtaaaagtggtccaaactcagaaggaatcaaagtgaaactcatttgttagaggaagagatggcacttttgattcatttgatagcgcaacacttccttcagctccccagtctctagttttgtgggtcctaattcttcttatatctttccctagacttttcaagtctgccgagaaaaggactttttatggtgttggaacattgtgaaataatttttttaggtaaaatataatacataacaataacaaaatctttataaacaattcctcctctaaattaaaaattaaaatttagcaattgtatcaaaaaaaaataaaattagcaacttatgcgattaaaaattgggttaatttcacaaatgcacaaaaacaacaaaaaaacaacaaaaatactgtttcacagaattttaaacatttttacgatttttttgattttatttacataaaatacgatctttttatgttaaaattttgttcatttgttgttaattttttgttatatgtatgttattttttgttattttttgttgttattttgatgttacttttatgttgttttcatgttattttttggtaaaaccataaaaatgtaaaaaaaacattctttgaacgtaaaatataaatattttcaaaaaatagtgtattatgtaatcattccttaaaaatttgacaactattcaaaatccaaatagatagcatttatttatt

SEQ ID NO: 261893 - DNA, 501 bp, Cannabis indica
tgatgccaagttggagaacactcccctaatcaaagaagccaaagaggtgaagaggactcagaaggccaagcttgaagctgccaagaaggaggcaaaagataaggccgatgcatgccgaaaactccagaaggaacttaatgcagccaaagtaatgctccatgggaaaaaagctgaaaccattcaacgatgcaacgttgttggactacgttccatctaccacgcctggatggaaaatactggaatggataagagtttcttgggagagtctgaggaggaagtcttgccctactgcgagaaggctaagaaggaagatgaggaagctgaggcaacagaagaagaagatgaactgtccaagtctccaactgtctaggcttggtttttatttatttcttttttatctaggaaaatggccctaatatatctgtttgtttgcgttttcattcactatttaaactattatattttgatcaaatttaaaatactttaggcatttccattgct

SEQ ID NO: 261894 - DNA, 996 bp, Cannabis indica
ggtgtaaaatttggtgcacactaatttagtgcgtacgtaatgtagtgtgtcatcaaagtgaaatagtgtaaagattctacactaatatggtgaaatggtgtatcattggagatgctctaagaccatttcaaaaggttacactaatttggtgtggaatctactccaatttaatgtagaattttttattttttggtacaataactccaataattcacacaaaatagtttacaaaataaatatatttaaatgatctgacattttatattatttacattaataactaaagatagataatttatgaaataattagttagaattatatcatagctactagtaagaatttaaaattttaaaataatatttattaaatcaattaaatgctaattttttttaaaaaaatcttcttcaagttctatagttgatcttaatatacgcaactatttttaaaacgagcaaaaaaagaattatgcaaaaaaaaaaaacttcactaataatatcaagcatatcaagattctcaaaacacttaaagtctatatagctaatattttgatatttttcaaggctaagatccacaagtgattattaaattattattttacttaatattgttatttttagttttataacgtagtattcattttatttttgttttattagtattaatactttttattgttattttgtatttataaatagggtaaattacggcataattaatacctaatgtttcagattttatacacttaaataccttatctttatttttagaggcaaaaatacccaatgttacaattctcttacacttttactaccacttctgttaactcataaatatggacacgtggagggcctagatgcattacatttatttattttattttaaaatttaatattctgaatatcaaaaactaaatgatacttgtttcaaaaaaaaaaaataaatagagatgcaataccatagctgagtaccagtgcagtatatggaacatgattatc

SEQ ID NO: 261895 - DNA, 2742 bp, Cannabis indica
acggttatgttaaaaaaaaactgtgtaaccaaaaaatttaaacacttaaaattactaaaatgacctaaagaaactacaaaacacacaatatgagctttttacaaaattattccagccgtatgggctttaaaatcccatagagtatgccaaaagtttaaaaaagccatataaaaggtccatagttaagtatcccatatttatcataaaaggtttaaaaaactcatactccatataaattctactttttatatttgtattaattaaaaagagtttagaataaaatttaaaatgtattagaatggaataagagtagaataagaatggaatagaataaaatttaaaattgtattagaatggtctttccttctattttaaaatgaaatagtcattccaccaaaatagtgaaaggaccattctattaaaatgatattccaatactttaatatgtaatcaaacaaatgaatgaaatgaaaattgtttcatttccattccgtttcatattacctccagccaaccgccaatatgtattatattagactacctaatcagtattaattagttaccaaattttcgttataaccaaccacttttattgtataaatgtatacatatatatagctatatgatatcagctttaaatgtttcattctgtaaaccccactattatgactattattataataacaataagaaagtatatagtaaaatctaaaaaaattaattagtaagaactaaaaagttaaaaaagtacatattttaatcacaaataataaaagtttaagcactagtagttagttacttgttaggcaagctatatagacatagatatataactatatgctagcactggaaaatttagattataaatgtacaatttagcttaacatcttttagatcatcaacatatagctatatggagttccaagaacttatgatagtaacaataagtggtctagggttgatcaaagtgataagttactcaattaaatttgtaatgtgggtatggattacgttcttgagagccccaaagaatctcaaggatgaatacggcccgtgggccgtggtcaccggagccacggatggaataggcaaggctctggctttcgagctagcctcgaaaggtctgagtctgattctggtgggccgaaatgcttccaaactcgaagccacttcgacggagatcatggcatcattatcatcatcaaaatcatcatcagtggaagtgaaaagtgttgtggttgatttggccaagtgtagtgggaaagaactaggtgagattatagacaaggaaataaagggtttggacattggaattttgatcaataatgcaggattaggttattcttatccacaattccttcacgaggttgatttggagataatggaggacatttttaaggtgaatatagaggcagttacatggatggttcactcaattcttccatgtatgttgagaaagaagaaaggtgctattctcaacattggctctgcttcctctgcttttcttccttctttcccttttcaaaccatttatgcttcttcaaaagggtaagttttctttcctttctaatttgttattatatctttgaaacttgactttcattgagaaaagaaaaaaaagtactcatatgtttggtatgaaaagaaaaatttgattgaacaaaatttttcattacaaacataaaaaatacattttcttttcttcgttaaaatcaaactttcaaataaagccaatgaaaccatgaatgaaccaatgtactacttgtgttgtgtgtacttaatttttcattaaccactacaaaaaatgctactcaaatttttgcttgaccttggtcaaaatataatctaatagtaatttttattttatttaatggtatgtattgatttttgatgatacaagatacttgtctatgttctcaaaaagcctaagtgaggaatacaaacagcgtggaattgacattcagtgtcaggttggttaattcaactttttctaatcataattaatttataataatattcaataataataaaaaaagagataatgcatattttcctctgttatttttctttttaatgtgtgattaaaacttttcataagtttatataaggtattttcctttttcaaaatgatttaaaaagttgtaaattatgccaagcagtctttacttgagaaataattcataaaatcttctcttttatgattaaaattatggatatattcacaaaatgaagaatacaatatcatattttatcaggctagtcttcattggtgatatcagttatgattactactagatatactactagatatcgaactagtattgtaagtctgtgcatgtcgtgttttttcggcttatatttattcgtgcttttcaaaaaataagtcgtgttgtgtctgtaatgccacaaaaaaatatagatcgtatcgtgtcatatcgacatttttatagggtagacccgccacagaccgtagacccaatattttataccgtgcttagattcgtattgtgctttgctcgtaccgattcgtattttttatacaaatcagcatattttcatattctgacttaaattcatgctttacttttttatattttattttttcttacaattagtttatatgtatattttaaaattttaattatatttatataccttttaaacaatgttttataaataatcatataaaaaaattattaatatcattataatcagcctttagatcgtattgagaggcttgct

SEQ ID NO: 261896 - DNA, 701 bp, Cannabis indica
gccaaaggggagattgtaaagttctttttttggcaatttatgtgccaaaatattttttatttatggtgagatttatttgttctttcaatatgattttatcacctttaatattcggttttattgctcttttctatcttaggaaagattgatttttcagctggacttttcttgtatggaaacatcttgtaagagaagcaattctcttatggaaagttggttttcaaaggaaactttgactattgttattttccttaataaatttgattgtgtcttgatacaatcagatcatacacactgtttatggcaggtatcaagacccaatacaagatctgactcgtttttggcaagtttccttttttggtttgatttgctgcgtcagaatctgcttctaatgctgcaaatcaagtttttcttaagaaagttttgtactagctgtagatttgactttatggctatctttagggtttctatgttctataaattgaacctagagagcagccattccaatcaactcttctagttttcattttttacatttttcttatttgtgaaaatagagttctttttgtgagaacctagttgttcatctagattctagtatttttcatatttgttcttactttatcttagagtttgttagattaacttgattgaacaagagagtggtcttcgagaggaagtaagcactcacacttcaaaga

SEQ ID NO: 261897 - DNA, 2319 bp, Cannabis indica
aaaaaattaaaaaaatagtataagttaaattttttaatataataatttataaagattatcgctaattaattaggagaaatcgaaaatgctagacttgtccaatagctatacttactattcgttaatgagacaaaatcactaccacctttaaaaaccagcaaatacctccaaaaaccacaaaagaagaaagtaaaaaaggcaaagatggagaaaatagagcataccacagttcaaaccaacggcataaacttacacgtggcatccatcggaaccggtccagcagttctcttcctccacggcttcccggagctatggtactcgtggcgccaccagatgattgctctgtcatcgctcggctacagagccatcgcccctgatctccgtggctacggtgacagtgacgcgccgccgtccgcggagtcgtactcttccttccacatcgtcggagaccttgtgggattgattgataaaatgggtattgataaggttttcttggtgggccatgattggggagctgtgatcgcttggcacttctgtttgtttaggcctgatagagtcaaagccttggtcaacatgagcgtccccttccgtcctcgccacccaatcattaaacccgtcgaaggtctcagagctttgttcggcgatgattactatatttgcaggttccaggtaaattcccttttcactgctttcaaataatttctctattgactttttttttcttaattaatcttgcattttatcatcttaattcttaatttttttctttaaactttctattttaaatgattaattgatttacattacactagtcttatttaataaaatataaaaattacattagtctttcggtacaccaatgtatatttcggcatgcaagagaaaattttcataaaataataatttgtagagatgatcttaattaaaaattctatatatatttcacaaaattctgactgaacaattttgggcacataaattattcaaaattttatgaaagtttgcaggttgtaatacaaatttaccttgaattttttttttatgaataataaaactattatttattttaattttataaataattttgttttttgtatcatatatattttaattttagttatttattataatttaaaatcaatttatataattttttgaatgtatgagtatttaagtgtaagaaatgatcatcagcttgagtagtttagtaggcaaaagaaatttaaatatgtgtgtaacaaattataaaattttgagtaatttcgccacactttaattgaatatgtaatatttaaaatgctaaatagtactcttagtaatattggatacaaatttaaattgtacatactttacacatataattgtttttaatattagccatagataattttaaggaaaatttttatttatgtggttaaaattatttatttaaaaatgtgtataattaaagcgtttataaatcaccatttccaaaaaaaaaaagacttttataaatcatattatttttgtgtgatcatatgcataatttactaatttcacataaagtaccaaatttgaatagacctccctcaacaaatgaatcattactcttcataaatagaaatgaaaaaagtagaggcatctgttttctatcttgggatgggtgtggagggtgatgtttttaatggcattcatgatatatgttgttgcttgtattgattgaagagaatctattgagtctaccaaacccagagcataaaccatgcaagtatctttaatgtcattatgtagatagatacatctcttctttgattcttacctacacatctctacttttagagaattgctaaggacactactctcatgtttagcatctttattagtgtcatattgctattggtgtaattaaatagcggatcctatataacttaaaaaaaataaattttagagaatatcgctaactaattataaagtaacacctataaaaagtgttgggcaccaggtgcctagtaatactcctccttttgttcaaacaaagccttttcctcaagtacttctaatgaataactataactaactttttattttaaatgatagatgtacaccaaccagattgagatattggttaaaatgtattaacccaaaaatataagagcaatgctatcatgggctataatcaatgaaagagcaatggtatcaaccgcaaaaagaaaagaactatgttttaagggacatttaaatattattgttaatgtgtagaaagatagtaccatatatataagatgcatgtggtcaaggtgttttaaagttatatccttcaacaaaaaaataataataata

SEQ ID NO: 261898 - DNA, 540 bp, Cannabis indica
caaaataatatacaaaaaatttatctaaaaaatataaattaatatatatccacacaagatcatgaagatgcaaggttatcaatattagatttagagaggatttacactattagtattttactcctaatattttgcttaaatacttacaccttacttcaatgatttaaaacataccaagttgaatattattgtagttaatacttgagggataatcatatctaaaaacaattggagcaaataatataacaaagaaagaaatattggtttaaaatattaagaaagtattttttaaaagagaagaaaaacaagagagcgaattcgaattcccctctctcaatgtccaaataccacatcaaaattttaccagacctctttcagctaatatcttctatttaatatgaagaagccaagtaatttagttcacatacaaagaaaacgaattcaaagcatgtctctattccatgttgagaggagttacctaagacagagcaatagtagtaggatcatccaaaacctgggggaaagtgatattttaaggta

SEQ ID NO: 261899 - DNA, 767 bp, Cannabis indica
aaaaaactgcctctaaaggctaacattgtagtagtgcatagaaaatgagtgatattttctaaccaaataagttgtttatatctatccaagaacatgcacaaccaatatctgagcaactacattggctgaacaatgaatatggattaaggatacaactaaaaatttgagtaacattctctaacaaaatcctaaattcattgttaaaggtagttatcatatctaccagaagagctatggcacatttaacttaaaatagtttaataattataggctcattcatgtgtagaaactatatgtagatgcatcagtaatgatattccgcaggccaccgattgtagaagccaacattatgaacactcctatgtatattgaagcctgtaaaataatcccccaattaatgtgtatatatgtatatattaataaatactttaaaaaatatgtacattaataaataacattaggatggtattatttcatattgcgaaaaaaaacaaaaaaagttatgattacccaattgatgaaccacttggcactgaatcttttgggcttctttaatatcaaccacataatgcttgggagctgtaataattaacaacaaaaaagggaattgtagattaaaaacatataagattcaccttacaaaaaaaatagtttacagttctcacatatatatgttttttatactcaaatttgtacacactacacactatttatacatattgaataatgatgcctaattaatttcaatgagaattacttcatatatt

SEQ ID NO: 261900 - DNA, 1091 bp, Cannabis indica
actctagattataccttatagcaaagaaatttgaaatgtttagagaaatttcatcaatttctagcaatgttagaaaaatagtttaaaggtaagtaggttaaagaagatcttaaaaactgatagaggtggagacatatttagttatgcagttcaaagaacattaagttgaactttgaatttgtattcaaacttacctccctagaaatttatattgcatattgatgaaagtaaaaggtatgtgattacttactagcagtttccaaagtccttctaaggatatacactagtgataggaaaacttcagaatgatgaaattgtcgtatacttagtatacaccattactagattcatgcatgtcctgatcatgaacataagaaaagctagaacttttaacttaggtttacatgtttgatagctactctaaagtgattaggggtggaccatcctgtggtcattaagataagaaagtgcttgtttcaacaaatactacttttctgagaatatgactaaatctgagaataaaatagcaaagtagaggagatatttcaaaatgttctatcatcttattctatataagatggtcccactacctctcttgtcttgatacaactgatgaggacaataccattattgttcctagaccaaaagtcagggtaccttgtcttagtgggaagattttaaggagcccaccctgttatgttttgggagatacttgtgataaaatccattgtaagtttgaacaagtaaaggatagtcagaataaggagctaagaagcgaagccaagagaccaatggttaaaaccattcgtatggaataaccaaaggttttctattacaagaacaagaaaggatattttgaaaataagtctattcaatggacttaacaaaacttcccgatccttgtataataggtttaagattatctaaacctatgagttgtggtatcctgtaaatttacttactcaagtgcaagcaacttactttagtaagatgctggagcaattatttcaaatggctaactctataggaagtcctagacttagagctttatttatctaaggaaaagtttcaactattccagaaaagataaa

SEQ ID NO: 261901 - DNA, 929 bp, Cannabis indica
ataagctgaaatatcatttatacggggttaagtgttttaaggattaaatacattgtagggtgtaacggtaatctaatccctttacagtgtagatcattcatatagaggatcattgatcaaattaggattataacaatggataactaatgatgtgtctatatggtggaacatatagagcattctatatactgagagtgcaattctaagttctatgcgtggattcaacgaagaattaataagttagtgaatttaagttataaattcttgatctgcttattggaagctcggttatatagacccatggtccccgcactagttgagataatattgcttgtaagacttcatattacttttgttgtaattacacttaattaattacttcctaaacttaaaagttacgtaacttagtcgttactttagtttaggaaagtttttaactttttacctaaacgtaacgtttaaatttaaaggtaactttacgtttagttaggtttcggttaacttaaaatttaaaaattaaaattagtagtaaaattaaagtacgaaactaaatttaatttttaaattttaaaatttaaatttttaattttaagtttaagttttaaaatttaaaagtttaaggttaaagttaagttacgaactttaaaattttaaaggtttgggttaagttttaaaaaattttttaaaaggttcgggttttttcggtttttaggaaaaaagtaaaagtaggaagtagtcgtcgtaaagtaaagtagtaaaaactaaaaacggaaaaaggttaaaagttcgaaaaacgtaaaaaggtagggaccggaaaacctaaaacctacctaaattaagtccgacctaggtccggggccccggaccctttaaacttttaaagggtaagggttaatttactactacttcgtagtaatttttacttttac

SEQ ID NO: 261902 - DNA, 669 bp, Cannabis indica
ttttatcctcgaattcccaagcatgaagtggcattcatagacgacaaagtcgacactgctatgatcaatggagaagcatggacgttgtacgttgacggagcctcgaatagcaaaggttctggtggcaggatcttactaatcagccccagcaattttaaggtacaccctgctttacgttttgaattttctgcatctaacaatgaagccgagtatgaggctttaatcgcagggttgaaactcgctctcgagatgaaaatcgagtatctacaggcttttagcgactcccaaatcgtagtctgccaggtgaacggagaatatctggccagtggcgggaggttgcttaagtatttagccattgtatgcgaacggatgcagaaattcaagaaagtaatcgtgtctcgagtaccgcgtgctcgaaatcacacgcagacacactggcccgtttggcctcaaccagagaagccgaattgctcgacgtaattccagtagatgtattggctcacccaacgataaatcaagaagtgattatggaaatagataccaatcaagaagtcacctggatgactccaatagacgcatatctagaaagggtatcttacccgatggcaagatggaagcaagaaactgcgacagcgagctgcccgatatgtcatgtacgatggaaggtta

SEQ ID NO: 261903 - DNA, 516 bp, Cannabis indica
aactaaaatatattattattagaaattgaattaattagttaacgaaaatctagatagatataatttttgcttgaagtatttttctagtaaagattaatttattttttaagtatttcgaaaattgtataattttatactttaattttttgaaatacaatatatatttatagaaagtttaaatttgagttgcaaattaatttaaattaatacaacttaaattaaataattttcttaatatttattggaaaattaatactaagatggaaataattcattttattttcttaaccatctaagtttatttttttataaatattaaattaaattttatttagaattttattctaacattaaactttaattaaataaagatatatttaaaataaataaataatagaagaaaatacattttaaataatgagctttattaagatattcgatctccattgttggttttacatagcttttgttttagtgagtaatcctccctaatggaggaacgttcattagcaagtt

SEQ ID NO: 261904 - DNA, 844 bp, Cannabis indica
tgggttgtctatcactacttcaatttaagggcacacagatatcaaatgtcagtaattgagatatacgaccagtctcgatcggccaataaggatttatggaagcttgttcttggacaccataatctcacatctccaatatcttcctactcaagaactgaggttgtgaccaaatcacagtcttactttttcactcattctgttaaagctatttcagttacatcaacagctaagggagtaacatcaaagcagcttcttattggtactattgtagatcaggttttggcacttgataaacgttttctagatccccgtcgatcggccaatccttcacaagctgagcgcgaacaaggccttgttccgttgacagattcgttgcctatcaatcctcagtcttatgtaacacattcccttaaagtagaaggacttcgaggcatagtaactgtccctgcaaggttggaatcaacaacacttgttttcgcatatggaattgatctcttttacacgcgaatcgcaccttccaggacctatgattcgctcactgaagattttagttatgctttgctcctcatcactatcgtcggactagtagctgccatctttgttacatggatcttgtctgagaagaaagatctacaagataagtggaggtgatctttccctctccaatattctaactttttcttttctttaggctgcgtttgattttttgttgaattttttaacgagtttctgaataattagatttagcctattggtggcaatttttgttaaattttacacttcataataaggttagattttgattattatgctgtatacctctaagtgcaattaatgattgtta

SEQ ID NO: 261905 - DNA, 958 bp, Cannabis indica
ttaaataatttttagtgtcaaaataaaatttaaacaaatgactaactacaaatataagaaaaaatatttatacttgcaataaaatatttaaattttattttagtacattgtaaattatttaagatttttgaaaagttcacttttgatcctaaataactatataaagtacatgatcataaaaaaaaaaaaaattggactaaaaaaatattcttagatatcaaaacaactatttagagtggagtagacataccctatactattataggagagttttataatttgtgagttttattttcactccataaatttttcaatacatcttattttaataatttttattttatataaaatatttatttttaattcttaatagttttttttttaaaatttttttcttcctttcatattcttaaaaaatatacatataaaagaaaataaaatatattataaatattaaaaaaaattatatgaaaatttattaaatgataaaaattttatataatttaaaaaatatatgaaaataaaattaaaataaaattattgaaactaacacaaaataatataaaaaagaaaattttaagaatattaagaataatttcttaaaattaatttgaatttattttttcatgtacttatttataagtattcatgtgtttaataaacatcttatatatataacatagtttctctaaatattttatattgtatgttaaggtttttcttattaaattcatagacacttgaggttgttctaaatattttatattgtctgtgattttgctattgtgattactcttgtttttgtgatatggatttgagtgtcttttatttaagttattacaatcagccatatctatgtgacttggttttattttgttttaactctgtaacaagtaatctgtgggtgggcttgctagtagtgtaattacgcaccttgcacaatagttgaatgctcaag

SEQ ID NO: 261906 - DNA, 712 bp, Cannabis indica
aattatatgagtcttacaagaaatattatctcaactagtgcggggaccataggtctacaactatccattgttctaaacttggatttaatttataacaactaacaatccctattgcacagcatatatcaggccttatacctaatattgcatacattaagatttgaattgctcatgcataagggtactttctcatgtcctccatctcttgtggagtttttggacattgatccttgcatagagaaattcaatgtctggacggtaactgtcctttcttataattctccattgataatatttctagcaccttatccatataagttgcttgagcaagtgctaatgttcttcactttctatctctatagattttaattccaagaacatagcttgcttctccaaaatatttcatttagaatttttcaattaaccacttatttacatttgataacctttctatattatttccaatgagtagaatgtcatcaacataaacatacacacttcatacctaggagcaagttttcctgtcttgggtttaagaacatgagcaagaaaaccacaaatatggaaatgtttcaaactgggttttttcccattccataattctataggagtttcgctttttctctttgagggtactacatttagaatgtgtgtagccacttgaaaagcgtatcccgagaagttcatgttggaatttattttaccaggatct

SEQ ID NO: 261907 - DNA, 618 bp, Cannabis indica
ataaatattaaagaagctaacaaattttttaaatcttaccataattggaaatatctaaaattggaaatatttcaaaaaaaaaaaaggaatatttcaaattggaaaattttaaaattagaaaaatcgaattttgggaaacaatcccatgaaaattcaaatttttggggaaaaaacccacaaaaaaatcgcaaatgggtgaatgcaacccaggaggctgcacgtgcagcccaggaaggctgcacgcagcctcctacgcgcgcggacaaggagacctgcagggggaatgagcggcaaagctcggcgttggcagggtgatcatgggcggatcaacagggtcgtctgggcatgtcacgagcgcggatggggcttgcagaccgagtgcctggtgctcacgagcacccactcgatagtcttgaatcccgattttccaaaattcataacatcaccaatttttatgggaatcaaattccgtaaaaatgaaaattgtttaatttttcacaaggaatccaaataaaatattttcaaaaatagaaaaaaaatattttttatggaaaaatttcgtacaacacaaacattcatcacataacgtaatatcccagaaaataaataatatttaaa

SEQ ID NO: 261908 - DNA, 599 bp, Cannabis indica
cctttcagtatgcaaccttgggattcatctccagagattgtcaaaagtttttaaggtgcaaatatgcctaagatgtttactgttaccctatttaatgaagtccatgtcctctctttctctctccctctctctctctttttgatgtctttattattaccaatatgctcgtgaaaaaagattctgtgtttgtttatagcattttattatcattctgatagtttggctctgtttgattttgtagattgttctcttattttattgtcactaagtatgtgtattcaatactcttgtatatttaactactggtggttcaacatggcttaaattgataaaaaccttttgaaaaattaatcaattatgtctatttgtgaatagagaatcttgtaataattttgttctctttaaatgtttgtagttactaatctctcgtttttcattaggctaatcattcttttgttttgttgcccctgataatctataaagtagatgtgattaaaacttccaagctatctataggctgtgtagcagcttttggtttgtaaaggctgcttcaagcatataatatcacttaacttgattacattcaggccttatgtgta

SEQ ID NO: 261909 - DNA, 792 bp, Cannabis indica
tttgggtcgaagataacagtataatacattaaaatattatatatgagaaataagaatggataagagtaaaagtattttggtaaatattgatttttttttttgaaagatggtaaatattcattgatattatttattgttaaacaatttgtatctattaagttgttttcttttcaatttttttatttattggtggtattttttgaaattatttttttaaaaaaaatattaatagtaataatgataataataattaaattactcagatataataacataatttatatcttgcacccttatttcatactattatatcattcatttactaattaccttttttttttttaattaacttacttgtgtagaatattatcaaacttttaaaattaataaaatatataatgatatgagataagtatgattgagagaaagccaatgattagtttttattatagaaccttgatgcttatagatttagagaagatgatgagaaattaacggctaaaaatatatatagtataattggaggaatttttagtggaaataagggtgcattatgcatttatgtctttcgtatcttatttgttgttctaaattatattaaaaatatataattagtatttttttttgttataataaattagtttttatgtgtatatatagattaattatattttgaaaggacaataataaatttttcatagtgaataattattgtatatatataataattagttaaatttatattgtcaatgaacttaaaataatgatttaaatattttaaatatctaaata

SEQ ID NO: 261910 - DNA, 494 bp, Cannabis indica
gttggatcgattggatgactgaaattaattagattggactgatgataaaatctatcatttaatattagatcagatctgaatagacctaaaaatattaaatgtgatccaataaatacttggaaaattttcatgggccacctaaatttggaaattatttataaaaatgacgttgtttttgttgtgttaattttctgtatatgtagttgtcgtttttattggtactttcctctttctaacgttttttatattgggcttttattgattcctactttttaggactagcagttgattttagtttgaaggttcccgtgaagaagatgatgacgtgtcacgtcattatgtgtttgatatatatttaacattatttttgtaaaaagtttcttaatatagtatattcctaaaaaaatccctaaatactttgctaaactcaatttgtggtcaaataattatttttaacaaattagtatcctcaggtcaacttcaaaattagttat

SEQ ID NO: 261911 - DNA, 699 bp, Cannabis indica
agagttatgtgcataagacataacttggttagacctagtatattactaggataaaccactaaaagaacgtaatgtatggattacgtaaatatatatgaatagggttatgcgagcaaggcaacaccaggttaaactcggtaattataacgagacaaaccttactaaggccttattgtaaatagacatgtgagcgtaacacgttggtctatgtcacatagacatatataggcgtgtgagcgtaacacgcaagtctataacaaatagacaaatagtgcaatgacaccattagttatgtgatatatataaatattgagattaagggttatgtgttcaaggcatagtgaggttggactcggtaaccagaactgagataactattctaaggccttattgtatttagacgtgtgagcgcaacacgtaggtctacgccacgtagacataaataggcgtgtgagcgtaacatgcatgtctgtgacatacaggcatatgagtttagcattattgtttatatagtatgataaacatgttattgatatcttatactgtcttgctgggcatggctcacgggtgctctactgtgcaggaaagggtaagactattgctaatcagccgtcagtgcaggagctggacgaagaatgcacatgcatgtccgggccatatcagaccaagcgggttggggtctactagtgttgtgttttt

SEQ ID NO: 261912 - DNA, 621 bp, Cannabis indica
gataactaatcagattgtaaagagttttatttagggcacaaaacccaacataaccctcatgggctttttggaagacttggcatccaccattttacccttgcgtttgcggtccaagggggccgaaatctcaccctcttcctcctcctcgacctccccatcttcatcgatcaagacaatttggcctaaggggatgctagaagaagacctccctggggtcaccatcttgtcaggcgccggaggaagagcggagtcaggactgtgggtctgggaaaggtcgccaaaagctccttcattggcctggctgcttcaaaaacaaacaaataagtgtcagaatggccacgagaaaatatgcacacaaaaacaaagcagtaaaactagtcctaccctgataatctaattcagccctagcaaagtcctgtactataatactcgcttcgtcatccccaagaaagctgtacgaggggagaaaccagctggaagacagataagctgaatgatccagaggaataggtgtgggaggtccggactgttggaaatattttaccaggatctagatttactaacaagtgtttcattaacatcctaatatgaattctacaacaatgaaataaacacatataa

SEQ ID NO: 261913 - DNA, 827 bp, Cannabis indica
agcaagtgaaggctaaacatcagcaacctttagggttgctgcaaccactgaacataccagagtggaaatgggaagacattgctatagacttcgtggtaggtatgcctagaaccacgggacaatttgactctgtgtgggtcatagtggacaggtttacaaagtcagctcactttttacctgctcggacaaatttctccattgatcagtattctgagttatatgtcaaagaaattgttcgtcttcatggtgtcccaaagtccattgtttcggatagagatgcaaagtttacatcaagattttggaagagtctgcatcgagctatgggtactcagttaaagttcagcacaacatttcatcctcaaacggatggacaattcgagaggacgatatagattctagaagacatgctacgagcatgtgtgcttgactttgagggatcatgggtaaagtaccttactttgatcgagttctcttataacaacaactaccaggaaacaatcgagatggctccttatgaacttttacatatggaagaaagtattaatcgcccattcactgggatgaagtgggtgaaagaaagtcttgggtcccgaagctgttcagagaacaagtgaggcagttgacaagattagagtgcgaatgctcgcggcttagagtagacagaagagttatgctgatccaaagcgttgggatattgatttcaaaatcggagacatggtatttcttcgaatatttccgatgaaaggaattaaacacttttggacaaaaggaaagctcagcctcaggttcattggaccttttgaaatccttgagaggatagggcgagt

SEQ ID NO: 261914 - DNA, 513 bp, Cannabis indica
tgctctttcaagacttaaactcacaaattaaacaaagattaaagccaaagaatgttacctcaaactcaatttaaagtcaagctcaatcaatccccaaataccaagcttcaaaccaagcaaatcttcactaaatcaagtttgaaattcaaagagggttgagagagagaggggttctggtaagagggcaagaaactagaaaattcatcctttttcttaaaaaaaaaatttccttttacaacaaatatctcataaatgccaatttactaaaatacccctgaggccacataacactcactttagcaaacaagggaaatttagtcatttcgtgcttaataattttcaagtaaaattcatatttcttattgtcaaattaagtgccaaataattcaatcaaatttgcattttgggaccgaacccggttcgacccgaaatacctggttgtgacgcgccaacctgtcagaacacacctgaaaagacaacatagacatactatataataatatagttccatta

SEQ ID NO: 261915 - DNA, 868 bp, Cannabis indica
cccatcttaaagaaacgaacattaatgcctcgcctaataggcttgttggcatcaataagcagcctgatacgaagatagggcccagtcccctcctttacagtggtattatccacttggattagatcacccaaacccgaagcaatgattttggctaaatcaaaggacttacaacggaaaggaataccatatacctgaacccagaaaggaacatagtgaagctgatcaggagtaatgggaaaagaggcatcaggagcagcaaaaatggtgagactctgggcaaaatgccacgactgtccatcaagaattctcctcttatcaccttcgcaaccaaaagtgaccagaaaaagcccatcagagtgctcagaaacgactacaggaaacctacattgggaagtccagacctgagacagagttttgatcaaggagggtcgattatagtgtttgatggtgaaaagctttaaaagaagattgatattatcagtggactcatcaaggacatcagcaagggtataaacagtgttttcatcaggggtaagggtcaaagattgagaagggaaagggttaagagcatccatcataaaattaaaacccagaacgattacagagagagggaaaaagcagaagaaaaatggtgaaaaccaaaataacctaaatctatctttatataaggaataaaataggctattaagggtacctcttggcttgcctctggtcatagcttggcctctaacctgagtagacatcatgattattctattctcccaagcatcatcaagtctttcgattctcttcgccgccaccttgatgaaggaaaatgggtttaagagatatctgatgatttaatagttagagacttggtagaagaaaa

SEQ ID NO: 261916 - DNA, 521 bp, Cannabis indica
gtattcattgttggatcttcatccgtctcacccagaggaatgacattcggaggttgctgacctacagtttggtaggctttttgtatcagcacggtagcttaacgactacgattttttgatctctgcatggtgagcccttaacgcctccatctctctatccctccattcggtgaacatacgcctttgttcgtcgaacatgagatttactacagtacgtaattcatcatgatcatgatgtagggtgttgttatgattctgcatgagtccaagagtgtcgcggatattttgtaactcagtggcatctccgatggtcgtctgggcattggttccaggcagaatagttgtgttatgaacgcccttgttgggtgcagaactattattcccagtctcttgcacaccagtcgcgatttcatctataggaggtgttacaccattctccacgttcgccgactgtccaggattaacagctgacgaaacccttgtgttttttgggtttttcaatgcaggatccaccatctgtg

SEQ ID NO: 261917 - DNA, 1826 bp, Cannabis indica
agagaatctttaatcatatttctttgacgttaaggaattttcatttttgttcataacaacaaatgcaattgtgaatattcattctatttgatgtttatttaactagtaattactaattggtataattccttgctttccaactgtgtggatgttctgattattttcttcagttatttatttcttacattctccttcttgattgtagggcggatgatgaacctgttgatccaaagaagtatcttgaggagtcatgcaagccaaagtgtgtgaagccattacttgaataccaggtatgttgcgaaattctggggatctgaatttaattttgtaagtaggtagaagttgaccttttctttgattgatatgctgcgtcctgatataggggtgaacactttaataattgttcagtactcagtagctgctttctgtgtatggtaaatgtattgttgatgaaaaattagagaatcttcagactctccatttatccaaatactttgttttgtccagaataccttgaatttttttactctttcctaatggaactgactaaaatcataatttataaatattgaattaatcttatactgtttaatactttcatgttttcaccttgtgtctttcaacaccattcttgtgcaaaattaaacaatctctacatgcaccgataccacttttaatttatctccctgatttgaagtcaattagtaataatttttcctttaaattccatcttcatttttatataagataacaaacaagctttggaagcctacttaaatctgtggcatatatacaattgagaggagagggagaaaccgatcatttcccaggcactatagttatggcttgcatgtttaagtgattctggatttaacaattctgtgtatctttttaaacaaaatgatttcaaacaaggactgatttataatataatttctgtttacataattgatgtccttttcatttcttacctctaaaactattgaaaggccaactagttaagaattatacttttcgatgaatgtgatggtttgtcaagaaaagttttgtaaaatgtcactccattctatctgccatctttacgagcctgattaaatgcttttttttttggtgtatgaagcgatgactaaaaatactttaaatttactcattcaacaggcatgtgttaaaaggatccaaggcgatgattctggccacaagcactgtaccgggcaatattttgattactggtcttgtgttgacaaatgtgtaagtatcagtgattcttctaccaacaggctttattttctggttatgcttatggtgtttttctgagattaagggtgtgtgactatgcaggtggcactgaaactatttccaaaactgaagtaatgtgggagtttatattctgtgatgaacatttgccatttttctttctcttttcaatttcaagaaactgttttcttgagcagttgattttgttccctggcttagagacatgcctgaatggttttcttccagaggactgcattttttctcaacaaagtagagatttgaaaaataattaataaaaggaatcctcaatgttagtctgaccaatacaacaaggcaaatttatacttttgttttatagttttggtggtgcaagtaaaatatttaattgttcaatgagaagagcaaacatctttattgtgtcgaaagacaagggggaatggattattcagctagcatttggaagttttcaaagtagattaatatttaaattaatctgagtttgatgctaccctaattatggagtttgttagggctgaacattggacattgggttttgagttcagggaaaaaaa

SEQ ID NO: 261918 - DNA, 1060 bp, Cannabis indica
attttagttggactcttctacaattttgttatggtaagatattattttgaagttcgttgagagtgagatgttatgtagcccagaccacttatttattgggcaattatggggttgcacttttaagaaaccacataatcagcccaaaagctgcctaatctgccctccgtgcacccctactaattgtatccccaaactcttagcatattgttccttgccactttagatgtaataaaagagtcattacctgtataacattaacagcttgcttgaccgcccatccaaataaactcaacccaagtagagcagcaagcaatgcattttgttttgctgagcttactaaaacctgaaagagggggtcagaaattaagatattagcaggaatcacaatcacacaaaaattgagttgacaatgtcgtaatcacttacattcatcaaattctcagagtcgttctttgcaagaagaaacaacaatatgtaaagaacctgcagaagctcaattagttaaaattagagaaatgctgcagttacagaaaactggtgtacacaaacagacgcagcaaattacctcgcaagccacacagcagtatgccataaacatcctatttccgtaatataacttgaaaagccaattagtgctatctttcacatctttatgactaaccttgcccgacaagaaagtactgaaataaaaagcattagagtcaagcaaataaaaatgttaggacaaagtttcgactctatttaaagaagaagatccaaataaaaaacaatggagaaaaagaaaactacctgtacatctgcaaccagtgactggcaatatctaacgcaagcaatgagaggaaaaccaaaccaggcctgcattaaacacgaaaccaaaacttaaaaatataaatcttaacataaataacggaaacttccataaaatatgacgaacataaagatgtaaatattaccggtacacttggggaaagaattacaagtagacaagcagtgctaatcctgagatatatagcacatgaaatcaaaaaccttgtaaggacaagagtgttcagcacaaaat

SEQ ID NO: 261919 - DNA, 1474 bp, Cannabis indica
atgctatttgctgatgatagctacgtattttgtaaggccaatgagaatgaagctcagaatgtgctgcgtcttttgcaaagatatgagctagcttcgggacagcaggtaaattttgctaaatcttctgttttctttagcaaaaatattacttcggctgtgagggatcgattatgtagtcttatgcggttaaatgcggcttcggatgatagtttctacttgggtcttccttgcatcacggggaaaaataaaaatgccattcttggctttttgaaggaaaagatgaagaagaagatcttcagttgggagactaagtttttatcgaaagctggcaaagaagttttaattaagtcagtagcacaagccttaccaagttatgcaatgagtgtctttctcttgactcaagacatttgttcgagccttgaaggaatgatggcaaagttttggtggaaatcccaatcgaactcttctagtaggggagtgagttggattagttggaagaagctttgtcaacataaagatgttggtggtcttggctttcgtgatcttcgtgactataacctctcttttttgggcaaacaaggttggcgtttgcttactatggaggacacaattgtggcgaggatttataaagcacggtatttccctcatggttctttccttaatgccgaactaggacaaaacccaagtttcatttggcggagtatttgggcggctcaagatcttgtaaagcaaggagctagaagtgctattgctaatggaacagcggttagtattttacatgatccttggttacccaatgattctaatccctttgttttgtccactaatccgggcctagttgatcaatatgtgtctagtttgatgataactggggagcggtcttgggatgttgagcttcttaataatatgtttgaagagcgtgatgtcaacttaattagaagtattcaacttagtcaatcacgggctgttgatggttggtattggagtatggaatcttcgggtttttactcagtcaaaagtgcttacaagtttctccaagcattgagaggaaattggttattcttgcaagacgacaatttttggaagaaactttggaagctacccgtgccctcaaaagttcaccattttctttggaaggcttgctcgggttgcctcccaacaaaggtacaacttcaatcaaaacatgttaatgttgatcttttatgtcctttgtgtaatatgcatgtggagacaattgttcatgtcttggtggactattccttctcacgatcttgctgggcattatcggccataaaccagtcggctactggtgttaatgccgatttctgtgactggttttttgacatccttgctgccggcagtgaggttgtagcgagtgaagctgctatgttgtgttggagtatttggaatactcggaatgaagtgcaatggcaaagtaaaaaccgaactgctttggaagtggtaagatcggcta

SEQ ID NO: 261920 - DNA, 748 bp, Cannabis indica
ttatttagggcgttacagagacgctggctggagttggtgaaggattatgattgtgagatcctttatcaccctggtaaggccaacgtttttgtcgatgccttgagtagaaagggttagagtcagataaatacggtgaaacaaatctcccagcagttagcaaatgagatgatcagagctaaaatctagttggttgtagggcagttggctaatattaccctgcaatctactcttttagagcaaatcagagaagcaaaattggaagatccagagtaaatgaaatcctaagatggggttttgcctgggaagactagtgactttacagtggatgaaacgggaatgtttcgatctatgaattgtgtttgtgtgcctatggatgatgatattaaaagagagattatgaatgagtctcatacgactccctactcagttcatccagggtcaacaaagatgtatcaagacctcaaggccatgttctagtggccaagcatgaagaatgacatcgttcagtatgttgttaagtgtcttacttgtcagcaagttaaggctgaacatcagaggcctgcagggttgctgcagccaatgaatattccagagtggaaatgggaagacattgctatggacttcgtggtaggattgcctagaaccactggacagtacgactctgtgtgcgtcatagtggacaggtttacaaagtcagcgcactttttgcttgttcgaacgaacttctccattgatcagtatgctgagt

SEQ ID NO: 261921 - DNA, 5255 bp, Cannabis indica
tacaataatatctctgaatatataattcttagatagccttagcttatagcgtttcggcgtatgatttctcctcccctgcccagtgaacattcctcactatttatagggtaagaaacttgaggaggaagagtttcctctctcgttacaaagtgcataatcacaagatcgtgggatcattgctaaatgctaggatcgtaggattgaggccgtatgcaccgatagtggaatcgtgtgtatgccatatccacgcaagttgatccctgagttatagggattgagctggtgactcacgaagtgcttggctgaattcgctaagtgttgctcattctgcacagctcgttgagtattccattatggacatgccagcgaggcatcctgctcggcatgttgatccgaccaggtgctctaagttgatgccacgtgtcaccattcttgtgatgccacgtcagagtgccaattttgagataacagacacataaatgcttgattgataattactttatttttttatttagaatatttgattctcggacatgattttggaaataaagtcctgatattgtgggatttcataataaatgagtgaattacgaaactggatatcagaatgtccattagccattattacttgatgttatccagagaactgctgcactggatgcttatctcgcctagacgagatatctatctatcatttggatggcttgtccttgctaatagatttggtccattatcttggttgggcatacaattgggcatgttatagtaaaactaaaccattgtggaattacacgtgtcttctgtctagaaatacagataacaaaaaaaaatgggcacaaactgttagatgtcagaccataacgagctaagttcgcatgagtagggataaaactaagggaggctatccatgcaaaattacgaatcgtaggtggaatgggtaaggactagagaatatttcaccaccaagactgacctgaataggtcgaaggttgcctaatataaaagttcctaacctaattccaataactactcttaacataaaagtgccccttatcagtataattccaaaccaaagtatcaagtctttcaaaagaagaggtaggaatagatagactggtcgaagctttgagggagcaaaagattgattaataagatcaatcctccaagacccttgatcgtccttaaggtcactgacaaaccaaaaatcagagtgtctaagaaaagaaaaagctcgacccacacgagttttaggaatctaggtatccacctctggcaataagccatctacaaccttccaaccatatttcattgccccaaacccaaagcaccatcttccaaagaaatgaagcatgtttagtctcttcaacatgtataagagaaccatttggatactaaaaagctttcatgaccatggccgctagagaattagggaaattgaacaaacaagttgcatgtttcgccaataaagcttgatgaaaaaaaaaaagatttcataagcccatacctcattagacttgtgccaaaaaagacactcccatgtacactaatgtaacttcttatgatcgtcatctcccctccaccaaaaccttgcacgcatcttgtagatatcattaataatacccattggcacccaaataaccccatagcataagtagcgttggcttgaaccatagatttaagtagttcctcacgaacccagcagaaattagtttagatttctgcccaaacaatttaccccaaactctacctaatcgattggaggagtccatccttatttttccctgcgaaacagaacaatcctaaatatttctcgtgaaaaaggaacaagagaaacatccaaaatacgagcaagatcagtgaacaagagtagatcaatcctcgaagaaaaacagacaacaaatttatggagattaacaagttggtctgacgcctcttcacaaaccccgagaatttctctgaacttggtactattttcggcaaacataaccttaaagacgtttcctcaagtacaattctaagtctttttttatgttttctatgatttagggatgagatttcatatttcatattttatattttaggtttaatcgtgtatattctttcagtgccaagagacatccctgtgtgtaaagtgttattattatttgattgttgaagcaagaaagttgtgtattgcttggtgtaataattttttcttacatgcttaatccattagaagaagaaaagtctgatacgagcttttggattttttctcataataatctcttactagcagacaaacatgaagccatgtcatttctttgcaacctctagcatttattattgtatagcaggctttaccaaattgggcgtgagagagtaagcaaccgaaatggctaaaaaaatagaaagaattaaaagttttacggatcaaaatgaaagatatatagattttgaccaaactggtcatttatcctctacacttgagttgcttgccaatatttggagacattttaccaaggcatacaatgaagaatcacgctacatcttttcaaaatcaaaacaatggaatggttaaaaatcaaatacttatttgctaaatgggagtattcacaccctcgaacagcttaggaactaaaaaaacaggtgaagaaaaagtataatctagactagctacctagtttgaaagcatccacaaaaagtcctaaacaaacaccagctttccagtagttcaccatcacaacaaaagactgcaaccttccctttgaaagagaaggtagctttctatacataagcataccaataccttcaatggcagctaccacgatgccggcaactagaacatcccaatcccccgtctgaccaagaattgtagcaagtgcattagctgtgtagaaacccaacagaaccagaaatatcttcatgggaaggttctttctagcagagttcagcttcgtcaatagctgtctgccacctgcactcactatcctacccaaacgagttcgaccaagattggaactgtcaccgttgacgccctcttggtcaccattttcggaaaccccaccagtgtctaaagcaaaggaaactttccaccctctttttctccaaacgctggacatgaagaaaaaatgttaagagaattggaatgtttataaggtcaataaaagtgtaaaagtattttcagtactagtactggcgacgaatttataatctggaatccactatttgaaaataagactttctgagaggaaataaaatcagaagagtaacactaaagattcatcttaaacaaaggattggttcatacaaacaaattaaacagtatcctcccagctgtagaaatgggcaagctcatatccatcagaacaaccagctaaaatcataggaagacagataagtgaagacattaaaacaaatctatttatcccatgatgaaagctagaaatttacctcctttggagaaaaggtgcagccattaagtcaatcctttatttggtgcaccgaaacttggctcataacaccagctacacaagttgcaacttgcagcagtaatgcaggaactttcagaaacttcattctccatcatcaaataccccgcatgatgcattatacttcccatacgacaggccatgaactatatatatatatatatctttactaaaaagtctgcagtgaaaaaaaggaagttcatatttaaagattcgcatattaactttttcgataaactagcattaaactgaagggaaattagcacaataaaccatttcaaaaagactcagttaggattataattttatactttcaagaattgttctccaataggctcaccatttagctctaatgcagaattttaaagttcttcgtcagagaaagtcaaagcagagttatcaatctgaactataaattcctacaaattccaccaagcttcatcacttgaacttggtgcatgaaacataaacttatatattaccttaaacatccctttcgctattcttctcttggagtatgctctactttctgagaaaactattttttgtaattttagaaagagaaagatgaaaaggactaaaacaataataaaaaatgtttagacaaaaggtaacattagctacatactacatttagctaagaaaataaggtgcgctaaataagagtagcaaaacaaaagcaaacaaaaactacaaacacaaaacataaagacgaaagaccaaacagtaagacagaaggcaaattcaggtaaaatcctttatactaaaataaaaatgtcactcaactgtagatattacagaaaaaaaatagatttattttttagaagagtgataaaagaggtcatttactctgagaatataatgatgagatgggaaaggaacatacctagtcgtgcctgcccgtcaccagaggaaggcccgcgtctcggaggaagcctggcgtctctctctctctctctctgagctttggccgtgacggacctcgcgccgcgcaggcagaggaagtcgcgccggagttctggtgccgtgccggaatctcccagtttgtggttcacttctgtctgagcaggcagaagaaaccgacaggcacacacaaacacgagaacgaaagagatttggggtttaggttccttttgttcttaattttttttgtgttttattttgtagtctattttttttttcaaaaaggaaattctacacctccacccatatatactctcttcatgttttctactttataaattttaattttttttttttttcagtgatattggcgcaaaactatttggattatacatttagttacacttaatttcatatactaattttaatggtaaaatctttaaacttattatctgttttgtttttactattatgttagatttccacatttaagtgtcaaggtggattgtctatatgtacacaattataaatttaacatattttcaattgtccatgtaacgatttaaatattataaaaataatttaataaataaaaaattaccacaaaaaaaattgatgaatcagagaagttgttattgctcaaaataatgtttatacattctataagcaccttaactgatttgttaaggtcttgtcatatctatttatacataaatttacaaattgtcaaaccaaacctcatcacttcggctaattttcgtaggccatattagaacaactctttgttttacagtttctttctctttgaccctggcaattaagtgcacagtatttggttcttttccttgccatatcaattcatttctagatttccatacatgataa

SEQ ID NO: 261922 - DNA, 579 bp, Cannabis indica
tgttttgaagggtatatcgaaagtagttgtcaaagaattctatgccaatttgagtaatgatttgcttgatgagagctcagaattttttggtaaagtatatgatcgggggcattggttttcattcactgtcaaggaaatttctagggctttgcaattacccgaaggtgtgtccaatgctgtcatgtccatggatcgtcatctaatgctcactgaactcactagtgcacgagttgaatggaaatctgggcagagtcttcgcattacacatctcacttatgctcatgcatcactcatgaggtttacacttagcaattggcttcgtaattccaacaaaactgtggtatctcaagatttggcatcctttctctttcgtatcacctcaggggcatccattgatctggcttcttcaatccttgaccagattgtttctttttggagaggtaaaaagcgtactcataagcttgtgtttcctaacttaatctataaaattctgtcctctcagaaagatgtggcctactcacatgaaactcttgagcctccctttactagcaccatcttccaaccctcggagtattttga

SEQ ID NO: 261923 - DNA, 1006 bp, Cannabis indica
acaagaattaacactgtcctgaagatttaaaaaattatacaaactgcatgacatgctagaatatctagagataagcaataaggcaacataggaacagaagttcttgaataaaattttgtttctctagtcagctaaaagtaaaggagagagaagggaaataagatacttggaagacttggtttaaggtcgacagtcaattgcactgccaccaaaaaatcatcttcatctctcgtacccaaaacagctcttgagtccccaatattcccaataacaatatcctgaccctgcaaataaagtctaatagttaagagggcatcattcaatgcaaagacaggtaaggatcgattagtgaaatctatctacctgcttcaccagggttacagctgttgtcccactggaatagcaatcaatatgaggatgcactttgagttccttatccataaacttaaaagctttcagaaatgagtctttcaatgttgaaatgagctcagtctgttcatgaccgtgcacaagtttaagtgaagatgcacattctccagtctctggactactacccaaagcataattactagctcctgaaaccccatttttggagccagcagtaatcagatcccaacgggaactcagctttaaaggcagagaatccctcacctttttggcaaccaaatggccataaggaccatggccgtcgaaaacaccacagaaaatggtatctgcccttgaaccaaaattctggagaacagaaagaatgtcattttagtaaccaatgatagaattacttccaatcttttaataggccccaagccaagaagataacacaaataatcaaaatataagtcacaagtcatataaacttcataatcattgctacaattaattaagcaaatcatttttgttgaaaaaaaaaaccaagcaaatcattggtttattgagaaccaatgaataaccatcatggtttttttttgaagtcatatattacgcaaacacagcagtagaaaaccataaa

SEQ ID NO: 261924 - DNA, 650 bp, Cannabis indica
gggtcatgctcaaaaatgcgtgccccttgggtcactaggatacacctagtcattttttgagatactcttctattcgcacacctgcgattttgtgccttggtgggctgattggtttttcgcgagaacccgaatcagccttctaaggagattttgaattttttatgcaggtaaggtcacttatattgttttcgcacgttcaccacactgaaaagatcttctatctttcagatgagcgatttattggacagccagatgcttggctccggaggcaatgctttcgacgatgactaggatcaggaggacagctttatcccaacctcgatttcagaagaggagacgccaattgccagcgacgcggagctgggtctgttgtcctctgcagatattgagaggatggttgaagagctcgctgaactgggaactattgagattcgagataacgagtctacggtgtcagcttgcgaacaccttgttcattcccggcatgctcccgacactaaagttgaagagatggacgaggattgggaggctccagatcgcgagtttgatgaggaagaggacgctgaggggagtgggaccgattcagtggataatacacaattggacgagcccttctcgtgtgaggacttggtctcgggagtcacaaaatc

SEQ ID NO: 261925 - DNA, 496 bp, Cannabis indica
ttttatttttgtaacagttaatcagttaaatctttttgtaaatgatttttataatcgggatcccgagtcttttgtaatattgtttataagtttaattaaacgagctgcacagcatgtttaaaactcacgtaatacgcctatggtagttagggtgttagagtaattttatagcataatttagtttctaaaaataacttgtaattgtgtacttgttattagttggaatcattattctatattattaaaaaaatataaatacaaattaataaaataaataaataacttgttgacctgctataccaagttattaaattgacacatcatcactttttttaatacccataaatgggtaatacccattaaaaagtactctatatatatatactagtatattgttacgtgcgatacacgtatgctatgttttatattaagtattatattatgagttcggaaggaaataaatgaataaaaaataaataatatttaatttagagag

SEQ ID NO: 261926 - DNA, 1112 bp, Cannabis indica
caaacaaaagaaacttccttttggaaataataataaattggctggacatgcttttgatctcatacattgtgatgtttggggaccttatcacatagcatcacacacaaatcacagatatttccttactcttgtggatgatcattctagatttacttggctttatttgatgcaacataaatctaatgctaatattgttatccctcaatttttatcctatgtgcaaactcagttcaaatgcatttttaaaaccttcagatcagacaatgcaccagaacttgtattcaaagatttatttgcaaagcatggcatcatgcacgagttcacatgtgtggaaataccagagcaaaatgcagttgctgaaagaaagcatcggcatttgctcaatgtggcccgtgccttatattttcaagcaaaattccccatcaaattctggagtgagtgtgtcatggctgctgcctttctaattaacaggattcccacttctttacttaaaaacaaaaccccatatgaatgtctttttcaaaaaaaacctgattataaccatttgagatcattaggttgtcttgtttttgcctcaactctatctgctcacaggactaaattctcccctcgagcacgaacgtgtgttttcatgggctatccgcaaggaattaacggatataagttgtatgacatcaacaacaatcaatttttatatctcgtaatgttattttccatgagaatatctttccatttcatacacttaatactgattcatctaacatcgatcctgttatctctcaaaaaccaaaataatggtgcatgaatttttactctagatatggaggccaacaggtgagcttattggccatggagagctcaaggaccaaggaggagctcaagggccatggaggagctcatgggccatggaggagctcatggaccatggaggagctcatggaccaaggaggagctcaagggccatggaggagctcatgggccatggaggagctcatggaccatggaggagctcatggaccaaggaggagctcaagggccatggaggagctcatgggccaaggaggagctcaaggaccaaagaggagctcatggaccaaggaggagctcaaagg

SEQ ID NO: 261927 - DNA, 625 bp, Cannabis indica
tgtctatttaaatattatttattttccgggatattaaattcaatgtctccatcaatttacaaaaagcacgcttgccccatagatacttgaagaagaatttaagatcgttaacaaactttaacatgtcatgccaaacttatacattgccctcttttgatactaatacaccttaaatgaaagcaatcagtccaagcttgtaggcatcatcttttacttcgcacctctcaagttggagtataagtgaatccaactacacagagctcttcccttcaaaatacgttcgactaaatggtcgttggaattaacttctatttcctcctctgtaggggtactacccataggtaagccagtaataagtccaaactttatccgttcgaatctcatgtcatttttccctacatgaaaccaaacctcatcttccttttcaatatctactttcattttttataagaggaggttgtggaccaaagcgccaaagaaagtcaactctccagcttcccaaaagtgtccgaaagagctagccttagccgtatcaatcaaatcaagctttgtaaacttggccttgatatatctaaacctatttgtaccccgataggtaagacgtcttgtgaaatactgggaaact

SEQ ID NO: 261928 - DNA, 556 bp, Cannabis indica
catctagtaggctcagcagtaaacaatttagaataaaaatcaacaatgacattatctaaaccgctatcccaatgacgcaaattcccatcatcatccttcaagcagaaaatatgattgttacgtcttctagtactagccttggagtggaaaaacttactattttgatctccttccttcaaccaaagttgttttgatctttgcttccaaaacgtttccctttgattgagcaccgcaaagagctcctttttggcatcataaaaaagttgcttcccctcatcatcccttctactcttataccgcttcaactcacgattacagcttttgatacaagacgcaaaactcccaaaaacatcttttccccactgaagtagctctcggccacactcttcaatcttttcctctatgtcgtggccttccattctatcccaacaacttcgaataatttcctcacaaccttgatgcgtcgtccaccaattctcaaacttaaaccgatagtcatgtgtaggaaccgtacccatctgaagttccaggaataacggagaatgatctgaaggag

SEQ ID NO: 261929 - DNA, 490 bp, Cannabis indica
atcaccaacgttcttcttcaaaacccatagagcgaggacttgtacataccctgatggggggaaataacgaaaaacctctctcgagaggacagaacagagcgtgaagagcaagtgtgacttcgatagaacccatagctgatcaactcgaagaggagaaagtactcaacgaactaatgatcgagaaagtacggaaacaagtaaattagcgagccacttaaagacaaagtctatgagtaggacgcggtctataagtaagacgaaatctaccagcaattactcccaactagatatgtgagagcacttgaatcagaaaaaacgtgaccttcgccaacagcttggtccaaagcaagaagatccaatccaattacgaataaacgagctggaggacaagtttaggagatatcaagtgggggaattagggaaatcatcttgacacaactctaatgaggagcttgagtcgtatcacccagatattatgaatacccccttt

SEQ ID NO: 261930 - DNA, 1032 bp, Cannabis indica
tttttttttttacttactgtcttttctttcaatcccagaacattccaaagagaaaatttcattccaaacttggtcctttttggtggggatttctttagtgtcgattcaaacttttcttttgttgcttcctattggaagataacatctcacaaacaggtcacctcttggttttgattctacactttttgcttctacaattttcagctctaaactaagggaagaggtactttatggaatgcccattatgttttctttctttctaaatgcaaggaatcgagcttgagcttgagagaatgagaagtggttttggtttatgatgttgagtagtattgggtttagaggtgtatatatataatagtgtataaatggctcatctagttatccaaaagttgaaacacaatattgtactggatggctgctgttttagagtgtttttcataattgttttaagtatgtggttggtgataatatgccgtttgataaatggggtgtccactatttcattaagaaagaatacttattttttgggctcaaactatgtgtatttatgtgtttgttctgttagttttttgagtttaacatgatgtaaccaccatttatcattattattttttgtggtttttcttttttacatactttttactttacatagttggcaatgcatataagtgagttactattttaaaacttgatgcagatatgaattttcgtaaatttgtatcagtttttggtacgatggttgtgtcaccattatcaattaaaccattttttttctgcagttttaaaatacagcagtggaaaagaaaaaacaaacgggagagtcgaggtgaagatattatattaccgtacatatagctcattaccaatatttttaatttatacaaatcatccatattaatatctttatatattaaaagtgtctatctaacggcatttcttggtttaacagaatatacttaaaaataaaaaaatattctgttaaatttaacgattaggtttgatctcccgttaacaaataaacccaataattaa

SEQ ID NO: 261931 - DNA, 1041 bp, Cannabis indica
tgtattcctacaatcaattttttttttaatatttttaatttaatttacataatgtagcactaatgagaaataatacaacaataatagtaaagagaaaaagaaaaggaagaaaagtcacctgcattccatcatcccagtcagcctctaacagttctttaatgttcattcggttgacgaacatctcttcctcaagagaaaccttattcacattagagctttcaatatattgcaccccattgacaacggttgaaaatcgttcaattaaagatgctacataatctatttctagatttatgtataattttgtagcacttgttgaagaaaaactgatttcacctatttatgttaattgtgaaaccatctaaattatattaaaaagacatagtaaacgaaatagcattgtaatattaagatcaacatttataatcaccttgaaatttttttattgtggtagaagttactatcacaataataggaccctcatcttttttatacatatttgtatcaaacatctctgccatcttaccccatagtgtaatttttgatgtgattgaactgtaaaatagaaaggtaaaattgcattaacatagttgaaccaagataaaatataaatattatttctataagtaatgtactctagcaacaaaaaattgatatagttgtggttcaattaaacttactaatctgttatgattttcaagtctctttttttccaacctgcgccaataatctcactgtctcccacaccacataaacatccgataatatctaatattttgagaaaaaaagtaataatattaagatgttaaaatttgaaaattgaaaattttcaattatacatcacatttgaacactaaattttatataaatacccgagagaattgtattgttactgatacgtgaatcaatcaaattatgagatacgaattgaaatccgttagttggaatcttgatgcttccttcttctaatttcatgattgaagttgtttttagaaaaataatcttgtaggcatttaaaacaggcctatactcgcctgtact

SEQ ID NO: 261932 - DNA, 893 bp, Cannabis indica
agaatcgaacattagtcattcccagaataaaagaagttctaaggctccaaatcaaaatgaagctctgaagaaggaaaaagtcttgaatcaaggtactctaagtatactagcctagttgatactcaataaaatgtttacaaagtcacttagaacatggtccattataaaaagcacccgcccatgttcaaaggcagaagacataagagggatcaaaataaaagatatgaatatcacggtgatattgggcataccacaaatgaatgcgagtacttgaaagatgaaattgagggattagttagaaacggtcatctatgtaattgggtttgaatacctatcatatatcacagacaaggagtagcacacaaacatctctttattcctggatagcaaggagtcgtaaatgctcctcaaggagtaggttatcctcaagctccaggaatacaagctcaaaaagtaacatctttgattgctacactaagctccaagtttgccttaaaagatcttgaggtaatgaactttttccttggtattcaagctatttatacattagatggcattgttctctctcaacaaaagtatattcaagatatactatgtaaagctaaaatgcaaggagtgaaaactcaaacctctcctatgaacagtgggttaaggttgtcttactatgggagtgatccggtggaagatgctacaacctacatgtctatagttggtgctttgcgatatgcaactataaccagacctgacataggtttcagtgtcaataaagtatgtcagtttatgcatcaacccttacaatctcatcttgtagctgtcaaaaggatctcaaggtacttagtaggtacacttgattatggtttgcatctcaagtgtccttcatctctgcaacttga

SEQ ID NO: 261933 - DNA, 814 bp, Cannabis indica
attacgtactttatagtcttttaagattatttgtaaacttttaaaaattctaaatagtttataggtacgtgaataaagttaaagcagtaaaaaaaaatagtcacgtgtgcgtgcaaaaaaatatttattcattaatttcgattggcacagtaacttatactgaatttaataaaaagttacatgtaattctaaacaactacaacgtgtacaataatgaaaaaaaataaattaaaaaactctactaaatatgtaaacagataaaatgtgtaccgaaaaagaattgtataaaattatcctatatgtacataacaaattagctaggtatttattttttaaagtttaaagctttattatgtacatttatttcgaactgtttggtcttaattaattattaatattttcacaataaattatcttgattatttattattctttctaatgataaagtttattatatatgataataattttttatattcagtcatggatatggatgcaacaagcaatgcatccagaattgaattacaatagctatttcaaaaaaagatgggtaagtaaaattattaattaacaagttacaacattattataaataataattattctaattgtaattattaatatataattaaatattattgtacgtactactatagatgtcatggaaggcagtgccattcaagaatgttatatcaataaaaaaatgggtgaaagagataaagcaacgtagaaaagaggaggacaggctacaaaaagccgaggtgcacgccgccatatcagtggctggtgtggcggcggctctggcagtggttgc

SEQ ID NO: 261934 - DNA, 740 bp, Cannabis indica
acatttaattaagtctaggatgtctgcattcatgtatagtcgcacttacggacatcgtataacgagctgatagaacctagacatgcgagtctatattggtttatcgaggctattgggtcatcgagaccagctcgctttacagagaagcgatctctatcgcaggaggattgagaggatactcgcatatatcgtggtatatgcaagtcagatctgtttcttggtcctgcataatgtgagtcgtacaaatgcggctagacttggtcatatccacatcaccttgctgagtctggttcaggcgagctctaatctcgaggagtctctcatggacatctcatctttccttggggaaattgagtacacgtgtcctttaaacaggagtccggtctcgagtttctaggtgagaaaaatctcactataacagtaatattttgtagggtgtactcttttcgaatatatattttattatgtttatgaaacttgttttatgcttcaattttaattatttaagagcttataaatcagttttatttattaaattttatttattgtgcttgttatcatcctttctattttattttgttttcactttgtatatatgttttttaacagatggaatgagttgctgaaaccggttcagtctttggcggtaaaagataatcttctcgtaatattggtggtattttaaaaaagggtaaagtagagaaaaatatggtatgcttatacattttacatgttatgtg

SEQ ID NO: 261935 - DNA, 2445 bp, Cannabis indica
tatatatataaatatatatctacaggagtaacagtaaatatacacccatacattacacagtgggtcctaccttaaataaatgttatttattgagaatttgacactaatgttttgatgcatatatttttgtcaatattttgtgtgtatatacataatacacatatatcacacttgaaaaaacacttgcccgtcttttgttcctttttcaagtgctctatttgaagttcctaatgaagtaactcttttaacaaggtttattgtttcttattaaaaatatacacacggatatagtaaatatttattacctttgttttaagatcattaattacatcccctacagtgctctgctttggcaatctaacagtatgaatgacaacctgagaacatgaagataagtatataataacaagaaaatacaaatattgacttgcaactaattataaatgcttttcaaaaaaactaattataaatgcacaagatcaagaatcatcagcactcacttcatccttggtcgaatgatggaaagcaaccttcaacgttttgagaccttgcaattccggtagagggatatccagtatttcataatagagaatatcggaagtctaaaaaataaagacagcattttgagagaaatcaggacacagatgaaagagggaaagcattcaaatgaaaaattattaccaaagagattagctaaggaaaaaccccaaaactaatataacactaacccataaaactgacaaaacttaaaatagatatatcaagcattcccaatctcttaacatatcgaaaaatctctttgttgttcctaatttaatcatttaaaatgagatatctattcatacatgtatacatatgagagagagagagagagagagggaagaagaaaaaaactgtaaatttagtttacattcaaaaagaaaggaagacctgattgtaatgcagcagcatgtcagacaaatggtctactcctctgtacttgataggttggggtttaggttgttgggagtaacagttatgcgacgtgagcctgatttttgagggatcgttcaaccctaggtggtgagcaactttctcaacgacgtcatcataggtatagagctttgacctaaacaaaggaaagagcattgaagaatcaaaaatgtaagaaaatcaaaaggacatatttgcaaatactggtaatggggaacttacagctcgagacagaactcatcctcttttggtttctccagagagcgaaagcgaaccacctaagaaacagatgaaaaacaacaatttgattattataaatctatcatcgagcgctaaggatgtcacaaaaccgtattttccccaactcaaatgtaaaatttacactccatctcagtcacagacataataaacactttgcttcacactggaaggttttgttatcctttatactagaattcactaaaaaaaattgaatctaatgcactactacaagattctctcttaaattagtattattagatattttgtttaccgatgatgttatcttatagtagcatttaccaattcaatgcatatctcagtatcctgaaactaaccagagtacaaccatatcctcaaaaacgcaaaacgaaataaaccagagaaaatggaaccttaaattaacatgtacaaatcaaataagcatgtgaatccatgcaattacatcatcgcaacagtgttatcaaaacaatggatcacttgcctgacgatttcggacatactctaagaatgaaggaacatcaggatagcgacactgttcactcactggagcagccttctggaagcaaatgatgtctccatcttcgagctggagaggaagagaaagttattgttgttagaattttaagaacataaagttaatataaaactgagccataaatgaatagtgtgaaattgcgagcacccaagctcaaccacaagtacactgaaagaaacctaaatgaatgaaaccgtaaagtatatgtgtacaaacaaaaaaaaaatatgagtaaaaaccgatcactaaggtacctgactagcacgaaaagtggccttcttgtcaatgtgttcacacataacattaggctcaaactttatttcctgagtagaaagaaaagaaatgtaatgtaagcagatgataagctgtaccttatctaaacaatagggaaaggggaaagaacaagaataccttatctaactaaacaagagggaaagaggaaagaacaacaatgaaataaaattttccagaacaacaaactaccaaaattttaaccaacctcgaaaagttcaatttcttcatcagcaccaaagccagccatttcgtttaacttggtcaatatctcagcaggctttccgcttgcctttacaaaaagcctccctaggtacctgattcatagacaacaagtgattatgcatactaatccaattttaaggctagaaagagggagggaggga

SEQ ID NO: 261936 - DNA, 578 bp, Cannabis indica
agcgtagttagtttttttttatcttgctcgggggcgagtaagaatttattatggggaaattttgttaggttatatttagcctatgtttcgggtttgaaaagtaagcattttctcctctattggtgtcttttggagcggttttacgcttgattttcattgtttcaggttcccggggtatcaaagttcaaaatcagtcaattgatgaaaagacgggacaaactggcaaaaaatcggaaaaatcttctcaagatgagtcagtagtcgcgactaccaatgagccaggtcgtgacccttttctgtggtctcgactctggtcgcgactttgaggatttggcagaaactcagtttttcaagtttttcctgtagtcgcgaccagcttataggctagtcgcgactaggtacggaaaatgtagttttgacctaattctgatttttctctcaattggaggcacacgtttcatccctatataaggaatacgactcagaaggtcaaattaagcagaaacagatctgaaaaatggatgaaagtggagaggaagctatcttgaagactcggagcgatatcaccttctagtttc

SEQ ID NO: 261937 - DNA, 533 bp, Cannabis indica
aaaaaaaaaaaaattacaatattaggtgctttgcaaaaatatatattccctgaacttaaagatttttattactacttataataacgtacgcgcgtaaaatgtgtataattattataattacaacgtgaatattatttaaatgagttcacaaaacgacaaagtttcagacaaagaaaactcaccatcgccttatttcactctatggctgacttttgggtcactctttgcccccacaatattttttgtcggtaacactccatcatatatatctacatttatcttttaagaaaaaaaaaaagaaacaaaaaaattatcaaatattgatgggttgaactatatagtctgtacatatagatatcacaatacaattacatcgacccctgaagttaaattttgatataaataaatagtatagctagtgtgagaagacaaaaagagaaactgataaaaaatgagtaattaatgtgattgtatataatgtatataaatacacacaggccatttatggaaatttagatattgatttttttttt

SEQ ID NO: 261938 - DNA, 892 bp, Cannabis indica
tgtgggttcgcgtcctgggtcttggtctaggttgggtccgagtcccaagttccaatcctgatctgagcctggattcatttctgagtcgaagtccttggttctgatcctgctcttggttcgagtttgggttcgggtctgggtctagctttgggtctaattcaaggtgtgtgtttgagttcgcgtccaagtctgtgtctgtgtttgtgtccaagtctggaccccgatctgggtctaggttcgggtccagatccaagtttgtgtcccgagtgcgggtccaagttttagtctaggtccagcatttcgatcccagtttgggtcttggtccgagtccaggttcgtatacggatccctatctaggtccaactctgtgtttgggatcgggtcacagatttaggtccaggttcgggtctaatatctggtctgggtacacgaccttgttcgggcccgagttccagtctagtttgggtctgaggccaggtctatgttcggttctaggtctgggtccgggtcctggtcacggtgctagtcttgttctaggctcttggtttggcgattcttgttcaggttctaatattgggtctcaggtctaggtttgggttcgggtttggttcttcgtctgggttcgggtcttagtctgtgtcccagatctagacactgactgttggtctgttccaggccccgttacccgaatcgcaagtcaagatctggatcactgtcacgggtctccgtgtggttctggtttaggtcccaggtcccatttctgagtttgggttgggaagcgagattgtggtttgggtctacgtgccgaccctagttctgtgtccctagtttggttccatgtttaggtctgagttcaggttctggtttgggtcccgagtccaggtttgggttg

SEQ ID NO: 261939 - DNA, 351 bp, Cannabis indica
aaacatcaatcaatcatcaaataacactcaatacaacatgataccatccaaagaacatacaaacaatcgttttaaagtccaaattacatgtaagtaaatcaattaccattctctgaatctttgatgttgaaagtgttccttcacaatcttccttactatgattgaggtattgcttgctgtgtgtgggcactactctaatcactaagggtttcaaaatattaaggaagaagagagagagagaatagcagccaaaggtagagagagaggctcaagttttttctgaatgagaagtgtaattttcctgaagccatcactacctatttatagcattccactagggttaggtttgaa

SEQ ID NO: 261940 - DNA, 555 bp, Cannabis indica
tggctcagtctaaattacactttcattagttttctgtcagaaaattttctctttagaaaaactgagccttcccttttctctctatagccgaaatcatctctctcttttcctcttcataaatttcgaaccttagtgatttttagaaagtttatatttagggtattaatcaacatacttgtgagtagatctaagatcctggtaaaataaattccaacactaacatcatcatacactccttactcctcttggtttttgtcgtattctagatcattggtctcatcttattcttttacttttgcatctactcgcgaagccacttcctcttcatccgcctccctagggccttaaggtggaggtggttggcgtgcatggtttttagtttccaccattgtactgagaatttacttttgatattcttcttacgtaaagctttctcagctgtcaatgaaagtaccaaaatattgatcgagattttcggcaactaattaatgagagttgtttaaatgattagaagatatttaatgcaaatatcttttatgtggttggagcattaat

SEQ ID NO: 261941 - DNA, 1038 bp, Cannabis indica
taataaacatattaatccattagcatgtaaaattcatgcaaacataaattacttcaaatttcttatattaataactaatcagattgtaaaggattttatttagggcacaaaacccaacagtgtgggcctccaataatgacttgtaagtgtccatctatcggtggaggtaacagatcctggttgttctgaccttggttggccttgacatacttctgtaagtgcgggttatttttcttgattagatattctatttcccgcttcaggttgtagcattcgttgatgtcatggccgtagtctccatggaaccgacaaaattttgtcatgtcccttttgttggtatctttcttcatgggcccgggcttcttgtacggaattaacaactgcgttgccatatacacactctctatatcttcagttagaatagtgaatgcagtgtgtttggcatgatcacggggagtctatccagatttctcggtgaattttcctttcttcccgtttccttgcttgtggttgttgcctgaacccttgccctttgaattgctggaataattgggaagttgggtggatgttccagtggaaggagccttcgttttgaccggctttttctcaccttctgcttgttgaatggcttcttcgagtttgatgaagccttcagctcggtcaaggaaatcactcattgaattgactggtctgtttttccttatatccttccatagttcgccaaggacttcaattccccccagtatcacggataactttccatcctcgattacccgcgacaccttagtcgcttccgtcatgaatctgctgatgtatgaccggagtggctcgcctggtcgctgttttacttcgaccaaatctcccagatgcaacgggagctaacgtgaggaagagaattgtgcatggaattctgaagagaaggttttccatgaactaaactttccaggagccaacttgaaataccattgctgtgcggcttccgacagagtggtggggaaaatttgcaacatacgttccctcgcactccctgtaaatcca

SEQ ID NO: 261942 - DNA, 643 bp, Cannabis indica
tcgtcgtggttgttgggttcggcgtggtcgtggtcgtggtcgtggtcgggttgggttgggttgttggttcttttgtttcgtgggcagggatgaagaggagagggaaagacggagagagaaatggaaagacagagagagagagagtgggaaagttaaatgtaaggggtattttgggtagaatttgaaaatagtggaattattttgtacaaattagtaagggatataaaatttgatatggggtattttattagggccaaaaagtaaaatttccctaaattggttgtttactaactaatttattaattcttctactacaacttttactccaaggcgtgtggcacctacatagggctagtttggcacagttgtgctgtgggaaaaaatagttgttgctgtgatgcgagaaaaacggttgcagcaaaactgtagaaaaaaaattaagctgagtgtttggtaaattataaatttcaaagtattgtgagttattaaaaatttattatgatgataatgatcgttttatgatctagtttattataatcacaaatatataaaaatttatttttatataatatttttttaaaatataaatttatatgcattggataaaaataatttatagcatttttatattatgttttattaa

SEQ ID NO: 261943 - DNA, 1512 bp, Cannabis indica
aataccaaaaaatatcaatgtaacaataataacaataaataattattaatactatattataatagaattgttctaaagtaaatataatattaatatatattacaatttggaacaaaattattaattttatgtaaataaatttacgaaatatatgtatatattttataaagatataattattcttatatagaggtatactttgttaatacgggacttagaaaatgtataactaattacaatttagaggttattcttatttataactggcccaaattgggacttgatatttttataacaaattagaaaatattcttgaatagagtattcttaaatagaggttctactgtatcttcatttgagaaatataaaaaataataataattctcacataaatgcataaagaaaaaataaattaagagcatccatatactttaaaatagaaaatttataaaatatttaaaaaaaatacactaaaaacatattacatcagatattttaatttttttattttaattttttttaaaatttactatttaagttctatatttataaaaggaatataaaactatctgaactttatatttttttaatacttaacaacataaactaattttttggccataaaatttactgaactctaattctgttttactctttacacttctgtccaaaaactttaattgaatgtcatagtggaccgcccacattacacaagtgtacatgtagcaaatttttaatagttgagataatattaattatgaaaatattataaaaaaaataatttattttattttctttctttttctttttttctctctgaaaccaccttttcatcttccacataccacacctaccaaaaccttagccttcctttttgtgcggaagccttccccaactctggaggagctactgccagcaatcctcaatccaaacgagccacactactattatccccaaccccgagaaacccaaaccatcaatgacactactctcgtgttcaatctctctccccgatcctccatttctttttttgtttctctctttctcattgaggaaaagggcgaatggaggtctcgagtagagagagagagagagaatagaaagagtgatagaggttttaattttttggtttgggattttttgacgtcattggagctcaccatgagcttcatctctgtctagacaacgccatcgtgcaagagagagagagagagagagagagagagagagagagagattgagtttttatttatttatattgtttatttcaaattttttttaacaaacctattatttatttgatctaaattgctatgattaacttgttgacatatccaatgatctgattttaatcatagtccaattgtcaatagatcttataaataatttgtaacaagtaaattttgtacttctttcatctgtgtaaacctagtaacatgatagggcccatccaaatcatttgacctgtgtgagcctatatgtttgctattgggcttagatgcatataggaag

SEQ ID NO: 261944 - DNA, 2703 bp, Cannabis indica
gccaggttgccattcaactcgtgtgtgcagtgaaaacaagaacattgtgttaggaatattttaccaggatctagatttactaataagtatgttgaattaatatcctaaatatgaattctctaaaatagttaaattaaacacataagagtttagaaaacataatttcatcaaataaaatatctctagagatgtacaatctcccatccttagaaagacacttgtagcccttatgagacaagttgtatccaagaaacagacaaggaataaacctatattggagtttaattctgttgtaaggtcttaaattgggatagcatagataaccaaacactttaagagataggtaatctggtttggtttaaaattaaacttctaagggagtgctttattttagttaaggattcgacattctgtttatgaaaaaatagcagctctataagcttcatcccaatacttgagagctaatgatgcttgagcaaatagggtaagcccagattccacaatgtgtttgtgtttgtgttcagcaacaccattttgttcaggagtgtgtggacaaaaaattttgtgattgatgtcatgttcttgtaatagatttgtgaaagcttgatattcaccctcaatctaattggatgcttttgattttatggccaagttgcagctcaacttgagctttcaaactagtgaaagtgggtaaaggcttcacacttagctctaagcatataaatctaagtgtgcctagaatatgtatccacaaaactaatgtaacatttgtaaccactagatgaattaataggggatgggccccataaatcagagtgcaagagctgtagtggttgacaataaacaatagtggatgtggggaagggaagtttatgatgttttcctaagcaacaagcatggcataaatctgagaaaccaacgtttattttattactaattttgatattacaagaagataaacacatgttgtacaatcctagctatggggtgtcctaatctgttatgccaaagtgaatattcaacattaatagtagggacaacatgtgtattacattgaggatttgaacttattaagctagggtacatagtatttgaggacgtcttaggatgctttgtttgagtgagagagtggggttgaatggcaccaaacttgtatagaccttgatcaagcctcccaaccaacaagattttcattgtatctaaattcttgacaagacagtaagagggataaaaatcaaaatagacattgttatcattagtaatttgagaggcactcaacaaattcttagtgatagaatgtacatgcaataaattgttaagaaccagattttttgagtgaaatggagaaagaaatgatgtttttcctactgtgtgaatgagcaaacctaaaccatcacctatttgaatttgttgatgacattggtattcatgtgtgtaggaaagattatatgcattggtagttaagtggtgagtagcacctgtatctggatactaactgatgtccccaatggtttctagtgaagcatacaattgagatgcttcagcaatgttggcatttccagcaaatgcttgtaaggtttttggtccttgaagtgatttaccaaatcgataaaagtatttggccactatatgaccaagtttatggcacagttgacattgaactgtttgaccccagggtgagtattggcctcatgtaaaggcacctcttgaaggtgggtgtgagccacaagattaacctcttcgagttgtggattgagtaggttactggccaaagctaggaggaggataatgagttgagtattgctcattgttgttctgcatctgatgacctcaagacacagaatgggagccaagattagtcaaattaggaaagtaaggagaagaaaaggtacctctgccaccagtgaatggtttcgtgtgagtaagattttctttaggctttgagatatccaattcttaagtcaacttttctaaacgaacttcctgagccatgagtaaggcttcaattttagggacaatatactatttagttcgtgtattcatggaggtgatgaacacattgtagtcactagtgacaccattgaagatcccttcaatgtgttcagctggggagatctcatgaccaatggaagcaagtagaatcgaccaatcttttgatcttgagtaggtaatcaccaagagatccttgcattttggcattgcaaagcaaagtgcgatattgaccaatattagctctattcagtgttgtgtaatactccttgagtgtgatttaaatttgagaggctgtatcacaaccaaccattcgtgtgagaattttctcagacattgatgatagcaaccaagaaataaggatgttgtcctgctgctcccaatcttcgaactcagggctaacagtagtggagattcgatcagctttagtaagaaactttggaggagtgagtagtggatcaagaatctttgtagtcgacttccttttattactgtaaacacttgatgaatccatgacagataattgtgttcatcaagtcgaacctagagagagtgagaaaaagtaacaggggattattttggaagattataagaggatccaccggccagagatgagccttcattgttcttggaaaaaaaactatcattgaagctagatcgaggaataagaaggatgaagatgctctgataccatgacaagagagagagagagag

SEQ ID NO: 261945 - DNA, 1258 bp, Cannabis indica
aaaaaattgaaaagtgaaaacagttttaaagaacctatttttgaaaaatattttcacttttccaattttaaaacagaaaattgattaaaaaaagtattaccaaatgctactatatattgctaaagtaatactctctataaaataattttttttacaaaaaaaaaaaaacttcattaatcgttcatcattacataaatgaactctgagggagcattacacactcggtaaacacgattagaaataacacaagtagtttcagctaagaaatgagctactttgtttgcagatcgtttgataaattttaaagaaacatctttgtgatgaaaactagctaacagactcctacaatcatcaataattctgccaaaataagacaacatagcagacgaacttcaaatcgcttggatgactacaaggcagtccgtttcaatgacaaccttacaccacgacaaaatttttatccaactcagagcttcttgaatcctaatcgcttttgcaacttctggttgaacgtttcctctagtgcaaactgatctagcttcctctaacctgcctgtatgatttcaggccaccaaagaataattaaaacattgagattgtttaaaaattgcggcatcaatatttaccttaattatttttgcatttggagttcgccaatgcttatcaccatcctctgaattcataaatcctaaggatgtgtcttgtgtcttatcctgagcactttgccattgattaaggacaatatttgccaatgtcacaacttctctaacagatctgtttttgttatcccagaccagatcattttgacacttccataaagcccaaacaaccattgaaatcaacctttgctcgctgccaacaaatctggtgtaaacctcctttagccaagtggagaatgtcccattgacctctgttggaacacctatttccaatctattacagcaagctttcgaaaaaagaacatgttatcaacacatgtgagattgtttccctctcagcattacataaaggacaaagatcattaacatgaacatgtttagtttgcagctgggatttagttggtaagcaacttccaaaagccctccatagcaggtttttaaccttcggtggaacttttaagttctaaacttttcgccagaaaccagagttgtcactggtgtgcctctctcccttctcttcttgcaagcttctgtacccactcttcacaaagtaatgtcctattttttcaaatctccagtaccaagaatcattctcacca

SEQ ID NO: 261946 - DNA, 1812 bp, Cannabis indica
ttctcatcttccttcgtgaatactatgagaggttcctcggttttcaccttcttggaaggttctggggcaaaggccgattgctcgttctttatttctttcacatatcttttctgggcattattgctttcccctgcgatatgcggccctcccaaaataaccaggatgtcctctccttccataggaataggttgtaacccctggttgtttgggttattgggcagagtgggctggttgtaaccttggccctgtcttttcacatactgtttaaaatggcctcgagcgatgagactttatatctcatctttcaattggcgacattcatcggtcgtatgcccaatatccttatggaatttacaatatttgttaggatcctttttgcttctcgaattcctcataggctcgggcttgctgaaggccaacttctgctcatgtgcgaggtaaatattctctggagtttcattaagctcgatataaaagtatacactggcacatatttgtcatgttttttctgtttctctttatcctttgacgcttccttaactccgtcctttctcttcgaactagaagcccccgagttatcaattctcgtggaaactgttcctgttgaaatattgttgggtttccctctcgagcttgtattcaacaaattcatttcctttcgggcttcttgttttcgaacaaacacctgagccttttcattgaactcagtgatgcttctcacgggacgtccttgtaagtcatcccacaactcaccccctgtagttaatggatcagtagagatccccgcctgaagggctgtaagttgcgtgctatcatccaaatttctaacccttgccgcagccgtgctaaaaagacttaagtaagcctaaagggtcttgccaggctgctactttatattggtaaggaaggctacttcgggttgcctatccctagcaggttgaagttgctttttgaaatccctggacaactgctcccaagaagttattaaatggtgagtaaacttgttaaaccagctactcgctgctccaacaagcgaggtggggaacaaaatacagcataaattattcgtcacattactcgctcacattattgtgttaaagttattcaaatgcgataccggatctgttgttccatcataggacgagacatgcgggtgtttgaatctcgaaggaaaaggggtattcataatatctgtgtgatacggctcaagctcctcgtcagagtcgtatccagatagtttccctaattcccccacttgatatctcctaaacttttcctctagctcgtttatccacaattggattggatcctcttgctttggaccaagctgttggcgaaggtcaagtttctgccgattcaagtgctctcgcagatttggttgggagtaattgctggcagatcttgtcttactcatagatcacgtcctactcatagattttgtctttgagtggcttgcagatttactgattcccatactttctcgatcattagatcgttgagtactttctcctctccgagttgatcgactatgggttctggatcgccttgaagttacacttgcttcttcacgctttgttccttcctcctgagagcgacttgtcgtatttcccccattagggtatgtacgagtcctcactctatgggtttgggaagaacgttggtaatatctagcaggtgatctccattctcccagttgagtcccaagatcctcgtcattttcatgagggatttctcgttcatcagtttccggttgtctcccatctggctattcatcttgattttcaggggggtgtctcattttccctgggttgt

SEQ ID NO: 261947 - DNA, 1440 bp, Cannabis indica
ctgtgaatcttgtggtcaatatttaccaatgaagttgcctaacacatattctcttactatagaaattaaaataatgtaatagaagctaaggtggagcactcttctttgcagatattaaacaatgggaatatatttcttactgcctttctcagctttcattcactgaaaagggagtgaaaaaactcatggacttattcaaaacatacgaacatgttctgtcggaggactctgtggtcgaccattttaaggctataataagcaaggtattgaattattatttatataactaatagtttcctattaatttttaattttttttacttaaattgtgtaacagagcaagaagtttgcgaagccagaactgaaatcatgcattgaggagtttgaggataagcttaacaagttccatatggaaaagaaggagcaggaactgacagcacgaaatgccctaattcatcaacaaaagattgatcgcatggaagaaatttcaatgactaataattctgaaggagctgaatctaataccgctgaaggttggggcaatgaacttgttttaatatgctttattcgtgttgcatggtcgttccactctagattcaactgggttttccatttagaaacttttcgcgatatcacataaaaatcaggccacattagaaaaaaaataatataagttaggttagagatatgttggtgcgctgcaatgtgctcttaatagatgcatgtatcaatcaagtattggttaagcatttcatctaatgatttttccagaacactcttaatgtcgttcaaaaataattttcaaacattgttatgcaaacaacaaaatgcaaagtttcttattcttagcatgcagatggatatttattgcctttatgatataatattgagtgcatgactacgtaagtaagaatgtgtatattttctttttcttgctgtgcatgccatttttatttgttattttttgaaaaattatatcccttattgccatatgtatgtgactgaagctcttgataccattatactgcatagcacattagcacgggcctgaaaactctgactctgacttggatgtgtgaaaactcttaaaaattctggctgtcttgagtttgttacgtatgatttatttattctaatgctcttattctgtttgttgttttccttttgaaattcatacagaaagcgaagtcattgatccttcatgcgacgaagtgagtcagtccataaatgtggagtcaaattctggacatgttgaatcagatgaagaatcaggtacttgtagcaaattaaagaagtcagaaccaagtgaaatcgaagttcaatcaccaaaagttaatacaagaggtaaataagcaacacatacttctgtttttagatgcaaataaatgaaactttgtgctttatgtaatgctgttagccttggcagtgtcaagggctaag

SEQ ID NO: 261948 - DNA, 3933 bp, Cannabis indica
cctagcacccttctacgtgtcaacatcgctattagtccaactaaatatctggtctcatatagtataatataataacttttaaggaatatcgctagctaatcataaaataacatattttaaaaatactagacaccactaatacccaacgacaatgctcttacttatactagacactaaggtttctctttaaacaattattctggcacattcaatatggaatgggggtgtatttatatatttatttattataaaaaaatagtacaaatgaagtggaatggaatggctgtattattaatataaataaaattatatttcattattatagtatagggtggaggggaggagggtaaaatgggaaagagatgagaattgatgggagtccacaccaatgaccgaccgtccctgtcacctaaaagtttcattgttttgttttgggtttcaaaccaaaatacaaaatacccattttaccctcgattttcttctaatattccccaattgaccccacttctcttaataatattaattcctccacaaacggaaaacagaacagatctcattccctctctctctttctttatacttaaaataaaatattcttaacttccatgtattcatctaatttcattatttatttaatttttgtgttacgaaaatggaaaataattttataattataaattaaatattaagagaaaacccaataaagaagaacgtagaagaagacacaaacaaccgactcgctcttcttcttcttcgttcgatttctccattcttttgcaaagatttacagagcgagaaaatgtgatgaaaatgggggtagcaaaggcatggaggtttagcttcatctctcccaacctggctgtccttcacccccaaaaccctcacaatgccaccgccaccgtcaagcccctcgtctgttacagatcgcccaatccttccccctcttcatcttcagcctcctcctggtcactcgtctgtggtcttatgctctttggccttggcttgatttcccttatcacaggtcacgtagcttctcatctcgaatggtactcacaccgccttggaaagccttctatttactccaaactggtataactgttcattattcttgttattgttcctttcttcttctttaaatatctatactttactgacatttttctactgattttgcaggattttggacgtaggacggctcccattgatatctggaaatccaaatactccaaccatttctatggatgtagtgaaagaggcccgcgttttactcgtacgttcttctaatcttcttgttcgattgttcttctactttgcttgggtgcgaagtgttgggaaaataagcatatttcctaacgcaagttcgattcttgtgtgtgtttgtgtagctgctactcggcaacgattctccaatggctatttacttattgcaactagtggagggctgaatcaacaaagaacaggagtaagttaatgatttttattggtggggttgggctttaatcaaagttgttatcaaaattattattcatattattgtcttcatttcactgtgctctcagataacagatgctgtggttgttgcccgaattcttaatgctacattagttgtgccagagttggatcatcattccttttggaaggatgataggtgatgattgattgaattcattacttttatagcattatgcttcaattttgttttttaaaggcgtgcctttttgacaattgcttctcaaatgactttgtttgcagtgactttgttgacatttttgatgtcaattggttcatttcttctcttgcaaaagatgtcaccattgttaagagagttcctgagaaagtcatgagatcaatggaaaagcctccatatactatgcgtgttcctaggaaatctgcccctgattattatcttgatcaagtgctgccaatacttttgaggagacgtgtaaggctactttgccacttaaattttagatattagcagacccttttttcattctaattgcatttaactcctagttaatgatgcacatatgttgcacaaatgaaattttgtcatgatttgtttttagttttttgagaagctacaattaacaccaggaggtttgcaggttgtgcaattgaccaagtttgattacagactctcaaatgaccttgaagaagagctgcaaaagctgcgttgtcgtgtcaactatcatgctttaagatttacaaaacctatacaagagcttggtcacaaacttgtgaagagaatgagaaagatggcaggacgcttcattgcggttcacctaaggtatgtcaaactgcttgcattgcatgtgttgatacataatatgctgacaagtacgattatggctatggttagtttctgacatccttttttccacaggtttgaacctgatatgttagcattttctggatgttattatggtgggggtgacaaagagagatatgaacttggtgaaatcagaaagcgctgggaaacactacctgtgagttactaacttttatagttctgatctctaagtccaaataatatgttgtttataattttgtatttatctgcactcgcacgatcaacatatttagagtaccatgcttggaagtttgtaaaatttgtaccattctgtgtatctaaatggacgtcctgttactgtttttccttatgcaggagttaagccctgatggagagcgaaagcgaggaaaatgtccacttacccctcatgaagttggtttgatgttgcgagcacttggttacacaaatgacacatttctctatgttgcttctggtgaaatatatggtggggaagaaactttacgtcctctaagggaactctttcccaacttttacacaaaggagatgcttggaaatgaagaacttaaaccttttcttcctttctcttcacgattagctgccattgactacatcgtcagcgatgagagtgatgtgtttgttgccaataacaatggcaatatggctaaaattcttgctggtcgaaggtttgttatctagtctatttgcttattgttagagagataactattactttgctgatttcttttgtggtacactgtgcaggcggtacatgggtcataagagaaccatcagaccaaatgcaaagaaacttagtgctctgtttatggcaagggaacagatgggatgggacactttctcgaagaaggtaaggtcgtgccagagaggattcatgggtgaaccagatgagatgaaaccagggcgtggtgagtttcatgaatatccacacacttgtgtctgtgagaaaccgaaaccatttaaggattttgaggacaaggaccaagtagataacccagctcacgtagcaaaaggctcgacaacaaaaagttgaaactagagttcatggagatggagtgaaggtgacaatgggttaaacttgctaaaaagagtgaagttggggcgtctgaaagggaacaaggagtatttttttttgtttaatttattttttactggtaacggagagcatcatgaaatggtggttagactcatatctatagatttattggaaatgatggtgaggttgcacctttagttttgacaattcttcatcatatgagcttaaaatttggagtagctcgacattttgaaagcattacccggttgctgtttggtggtgttgttgattaagtctgtgaaggatagaactggaccttgtatagtagaaggctctttactgagttgcaattgtttgcaattgttcataataatttttctagataatagttgtgtagaaactcatgtttgaagcttgttactcaaacaaatctaatttaattgtgtgaattacttttgctgtaccctgtacttgatattattttatattatgtcacattttcacatggtaaggatgaaatctgaatcatctaattgaagtttacttgggagatatatatatatatata

SEQ ID NO: 261949 - DNA, 1049 bp, Cannabis indica
ctggtttgcaagctacacaagtccatatatggcctcaaacaatcatcaagacaatggtataaaaagttggcagatgccttaatgcaagaagggttcaaacagtctcaagccgattacaccttattcactagaggaaccgaagacactttcattgctctcttagtttacgtggatgacatcgtcataactggaccaaacatcaatatacttcacgagctacagatttccttacaccataaattcaagctcaaagcacttggaaaattaaaatattttctcggcttcgaagtggctcaagctcaagaaggactatttctctcccaaagaaaatatactctccaattgcttgaagattctgggtacatcaatagcaagcctagtaagacacctatggatcccaaactcaaacttgacaatgaagatggtgaagcattggaacatccttctcattaccgacagctagttgggaaactcttgtacctaactctgtctagacctgacatcacttttgccgtaaactctcttagtcaatttatggcaaatcctcgcactccacacctccaagccgtgcaccatctgcttcgctacattaaaggaaatcctggacagggacttctgtattcaaaatcatcaacattacacctccgtggcttctccgattctgattgggcgtcttgcccaactacaaggcgatccacgaccggtttttgtatttttttaggagattgtcttatctcttggcgcaccaaaaagcagccaactatctccaaaagctccgctgaagccgaatatcgcgctcttgctgccactactagtgagataacatggttacaatacttgttacacgattttcacattcctcaaccacatccggccttcatctactgtgataacaactcagctatccatattgcaaacaacccaaccttccatgaaagaaccaaacacatagagcttgactgtcacttcatcagagataagatcaacaattcaacaatcaggctcattcccatatccagcaaactccaattggcggatgcttttaccaa

SEQ ID NO: 261950 - DNA, 692 bp, Cannabis indica
gtaaacatctatttgagcaataacaatataagaaacttcaactacattttaaaacaaaatgagataggtgtcctttagataagcctttcggtgccacgtaggcgaatgatcttacacgtgtacaagatgatagtcaacattcatttagattctttatatacataatatatatatattatcaaggaccacctagaagtaaagtagtctctatcttcattgcatttttgacacgtgtaaccaattaaggacgttccatcaacattttatacaacatgacaaactctccagtgagagccacgattacatgaagttgtagtttggacttttgcttcacatggataaggatattggttataaccagaagttactactctagaatggtagtattttgatcgggtgttcttagattcccaatcctaaaaaaacaaaagaaaacactactaaaaaaacactacaacaacaccaaaaaattaaagaataacaaaacaagcataaaaaaaatagaacaaaaataatgaaatcacacacctctacaacccttttcttgattgcacaatctttactgagaatttaccctttccctaaaatttaacaaaacaaaaccaaaacaacaacaatacacaccatcaaacaaaacagaaaaacataaaataaatgaaacaacaaaaggaacatacaaaatgaaaaaaaaa

SEQ ID NO: 261951 - DNA, 2188 bp, Cannabis indica
gatgagatgaagaaagcagggttcaggcctaacttcgggttgtatacacttgttgttgagtcacacgcaaaatctggaaagcttgatgtagcattgtctctcttcaccgagatggagaaggctggatttctaccgacgccatctacatactcttgcctcttggaaatgcacgctgcttctggacaagttgatgctgccatgaagttgtataactcgatgaccaatgccggtttgaaacctggtttaagtacctatactactcttttaactctactggctagtaaaaaactccttgatgtggctgctaaaattttacttgagatgaaaacaatgggttattctgttgatgttagtgctagtgatgttttaatggtgtatattaaggatagttctgttgaccatgctttaaggtggctgcgtttcatgggctcatctgggattcgaacgaataactttataatcaggcagttgttcgagtcatgtatgaagagtggtttgtatgaacaagccaagcctctccttgaaacttatgtgaattcagctgcaaaagttgatctcatactttacacctccattctagcacatcttgtaagatgtcaggacgaacagaatgagaggcatttgatgtccattcttagtgctacaaaacataaggcacacgcatttatgtgtggactcttcacaggcccagaacagagaaaacaacctgttttatcttttgtgagggagttctttcagggtattgattatgagatggaagagggggctgcgagattctatgttaacgttcttctcaactaccttgttcttatggggcagataaaccgggcacgttgtgtttggaaagtttcctatgagaataagcttttccccaaagcaatagtttttgatcagcaaattgcttggtcccttgatgtgaggaacttatcagtaggagcggctcttatagcagtggtgcatactctccacaggttcagaaagcggatgttgtattatggtgtcatcccaagacgcattaaattggtcactggacctactttaaagattgttattgcccagatgttgagctcagtggattctccctttgaggttagtaaagttgttttgagggcgccgggagactcagtaatggaatggtttaaaaaaccaatagtgcaacagtttcttctgaatgagattccttccaaggctgacattctcatgcacaagctgaacatactctttcctagttctgcacctgaaattagatctctgtcccctcccaaacctctcattggaggagggaaagcaatgtaagtttcggctattactagtatcctatcaaaaagttttttctcttaattaagatacattgcatttgttttttcttgagtctttctagtttacaatgacatttatagaaacaatttcacacctagatacatagcttgtattcaaatatctgactatatgagtttcaactagtaaaacttgctttcatgtagtaggtgtgtttgattggcatgccttctttatacaatgtaaaccagtacatattgacctaacatgtaactactgtattaatcttgttttggctcttgaacttttatatccattcatgtattgtctgccaatctctcaacacccagtctaaattgctccatggtttcttgaaagaatgtgttaggaatatactaagtttttgtatgacattttcagttgcataaatgtgggttttttattccattttgacagttagtattgtaaatatctgtttccttggtactcttctggatagggacattggctcaaccttatgttttttttttggttattttgatagttataattcagttgataacaaaatcgggtgaaaagacacgacaaactattattatatacatataaaaatcttgaccctttcaagattgaagttttctccaattcatatgtccatatatattttcttgtaacgaccccaattgtgtattgccagaaatagcattaatcatatctacacaaacaataaaactaaaaagggtacctatttctatttgaggtgttgataagaaataagtgatgataaagctacttcaacaaaattaagaaccataaaaacaatctaatgcaaaactatttgtatatatatttgtcatgagatagcaacatgagtatctactatctacacaatttattaaagttttcatta

SEQ ID NO: 261952 - DNA, 1093 bp, Cannabis indica
ccagggtccatagctcggtttggatggatgtggcccgcaccgtaagcaaatggtgttgccttttccaaggttgaatccaacattggttggttggaattatccctggtccttgctacaataaaaataatgaaattagaaaaaattaagaaaaaaaaattggtatataataaaattactatattatccttatttatcggagatttttgtctctattttttttttcgaatcagagaagaaaaattttggtgggccccacaccataattttcttctcattttttctcatttcttttttttcatctcgcttttcttctctaccaaacatagcctaaaatcgaaattgaaaatcgacgaaaaataggctactaagtgatttgagatttgttatgttaccagaagtcataatggctgatctaatagcagctgaactccaatctggatgaagggttttgagaagaccaacaacaccggcgacatgagggcatgacatcgaagttcctgactcgacgttgaatggaactcgacgatgatcaatttctacctcggttggagcagttgattctgtgaatgcagcaatgatgttaactccaggagctgtaatatcaggctgcaacaaccaaaaaaaaggaaaaaaaaaagtaaacaatgagtttacaaaaatcaaaattttgttaaaagttttattgtctagttttcccgagaccctgctcaaaatttgagtatgcataccttgaggagagatggctcaacgagattcggccctctagatgagaatgcagccatggttggggcgggttttgtgttaagaacagttcttgcttgagtaagatatgcgtagggattttcggtagagttgatgtagtttagtaccaaatttccatctgagtaagtgatatgagaagcagggagaaaatgtggatcagcaatgatttcatttccactgctttcatcattagccaaaatcatcccaaccgcgccagcaagaacagcctcctcacccttttcgattctagcagtgtctccccgaacgcataccaagatcttacccttcacctttgaagggtcaagagtcttaggcttacataacagcctgc

SEQ ID NO: 261953 - DNA, 1048 bp, Cannabis indica
tcttttgactttcaactagtgaagtaaaagcccaataaatatagccactcaagtgtaaaatgtttgggcttttagtccatttcactttacatcaaatattggtggtcattagtgagtccatccatgaacattaatactcttcatttgaactaatgtgacaagcccaaaatacacatttaaactttctacaaaataaaaaacaaaacattgagattaaaacttataaaatgggaaactaaataaaattgataaaatattacaaaattaattaaaaattaatgaaaaatactaaaattactatttatgcaaaactaaataaaaccaaataaaagtcactaaaataaactaaaaatacttgagaacaaagctaatttaatgcccaaaaagatataaataactctattttcatagagttatcataaatcttaccaaaacacaaccaagttcttctttggttcagtcaccaagtttaaatctcagccttccattttcttaaaggagacctagcatagacaattaggtcatctctctattgttgttttacatcaagttttaaagctttcaaatataaaacatcatgttaatgaaaaatactctttctgtgatgattgtcgatttagaaaatctcacacactgtcttttaaaaattctgacagtcgtgctttacattttaaatttaatctacattgacttatgggggccctgccctagttgcatctcacacaaactttagaatgtatttccctttttagataattatagtagattacttggctatttccactaaagcaaaaatcaaacgctatagctgcatttattcagttcaaaaacttagtagaaaatcaatttgataggaagattaaaaaataaagagttgattgaggagcagaattttaagcttcaactgatttagttgttgctaatggaatattcttttcatcattcatgttccgatacctctgaacaaatggacgagctgaacaaaaacatcgacacattgttgaaaatgggacttacattgctttcacaagctcaaataccacttaaa

SEQ ID NO: 261954 - DNA, 689 bp, Cannabis indica
tatcgcgttaagccaagctctaaagaaactattgtttcacttctaaatagttatagaagctatagatgtttatattcatgattaagaccctcactcaattgcactagagtttctaagatataaattgagttggttctacagtaagcttgtaagaaacaagtcaaagaactcgtgcaatccatttgaattagagcttaatcatcttaggattgagattaaataatctatgaccaactaaatgatattgacttaaaaaagataaaatatataagtttatgatatctttttcactatcaatatcggtccaatatgatgtatatcgatgcattcaatcttggtttactttactaatgcttaggaaaagatattaagtgtaagtaaatcttattgttgattatcacattaacgtaaattcaatgcagagaataattatgggacttaatatataatttaaaatatatgatcataattatttttaaccgtgatgacatcaccgtaattgtgaataatcatatatttaaaatttactctcatatatattaatagcagtacactagaaatatacagtagaacctctattcaagaaatgacttgggactaagcaaattatattctaattgagaggttataactaaatagagttatactagaaaaaaaaaaacttaaaatactaaaaaatatcaatgtaa

SEQ ID NO: 261955 - DNA, 2855 bp, Cannabis indica
gataaggaaattaaaaaaaaaaatgagctttcaggatctcgaagccgggcggggttcgggttcttcgaggagagatacgatcaatggcaagcaggacccgactcaagccgtggcctctggcatattccagatcaacacggcggtttcgacctttcagaggctcgtcaacaccctcggtacacccaaagacacgccagagctccgcgaaaagctgtgagtctctctcactgtgttgaacttgcttgttactaattttgtttgtttgattgatttcttttatcattattattcgtttaataattctatgttggtgattactgaaatgctattatgtattaccgataaagaatttggtctgttttggagtaattccgatgagcttaaattcgatcatttatgtcccctaggtttgctattgctggggattattaaaaatgcgcggggttcaataggtgtaattcttagcggtaaaatttgattataaatgattggagttgtgtattttagtagatattagactagtgatcgttggtcatggtaattctttaaaactatgcggaatgagtagagcacagttgctgaaactttatagccctttctagtgagaaatatttaaaaattgtgcatgcatgaacccattattgctaataggaaacaagtgctgctgttctcgtaatatttttatgtggaaccagtctatgttcgcaaagtttaatttctctggagttatatttacatccacattggtttgtaactgttggaaggcacaaactttagacggaatgtgagaacagactaaacattgtagctgctgttagattgcattgccttaaacatgataggatgttggattctggtttcaactttacaactttgtcgcaactatcttcttctcgttttttctccttgaataaataggatttgcattcaactaaatgaaaagaacgaataacacagggacaaaacacacacacacacaggttccagaggagaatgaaatgaggaacctgcacctgcgcaccaggcttggtagagccaattttttaaattgacaaatattatacttactatatacatgaaacttataaactcttatccttgttattccttgtgaatcattgataggagtattaaatatgataaagcgctttattcatgagtggacttctctctataagtcccaagcacttacatatgtagctgcatagcttgcattacttctgacacttatattaagaaaggttgtggttggttgactggaatttcttctctgtcaaagacaatttctggaataactctaatgaactcttatttcagtgaaagcacaaagctagcctctcccaaaatacaaaacaatttgataccccttgttgattagaataaccttttctttttctaattaattatttcaagtgtaaacggggagagggtttacttcagctttgtagtaaacgaaaaattactttattgtaactacgattttcttccgccataggtgagggtttttatatttataactcagtctaagacaagtagcctctttctctttttcaaaaaaaaaataaaaaattatttcaagtgtagaggttagtcaaatcggacaaatattagaatactctacaactaattaatttcctaactgacaatacccaaaatgcactaaccagctaaaaacgcaattccaacattgagcacttccaatcttttggatccctaaatgaagatatagtatgccagatctaaagagtggcattagacattggcaatataataatttgcataaagttcatacatacagtggctttggagattcctgtcggaaaagagttatttatgatacaaagtaattaaaagtacaactttcaaccaaacaaatgggatataatgaaacacagaaattcccttggaagtttttttcttcttgttaagacgatttccgcaaattcgtttcatttaactccaaatagcggtaaatgtttaagtgagagatgcatgcctagttgataagtttcttatattttatagtttagaagctcataattttccttgaggcatcaagagggttgtatcagaagggatattttccttggggttataaatttcttaggaatttaaatgatagggacacttcagatttcagaactaattaattttggtgattgagtcagcttccttttgtgctgcataaatggattgatagaagcattttgaagttagaagaatctgaattatttgagtctatatttcaaaaaatttgttttgttagatggtttgttagtttactcaacatactatttcatatggaagtcaaatgcccatcgaagttgtatatagctggtcactttttctgggaaaactaaatactaatgtgtacttcgaagacagaaacccttcttagctatttcaccatattggtgggttctttgcaaatagaataatgagtcaagagacatctctttcaacaaactctgtttctgcaaagctttggtcctgatgtttgatgggatgtgagttctatgggtttggctctatagtttccatgatatcatggtgcaaggcctattgaattgttggctgatggaagaaagaagccgtcgtttgttgtagttttagcttgctgggctctgtggcttgaaagaaattgggaatctttcaaggtgtggagggaatatgtctataatagggaaagttaaattttggttggctatatggatttagaggaaaatttgaagttttttctttcactgatttagttagcgattcgaatctttggttttagtttaaggagatgttttatcatttgtcattctatttctatctaatatatacattaaaggaaaaaaatatatatatat

SEQ ID NO: 261956 - DNA, 909 bp, Cannabis indica
ggtaaaataatttcctacaataagttcaatagatgcatgtttcctccagatgttcatttgggagcgttttccaaaacttgcacctatccgcaagtcactgcaacctggagaacctcgtccttgggcatgggtaagttcgaagtgttggaaaaccttgtgtaatgttacaaaggatgtttcgaattttacatttcgcccttaccttaccaataattgcacctattttaccctcgatatgtacccaggaagtgtagtaccattgacagatgaggtccgttcttctttcactacttctgctggtgaagcaggattttggtttgttgtctgccttccccgatcactgttatgtcttcgagatgatccgaaatctttatcttggtcatttgtttcatatcgccctgatcgtgtggctagacaatttgggtttgatcaacatgttcctcatgatcggaagataggggatttagaaaaagcaaaacagtcatgtttgttgggttccttccaactctcaaagcaatctcacgacacatttcgactacccgataaagacagagaaggtggagtttctgttaaatttgctaacatatggatgcgacatcattatattggattaatcagtcaaggtgagacttgtgaccgagagaaagacgtgggtccatcgtcaggtatctcctcgctcgctcatcttctcttaataatgctaaatctttgatagtttatacgagataatatgactttgttgttggaaataggggtgtatattcctttgcaaaagtcacctcctttagcaccctctgaagtctgtttagttgatgagggtcatactccggtagctttagtaggtaaaccttctgatgctttgggtggtaattcccacgggaatgatgtagcagttcgaccaaactctga

SEQ ID NO: 261957 - DNA, 591 bp, Cannabis indica
ttgtgggagatatgttcattagaagagtattcctaaatatcaaagacagcacagcaggtgtgctcagaccgaattgggaagggccatattaggtggtcgaagttctagaatcaggggcttacaaactgggtaagtatgatgaaaacatgaaactcgctctggtaccaaggtattggaatggggaatatttaagaaaatactaccagtaaaagtaccaggtcggatgaccattttaagtacaaaatataagaacatttactcttaagtaaatggccttttgggcggaccacgccaaaaggtttggatgaaaatgataaagtactcaggtcggatgaccatcttcaaaagtacaatttatttttaatgcaattttctttgttaagctaaagatcgggttagatcaatataatagctttatgtaagttactacggtaacaaatatgttccgaccgataaatgaataaagatgtctatttaaattcaaattgtgttaattctattagcaagttataaatttaccattaaatgcgtacaaaggtctgctcaaacccaaagatctgagcagacaaaaaatcatacttgtgaaatgca

SEQ ID NO: 261958 - DNA, 1034 bp, Cannabis indica
tggtaaatcttgcgtttaaagagcataggcgcatgtttgccgattggagggaaaaagagatggaagcattaagggctcatcatgcagtcattaacaatcgcagtcggcaagccactgtgttgatacaaaaagcttatcaatctgtcgagcagcaaccctcgaatgtcatccccttgggtcaaacagatgaagatccagtgatgaatacttctcggactataaatggttagccaccaaatcttcggtcacaggttccacctgtgggcaaagtagtaggtgggcagaccttgtttagtaattcatcaggagaagtcatacccaacaattccaaccaggttaatggtgtcggtcagcacattaaccaaaccaatcaatcactgagacaaccaagcacttccgtgttcgacaagttgggaacaactcatgatctcagaagcgatctaaatgggaggagaggggtggacgatcagcttgacacgccaaacgtggagcccgaaacccgtgctcaaattcccgctcaaaaagatactgacgtaacttagatcggccaaaatgccgaacaagttagtccagctaggcatgcccggtcagagaaacaatgatctcgagttggaccgagcacgtggaacccctttctctcccgagaccaatctcctggcgttgccccacaagtttaaaatgccaacttggaagatgtacactggaaaagaagatcctttttcccacctaaagtatttcgagatgcaaatggatctgcagggaatacgaggagacgtatgttgcagaatttttcctgctaccctcttagaagccgcccaacaatggtatttcaagttggcacctggaaagttcaactcatggaaagctttctcctcagaattccatgcacaattctcctcctctcgccaacttccgatgcacctggagacctggtcgaagtcaagcaaagaccaggcgagcctctccgagcctacatcagcagattcatgacggaaagcgactaaaggtttcatgggtaactgaagatggaaaag

SEQ ID NO: 261959 - DNA, 1354 bp, Cannabis indica
taggcagctcgtgtgacttcttcaactcctctaatgaagtcaaggaggaaagagaagaatgtcatgtccagcaatccttcccctatgagagatccacacaagggaaaagaaggtgaccgaaattgaggacgaaccttctatatctccaatggttacctctttgaaagtttgggatgatgtcgatcctggctctctggaatcagagcttgtggccaatttacaagcacaaggcaccatgttgttggtgactagagatattctgatcaactccaagtccgaatgcaagcctttaggaagattggtatccaccaaacctcctcatattattgttcgaagagattttagcaacatctttagggtagttagccttaacccatttttacttatctttttcttctttaccaagatcttctcctgaccttatttttgtttcttgcacgcttttgttagcttcgcttatgctattgataatgagcataagagagttgtagagccagctgagaaattggcagttgctgagcagagagcttctaatacggaggccaaggtcattgacttggagaaggccactggtgaacttgagactggagtttcagaccttcagggcactgttagcaatgccagagatcatgaaaagcgccttaagaaagagctttctgctgcaagaaagaagacttttaaggtagaagagcccctcagaaagtctcttgacaaaaagaccttgagtgttgttgagctgggaggtcaagctcatcaacttgaggaccaagtggtggtcctagaagtaaaggtcattgtggatatcgctctttatgagggctactactttgattctattttcaactcatggtcgcgcaatagtggatctattagctttaactaggcagcctttgctaagaaccaggttgctttcttggttggtgaatgtaaatggcatgatattgagtttttctttatgacatcgaatttaacttgaatggtgatgtcttggatgtcggggatgctacaggagttgaaggctacaaccctgagcatccgaacatgcctgcactcgtaggtgcaccagaagtgactatggcacatatcgaggagcttatgcaaaagtagatagttgctagtttttttaggatgttgtcttagtcccctttttttattagcattttgctttcgtgtgttagtcggtcggcccgagcggcctttcgctctggatattccttataagaaatattttagaacttgtttcaatttaactagaaattaatccaatttaattagactttattctaatttttatccaaatttatacacaaggtgatgtcgcatccacttgggtgacacgtgattgatttcatga

SEQ ID NO: 261960 - DNA, 514 bp, Cannabis indica
tttttttgatggtgttcacttgagatttttttttcataaataattaactttatgttcttatttggttcttatagactttttttttttttttgtaaagaaagtcttacaatatatacatacatgtagttcttataaacatattctccatacgtacgtactaaacaccgtccacccaaaaatatatgattcatccctttattaaaaaatatgttgtattttaaaaaattactataaattatgtatattttaaaaaatatatatatttttgtgaccgttagacctgggtgggctctcgcaggcctaagccctccgtggctaaagcccaactgtgatacaaaagattgtaaaagtaaaagacgaaattacactctataccctttttatattgtcctcttttatttttaccttcttttttaaaatctatcatttttacctctttttttaaacattgtaccaattttacccctgtcacttcaagatattctctatgtgattctcttatgtaaggggtatt

SEQ ID NO: 261961 - DNA, 516 bp, Cannabis indica
ccatgaagcgaaattttctcccccatcttctagtattgtagcatcaattgtatgttgttgatttgttgagtcttctgttgttgctgcattgtattccatcgtttcaaatgcgtttgtctgtgcaactaatgcgttactattttctaagaacgatagattgatggttgttggtgggttgttgatgacattcacacacaatggatatgttgtgaagtcgggttctttcagtttagttgtatgtagaaatgcaggctttggccatcctttatcctcaatggttggtatccttctttcccttgatatttcagttgcagaacaatgttttcttggttgcattccaagacctctttaaacttccgttataattcttcatacttataattgattgaaatgtaatgtccactagcttcataattttcataattcattcgatcatcaaattgtccattacaaaagactaggaatggaatgtcttctttttcctgtgattttgaaattattattagtgtaaggcaa

SEQ ID NO: 261962 - DNA, 579 bp, Cannabis indica
ctgtggaaaatcagcatctaagaaggagagaaggagatccaaattcagatcttgataatgctctgctacagaaaggaatcaaggactagagatctgaatggaaggagtcatattattccgctgcacccaatgtaaggttttcttaaactcttatgtgtttattttcattgttttagaattcatattaggatgttaataaaacatacttggtagtaaatctagatcctggtaaaatatttccaacacaatcttacagccaatgtaagactatagatttctcaaactccaaaaacttctcctcaatagtcttcttaacctctaaaaatccagcatcaacaacagtcttctgatgatttgaaattacagctgaagagtctttcatgtcctttaaaatcctattggaaacaccttccagcacatccttagcaaccttctcaggaatattttgaacaccagaagattgccctttaacaacttcttgggcatggctggtcccacaaaatcatcatcagaaacactcaaaccataccactcaaactcagaaagatccaacaaatctttctctgcatcagtttgttc

SEQ ID NO: 261963 - DNA, 4973 bp, Cannabis indica
ttatttagtgatagtccaaactgtaaagttcgcaccgcaccataccatttttgtggtgtggtttctacaattttttagtttcacggtgcaggtgcagtttgggaaattaaaaaaaccgcatgtgcgagttagtttgaaaaagtagtcaaaaatcgcaccacccgcactgcgaacacccctagttagtgtcagcatacactcgctgcgaagacattatcagtctaaccttttgaagatttttagtgttgaatagagttctcccatgtctctcccatgcatcaatctcaatcatcatggcatcaactctcctcttcatgtcaatcagaggagcatgtcttttgaaagggccaaccttttgaaaggttatgtgtttcgatggaagaattgagtaagagcaccatatcccaccagaccagggaatcctcctggaattggaatgttgcacaagccagtctatcattgccggtgactcccataaaattcagagtctgagtaataatagtcagccactattcagctttcataacatctagacctcccaaaaagactagaggtgcctgcttgtggaacctttcatacagtggttccatcaattcacaacagcaaccggcccagcctacataacaggggtaggagccacctgcgctttaggagcgggtattgagggagcacttgctgcatcaaacgtctgatctttttgtcttatttgttaattatggcttgcattaatgtgaacctgatctcccaatcctggacagcctactgtgggttaacatctccccggccgcatgccctacctcttgggcctcagcctcggccacaaatatttgggggaaactgaactccctgaccaccactggatcccaccgaattaccctggcttcttgtgtttcgcctggcgtccattccaatagaacaacctacgaaactaagagctagcttggtcagatcgcgatcaagaataaattactaattactgtttacttaagaaattaaaatatgcactattcaactatcaggctactaacatgcttcctatcaggcttttcttaaaacatactaataaagcaaattattaaagcaataaaggcttactgaaccgtgagtcgagcttatctctgatgatgattgtacatgtcgtgatgatctttggaagacaacttgacggctctgacactaaattgtaataccctactagtttaggcgtgttatcgtgattttaattaattgtacaatctgttgttaatcaacaggtttgttaaaagtcgagagtaattaaaattttacttaattacccttaaattgaaagtaaataatttttatataaaacgggatcccgtatttaaaatatttacaattgtgatacaaaatattcgatataaaagttgtcgcctattgaccattcaaaatatagatgatgtcccaaagattatacgctccaggtctaaccgccctgacatgtacaatcttcatccactcgcactcactgtagttcagccttagctttgcccttacttacacatgcatacaatatctgtgagttgacaaactcagtaagaaaaatataatcataacataaatataacccgaattacaattaggcacccatacacccaatcataaccctatcctcgtgtcccacgcggtacagagtctagaacgttcgtacgacagtgctattgaccataatatcagcctatactcgatactctagtcgtgccaatgtgatatcgtcaatcaatacttgagccaaacatacattaattgacatccaatacaactacacatatattgatactgataatttcaatgtattctaacagccattcataaacatgcacgctaaatatgtaatcacatatgcatatcagtatactaatcttacctcgattctaaattcatgtgtgtcggtcaacctgagtggaactgctgctcgacgatttacagacacctaagtcacaatattcgtaaaactgatgagtgacacactaaatcacgttttggggacttaaaatcaaaactaaaagttttcctatcgatggataacatggcaataccctaaataccctaaatatcataaaaacatgaaaatctagtttaccctaaattgcccccattggtagaccggttcccaactgaaaaaatggttctgtagggtctacccagggaggaaccgatagaccgattctacaggaccaaaatgaactgaaccggttgactggttcagtacaggaacccccaaaaaccttctaaacaactcaaatcgaccccaaatgctcccaaaccttccaaagtacctatatagaccataacaagtacaattcaagcaataaaactaggtacaaaccccaaaaatcaaaatcaccatgatagggcaaagttgagctcttaagcttaaactttgtccaaacctcacaacaagcccctaactaaacataaactagctcaaataccctcaaaataacctctgaaaacagattcaaacatatttcaaacctacagaaccctaaccttaaaattgcatggaaacttaagcttaaaaccataaaaattcaaaggaaagagggagggagcttgcttaccttgagttggatcttaagatgctaccaaatccagctaacacactaagaatttgggttgaaaaccctagttttctgctgggtttctaaatggatcgagagagaggcttggagagagaatgagtttagttttttctaatttttgtaaaagtgaataattcttgttttattaatatcatacctaataaaatcagattattccttagtattaatctactagttccctaaaagacaaaggtcatcacaaggcgaaagactactttacccttgcttaaccatgaattaatcttgccacctaaggacattttagtcaaatctaaaaccacaaatagacccgacatcctcaaagtctatttaaatttgctccgctgtttctaaaatactaaaccataataaaaagtgactatatcggcccaacgtcgtgttccactgttaacgagcataaaatataaaaaaaaaatgaaatttcacatataacataaatagcacacttaaaattctaatgtctctccataattacgtaaatcataattaaaagtctaattctaaattaaatcctagttatctactaattcttatattaaagttaagcggtcattacaatttttcccttccaaaattattaattggattatagtttgtctttgtggcacttcttactcgttaatgttaaatggtagatttcatggttcttttcaagggaagaaatgactcaaacaaagggaccccatttccttgcttctctttgtccttatgatagagtatctcacctgtttgctcattcatgtctcgaacactaaaggttttagttttcattccatgtgcaagtccttgaagcttttaaatatttgctttgccgacgatttggtaatattttgcaagggtaatatatcctcttttagcatcattcacattgcttttattgaattctgtaatgtcacaggtttggcagccaataagtccaaatatgctatttattttggcaaaattcctacaaacattaaatctcagttgcttaatattatgaaaatggaagagggatctttttccttgaaatatctcaaggttaacttgcatcctcctactaaataaaaatccttaaattgtggaggtatttttgacaatattcaaaagaagcttcatggctggagtagttggcacctttcctttgctggaagagctcaactcattcattcaattctgctgggtatttagaagtattggatgagtatcttcatcttgactcaaaaagtcacaaaggaaataaacaagcattgtagaaacttcatgtgggaaaattcaggtaatcgaagtaaaattcattttacttcttggagaaagtttgtttaccgaaaattttggtagtatttgttttacataaggcataaagtggaatatggctttaatgggtaaatatatttgggctctatctacaaagtaagattgtctttggatccactaggtagttgcagtttatatgaagggtgaagacttctggacttttcaaccaaggcaagacattagtttgtacttccaaaaactagttaatttttgagataaaataaacaaacaagctttgttcgatgcgggaattttaggagtctttaaagtgaagaagttttacatcgctcttatatcggattcgaaagtttcgtatcacaagaatgtttggcacaaggttaaggtcccaaaacaccgattcatattgtgacacaccttgaatgataacctgctgactcgagacttactggcaaagatcttttcggttgagtcttctctttgcccaatttgttgtgaagttaatgaatcttactctcacttgttttttgagtgcacttactctaagaaagtgattcttgaaattactagttaattgggacaagttgattggccctcgaatctagatgagtggattatcatgtctcgtgatgctcggaacttgattggtaatatagtttcaacaattttagtagttgtagtttattacatttggtgtaatagaaacaattatatttttgatgacatttgttactcggctaaagccattagaaatttggttaagcttagttttaaagctataattgttttttgtaatctttctaagttcaaggttagagagaaagatataatttacatgataaataacttttgaatcgttcattgggattgccccgtcttatatatcttgtttggtggttgtttgaataaaatcttctttcttttgttaaaaaaaaaaaactatataaaataaaatttagaaatcataccacacttttgtaaattttttaaaggggtaagttgaaaaataccacttttattaataaattaatcaaatttacttctaattttaaatttaattgaaacatagctctttttatatgtattgtacccaaa

SEQ ID NO: 261964 - DNA, 648 bp, Cannabis indica
gctttttcacactccttcgtccattcgaactgctcacaagatgttgaagaatcgaacacacttatctgttgattttgaaacgaatctgctgagtgcagcaattcgaccggtcaagctttgcacttctttggtttttgttggcgatttcatatccaggaggtcttcaatcttctctggattagcttcaattcctcgggcattgacgatgaagcctataaactttcctcagctaacttcaaaggaacactttaaaggatttagtttcatattgtactttctgaggactttgaagcactcgtccaggtcgtctatgcgccccctagtgtttctggattggacgagcatatcatccacgtacacttccatatttcgcccgatctggtctttaaacattttgtttatcaatcttttgtatgtagctccagcatttttcagaccaaacggcattactttgtagcaatatagacccatatctgttcggaaacttgtatgttcttggtctggtggatgcattttcatttgatggtagcctgagtaagcgtccatgaagcttagtatttcatgccctgctgttgcatctacgagctgatcgatccttggaagtggaaaacagtctttagggcatgctttgttgaggtctgtgaaatc

SEQ ID NO: 261965 - DNA, 453 bp, Cannabis indica
ccctttcctgcacagtagagcacctgtgagccaagcccagcaagacagtataaaaaataacaataatatactcatcatataatataaacagtaatgccatttaaatctgtctctgtgtcacagacctacatattaggctcacatgcctgtttatgtttacgtgacgtaaacctacgtgctactctcacacgtctatttatgtctacgtggcatagacctacgtgttgctctcacacgtctaaatacaataaggccttagaatgattcatctcggttatggttaccgagtccaacccgattacgcctttaacgcataacccttaaatctcaatataatcatatacttagcatggcatagcatttactcaacttatatcactagggttataaccctaggctattaaccgctcatattagagtaataaccctaagcccagttacaattacttacat

SEQ ID NO: 261966 - DNA, 380 bp, Cannabis indica
attggaatgtcattccaatactttaaaatgcaaccaaacaaagaaatagaatgaaaattgtttccttccccactactacaaaactgggttttcctaacgtttttaaacagttgtttaaagtattcacgtcggtttctataaccgctgcctatatgaccgtcgtaaaatgggtaaaataggcaacggttaacaaccgtcacctataccctgttataagcgacagttttaaaccatcggtaatgtaaaaaaaaaaagaagaaaatacagaattttctgccattaaagaaaatctatattttctcccattaagagagacgagaagaaagggagatcgagagagggaggtagacggcgagagaggagggcgatggtgcgaaggc

SEQ ID NO: 261967 - DNA, 3539 bp, Cannabis indica
ttactcgtattgttgtagacaactaaataggtaagtattgtccgcatttattctaaatccaggtgactttttaaatgatatgattattaaatattgcaattatggtatacatgggcaccagtgtgacctgccccaaaatataattgaagagagatggattggagacctaggcaggacctacaaaagaatagaaagaaatttctcttgaaatttataattacattaattgttgatttttaggccttacattttggttgagcacaagattcagaggggatcttgattcaaccccagttgctgataattaatataatcaattccatttaatcgtatacaacataagatctgttctggcaactcttcagctttgttcccctgtcatgtcagtcaaatattagaaatttagaacacagtgcctgtgaaattcaattaaaagttactgtcataggattagattgaaacacttgcctgaatagtgaggccaacatccaaaacgcagctcttaagtctgtctaagaaagcttcaaatcctttcctagaaatgtaactgaatctatgcatatccaaatcaatctccatgtaattttccccctgcccatgacacaatattcactgtcaattatagacagctgagtagatcttacgtattaagtaaaaacaacttcagttttaggacaacaacacgggaccctgctctttttcttatatcagaacaagggaccctgcttgtttaaccaatttatgaaactagtttacacttacaaagtaaaactcatgttgaggacgcgacaacacaggcttttcattgtaagcctgcatgagcttcctttctgcaccgcccagatgaagttcttccacgtttgcaacacgtcctaatatctttagcctctccctaaagggtacgagagaatctacagtaaaaccttttaccttttcaacttcatcatcgattaacctctgtttttgagaaaagcatcattttaaagagccaataatagcataaactgaaaagaaaacgtacgcagtactttcacatccaaaacataaattatatacgaaatgtagtgttcaaaaggctccatcttaccctgaagttctcttggaaaagaggtggaagttccttagagtaggtttcagaaagtttaaagtacagaacaaaactcattccttcaccatcagtttcaccctggaaaagtgcagctggatacaatggtatctgcagaccaagaagaaaaaataactgataaagcaaatcaagaagctagagaagaaccttaatagtacgaggttcaaaatatgacaaacaatgagtattagaaacatgtgtttgcatacagtataacggtttgaactgccattcttatttcttgattttggatttcatacaatatttaagttgtttccaactatatgaattgttaacggtaacctttaccattacctagctcactaaattgttctaaatcagataatgaaaagatgttaattcagaaaatataagatcatcccagaatcagggacttgccataagacgtagattccacacacactcaaacagttgagagagatacatacctgtacatttacaacaaggatagaagggagatcccctgcagaattaatagcagggagcttcacaaatctagcaatatgatctatcttccgctggcacaagaatacatccactccaaatggataataagcagcatagttggaagcaaattctttctttttgtcactgaaaataagttatctcgaaagtaagcgtgataagaaaaccattcaaacctcaacagtacagaaatattattatgtaagaacagcctgttgattagataacagagatagccacatcaattttttctttttttaaaatagaagtttcccttttcagaaacctctccaaatataggcgtacgccactaattgaggtgagaaagaatagtttgctttgtgttcaccgtgcggctgcgtatatagaaaggatgtatgaattgttaaaaatgaatgtaataacaatttcacactgccctccttaagtcttaccgaaagtaattcactgcccgcactttaaatgtacttggctcgatgggggaccaactgtctaggattttcttttctatgggacaaaaaggtacttgagaaccggcaattggtcgttgcagaaacatctttgatgacactgaattacaaataaagaggaataagctaatgaaaataaacttgttaaactgaaatgaaaaacagagggaaaaataaattttataatgatctacacaataaaactcttggactctcaaatttgaagtatcctattttcacacaattcacatttacagggttcaacgagcaatctatatttcatgaatatgaccatcaaatacttctatcaatacactaattaaattgctcagctaaaaggctgatgaatacctcgtgaatggtaatggaaatataagctctaagagaagcaaaagaatactctttcatgccagaaaatataattgctaaactaagactacctgtttttttaaaagaaaaatgacaataatacatcaaatgttgaatggtataatacttacgtaaagcagaaatagcatggccttctttccatttaaaaggaagcttcaggggtgccttcttccttgcactcggtggactagaacttaatgatcttcttttatcaactgaaggtactgtagacgcaagacaaggcaaacagttacttggaagaattccgcagttatccaatattccttctcccttgcaagaattttcatccacagatgatgaaatttcatctaggaacacaggatgatttgcttcatttgttgacggtccatcacatttaggttgggagtcaatatcatctgaactcataacctgaaaactagagttctgggcaccttcagtgacagagttgcccgaatttcctgacactgacacaccttcatattcattaagagagagcacatctgcacatgtcgaaactgttaacaatacatatagaacaaattatattaaaccggatacatggaaacgtattagtaattgaccgaaacataataataaaaaagaaaaatcataccatcttgaacactttggtaatcttcatcacaatcagaatcaaatacgggaattgagtcaaaccatgcttcatcgatgcttcctgctgatactaccacattgcaaaaaccattagtaaaaggccttaaaagaagttcacttgctcattctcatctattacttagttgagaataatttttttgtcaaagcttgatcagtgtatcagaaagaaaggaaagtaattaggatcaccaagataatatggagatatataatacgaaggtaccaacaatatacagaaaaaactccctcactgcaatttactttgatcaaacaaccaataacagtccaattatcgtaagagaaatttcatttttttacatagtctccttccattgggaaaactgtacatatttcatgattaaccacctcaaaaacttcaaatccaattagaataattataattattaatt

SEQ ID NO: 261968 - DNA, 622 bp, Cannabis indica
aaacacagggtccaatctgtaacttttgcaaaacacagggcccaaaatggtatttacccataaaataaaagctaattttgaaatgatttttttttttaataaatcatgaaattttattaattgcaatcaactaaaataatagcatacaatctaatttcgagacatctcccccgtttgacacacgactaaaattagaattagaaaaatgagccatataattagccacctaattctctaatcgctagcttgacaaaaaaattaagaataaaataagataaaaaagattgcaatatcactattaaccttaagaatacttatattctgtttcttttactgctcataaaacacaaaagtagaaactgttgcaatagatccattcaatattgtagcgcgagcactcaactattgtgcaaggtaagtaatgttgggttttatgccctaaataaaattcaatttcaatgtaatctttattattcaaatatcaataaagaaacagaagtattttcatcacttattgtgtcatttggttcatgttatcatttatttgtttatttaatttataaattcatccaaatccttatcacatttatattcttgtttattgtgtcgtcagcacagtgga

SEQ ID NO: 261969 - DNA, 723 bp, Cannabis indica
gaaggctgaccgtaggcaggccatttgcaggaaggctgaccgtatgcaggccagttgtaggaaggctgaccgttggcagaccagttgtaggaaggcgagttgcaggaaggctgaccgtaggcaggtcggaggccacattgttggtcgttggacctccagagtttgtcccatctgtttgcatatcagtatgttcagattgttgaggttgagaacctcctacgacagaatgacttcctaacgttggagtcgatgtccctccgagtgtttgttgatcagaaacttgggtctctgtccttataggagttgagtctagtgatgtcattggtgcaattggaactcggaaccgactttgagcaacactgggggttgtcatggtagccttcagtgactgcatttgtgattttattgcggcattttcactcctaaatgttgcgttctcctccttaaaggttgcattttctcgctccagaactccagttcgctcagccatcttgcgcatctgggccattattgtggcaagctgttcattgacattgggttgttcctgggcaacaaactctccttcttctgccattttaagtgtggtaatgatagatcgccttgctcacagtcagtttgtcagggccccacggtgggcgccaaattgtagacgctaaaatctacaatgatcagaatgagcgtttgtgggcaccgacacctgcagaacaaagacaaaggatgacc

SEQ ID NO: 261970 - DNA, 947 bp, Cannabis indica
tcttcgtccacttgtcagtttttcttttcgtgtcgcaaacctgcaacgccctgactcttagggtcgccacgtgtgtgcttttgtaaacttattattactaatcatttagtttatgaaaagtgtggtttaattaaaacttttgattaaatttaaaataaaacttctctatgaaacaccactaaaatatagggatcccctatttataaaatttctttataacaagttgcaaaactgctatcacaaaaataaagttactttcacacataaaagaaaagaggtcgatcctgcttcccagaagccaagacaccacgactgatatgtacactgctgggagacttttgattcatggccaaacatagctttgtttctcttacctgcaccttgaagcacccgtgagtcacaatgactcagcaagaaaagttattagatcaaaagcattgtaaacacaaatattcacatctcaatataacaagtatatatatatatatttgtgactgacatatccatcaagcataaccatatagtataagcatttatacattcccacatactatacattatgagaaaatcacaacaccttacagtcaacaacttcattgatacactaaatgcatatctaatcaatgcataagcacacatccttagggtttcataaagtattctaatcttacatccctataaatacatattctcacatcccgtgagtcactaaaactctgcaaggaaagtaactaatttcataagcaacataacattcatccagtcacactataataatatatattcaattacagctcattacataatatcacgcttaatccattttgcaacatcgtaaccacacaatgccggtacttcataaagtaccttaccgctcgttaaccacgagctacatatgtcactatcgttgcccaatacagcaaacgataagtaagaaacctatctgc

SEQ ID NO: 261971 - DNA, 654 bp, Cannabis indica
aaatatttaatttataaagattttatgtgctattttttagatttggtgtacaaattgatgaaataaaaagaagatgacaagcccaattctttctcacttttccattcttcaaatgggcctcaagacacactaagcccaaatgatgcatggtttcttttgtcttacatgacacaaagttggaagattctcttacattttcatctattattttttagggaaatttacattgtatactaacttttgtcattttttacaaaaatactgcccagcggtattttttacttttttactggttttttttttataagttttatactgcagtatactgtgttaaattttcactggtgttctactgttgttttgagtaaatctgttttgtgttttactagtattttataaaaacacagtaattttgaaaacttttctgtgtgacagtatttttgtaaaagttaacccaaattccaatatttttgtaagtttcccattattatcaaattaagtagttgggctacttctctcaactttgtccattacgcctatttcattgaaaaatcaaccaacaactaatgaaaggaatttggcagtggcacacgttcaagaaatgacatcagcaatacttgttccacgtcccagtatatcacaccaacaagaatg

SEQ ID NO: 261972 - DNA, 1583 bp, Cannabis indica
aattaaaataaataatgtaaaaaatcaataaaataaaaagtgacttattctattctaccatgttaatgttagttattattaatattaattacacaataatatgagaggttgtggagtttaaaattatatacgattcttcttaaatggttattaagatcataaatattattaaaaagggaaaatgtatttttcttcttctatgatcactttggatcgttggttattaagagaaagaaggagaaatgtttaataagatttaaaaaaacggaaggatgtaataatgatagattcagctttaaataatttattaatctatttttaaaattaaaataattagaaaatcataaaaaatccacaaaatagaaaaaaagggattactcaatccttaagcctccacatcatcaccctaatcactccctaacaacaggattatatagatatatagattgttccatttgattactttttcttatgttagatatatgattactaaaattatattttaaataagagtaattacttaatgattacattagaaatataactatttaatggttacactaaaaaaaatttcatatttagaattaaattaattataattagctatatatttaaataaataattttttaataaaatattaaatgagaccgtttaaccattaatatttaggaaaatttgcatcaaaatcccattttcttttacacttaacttcctaaacaaggaatttgacagcaaaatacttaatgctacatttttattgcaaattagttctttttgcagttaattgccacaaaaatttgttaattaagtgtaagcaaggatgcacttgtcaacatttcatttgacataatattaaatttttaattatttacttgaaaactatattttatattaaatttaattaatttaaaaagttttgaattcctaaaaataaattcttattaattcgttttagataaaaatgagaaaattaatcttaaaaataaattatagattttgttcacattgaattaatggtatataaagagttaagagataattagaaaggtaaaacggtaattttgaccaactctaattatgaactaataattagagggcgaactacttatattaattatatcaaatcaatagactacatgtaagaattctgtaaatataattttatatagtcaaagagtgcaattccatatttatagtatagtaataatgaaattaataaactggattattctattgatgagatcaaaaataattaagtgtttattagagctttaaaatataggtctatgattcccgagtcacctctatacaaaaatcgtacaggaggaggttttatttgatgagtaaatttgagtgagaattaattattgagaaataaattcttaagggcaaaatcataatttataaaattatagttttgaataattatgataattatgaattgtataattaatagtatttaactatttaattttattagataaactatattaattagttaaatataatattattcttaaataatattgaacagagatatatattattttagaaaaaataatatttattttaatccttgtga

SEQ ID NO: 261973 - DNA, 715 bp, Cannabis indica
ttcatttttgtgttgtttggttcatgttatcaattacttgtctatttaatttataaattcatccattagttagcgaggttgctttgggtcgtggaattgtttctcgaaatccctagacagctgctcctcggaagttatcgaatgatgagtaaacttgttaaactagctactcgctgctccaacaagcgaggtggggaacagaatacatcgtaaattgtccgtcacattcattgcccgcattattgtgttaaaattattcaaatgcgagaccaaatcagtggttctgtcatatgacgaaacatgcgggttttttgaatcccaaaggaaaaagggtattcattatgtctggatgatacagctcaaggtcctcgttagagtcgtatcctgatagtttccttaattttcccacttgatatctcctgaacttgtcctccagctcatttgtccgcaattggattggatcctcttgctttggaccaagctgttggcgaaggttaagtttcttccgattcaagtgctctcgcagatccggttgggagtaattgctggcagatcttctcttactcagagatcgcctcctattcatagactttgtctttgagtggctcgcgaatttactggttcccatactttcttgataattagctcattgagtactttctcctctttgagttgatcgacagtgggttcttgaccgcctcgaagtcacacttgc

SEQ ID NO: 261974 - DNA, 1850 bp, Cannabis indica
tcaataactttaaaagttcagggaacataatttggtacatgttaaaattcaaggagaaaaaatattagcctatttgttaagattattatatgtacacaatgagccgtgtgggctgtgacaaagaaacctatgtggaactcgaaagtattaataaagttgtgtagataaagccagagtttttcgcttttatttcagaaaaatcacccactcaaactcataaccttcatcaccaagaaaactatataagttcttctccacctcctcgtaccagattaagattattaacctacacataataattagactacagtcttgtcgagtccaaactcctctacctaccacactcaaaagaatccactctctgatcactatcttccttcaatcgtccatacccatgtcgaagctgaagattgcagggacgtgggctggtgttatagatgtcgaattggataattggaccgttcccatgttgagggaagaggttgctaagcgatcaaactgtggacccaactccatcaatttgatttgcgccgggaaagttttaaaagatggcgatggaaacgataagcttggtcaattgggtatcaagaacaactccaaaattttgtctacccgggttgctgccgatgagggtaaattcataaagaacgagttgatggctgaggaggaacgctctcgtagacttgctcgacttaagtgagtttgtttttacttttcttattttgataatggggtttggtgtgtttgaggttctgatggtatcgttgactattttgatggataattctgttaattgaaccaagtttgtaaattgggtctgctgttgtctattaacttttcaatgaaagctaggtcttttgagaagtctatcccaaattttatgttgtatggttgattagtgtctctctatataatttgcagccttgctttgagtgccatcctgatatagctatgtgatacaccttgggccttttctcatgttctaaggggaaaaacaaaagagagaaagagagagatcacttttggctttaattttgttgataatttatcttggaagttttcttttttatagtttggttgcatattgaatataacacagcgctagagaattctgtggagagaattctatttggtacttttctgaagttttaatccatggagtgcctttgtaaaatgtgctggtcctcaatcacttgaagccaatgttggtcctaaaactctgcttgttaacttgattatgtttgtattgaattgacaggtcagctgctgccgcaatgtcccaaagaaatgcagacggtaccttaccgtttgatgatcaagttatcgaactggaagatcaaagtggacgacaagtgaaattaggaacagagactgatcagcggtatggtgctgattagaatgttctccttgtatgcttttttctgtttggctagaaagttggatgggtagatcatttttctattagggtttaattgtttgcagctcagtgctctaattaacttggaggattttgcactcattttttacagggcaatcatgatgggcctgatgcttcataccaatggaaaggagctaattaacaagggaaattacaaagaagcaatggaagtacttactatgggagaggttagttgcctgtagccctgtttctttttgtacaaagttcttatgcttgcataagttgcatctatgtgatggctttctttggataggataagtatcatctcaaaatggctgttgccctttcgatatgttattagttacattagttgtttagggacattttacataccgcttgctttgtattgattgttaagctataagttgtttacttggtattataatgtgac

SEQ ID NO: 261975 - DNA, 890 bp, Cannabis indica
ccgcgcagcacgccaacacttatcaaattcagctttcgcagcgtgagtcatcgaagaaattcctataactttgggatcagatcacagacatatggcaagttgtctgaatcccttgattagtgtattctgtatttacaatgcaatctttccacttatatcaattgtaatcagaagggaaatacttccctcccaagcttaaagccctataaatagtgattcatattcactgggcaaaaggtcgaaaaacttatctaagaatttacattcagagatgttattgtaagagctttaagaaaaggaaccattttccttgttcttaagtcaatacaaactacgaggattaggctattaccgaattgcttggggcttaacctctataaaattctcgtgtcttcattttctttattatattacactcatattatactacttctcgcttacaaattagactcactttcgttgctaaaagcgaggtcaacattttcgtgctttcactgagagataaatcgagaatcgctctttatctcaaatctaatcgcaaatacaatagttgtacagactcgcagaggtgtggttgatccaacgaatccacagatagtggatcctgcaatgcaaaacccagggaatacaagggttccaccaactacaaatcctgaacaaccatcaactgtaggtcgcggtgtgacgactcctatgattgaaattgcgcctggtgtgcaacagactaggaataccagtttagcagccaactacggcattcattaaaccgtcgttctccccgctaccaatgttcaaacaaccgttggagatgacactgaaatccagaacctccgtgctgctcttggagccatgcagggtcataccaacaccctacatcacgatcaggagga

SEQ ID NO: 261976 - DNA, 510 bp, Cannabis indica
gatgttaatgaaacatacttggtagtaaatctagatcttagtaaaatatttccaacagtgtcatcatgcctcacattttcccatcaggagttattggtcggtggcaagctgcggggatgaccattctaacttttagtgggatgacgacatattggatatgattcgaggggatgatgcccaatccttggacagttggaagaataaggagagaatatatatgaccctcttcttcgatagtgcaaagcattgggtgactttagaggcagaccttgatcgttggatgctgagcatatttgactcgagccttggattgatttccccagataaattgaagagtcacttgatattatgggaagagttattcccaaccttgatgctgcagtctggcctattcgagaatcatgaaatgatcatcatgtctcaattgaccgtcttagagagccgggttaaaaattttagttcaaaagtcatcgactggagcattgtacgacagacggaatcaaggtaact

SEQ ID NO: 261977 - DNA, 821 bp, Cannabis indica
tctctacggatgtgtattgattatcgagggttgaataagcttacaatcaagaacaaatatcatttacctcgaattgatgatctttttgatcaactgaaagggaagacggtcttctccaagatcaaccttcgctcaggctatcatcagctgagaattcgagaggaagatgtcctgaaaactaatttccatactcggtatggacattatgaatttctagtgatgtcttttggactcaccaatgccccggcagcattcatggatcttatgaatcgggtattcaaggattacctggatagatgtgtgatcgtttttattgatgacatcttggtttattcggaatcggaagaggaccatgagttgcatctgagatctgtattgcaacggttacgagaccacaagctgtatgctaaattcaaaaactatgaattttggttatctcgtgtctcttttttggggcacatagtagataaagatgggataatggtggatccggccaagattgaagctgttcggaattggccaacaccaaaattggctactgaagtcagaagctttttgggctagctgggtattatcgtcgatttgttgagggtttctcaaagattgatgtacccttaacggagctgacccgaaagaacttgaagtttgtctggactgatcaatgtgagaatgattaccgctccagtactaactcttccttcaaataggaaaagtttgtggttattgtgatgcctcgagacaaggtctcggctgtgttcatatgcaaactggaatgataatagcctatgcttctcggcagttaaagggagtacgagcagagg

SEQ ID NO: 261978 - DNA, 519 bp, Cannabis indica
gatgaggctcctcttgagagaggagggttaatgataaatttaatttaattaaattaaattaaaaaaaatagctgagatttgtgaaaaagagagagaagagaaatgaaatgaaagaaggaagatgaagattgggtttgggtttggtatttatgattgaaaatgttattatcttctgtggttgagtttagagtaattggtgtggtcttggctttatggggctttatatgccgtcggattaaaataatagttttgttataaagaagaatagagagacaaatggaatcattgaaattttttgtgttgggagattgattattattattattattattattattattattaaatattggaaaatatatggtgtactaatatattcttaatctttgctatttagaaaaaaatttagtttgatttttttttataattgtatatttgtagttatttaaaatattttgtaaaattttgaaaaatttaaaaaaatttaacacgctaaaaaaatgatttaaagaatttgtt

SEQ ID NO: 261979 - DNA, 1016 bp, Cannabis indica
ccgtgaatgtaatgggctgactccattagccggggctttttgagctgggagctgagtaacttcccaaacctcatcgtgtttcacggtccctgcgtattgtttcagctccttgctggtagttcctccgatgtggggtcctcccgagatcaaaaccaactctcccgttgtgtcttggtggcaggccgggaatatgcagggcatctttggggggagcaactggagccaatactcctgctgcaccccctggtgctcctgtggcaaagctccagccgcctaacccgggttgagatggggcaaccggttcttgatccactcgtagaggtgtcccaatcagatcaagttcttgatctcgtctttgagatttttgcattcattggtgtcgtgcccaatgtcattgtggtactcgcatctcttattgggatccctccgggagctgtctttctacaggggaggcggtctcaggtagtgcgtattttgccttgtagcaaaatatatacgttcttgggagtctgttaactccgtgtattgggtatattgaggagtatacccccttttctgccgcttatcctcaattcagttgctgtcttttgaggaccttttgctccgggagccttgagaaggaccggctaaacttgcagccggagcagagtgggttgggacttgcccacttatccccgaaggctttccgaaatgggaagatgctggggccaaggcctggccttaactatatccgggagtggcagaaaattgtatgccgctcaagggtggagttgttgttggcaaagtacttgggagctgagctccgggcacatatctcgctatcccggtgggatagtatcccccataggccactatttgggcctcttccaggttgatatatttctggactctcttctagaagtcttgaaggtttgaagctccttcttgttgtaactcgttccaaaatggagtccctgtacggatgcctacttggagaagagcaagctgttttccgtcatctacttttttggttttcg

SEQ ID NO: 261980 - DNA, 508 bp, Cannabis indica
ggcactgctttatgttttgaatattcgcatgtttgcgagagacttaatcacttctgattgtcgcctagatctttaggattttgtattctgtgaatttggttgtgagaacattgactgcgtctttcaaatggtggatgtgtcacagtattctaatggtcatatatgcggttatatgttccttgagatactgagatacacccaaccattttcgacatgcgttaatgttctaatgagcgtactctttggctggtagatatcctcgaaacggtgggagtacctcaataagttcagggtcagcttgagaacgcatgccccttgagtcactgagtttctcccagccgtttctagaggtatatcgcttagctcaagatgcgtgatttattcgcaggttgcgactttagttggactccttgaaatggtgggtgtctcctcgtcacctcagggtcatgccgaaagacgcatgtcgctgaggttaccggacgctcctaaccatttttgggacgttttt

SEQ ID NO: 261981 - DNA, 594 bp, Cannabis indica
tcgttacaagtagtaaactcaccaagagtaaggtcgatcccacaaggattgtagttaagtacgttaaaattaaacttctacttctatttggttaaataaaaattaagaaaagattaaaattagaaaataaaaatagtgcaagaataagcaattaaattaaataggaaattaacggttaataagaactagggcttcgacttcaattgtttctattgattatggcctaatatgattatctccctattatcaatttctatgcaatagcaggtttactaaggtaatttatagtcttctcagatatataaatctcaatcacatgcaaactttctactctcgtgataaatttaacatgcaacaggcattaaacacaaaaaccctataagctatctaaaccatacaggtactctcgtcctgtatcgaaattcagttctatttcactatagcataatcgacactcacttctcagatctcgcatcgaaatcataaaacagttaattgatggccagacaattaaaagtaattaagtacgaatgaaatagaatacatagaaattagggggaaaataaatcatattaaaaccataaaacaatgtta

SEQ ID NO: 261982 - DNA, 491 bp, Cannabis indica
aaactggattgaattaattagcattatatttgatattatgaaatctgaaatttatttcggaattaattgagtgtgaaatggtaattttgcccttgaaaacgtgtacgtatgattaattggccctaagggcattttggtcatttgacctcttattattgtatttggaaatgggattttattaagaaaatcaaagtaattttctggttatttccttctctcaccagaaccctctccctctctcaaaccctctcaatttatgagacttgaatttggtgtgttctagcttgaattaagagtgttgattgggaagaattgtgttgaagattgggattaagcttgtgcaaggaattaaggtagcttcttgctgatttatttgaaactaaatgttgaaattcttagggtaaaaagcatgttctttgagttttgaatgttcttgttgcatgatgagtgagttgatgttaatcttgtggagattgagcttctatttgttg

SEQ ID NO: 261983 - DNA, 3061 bp, Cannabis indica
aaaagcctgcctagtttgcctacaaatctaatcaggccagaaagtttatccggagctgattctactcaaaattttcaaacagtttccccagctgaaccagtaaactcatcagaactctccactaatgacagtaagacgtttgctgatgtcaatcaagagaatgtatctaatgttgtgtcagtcccgcctcaacttgaggatctccttgatagagctcttgagcttggatccgccactacatcgggtaaaaagtacaagattgaaacttctcaagcagatttggtagaggaacatgatcatgaagagaagaaggcagcagcaagagacaaaccgtatgtctcaaaagctgaaagaagaaagctcaagaaaggccagaaaaacgacacagaaactgttgagcaggaagggaaaaaaaatcccggaggaagcaatcattgcgagaaaaatggtgctgcaaatgttgagcaggaagggaagaaaaaaccagtaggagcaagcaatcattctgaaaagcatgttcctgatgcaaagccagttggtggaaagatcagccgaggacagaagagtaagctcaagaaaatgaaagagaagtatgctgatcaagacgaggaagaaaggaaaatccgcatggctttacttgctgtaagtactatgacttgcacagtacttgaccttgtacctgatttatttttgcattgtaatctatgttttttcccacgtttaaagtaacctttttctatgctgatattataagtggtcatctaggataactatagggactgctataactttcaaaatatccattgttgcacagctattactgattctacttttgtctatccaattaattacttgatgacctttgacctgttaatctcagtctgcaggaaacacaaacaagaaagacaccactgagtcacagaatgtagatgcagctccgactatagtgaacaaatctgacggtgatactcctaatttttattgattgaacttgttgcttcttagtttcattgtgttttaatccttacaattgtaataataatgttatcttttttctccttgttttattttatctggcaggtcctctagatgatgcacttaaaatatgttataaatgtaaaaagcccggtcacttatcccgggactgtcaagagcatctgggtgatgtgtcacaaagtcttgtgagtaaagttgaagttcctcatgtacccttggacgaaaatgcttctgagatggacaaggtagtcatggaggaggatgacattcatgagactggtgaagaagagaaagaaaaactgaatgatgttgattacttaaccgggaatccactgcctactgatatcctcttatatgccgttcctagtctgcggtccttacagcgcagttcaatcttataaataccgtgtgaaaataactcctggcaatgcaaagaaaggaaaaggtaaccattatcttcaccttcctattgcatgcttatgcgcgagaacctctcttttatgcttgtgctttggcttatataccctttgtgcttgcactgatgaacagatcatttttactgttttattgtaagttttacattaaggaaggaaaaagtagaagagaaacaataatgaagaatagcataacataactcttaacaagaaaactacaaaacttgctgcaattcatttaagctcattaccctttctttgaccacttgctatttttcctttttgttttcatctctatcttttctagttatcttacacttttaattttcttgtattgtatagctgcgaaaacggctatgaatttgttcagccacacaccagaagcaacagttagagagaaggaattgatgaaagcatgcactgatcctgaactggttgctgccataattggcaatgttaagataacagctcaaggcctaactcaactcaaacagaagcaaaagaaaagcaataagagcagcaaaggaaaaagctagtcactaataccataatgcctgcctattattagtctcacattttttttttcatgaaaggaaaagcacaaaggatctacaacattcagagtgttaatacttttgtaaatgttaaattttgcttgggacaagtctttgttactagtcaatctgattttgcagtaaactaaacctcaaagttctcaaattctcaatacaagagatatagctttttgtttacttaagttcttttacattgttgctttgcacatcagttcactactttgaaactactcaaatctaattttacttattttatgtctgtagtacaaattttgcacacattttcaaattgaacaagtaaaatactagcagtttgtgtaatgaacaaaatgcttttctgatcagcttggaagcctaagtatgtgagtttgacaacaattttcacaagcataataatcaagggggaagacgaaaaatgtgtcttattctgaatctgcatcttcggctttgggaacgtcgctaagatctaaaccctccgctggcaaatcggaagtaagagggcccaagataccgtctgagctgatcgataatccactctgtagtttcaagcataaatgcagaattaggttcccatttatttggtgttactactgttcatcatttaatctaaagtgtcatacctcaggctggaaccgaagcatatctgcacgagccatggcttctgcttgggctattctttgcctgaatgtctgagccatctcctcagcctgtcagagcagaaccacaaacgtatgtacagttaaagtctcaacagaaactagattttggttgctaattatagatgactaagtacagcagataacaagttcaggggttttagtatttagaaaacaccttctcgaaaacaagctttggattgcgaatcatatctccaggagtgggttctaatttcttggtagaaagactaactctgcttctctctcggtcatggctcaatatcataacctgaaccacaaattcaaatttaattgtaagttattgatttatttatttagtatttgactcaataactaaaactctgcaatttgcgttcgtatctataccttgagtgtatca

SEQ ID NO: 261984 - DNA, 3170 bp, Cannabis indica
atccgatccgcccgaatatttttttaaaaaagaatttgcgggttcaccggttcgggttcgggttcgggttcggccaggttgctcgggtttgggttgaacccgctagaattattcagccctattcagaagtgtttcgattcaatgaaggaaatttgaagtaaacattcaaaaaaagaagtaaaagaaaagtcacaaatcacacatataataaaagaaggtaaatgattcttcattactcagctcaaaatcattcttatggactacaaaaaagcatatcaatacggcaaaatgtcaggcttatacactagaatattgctcctaacactatgcttttgagaatcattccactcgagcaaagcggataggaactgtgtccccttaggcaacgacttgcccttgatcaaaacactgaaagacctcttctgttgtggtgcactgaaactcaaactacttggattaactctcacagaaagaccttttggggagaccacattcaccttgtacactgcacttccctggccgacatgagtcaccgtccggtggaagatagcagagacagtagagttaggattctgtaggtggagttgcatggtggggtagttgagaccgtctgtgcctctcgcaggcctaaagtctgagcagttgtacctcctcttccccccaaagagcagagcgatggtggtgccattgtagccttctttgcacaagaaccgaatgtaagagctcatggacaagtcatagactaggccaggatcaattgcctggacagggtctatctgccctgcaccagagcctaactcagctgttttgtccttgattttcattggtgtagctgaaacaaaaggacaaacaaaaatgtgttagaatgaaatgaaagagcatagctagttgcatgatatgattttggtgattaatcttaccagtggtcatcatagcagacttgatagcagcaggagaccaattaggatgaaacgtcttgacataggctgcggctgcggtggcatgggggcaagccatggatgttcctgatatgatattgaagacagctcgacggtcatcagtagggtaaccagttatggtggtttgcttcgagtaagcagctaaaatgtctaaccctggtgcagcaatatcaggctgctcaaggaaaaaagaaagaaaaaatcactcagtgatttagatgtaaaaaagagaagaagaagaaagaaataatttgattctttttataccttgagaatgtttcggctaactactgaggtcctcttgaggagaaagaagcaacgaatggggcagcaatactgactgtccttgtcttttgtatgactgccacgggctttctttaattcccaaaaagaaaaaaagggttgattagttagtctcaatttcaaaaataattaatgttcatgatgtaatgataatgtgaagcaaaatcatacttggtggagtttatgtattgactaatcttgttaccatccttaggcagagcataggtcccaggaatataaggagtgaaggctgtgtctacaaatgaatcaagagtcatgattgttccaacgccacctaattcacctattgtgaaatcctggccgttgttcccttggcaatacactatctttcccttcaccttgtcccggcttaatgtcccataatcacaagcactgtacagaaatttaaaagcaatatgattgaattgcaacgccttcatttttgtgaaaaatcaataaatttacatcccaatgcttagttgttagttattacctgccatttccaaaaaagtctgcactagtattaactgaatgagctccatcggttagtggatacatatgtcttttgggagaaaaggtattaaccgcgagaccctaaaaatcatcaaaataaaccatgaatttacatataacaacccctaaagtcaaactacaaagatttgtggtatttgacacctattatctttagcaaaaaataattgtaagagagaaaaggacatacaggaattctcctcccattgccaagcttgacaacagtcttaaactgcctatcaatgccgctagcagccacagtcatgatccaaggagcaacgttttgaacagtcaaggtatcagggccatcattcccagccgagcaagaagtgagaatccctctcttagcagcgtggaaagatccaatagcaatggggtcattgaaatagtctctgctagctccacctatggagatggatatgacgtcgacgccatcagcaatggcgtcgtcaaagcctgccaagatgtcactatcagcgcaggcaacgctccagcacaccttgtacatggcaatgcgcgaggatggcacacctcctcgcgcagtgcctctggcgaggccgtacaagctggcatccttgaccgagacaccagcaatagtggaagaagtatgtgtgccgtggccgtcattgtctacggggctcggagtttcctccccggctgcatcctccaaattgtagtatttggcaccgatcaccttgctgcatgcacgttcacataaaaacattacacataagagaattattctatatatacttattttttaattttattttttgaatttacagtttgagttgcgtccgtagttgctccgatagtttctaagtagattgttatgtgaatttctatataaaaaagtaaaaaaaaaaatatttttaaaatgttattagtccttaaactaaaagaaagtaatgaaatattgatatttttctttggatatcaggattcagattaatatagtgataaaagatttacaattggacatttttgtaagtagaaaaaaaatgatgtattttttaatatgtagtggtaataatgtaaatataatattattgaaaagtaaattgagcatgttttcttaatagaataacacttacaaaaaagacttatttgaagtaaataattgtgttttataatatacaatggtaaaaattataaatattgatataaattatagtatcatttaaaaattttaaaatttttagggtgagtgggggagccttgggcgatggagtactcttccaatagtgcaagaccattaaagattctacagtattgtctgattagtaatgaatggtcgagatcttactctaatatgtactttgtttctgatatatacgactttcatagcaaaaacataaagagaagattggtatagta

SEQ ID NO: 261985 - DNA, 639 bp, Cannabis indica
aaacatgtttatttccaggtaattagatttaaacatgtttcgcatagtaatgcacttaggtcgaatgtgaccttttctcccacaaaaatggcaaatagggatgaaacgtcttccattccctttggaattgtcaaacttaccgtgctgcttcttttctgtaacagcagagtgtttcgctgaagtgacagaatcctgcgaggtagaaacagttcttccagaaacaaaaatatcacatttaacaaaagtggtattgaaatcagattgagtagaaccataacctagaccagtatgattagtttggccagatttttgaatcttttcaaatatgttggaacctggatttaacattttaaaattctttttaatgtttttaagttccttagtcaaagaaataatttcagattcagattcacaacatttaattttttcatccagatcattaatgttgttacacaagtctttattatctttaatcagggaacgattttcagcacatatttccaaccacttacccaacattaccttgtaagattcagccatagagttctcatcaatttctgactcatctaattcggatccagcatcttccttgttgtcatcgatcaaggtattattcatgcacatgaatttttgtttttc

SEQ ID NO: 261986 - DNA, 718 bp, Cannabis indica
ttataaaattgaaaagtaaaaacagttttataaaacatgtttttgaaaaatattttcactttttcacttttaaaaacagaaaactgatcgttcacaaacggtaccttagtcttttaagtaaattatactagattgtagttattttataatatgttgtaaatgataaaatagttattatatattcaattttaataaataaataatattaatgagtaagaaaaaaagataaataaataataatagttttatttattttttttggttgagagataagagtagagagggaaggtgtgaacttattaggaatgagagccgaaaagcaatgaatcacacaattcatcataactactcatgacaatgatattcatctaattttcaaccaaatcatcacatttttatttctcctttttctttctctttttgggttttgttgtgttattccttttgactcgtgatttattggaactttttttttcattttatttttggataagtggttatgaaaatttatttattccaccatcgaataatggctactattaattataataattaataattaaaagggtaaataccattttgaatctcatattttgtaaattacttattgaactttgtgttttattaaatgataaaatggaccatgtattttttaaaatagtacaaataggaccctgaactgattttttgtacaaaataaaatttaataataattcga

SEQ ID NO: 261987 - DNA, 1425 bp, Cannabis indica
aaaagtgcggattggatcggatgaacacccctaactattaccaaactgctcgacgctcaacctctataaaattcctatgtctttatattactttatcatatatcaatcgttataaactacttgtcgcttactaaattacactcactgtcgttggctaaaagcgagatcaacaagtatataaaattaaaatgataaaatatttatgccgtaaatatcttaaatatttttaaattttagctacatattattatataataaaaatatcaaaaaatatgctaatattttttaaaatttaatattaattcaagacaattaatataaataggaatatatgtcttattatagtaatttttatactaaaaaaaatgtttctattgttcaattttccacctattttcccatacatatattttagtcaaacaacatactctcaatttcttttataaatatataaataaagttatgtcatacattaattataaaactacactatcatcaataataataacaaataatttaaatagggtgaaggaataaatgaatttgtaaaaaattgaaataaaaaaaggaatatcgagtagtgcaaagatatgcaactactttagtatatttttctttatttcttttataggtgagggaattttgttttattttaaaatattttgatttatttttgtaaagtatgtgcaagagtttggtttggtgttctggtagaggaaaagttaaaaattaatagcttttgaaatatgtattttcaggtgttacaaaaaaaaaaaaagaaaaaaagaaaataatgtattttcagtgatgtaaataaaaaagcatacatttatatatgcatgtgctaaaaaagtgaaaatattttttctattatgttttgcaagctttgctataactaaaatagtactcaacgtggcatattctgtagttttttttttttttaaaaaaaaataggaattatatattgagtgcactgaaagaaatatatatcatagttatttatcttctccatttatgctttcttctacaccaatcctcattttcatttttcatctcatgatagttagcatatttttattattggttaattaggtattttttttctttcaatttcgacatgtattaaattatattccttaaatatttttagctcttgaaaattctccttaaactattgagatgttaaatttaataattttttgtctaattttagtaaaactattctaacatgtatgaaagtttagaggtatgatttagtatatcaaagtttgagcgacatgatttgataaatatcaaagtctggagagcataatgtagtacacaaacaatcattgaaacagtaaaattgaatgaaattagacaaaattttttaaatctaacaatttaaataggcgaatttttaacgactaaaaaagttcaaataac

SEQ ID NO: 261988 - DNA, 1715 bp, Cannabis indica
tttaaaaactaattcacttttggtcaatattgtttttaaaaaatactaaccaaacatgacttgtttttaaaaacttcaaaaactaatttttgttctcattttcaaaaatatttttttgaaaataaaaaacagaaaataataccaaacatgctctaattttcttcaataaaattagacaaaagttcttaaatccaacaatctcaatagttcgagaagaatttttaacggcctgaaaaattcagaaagcataatttaatacatatcaaggttcagagagaaaaaattttaatttagcctaatattaataataacaataatgttgaagaaaactcgaccaagaaccaaacacaaaacacacaaacagatataggattaaacacagataatgtggtaccaatgctatatcatttagagtgaattagaacaagcataaaagatagaaaatagagacaaagattacatggttcgaacaacaataacaacttgttattgtgcctactccacggccaaaaacagccctttgggcagaaaactttattgatcataacatcttttttaaaaatcattataattcacatcataatgaatcttaaaatgtgttaggaaacataacaccttttttaaaaatcatgcatcttaatatatgtagtccacctaataaatagctgcatatactcatatttataataaaattttaataattgagaagccataacttatgtagcatggggttgtgcttcattagtttaacataatattatttcatagacaaaccatgttgaattcaaattcaagatacaactaattgtaataattatgagccaaaatatatataaatttattattttgtaaataaaatatatattttttattataattaatttcatgctaattaactgaaatcccggacacatttaaagctcacatagccatattggccgacaacatgacttcatgtttattaaactcaaaaacatataatataataaagattcttaaatatcatacataatgaataaaatgcaatataaattaaaaacattgtaataattaaacttgcatgtaatcatagatggtccaaagtaataattgagacatatttttgaacattcaaagtgttttttacactaatttattcattcaatattaacaaaaaataatctagtcccaattttaaaatatcactaatgagtagtgagtgtaaattttaaaagtacaataacataaattactcaaaaatcatctatattttaattaaaattcttaattatattttttagtaatgaatgcaacaaaagattatgaggttttggtcggaggaaacaaataacttttcatggcttctcttcataatcagaatatcacaccacacaacataatcaaatccaaaatcaactcaaatcattaatgtcccttctcatcacataattactcatacgtttgaataatttgtaaggctcgaaattaccaactgtgatataattcaaataattgtttaatattttatttgttggattgtaatttgcaaaagatgattgttttttttttttttgaaaaatactactaaaaataggaatttaggcccaccattccctaacaaagtccatttccattttcagccctcccatttatggttagtgggtttggaccattttcaatacaaggcctgttttatggcccaatttcttttttcttttttaatatgattattgctt

SEQ ID NO: 261989 - DNA, 854 bp, Cannabis indica
tgaccagtccaaagttcttgtggagttttgaatttcaagggaactgatggacacctatttattagataacaagctgtcttgacagcttctccccagaaaggtctatccaaaccagcacctttcaacatacacctaactctctcaatgagagttctattcattctttcagcaagtccattttgctgaggtgtatctctaacagtgaggtgtctagcaattccatgttctttgcaaaattcatcaaattgatttgagcaatactcccatccattgtctgtcctcagctttctaatcttgcactttgtttggttctcaatcagccttttccaattgacaaaggcattaaatgcctcatctttacttttcaataggaacacccaaactttcctagaaaagtcatctatgatgctaataaaatagctagctccaccaagagttttaactctagaaggcccccacaaatccgagtgaatgtaggctaatttctccttggtagtgtgttgactagtagcaaattttaccctacagcttttcccataaacacactcctcacagaaaccaagtttcccatttaaaccaccttgaaacagcccctgtttgtcgagttcattgagccctctttcactaacatgtcctagcctcaaatgccatagttgaacatcattatttgcataattgtttattgctggtgttgcagatcccattacagcagagccaaccatgtagtaaagaccatttttgagtcttcctctaactaccacaagtgacccttttgagatgttgagagtgccttggtcgattttgacagtgtacccttgattgtcaaacatgcctatggataacaagttcctctt

SEQ ID NO: 261990 - DNA, 711 bp, Cannabis indica
aaaatgatttctcttcccaatatcaaagatgtaatttgggtggtaatttcgctatgaacgcctgcctgatttattgtatagagtgtggatgaattggacattgtttttaataagtgtttagtccatcttgaaaatatggataatgggattgaatctgaattggcttatagaccaagtcttaagggtgctcctttgcctacatctagttatgatcgatatagattcgaatttttctaaaggaagtgtgtggccactcttgactcgattagcacgatccacactctctgcaacaattccacagatcaacaatcggccaccttctcatccaagacctcttctacatggagaatcctctaatactaacaagggtcatcatcttcctaccaccattcacacattttctccatctactgcaccaaattttcagcctccagttactgctggttcaaatgttcagcctccacttactgctgccgtttttgcaagtcattctcttggccttacaactgctccttgtggtaactcagtggttcatctaaaagatgttttcactcctaacattggtactttctctgatgatcacactttttgcccacatatccctccaaattccctaaatacttcctcgtgaaagaaatatgccagaatgttactatggatatctcttccaaaaaaggctgggaaaagccattgctgcaactactgtctcgc

SEQ ID NO: 261991 - DNA, 705 bp, Cannabis indica
ttaccaaacggcacctttatttataaaaatacctccataaggtaaagacaatatttatatcttttatgtgattttaattactaaaataccacttacactatcatcacttacacaatcaaacgatagctgcagggtggttgttgcgtggttgcacggtggttgcatcagacgaatcagacgatggttgcagggtagttgctagtagaactgtacatcggtcggtttgaacggtttatcctatatattttctaacccaatctaaagttcgggttgctaaaatttaagtgcaagccgcccaatttaaaaaaaaaaaaaaaattgtaaaccgactaacggtttgggcagtttggttgggttaacccggccaaactttttttttttttggtttcaaagtcaataaaaatgaaaaaaaaaattaattaaaaatatcaaattccaccaaagcacaacacaatttatatgactttgaaactaacaattaagtatataattttatatcttaataaaaaatatatatataattttatattattatatatttgatcatttatgttatatataacaaaaactaaaaagtaaaaaaaaataataataaaaggcaaaatcgggttgatcgggttattcgatttaattgggcgggttggatctattttcaacccgcccaattatcagattgggcgggttgtaattttttcgagttatttc

SEQ ID NO: 261992 - DNA, 801 bp, Cannabis indica
cgaacagataataaaaatataaattgttttattataagatcgggattattattaaattttattttgactaaaaaatcaatttatggtcttatttgtaccattttagaaaatacaaaatctatttatcaatttaataaaatagaaagtctaattaataacttttacaaaaacaaataatccaaaataatatttacttttttatatatacattgaatcttccttaattaaatttttaacgggtttcttcattatattatttatatataaatttcttttaattttacacttgtcgggtaagtaattagtaatttttttttcctttttgttggaaaggagaggcctttaatttatgacatgttagtaattgtgggttaatgtgacacctcattctatattctataatacacaacttatttaatgcaagagagacaaataaaccagctcaatgttaattttaaaattatatttatacagcaataaaataataaaaacatatattatataatgcaaataatgaaacggtaaaaacagaattaatataggaacaattattataggtggggtttgaatatattctttttgggtatttaatataagaaaatatcaaaagagaagtttttgatattggccttgatgctattcaacatttgatctcatcaaagaaaactctctaaaacaaagacagtagatttgatgattctatcacgtcgtgacggttgaacttgccaattaataataataataataaataaataaataaataaataacattattttttatatatatatataagtagggta

SEQ ID NO: 261993 - DNA, 739 bp, Cannabis indica
agcagcacgaatcggctttcaaccactccaaaacccaccatctcgaacactggtattctcagccagagcacaaccagtttttatccctccactcctagcttttgcccgtgccttatcttgattgaaatgcattttctgctctccttcccacccgaaatagtccccctgaccttccattgtactgccctggcctttataatttcccccaaagccaccatgtcttccatcgccgccccttcaatcggtcgagcatctcggccatcaacacttcccagtcgcccacactgcctcttcctaaccgcccctcattctcaagctcaacctccaccctaccctccacctggtcacgagaccgtgccccttaccattactttctttcaaactctccactgtcgaagccacaccagaatttgcatcctgtttccctgactcttgtgagatattgggctccttttgttgtagcccaattgagctttgaccagcttctaaagtagatgggcttttcatatagtccatttgagtacacttatggcccacttcaaaacccacctgcattttagcttttaatttttgagtcatcagatctcctataaccgcctgcccacgacccacgccagtcgccacctccttctccatctgttgcatcgtgggaaccacacttctacgcacattcggagtctcatgctgcccttcctccgaccggcgaaccccatccaccaccggttcatcagtattatca

SEQ ID NO: 261994 - DNA, 2456 bp, Cannabis indica
gtctagtgaatatataatcaaatagtagaaacagttcatgcaatcaaactcaatgctttacatttcatttactaaattagttacctgctcggaaaattgtgttcctaaacccaaatgtttaatttggcaagagtgctcacagcctattctttttttttttaatcttttttgacttaccagggaaaaaagcatcatatataagataaatcacatgctgatcaaaaaccccatggccagtatccattcatgacattacaaaatactaaaatgtcataacacaagtacattacaaactcaacaagcaggcttaacacaataataataataattggacacaagtacatagcaattattaatatataattagatatgacttaattatgagaataaacaactttaaacaaactagctaagccaccaacttggagttccagaaaacaagctttgagaagcaacaacatcaaccacttaacccaattcctcctgaatacacgaaattttgaaaatcaataatcaaaacatgatgaagcttgctaggaatgttttatcatccaagaacattaatgttaaccttgcttatcatatcatgaaaataattctttagttcaaatatatatgtcttcatgcttcaaaagaatctataattttatttatatttcttattattaagcagccacacgaattcattcttagtctaataatcttttttatatttcaatctatctgtttatctatctcacttattctgtttgtgagctaatccttctatctgtgttttaagattcttctatcatttactcatgatagacaaatatataaatgagaatgctaactttcaaaatgtatttggggctcctaaggatgtttgtgtatggctttaaggcttcaggagtagttaggatcagtataccaattattggagaacattctcttacatggattaaatataaaaatactgagctatatataataacatgggctactccactcatcaccaattaatttcgaatagaaccccatatttcttaacatgttatcaaatccatatccttagctggctttcgatcacacctatctaaatggttagctagtcgcatgagatctaaattttagcaaatggcatggcttgtgataaggtaattcaaaattggtgagcaaaaataaccaccatcttgagaaatattgagccacatataagaacatgggttactccactcatcgtcaattattttttaacaccaataagatgattattaacagttgcatggattcttgtaaatgaatgcagctgttagtgcaatgcaaatgtgtgtttaattatgaatggttgcaactgtagtaatacaaatttctgttaaagttaacatttatattagtatcgttaattaatacctgaaagagcagaggagtttaaattatttactgtataatggatctttaagcatggtttcgaggtgataaacttgagggcagtcttcaatctccatctttcttaaagaggtgatgaggctaattctctcacgcggtatcctcaacttaggacagagcttgatcgaaattgtcctaagtgaattaaagtcatatgtggatttgctgcagactgttgagttctttaagtttttcaagatgaacatttatgtcagtaagttgatccaagggacttccacattcctggatcaccattggacatatccatgatatgttgtgtcctcagtccagagagaggagcaactgtggtggaacttgatgatgatggtggtttcaagttagatgaaatactctttcgaacaagagctggtgtacttgatgtggaagaagttagtttaaaaagagatgaaaaagatgttgaggatgatgatgcttcaaattcagatgtagtatgaattcttctcactccttgtgctgccataattgtccgtttgaatggctcccaactagtgtttttaagcactagtagttcttccagccatggaaacagaggcatggaagtgagagaggggcaatcctcaattactaatttagaaagacaagtaataataatgtagcatcatcacatgcgtcatctttacaccatctctttagttctggcaagtatgaaaatgatgtttttgatgatgtttgatccaccacaatgtactgcagcttcatcaactcatctaataccaatacttgaagattaggcaagtgatcaagtgggggtaggcaatgacatctgttgcatcaagataatgataatttcacaagattttcaagtgatggaagccaactggaaaacttggtaccaccataagtagatgttgacagttctctgagatttgggtgtggctcaagatcttctagcgcctcttcaatgcaggcccggccccgggcataggcaggctaggcctgtgcctagggtccacccagcccaggggccctaaattttttttcctttcttaaaattatacatttttttt

SEQ ID NO: 261995 - DNA, 565 bp, Cannabis indica
attctaaaattagactgtgtcttatttttgaattttcactaagctagggcgtaattgtgaagaaaagaggttttagggtccattttccaattaagagactttattaagtctaattaataaatatattaaatgacaattttatttgataattaattttaattattaaataaatagttttgacatttaattggttgaattgcaaaatatggcatttgtgaaagaataggatgaataattgagtaaaattacaaaattgtaattggtgggcccacatcctaatggccgaccacttaagctcaatttagccatttattaatcaactttttaatgccaaataattcaaacctaaacctagaatgattcctataaatagatagtgatagactcaaaactgacagcttatagtcattagcctttcagtcaaatttgagtcttctctttctctctctaattttcgaatccttctccctattttcttcttcaaattttgtccctcttagtgattgagtacatgcctacacataacaagttagtactcaatcatagtgtgtaagactgtgaagaa

SEQ ID NO: 261996 - DNA, 715 bp, Cannabis indica
aacttggtgatagtccatgtattgttcttttccaatgcattggtttcagtatccattgcttgaagccaatctttaaattgtgaagcttcagagtatgattgaggctcaacatgagaataagctgcaaggacagcagctcgaaaatgagggctgagcttagcataggaaattaatttttcaattggaaaagcagttgaggttgtatgacagatataatctgttaaatattttggtttaaccacgggtctgccagctttggattgaagcaaaggttgtggaattgaattggtaggggaaatgtttgtagcagtagcatcagttataggagcagaaactgatgttggttttggattaatatccgtttgtgggactgtttgtgaagaaaaaccaggttgtgaactggtttgttgtgatgttgctggggtgatagctgcatcagtttgtgagttatggtccttggaggggacaagtggaatggggagtgatatgttatcactggtgtgaggtattggtgtgggattgacaccagaatgtgttgataaatggtcaacacgatgtggctgctgtgaagttgcagcagtatgatgttgtttggttgtgttgataggatcaaacacaggtttgataaatgaattaaaaaaattatttatcttgtgagaagatgtataacctgtgaagggaaatatgtcttcatgaaatattacatctcgagagt

SEQ ID NO: 261997 - DNA, 556 bp, Cannabis indica
acttttatgagataataaaagatcctttaaaagttacatcttttattggattataagagataataatctcatatttgagataaggaaatatggattatgggcgttacacttttattggacttgcattgtcataagcaagaacaatgatctagtggatctaaacttgtgaaatgagtcataaattagaagagtaattttagactcaagtaaagtgaatcaatgtggattcaaattatgaaaagataacaaaattggagaagcaattttgaatcttaaataatcaaagttgtgaacaaaattgatgagaattatgttaactttggtataatttgggctaatctcaatgagtagataatcttaaaattatgggtaaaaataatcacattattttgtaagtggtaatgtgagtttgatattttattttttgagaaaattaaaatatcaaatgttatttttaaggtggccttaaaaagtcatttcaagaggaaatacacaaaagtgatatttaatatacactttatgctagaaatgtgggggtgagccacaaatttaatca

SEQ ID NO: 261998 - DNA, 509 bp, Cannabis indica
acctgatacttaattacattaatatcgatatgacaccgaaaagaatgttcgacacctgtaataccttttagcatttctcatagtaaaattcgttcatattgctcaaaccaataaaggatcaagcttttcacgcatgcatgcatgggatggcccaattatttaaaaataatcaaaaaaattaacatttattcaattaggtagtgttaaaataatcatcacatataagatatatatataaatataatgtgtatacctggtcaaatatgctgcaatgcatgtgattttaaggtttctaacattaatttgaaaattagtaattaacaggaataaagaataagacacaatacaggctgtgtaccattatcaatagattaataatattaattaatagctatatataatttaatcgttgtgcaaatataaattactatattacttacttttatctggtttttaaatggcaataattgaatcccattggatgaatattataacattaaagaaacgac

SEQ ID NO: 261999 - DNA, 550 bp, Cannabis indica
acaaaacaaatgaaactatagtgatcaccggagttgtcatcagtgccggaaaaggcactggagtttgctgttggcactagaaaagccatcggaattggcattatcgccgaccgaaaaaatcactaagaaactggtttcttggtaatttgttcggtaattttttcggcgacaataccaattccgacgaattttttggaatttgttgtcggtactgaaaaagtcgtcggaatagctgtcggtgatagaaaaatcgttagagttgctaccgacgtcagaaagtcatcaaaattggcattgtcgtcgaaaaaatatcagaaaaatcaccaagaaactggtttcttcatcaaattttttcagtgatttcttcatcaaatttcttgatgattttttcagtgatttttccggcgataatgccaattctgacaaattttttggcgtcggtagcaacttcgacgacttttccagcaccgacagctactccagtaattttccgacaccagcagcaaacttcaataattttttcggcatcagtgacaaataaaactaccta

SEQ ID NO: 262000 - DNA, 731 bp, Cannabis indica
actcacttcgatctcgcttttacccacttttccaatcatcctctcggtatttgctccacaatgctctcgcttttcatgttgatctccgaactggccaaggttttcaagccatttctgatacatttggccaggtgggttccaaaccataaccccaaaatatatatttattttttctgcttttggttgattattgggtttctgaccgttggatttgtacaatgagatttgaattagtgggtgtgcctgaataatgcatttgaatttagataaagggacttgttttaatgcgtacttcaacactgtgatttactggtctcatgtagcatgttttgtgaaagtgtttctagtttgctgagctgttaatctgatttatggggattttctgtttttgtatttatagttgttgtattctagttttcggtgcagagattctagcaaacgaaataggattcttgttgtaagagatttctaaccatcttcccttgaccagacaaggcttgtgttttttttggtttagttatcattgtggagtaacaatttttctgaaattcttaaaattatagtttttctgattataagcaataagtattcatatcagacatgaggttctatctatgtattttcactttttccatggccacacgttgacatggtaataagggtttttgaatgtttattttaactcaaaatgccagccagatgttgtggtgaattgtgctgcactttctgta

SEQ ID NO: 262001 - DNA, 585 bp, Cannabis indica
atttcacaaagggataccactatcaaaaatttgagaattttactatttaatttaaataattgttagtgcatgaaaactatgttttcactcaacatgtataatagaaaaatgatgcataaaagacttggctttttccctgtgaaatttcgcgatttttttgagatgtgtagggtgagattttaacagaacactaacgagtgtaagactaaggaaaaaacttaataaaatttacgctaaaagaagaatatttttaatttttgaattagggggtcattttaaccaaatttaacacgaaaccaatcttcatattcccgtcttaatagtacaaattcattgggactagtgctataaaaaattctaagatgggtcctagccatatttcacaaaatggtacaactatcggaaatatgggattccactatttcgattaaaatgattgttagcgcatgaatactacgaaaagtgatgcaaaacattcttggttttctccctttgaaatttcacaatttttaattatgtgtagggtaagattttacgagaacgctaatgagtgtaagagtaagaaaaaaactttttaaaatttac

SEQ ID NO: 262002 - DNA, 602 bp, Cannabis indica
aatttactgtttgggtttctaaagtggttgcagtgctagttgcaataggagtttctatacgattttttgttgcgatttaggttgcagtgctagttgcaatcgagatttctatatagaattccgtaaaaatgcataaaaaaatgtttagaagtgtaaaaatgaaaaatgcccaaataaataagctaatatatatttatttatatttagaagttcgtcttttttgttttaatattactaaaaaaaaaatatatattatatataataaatttttaaaaatatatataattaaatgcggattagatcaaatcggttactttttgaggtcaaataacatcaaatctgcataagtgcataagtacggattttagatttttcaatccaatcaaatccgcacaagtgtaaatatttacattttgcaaattagattagattacatcgtacaaattggattggatctaatagtttgtgaacaactctaactaaaacatctttttaaaaagtgtacggtaaacttagccaaaagtatatatgcaaatcaaatcttcaaaaggaaaaaaagaaaaggaaagataataattattagggaaatttgtggcaaaagt

SEQ ID NO: 262003 - DNA, 1563 bp, Cannabis indica
tgttaatgaaacatacttggtagtaaatctagatcctggtaaaatatttccaacaaatataactattcatataagcaatcaaaaatgtacaaagtgataaaattattaaacgtatattcaagtttgcttaagatagattataactatcattgcgaggtggaattgacattttctcgtaaatcaaaaaatctggtagattactaagtacttaaataggaaaattacgagcaatggaaagaccaaaagtactctgcatttgatcaaaatatagttgtttacattgtgaataaaaatgcaagcaaacacaaatatattaagtttgaatgaaaaagtacaacacataaaaaaaagtggtttacaaacttgtccgtacaaaaatgccactaggggcaaactattaggccattttccttaataaaaaactacaagatcatttatagaggacaagagagctcgagaaagaccatctacacatagccagagaaagaccatctactcgtagcttgagaaaggctatctacacgtaaaaggactcaacctctgcatagacctcattctctgcagtagaagacctccatttctcacactagaagatcccatttcctatagcagagatctcattccctgcggccgagacctcattcccagcctcgagaaatttataaacaccagtgattggctggtttggagacttcctcgtgcaagccttgatcttgaaccatttgggatctttagtagaatccatgatctcgccaactgggattaccttcttcttgggtccattgtcagtctgaggaggacctctgaattctctctcaaaatgtacgtccattcctgtagagacaaagataagagatcagtaaagcaacagtttcaaagaggatgatgcttacccttagaaatctcttgtggggatcgcctgtaacgatcaacaatacctactgggtttggattaattggacgatcttcagtcttggaatcctttgtttctaatttaaaccgaggattgaagcctttgggaatgtatggagaggaaaagcagttggtatattccggtggtacaggttttgagggataattttctgagtttggatgggacatcttagcaagagaatgacaatccaatttctgaatgtaactcacaaaaaaccagaagtttacgaaatatggctagactgagccaccgttttatacttagaacccagtaaccataaggccaaaggttgggaaatccaacagtcgggaatgaggtagaagatgaaaagacggttcattaatactaataattaccctcgaaactatggaaccaataaagttaggggcatgcgtggtcttgaagaaaggaattatcacaaatataccctctataagcatttaaaaaatactttttattaaaaagatttttttgaggggcaattgttatacctgaaattcggctaccatttcaatggaggacacatgtcaagttaaagagaatatggatcgaagcatgtaacggtaataacatttaatggaataattcattaaaggaggaagtaacagagtatatttgcaacttgctga

SEQ ID NO: 262004 - DNA, 546 bp, Cannabis indica
tacccacgatcaccactatcacacttctctcattttttttttcaaagtctaacccttttcaagtttgagagtgtgtttgtattctagggtttcaaagaaaaatggcaaaataaaaaatgcacaatcttccaagaggccctcccctggctctacttctgcatctccgatctccccacctgcgctgcctgctccagtgaccggaattcctggttcgtcatttgctccgacaaaaactaccagaaagtcaaagacccaaactcgaaagtcgacctacaacctcgcttctcctcctgtcattgcttctcagattgctactccaacacctgggtttggtgatcatgatgaatctcattcatccaatcacacattctcgaagtcttcttcttcgaatggtgctcaaaatgtcgagaaagcaatggcgactttgtccacagtgagttctcgaacaaggtccaaggtatccactcctcaaaaacacgaaatggttctgcccaaaaatttctccaaaggaaaaaaggtggtgccttcatcttcaaaggccaaaaa

SEQ ID NO: 262005 - DNA, 549 bp, Cannabis indica
cttttcactgtgttgacaacacaataaacatgatcaagaatgtgaaaggagtttggatgaatttataaatcaaatagacaaacaattgactaagtgaaccaaaacatacacaaatgaatgaaaaatacttctgttactttattgatattgaataatctagattacattgaaatagagttttatttagggcataaaacccaacaatattacattggattagttccaataataagatgcattgctgattttttattggattggattggatccattaagttgatttcattaaaaaagaaaaatatatatatatatgtaaaaaataataatttaaaacctaaataattcaatatacataacaaacattagtttagtccaatctaattcgcacgatctcataataaaacccctacgaaaaataaaaacttaattcaatacgcattgataattttattaacgtttaggaagatgagaattaatattttagtatctaaaggtttttttcctttaatcttatgtgttaaatgtatattaaatcaattaatatatttt

SEQ ID NO: 262006 - DNA, 613 bp, Cannabis indica
aaatcaggacccagaccgatatcgaaacctgaacccaaactcgaacaaggagtttaaccccaaccggctcttagactcggaccgagacctaaaacttggacccagatgagggacctggactcgagaaacgggcatcagaactgggaccgagaccctagacccaatcccagacccagaccctaaccttggactcggaatgggacctgggacccgaagtggaactagactgggacccggggcttgcacctgactcatagtcagtgtttggatttgggacccatacccggactcaaacccagacccagactcggacctagaaccaaacccaaacccagactcgtaccccagacctaggtccaagtccgagtctaggtttgagtccgggaactagaatttgaataggacccagacccaaacctggaccgggacacggactcgaataaaaactcagatcgggactcgggacacaaacccgaatccagacgcggacttggacccagactcggacccaagacccgtaccgggattggatgggattggagactagacttggacccagtaccaagacctagattgggggcccaaactctaaattagaaccaaaatcaggacc

SEQ ID NO: 262007 - DNA, 10493 bp, Cannabis indica
tttttagcagcataagtacccaatgtttgtaaaactgtaattttcctcccgtttagtcagtacaaactactgttttgaatatattaaaggaacatttggaagtaactaatactacatgttttatgtctagacccaataataaaaaatttggactttatatgtggcctgtttaagaaaataatagagctgtactgacaaaatcagaaaaaatttacaattttacaaacattgagtacttatgccgctaaaaataaatattgggactatgacacttacaaacttaaaactttgagtacttatgccactatttaccctaatataaaaattcaatttgtcatttaaaaaacagaaagtccaaatagtccattcaaactcaataactttacaaaaagcctaaaagtatttatttacccaaacataaatatggaattttttatcatcactagctttgttatcctgcaaaatctttgagcaacttgacatagaaaatattccatgatgcttatagtggattattcccaatatatatatagacatgtagggtttagttaggtatgtttattaatatatatatatatatatatatatatatgtagaaacttctttaaagactagtggctattagtaaccttacttacttcccaaccaaaacaaaatcattttcaacataattacttaaaaaaggcaaaagaaaattgcaagaaattaacacctatcaagaggaccaagtgggccaaaacactgtcttaaccatttgttcaatatatacaaactgagaaaagccaagtaagaagaagaaggtgatcacagaccaataataagagttaaggataaagaaacaaggtttaaggagataccatttacagttttttttctttcttatatatatatataaatgtgtgtacacatgtactttgacttgtctggtcccagcagcactgcacagtgttaaatgtttttatggtattatgtctttgacttgtctcctaattggtccattcttcttgttcctgtgttgttttcctaaaccagcaaaaacaattaatggacatgttgtctcttttcctgagtttggtttgttcataagattcatacctcaacagcttcaacatccaccgagttcgatcgtcccctcctcggagaacatttgttggatttaatgtatccaaatgaccattcattcatatcgaaaacccttctatgaaagagtgttgtaagaagctagaaatgatctttcttgcttttctttaacatcattgacatgtgattgatgtactcgttgccctttcgagtttcgcccattagccactggagagcttcagctgctgcgtctttttcggcgctctttttgttggtacaaggatgccccactatttgcattccattgaactctacggttgctaggaactgacagttacttagttgcttagttttgtatgtgggggtattgtatcctgctcgggtgagtaacgtttggagctgacttttagagttatcacccccgggtccactttcggttcttgaaggtgcgaccggctgtgtactggtggtaacgcatgacttagtagatttgaggacctggtgaccaaatacgaatttgccttcgcagttgacctcagaaatcagcaaccgtacagccgataagagctcgtgatgggtgtttatggccattctcggattcagtagctgccatattccccagaggaatgaaattagtgaaacaggggatgagcaaagaacaaatcgagaaatctgccaaactaaccacattcaatttatactgagcgaccgaccataatggtcattatatggtcgcacagtgtaatgttcggtcgtttattcgaccaaacatgtttattttgctgataaaaaatttcataatgaatatttttaacaaaaactccaacaaatctaagtactcccaatgttttttctttccattaaacatttgtggataattaatttctttggaaatctacttactttgctttgaattagatcatcaagctctctccttacacattgatacatctcggccaccgcaggtttcatgaaaaattcgaggtatcctcccaacattttcaagtgtccatccttccaaagataaaagaacagattgttgctaagtcatcttgattagaacagtatagagaaagacagatcaagatgcatgatatcgaaatacttacaatatccccgctagatatgcttccaccgaataaaagaagcattgaatcattcacagctgttgaatcccggaggaatacagagttcacttttatcttttcgttgaaaacaagccatggataaggaattttagcttcccgggaattgactgagttctaggcaagccaaatgaagatgaaattaaatacaagcataacaagtagcatatccaagccaagcaatacattgaagtaatgatcgagaaatcataccgaatataaaagcacctggccatcctccatggtttttagtgaaaacgacttctcattatgctgtgtatacatttacataagttcacaggaaaacaacacagaagaaactattcattttttacttaaaaatggctattcttgtatattcacacacagaaggaagaaatacattgcttaccaccacggagcaaacccctggatatagaccgtagcatatgacagctcgaacgagatgttcatcatagctccatgcactgtagctggtgctattggagtcgaccaaaccagtatctctcaacagagaatagaactccatcctaagagaatcaattgctttcatcgattgtaatgagagaaagtttttccagcagtaatcataaccagcatattctctttcagcgtttttccatccctcgtatgccctgataagggcaaggtgatcactgtaatctctcgagaactgagattttgcagcctctgcaagctaaaagctcaaacacattaatgtaaacaaatcagcccctgaactgaaatcctaactttccctatcacttttagcactgttcggagaaacaaaatccattgttcttgtcaaattagaaaattggaatcttacttacatccttcttgtcaaatggtgttaagaaaggatctcggacactgagaccagaaacaacagtcaatattgggtcaaggcaattcaatatggcacctaacaagagcatctttccaagttttggctccacgggaagcattgttagataccgtcctgtcaacaaactcaaacagaatgaatctcttgatctaagaaaaagttatcttgcaatacaatacagtcctatacaggctaaatcgaatatcattctctacctaaaacggtcaaattttcattctcgtccaaggctccaataactttcaaatattcaatagcattttgcacctacaaacagataataaaactaattaaaacttgtcaagtaccagcaaaacttgttaaagcataaaatcataaaaaaaaatgaaaatgtaaaactccaaacacgccacaacgtaaaaaaacaaataaataaaaaatccacacaagtcaattatggaaggccttttaattattttataattagcctatcggtactataaacaacatgaaataattaaggtgatagctcttatgccaataattgctcaaaacaacaaaaagaaagacatatagcacttccgaaatttacttgtgtttgtgtgtagatagcttggtaattaccgctaataactctggtgactgcaaagccctggataagaactcagcaatgcttccaaggtttaaactttttatttggagacaaagagactgcaaaggtgtcctcaaaatttcgggtaattgatactccacaaaagcattatatacacatctgggatagagttggtagcattctccaggttgaacacgaccagctctgcctcttctctacaaaacacacacgagaaaaatgcccacatatttaatccaaggaatttcaataagtagtaatacaattgaaactagtcaatttgaaaacaaagacacaaaaacacacaaaacatacaacattgaaatcgtaattataagaatgacaaaaactgctctggccaagaaaactccagccaaggaaagtacaaaacaaaactcaaaattcagtcaccaaaaacgatacaaagatctctcgtatagagaccaaattttaagctagaaaataaccttacttgttgagcagaaactttggatatccaagatggaagtaaacaaggtgtgttattcagtgcatcatatgatgtctcttttgcctttccgcaatcgagtacaaaaacaacatcgttaattgtgatacttgtctctgcaatatttgttgctagtactattttcctcactccatcttcaggctcatcaaatattaacctctgtattcacatcccatgtcaataaatcaagtaagatactagaaagaaaagaacgaaaacagaaaaggaatagtaattcaactatcaagaaagatcattatataaaaagcaatcctcccgttttcacatatatagcaaaatttaagtcaagctgtgagccattttataatccgctagatcacatgcggaataaagtgtatacaaagaccgttaggatcttatcatgcttgtcccggttacaattgcaaagaaaaatccttatcatcatcacaattccatgataaatttgagagaaacataattacctgttcagaactagccatagagccatggcatgcgagcaacaaaactcgagtttgatcacccaacagaggatgcgccaggagcttatccttcaatgaatttatgtcatcccacccagtcataaaaactagaacagctccaggcctttcgttttcacagatatagcacaaaagatactcaataaaattgaaaccaatacaatcaggattccaacatgctaaagattctcgagtctggttactgtaatctttcaagtcagcagctttgagtgcatcctgagcataaattttacaaaggaatgagaagacaacaattaaaagagcaagaaaatcttatcttatcaataaaatttacaatgtactactacagacctcaacaacagaagcaatttgacttttcctttttctcggtgcttgtttgctcatcttccacatcttttcttgaccataatcgtcaatttgattgtaaggggttaatttgtaacccgtgccttcaagaatgtcctccagaaaatgagttctaactgggtatgtaaaaccctaaatttgaaagaagaaataaaaaaacattaagctcattgccccatccactattatcatcctactaactcgatattgtcacaaggaaaacttcgtagatgctaatacttaacaacgttttaccaacaacatcatagattatgaactttatttaaaagaggaataatcaaaatattattgccagctgaattagaatcaaaagagaaaaggaaaaccgaaagaacatatatcataagagaaaagaagacagcttaagaaacggatcaatcttcataagaaataatcttaaaaagttgatatttcataagtttgacaaataaaagaaatagctagaacaagtaccggaatgtgaagaatctgggcagtaccaaagtatgatgcaaaaagatctgcatctagagttgcgctcatcaaaatgaggcgtagttcaggtcgtcgaggaagaagatccttaagaacaataagcagaaaatctggcatcaaattatcactatgagaagttgcattttaaaatttaaattcaaaaatcaaaacaaagattttgcttaccttcattcattccgcgctcgtggatctcatccacaataacatgacttacacctttcaaacttctatcaacaagcaatcttctcaacaagatgccagtggtgcaaaatagaaggcgggtatccctccctttcacaccctctaaccgaaccttgtatccaacctttgacaaatgaagccaagaataagataacttaaaaaatttatcaaaacaacaatttaagttgcaagcatagcatcccaagaaaattgagaaaaacttacagattcacccaactgttcccctctttctgaagcaactctttcagacactgacatagcagatattcgcctaggttgtgtacatataatattacaagaagccccgtgaccagattctatctcagattccaaaacgaattgtggaatctgggtggtcttgccacaaccagtttcaccggaaataataatcacctgaaacccaaaaaaatttaaccatcacgaaacaaataatatacaagagaatctgttaaaaatagattctagccactaaccaaatgatccgatatgagatcacatttattattagcctatagagttaccacttaagggctgtaaaattgagagagacctgtgaccaaatgctttttggcatcaccactaggttaaaattaattcttccgaaatttatgagaacacttctaatcaaagtattatatctaattcacaagcaaataacagacctgattttgtgaaatagctgatagcactgcatccctctccttataagcaggaagacttttacgaaactccagcatttctctgccttcagaagattcctacaatgttttaaatagataataagttttaaaatatatattttatgcatactagagaccaagaatagtggcaagataccaaaaataatagaaaaaacattgcaaacataactacagttataatcaagattcaagaacagaagtaatagacagcttgacgaggaatctaaggatttgtttcagtatcctatcggttttccataaagacgaggcatatgaagaatagttgtttgctttaatattataaaaaaaaattgtacataaattcttacagcttggagtggttctaaacaacctcgcatcaaaacaaaataaagttgacttcttacttttcacataatttgaacctcaataaacttaataatgctaaatacattgtagttatttgcccaaaattttaatgaagaactgagaaaaacatgctgtgactgtgtccaagccaaatacattgacactcagacaaggctttgaaaactaatgctgtaagaaatctacatgctatgaagttcttgaccagaaagccagaaatctactctactaactcagattttttccactttttcagatttatttctctgagcaccggcgcataattatgcaggcagacaaaagtaatattaaaaagaaaaaaaggaagacctgccaagctcgttgctgatccctcaactgcatgcttcttcgccaaagaactttctccatcatacccttactagatgccagtggttcaggtgcctcaaaaagcccttcctcggtggcaatgctacagctactgcttgatcttgaaaaagaaacatctgaattattatccctactccaagacttttgagataggaacctgctaacgaatgattcaacccttctgagtaggctaagaggcaaagtaacctgtccagagtcttacaacctttaatagaagtctataagggaaaaaaattgaataatttaaaaggaactatagaaatgagaaaaatacacaagaacaacctagaggcataaagcaattagtgatgattttaaggtagaaaacttgtcaaacacggttatgtagcaaacatgggacatgtaaatacaagcaaaataaagaatgagaaagaatcaaacataattttgtagcatcaaaataaagttacaataatgtatagaactgcatattattaagataatcaagcatcataataaagaaaaaagaattatgaaaaatacctccctctgtggacgcttatcatctagatcaaatctatagtttggtagaggtatcttactaacaacaagaactcttgcatatagatggctgccaagtgtaaccatcaattagattttcaatccctactcttgtacaaaaacatgaaattcaaaagataacaaacatattattacctatagagtcccactttgctcgccaaagcagatatttcctcaaagttacgtctatcctttttctctctggaaatcaactcttgcttatccttgtctcttaaaagaatagttaagttcctcttccactgttcaacgctatcaaaaggaacggcaccctgcaaagcatagttttttttctgaagcaataataacataataaacatacattagaaataaaataacatctataaatttaatatagttttaatattcccaattgaagtacattgaccattattgaccatgaaaacattcacaacttttctctaaagagggtgcacaccaatcgatatttcttactaatactaactaccaaagctcaatcactgccaaggaaggagaaaaagataatctttctaccatgcttcaaataacacttcaaaacttagtgcaaaaagatagtctttcttagtgtttctatcacatcaaatcaacccttcataaaaaattcactcatttaagaaaataacaaaacagctaacttaatcaaagagaagaaccgattaaattcgatcgaattactaaagcattcacattgatataatttccaaccattctaagagaaaagtcagcaaaaatcccaacacgattttgctacaatttagctaataacacaatcactaaaacaagagcagcataagtacaataattgacaagaaaggagaaaaagataatctttctaccattttcaaactaacacaaatactcacattgcttaagcccaaaacttagtataaaaagacagtctttcatagtgtttctatcacttaaaaacaaccctccacaaaccatttaaaattcactcatttaagcaataaaaagaaacaaaagctaacttcatgaaagagaagaaccgattaatttgatcaaattactaaagcatattcacattgatataatttctaaccattctaagaaaaaagtcaacaaaaatctcaacacaattatactacaatttagctaataacaatcactcaaaaagagcagaaaggaggaaaaaaaaaagataatctttctaccattttccaaataacacaaagagaagaaccgattctttcaatcaaattaaccattctgataaaaagtcaactaaaattattctgacacaaattaccggttgggaataagaatcgaattcacgatcagacccttcttcggaaacaccatcgtcgtaagaagaaatgtagggcgaattgggcttatggaagtggtcctgctgcggctgaaagtaagtagcaccagtggtaatggcggcggtctgattttccttgaagttggaagaaccaaaagaagcagaggaggtataatttgggcaggtaatgacagagcgaagtcggtggtgaggaggaacgtaaacggagccgtacgatggtggaggtggtcggtccttcattggggggattgggtttgagggttagggttttggaagaagaagaagaactgaggaagaagaagaagaagaagaagaagtacaataagatgaagatgttaagagaaaaacggtgtcgtttgagttgttattcaactgttaattgtttttgtgaagagaaaaacggtgtcgtttagctgggaaggaaagaagtttgagttgttaacttgttattctgaacttgtgaagagaaaacggtgtcgtttttaggtgaaaaggaaaggaagttttgacttttgagttgttattctgaactcttttgttttgtcaagaggaaaacgatgtcgtttagtggaaaggaaagaagtttgagttgttagcttgttatgttattctgaactgtgtagttagaaaacggtgtcgtttttaggtggaaaggaggaaaggaagttttgacgttgttattctgaaactgttttttgttttgataagagaaaaacggtgtcgtttaggtggaaaggaaaggagtttggcgataacggtgtcgtttaggtggttttgagctgttaattgttattctggtaacggtgtcgttttgagttgtcatatgaactgagttattatttgctatgtcagagtgttgatggttattaaagtacagctgtactgttttctgtttctttttttagattcgatttcggcctggtatttttttttttttagggaaattatatattattctttttttatataaataaaattagatttttttttttgaaaaagataaaattagatattattcgataatgtttttttagctggaaatttttttgtctcggttattttattaggaaaattaaatgtatattttttcgtatgaggataattaaatatattattctttgggtattttagtttttttaggaaaattaactatttaaattatgttttaaccatttatataattactagcaaaaaattacgtgcgaggcacgtatactaaattttatgttaggttttttctatgttatttgaaagtgagattattattgaatactgaatgcaatatattagtgtttaagaaatcttaatgatttaaatatgttcttaagttaatccaaaaataaactaa

SEQ ID NO: 262008 - DNA, 567 bp, Cannabis indica
tgatgcaggaggggtaggagccccgccactcgccggagtactagccgactctgacatacacccaactgcgccctcagctcgcagtgccttctccaccatctcagcataggtggtcttgtcgtcagtggtgatcatcaagtcatgtttaatctttgcatttaacccgtccaggtacttctctttcttgctgaagtcggttggcactattcccgaggctaacctcgccaaccggtcgaattgagtagtatactctgtcacgctcatattctctcgctgggtcaggtgagagaactctttcctctgggcgctatcgacagcctcgttataatacttggcgttgaagagttcatggaacctttcccaggtcatggtggtgatgtcatggatctgagacaccatgtcccaccagacaagagcgtctttctggaactgaaaggtggcacacaccactctgtcgttcccggtgacacccataaagttcagaattttggtgatcaccgttagccactgttcgtccttcatcacatctggacctctcagaaagactggaggtgcttgcttccggaa

SEQ ID NO: 262009 - DNA, 931 bp, Cannabis indica
ttccaaattactaagcgggctttacatctcatataagtacattgaaaataattatttctacatatttaatttcacaatatatatatgtatattatattatatctaatcatatatacaattaatacacataactcatatttatatgttatatattatatatgtaatatatatacacatataaacatgttataaatttaaatatcatattctatatcactatatataataatatgatataaactcataatcacatatatatgatatatatatacatatatataactcacatatatatatcatatatataactatcatataaaatagtaaatcataatattcaccattatgctcacccataaatgactttcacataaaatattttatccttgtatattctgacaatcttgatttatctcctcttccattgaaaaggaataagcttttgattgttagagattttattacaatggaagataaatcaagatatgtacaactaaattgtaaaatttagctgtcttaaagtctgggaccagttgtgcctttccaagtcccgtggggggcttggctttaaaaagactgtggagatgaaccaggcattgctggccaagtggggttggactctgcttactgaggaacagtcgttgtgttgtaatgttctcagatctaagtaccttaaggataaacagttttttgactgtgaggttaagagctccgattcttggttttggagaaatatcgtgcgatcaaaagagattctaagaaaaggggcctgcaagctaatatcccatgggagagagaaaagtatttgggatgacccatgggttatccatggtacagatttttatcctcaatccaattatcgtcaatagcggggcttggagaaagtgtcagatttacttttacctgacggaaattgggacacacccaagct

SEQ ID NO: 262010 - DNA, 785 bp, Cannabis indica
ctgagtactttttcagttttttccgaaccgttgggcgtagtccgcccagcaggccattcacttaacagtaaatgttctttcaatacataatatggtcatccgacctggtactttattgatagtatttctagaatgttccccattccaataccatggtactagaacaagttgcatttttttcatcatacttacccaatttgtatgctcatgattcgagaacttcgaccacctgatatggtccttcccagttaggtccgagtacacatgccatgctgtcttcggtgtatagaaatactcttcttaggaccatatcacccacgaagaattttcgagccttcacttgtttattgaaataccgagctacttattgttgatggactatcaactttaagtttgctgtggttttcttctcttcgatttcatcatgtgattcggccaagagtatgtgatttgcttcttggttgtacatcaatcttctgtgggatggtggctcgagttctacgggcagcatagcttcatatccaaatgccatggaaaatggagtctgtccggttgccattatttcagttgtttggtacgaccatagaacttcgggaagcttctctggccagtttccgttagcatcctcaagttcttttctttaatgtatccttcagggtcttgttgactgcttcaacttgaccattttcttggggatgcgccactgcagagaaactttcgatgataccatggtttgcacaaaaatatgtgaaggactggctgtcaaactgtttgccattgtccga

SEQ ID NO: 262011 - DNA, 1365 bp, Cannabis indica
tatgtgggacaatatccacaacaaatagccatatcacttgcgggcaagtgatcttatccgatctgcacctacttatacagacactctgatacggttcaagattgatgagtaaaaaattgtcccacatagaataaatggtagagaattgaaccatatataagaacatgggctactccactcatcatcaattggttttgagatggaaccccatgattctcaacaattattgtacattggtatatatcttctgttttcatgtaaatatattttcctttacgagagtacatgcacatactctttgccaaatacatataatcatcttccaaggttatgagattattttgtcatgtttttatttgtgagttcatcatcaattattcatctatcaaaaatatcaattagaattttaagatatacataaaaaaactcaaaataaaataaatattaggtaatgtttgaaatattttctttcaacttaaggcccagctcatactaatatacaaaaagaaaattggatatttttctctttgttttgttgtctttcattttcatgtaaaaataattttctttacgagtatggttactattcttcccgagttataagattatttattagattttcattcgtaagtttatcaattattcgtctataaaaatattaattatatatttgggacataatttttagtttattttaattttatatatttttaaattgtaattcttttaaaatttgagaatgatttaatatttaatattttaaattatttagactaatgaaaacatgtcacgttcacacaatagcaatgctaattgacatttaacgttgataaattggcgcctcaaatttgaaagtagaagtaataaagttaagggagtattttcatagaaaaaaaatttaagaagagattaagtgtataaaattataaacaagagcggggatttaattgcaaattactccaaatctaaataataaatgataaaatgaacataatattgttagagttgatgccctaaaaagttctaatagacatttgattttatataagagttgactaatttgaaatatgtttgaaggtttaaatataattaatgataatttatatataaatatataattttttatttcattacatgagactatgatattgtaatggtataagagaattgagatcatatgttatgaataaaacagtcagtaataattaaaatttagaatctttaatcaatgtgttctagtatggtaattgatagccgtcactcgacatacgagaaattttgattcagattgctgatgtggcttgacatcttggtaaaatgtgttgtatatatataaaaaaaaagaaataatgtaatgacatagcc

SEQ ID NO: 262012 - DNA, 1784 bp, Cannabis indica
atatatatatatatatcagaattagatatgccaagaatgcattctcatcaatgattatcattacattgaatattattaattttaaaattatgatattaaaaaaaattaaaaactaaaataaaattaacatacgtgacttggcacgtaacatctatctagtataaatataaacattaatgtaaccgaaaggtgagcattatgattatttttaaatgcagaagtttgtgtatttattatatttaattttgttaatattttttcggtattatatttagagaaatagcatttttgtaaacaaaatatctaaacttcagctaccatttcattggaaaagaatattggtatttaaaatttataaactatatcagcattgctattaggcactagtggtgcctagcacctttgcgatatatcgcgttgcgaatggctagcgatactccctaaaagctattatattaaattatataagacccgatatttaattggactaatagcgatattgacgctaggcaccactgataccctttagcatttctggaactatatataaatgtttttggtaaaagcaacaacaataatgactacaaaacaatgacaaacgacacctaagataaaacaacaactaaaggaaaagtcttgtaagactataacacaacaaaaattcctttaaaagaaaaagaaagtacaataaaaaacataaaacatagtaatgctaagcctttacacttatagtattgctacaaagtaatgcaattattgcttacatcaagatttcataagggaggaaaagaatgtgatgttacacggtttcttaatcaaagagactctgttgttgaatggtaagggggataactaattcttaagtataataattaaaaaaaaaaaggagatgataaaagaaaaactatatttattcaataatatattttattacacaataattaaattcaaactttgtagaagataatgatctacaaaattcaaatagaactattttaagtggacaaaacaagcgtttgccaagtaaaaacatatgcacacatgaatcatgacatgtgattattattattattattattattattattattattaagatatattactatataattagcaaagtacgtagaattatactactttgacagcatatacaagacgcacagaatgattaagagcatcagaccaagtaatatctccaaaattatatccattagaagcccctttgccatcaaacgacacctcaaaagaaaccttgtttaaactgttactgaacacaatcgtatcaggattaacctttacaactaagcctttgggagaattgactcgagcagtgtatgtcgaggtggagggtcccacattggttacagtccttttgacgattgtaggagttgattgctgtcgttttagattgccaatagagatggaaggataattaatgtttgtgatgagttctggacgtgagtttttagggcattgtaagtttactcccttaattacagattttatcattgcctctgtataaccgtagtaacacaggaaattaaatagtcttgtgtggttgtattgaatcaaaaccctgggtctacaactttcatatggttctttcatatggtttaattctccacatccagcctcatgtggacttgccataacgtttgttcatttgtaatggttttcccctgttgtcgtatgcacttgctagtttgtgcacaataaaaaaacaaaacttcagctcatatatatattttaattttatttaataatttaaatatttatacagt

SEQ ID NO: 262013 - DNA, 2915 bp, Cannabis indica
tgtgtgtattgtggtgatgggcatacctttgagaatttcccttcaaatccagctttggtttgctatatgggtaatcaaaatttcaaccgcaacaacaatccatactcaaactcctacaatccagcatggaagcatcatccaaatttttcatggggaggtcaaggggaaagttcaagtggagcacaagcacaaggaaaacaaacatttccactaggattttctcaacaacgaggacctcaacagccacaccaatctcaaatctctcaaacaagtttcttggagagtttattgagggactatatggccaagaatgacactgtaattcaaaaccagacagtctctcttcagaatcttcaaattcatttggggcaattggctaataatttgaagaataaaccacaaggaactttgcttagtggcaccgaaaatcctagaagagatggaaaatagcattgcaaagtggtaaccttgagaagtgggaaaattctggtgtcaaatatggctgtaacaaaaggcagttggagccctcttcaatccaaaaagagggggaaacaaaaaaaactagcaatttcagctgctgaaattcccccagtagttacagcatatgatcagcattcaactgcagaaaagcatttacaaaagccacctccaccttctccttaacgattcaagaagcaacaagacaattccagagatttcttgatgttctaaagtagctccacatcaatataccattaatggaagctttggagcaaatgccaacctatgtaaagtttttgaaagacatttggacaaagaaaaggaggcttggcgagtttgaaactgttgctttgacagaggtttgtagtgccacgttgaaaagtaaaattccacctaaattaaaagatccgggcagctttacaattctaatttctattgggggtcaagatgttggaagagctctttgtgatttgggagctagtattaatctcatgcctatgtctatttttaggaagttgggaaatagagaagcaaggccaaccaccgtcactttgcaaatagaggatcgttccatggctcatccggaggggaaaattgaagatgtggtggtgaaagtggataagttcatttttctgattgatttcattatccctgactataaggttgatagagaagttcctattatttttgagtggctattccttgctaccggaagaaccttgattgatgtgaaaaatggggaactcactatgagagtgaatgatcaaaaagtcacttttaatgtgtttaatgctatgagattcccgaatgagattgaagaatgctcctgtttgagtgtaattgattctattgtggctgaaagttttcacaaggaagtgtggaaagatgaaaggttgataacttgaagagcttgaagctttgagtgacaatgaagaaacccaagttgcttaggtagagccaatacaacctttccctaaattcaagagaccttttgagtctttagagttgaaggaaagcaatttcaagcctccaaaaccttccatccaagaaccaccaaagctagagttgaaacccttgctgagtcacctaaaatacacctgcttgggggagaataaaacactgccagtaattatttcagtgtggttagaagctggagctgaaggtttattgctggaagtgttgaagaaacataaaagagcaattgggtggactatggcaaacataaaaggcattagtccaatgatttacacacacaagataatcttagaagcgagttgtagtaattccattgagcatcaataggggttgaatcctgtcatgaaggaagttattcgaaaagaggtaataaagtggctggattatagtattgtgttacccgattttagataattaatgggtcagccatgttcaatgtgtgcctaagaaatgaggaatcacggtggtggccaacaataataatgaattgatccctactagaaccgtgactggttggacagtgtgcatggactatcggaagctaaataatgcactaggaaggatcatttcctgctgccatttattgaccaaatgttggatcgtttggcgggtaaagagttttattgctttcttcatggttatttgggatacaatcaaatttctacagcgtcggaggaccaagaaaaaataaccttcacttgtccatatggcacctttgcctttaggaggatgctatttggactatgcaacgctcccgccacttcccaaaggtgcatgatggcaattttttcagatatggcagagagcattcttgagatcttcatggatgattttttagtatttggggaatcttttgacacttgtttagctaacttggagaaagtgttgaagaggtgtgaagaaacaaatttagtgttgaattgggagaaatgccactttatggtaaaagaaggcatagttttgggtcacaagatttctcacaagggtattgaggtggacaaggctaagttagaagtcattgaaaagctaccgcctcctaccacggtcaaggatattagaagctttcttggacatgcggggttctatagaaggttcacgaaggattttttaaagatttcaaagcctctttgttcgttgttggaacaaaaccgaccatttgagttcaccaaagaatgtaataatgcttttgtgactttgaaaaaggcaatggtgatggccccaattattgtagcttcgaattggactttgccatttgagttgatgtgtgatgctagtaattttgccattggtgtagtactttggcagcgaagaggaaagattttttattctatttatgttgtgataaatccaacacgcaagtatacatatcattttaacaagtaatactcaggtaagtgagatcgttcccatgaggactgtagttaagtaccaatcaaataaattcttgtttctatttggca

SEQ ID NO: 262014 - DNA, 555 bp, Cannabis indica
gcttccttgtctcgacttcgctggagcggaatggaagcgctagggttcggcaaattgtccgagccattttgattaataatcccggaaggccgattccttccaataggtacactcttaattaagctacagttaacgcctgcttaccttgatacttttcgctcgacaattcctcttttcctcgtgtttggtttggtgccgagataaagaaaaagaaagggagagaaaatttaatttaagacagggaaaatctttgatttacttaatatcaagtgtgtctctgcatgtaaagttaactatactttacttgccgcgtggcatttctgtctttgactaattgactcgttttaggtgattcggttctggggaattttttattttttcttttctaaattttttaattaaatataatcgctacctcaacagatacagtacacaagtatagcgttgttcttacaatgatttttaattacacaacttttttatacgcaaaaatctacaaggagtagtttggattgattgttttttgctgaacagtttggattgattgttaatggt

SEQ ID NO: 262015 - DNA, 646 bp, Cannabis indica
tcttacgaacgatttggttaatttgacttatatatttatgtaaagataaaaatataaaagaaatggaggctaaaaatttgcatgataataattaatgaatttctacctcgaccaactcttttcttataaggctttaatttaccttaaacccaaccttccacactattggagtttcaataaaatatttcactcacaaatattaatgtaataatatataaaaaatgagtatccatcctgttgggctttgtgccctaaataaaattctatttcaatgtaatcttttctatcaataaagaaatagatttattttcattacttatttagtgtgttatttggttcatgtgattatttatttgtttatttgatttataaattcatctaaattcttaccacactgatattcttgtttattgtgttgtcaacacagtggaaagtaatcaagattgtgtgattaaatgtattcctataatttgtcagtacacaggatttaactgataggataatcaacaatgtagtttacttacaccttggataagtgttatgtcctttctagggcattggttaaagtaagcttgggttgaatgtatggagtatgcatcgaaagggactgatattgaacttgaataagatatgataaacttaccgt

SEQ ID NO: 262016 - DNA, 644 bp, Cannabis indica
ttttttttaaaaaaaggggaaattacgcattatacgaaccttttctaatttttttccgtttttaggttttctttttaaaatttttacttctataaacatttaatttcataaatatatctttattgagtttttaattttgtttttaagttttgttgctgcggcttcggcttcggctagagcaaaagggaaagaggtttggcaattgagaaaagtaataggggtattagagatggagctaatcctagacatagaaactggatgtgagtttttgtgtttttataatgtttcggttaattgaatttcattgggtgttttataacttattgtagtacgtgaagctttaatctttttgttgttttgttttgaaatttagtgatggagatagagataaagacaaatacaatgtagaaagttctctgggaggtgagtttgtttatgacattaattgttgttgctttaatctctattttcattgattataatattatactatcatgacgtcgtcttcggaaattaatggtggtggtgggactttgactgtaatgtaatggatcacaagcttcgacccatagccagtgaccgaaccgaagtcacacctcgtcgaacgaatgaatgcccttactctacgttcgagttctgaaagc

SEQ ID NO: 262017 - DNA, 535 bp, Cannabis indica
aaaacaacactaaaacaaataaaaaaaaaaaataattaaaaaatttcttctgcacagcctcaacaccaaatgcaacagagtctatatttgcaaagtcaattctaaaaaatcagaataaaaaaactacactaactcttatcttttccaaaaaacgtgactaaaaatttcaaaaattaaataaaaaaatgaaaagaagatgaagaagaataatttaacaagaaaaaaaaaaaaaaacttatatattaatggagaaagatagagagaacttgaggaagcaaagagtgaaaaaaaaaaaaagaatgatgaataagaaaagagaataatgaggaagtgagattaaagtaaaatgaacatgtattaatatttagggtatcaaatttttcatcatcaattttaattaatgaaaaataaaacaaataaaaaaaatctgtcacaacacaagtcaaattacaattttatattatctaaaatataatacaattttagttaaaaggaaaaaaaaaattgtcactaaagtgacaacacaaagtcacat

SEQ ID NO: 262018 - DNA, 1139 bp, Cannabis indica
agttgactaacagaaagcaaattaaaagacaaattaggtaaatgtaagactaatgacaaagtgagcaaaggtgtaggagcaacagtaataaatccaagaacagaagatggtgatccatcagcaaaggcaacaatagaagtgggactatgagactgaaaagtggaaaagatactggaacaacctgtcatgtgatctgtggcaccagaatcaatgacccatgatgtgaaaagaaggcatgcattagagttacttaaatcagcaatcgctgtgacaaaaggagatgaagacttaagtgattcctgatatctcgagaacgtggcaaattcattagaaaaaataaagatcaattagtcagatgcatcactggtgcttgcaatattagcagagtgtttttgcttatttttgaactataaatttcttcactcaaacttggtgtgacttggtttcttgcaataattgcacataatgctcccgaaatctagtgttcgactattaggtccttgtgaattacctcatttgtatccacttgaagtagagtttttccatgatgcgaaattgttacgactcaccaaggcgttattacgaggagttaaagaggtagtttctatgcaaaaaacacgagtaaacacatcttgtaaagagaagacatcagaaccagaaagaacctgttactttgcatagtcaaatacaaataagaatccaacaagaaaactcatgatagccaactgctctcgttggcgctgttgaaccttcacatcaggactaaatggcaataacacaataagctcttcatacgtttttttaaatgtcataaagtaattcataagagattaatcttgtctctctacacgataataactttgcaaacatcatacatatgagataagttgtcttttctagaatataaaaactccaagcaatttattagttctttaaacaattcacaatgattaatcaaactaattatctctagggttgtacataaacttttgtaaaccgcccaactcgaataactcgcccaaactaaaccgagataacccgacgaaaaatacaaaccgaaaaacccgacaaaaatataacccgcccaatctttatattgggcgggttgaaaataataccaactcgcccaatcaacccga

SEQ ID NO: 262019 - DNA, 695 bp, Cannabis indica
ttctcaaataacttatgcatgttctaatttatttttcatcgacatgctatcgacaaattgtcgacaaaatgtcgataatggtcatcactaactttttggtagcctatcgacatagcatcgatattctatcgataaagcatcgataacatctggaaaactcagatttcgactgaaaaccagatctgtcagatctcaaccatttcagaccaaaaacaccagttccaacaaatacgacacatacgaaagcaaactacataaagtctaacaaaatgcttaaaaagaaaaataattttaaaaaaaaaaaatctatttttttcttttcttatgtaaccctcgacaacttcttctttttcctttcttcttctactaataccaccaccaaaaatccacttgtgctcctcctcctgaagcgttctaacctagaaaaaagaaaacgagtcgaagatgaaccaaacccaaaaacaaaaacccacaaatctcaaacccccaaattgcaaccacattcactcaccggcgaactagacggagcaaactataaccaaacacagtcgacactttctccctttctcagtcgcaagaactatactgttcgtctacttcgtctcctgaaagccgccgaagatgcattgtcacaaaaaactcccccattcatctgttgtgtttcgaagttggttcgtctacttcgtctacccttc

SEQ ID NO: 262020 - DNA, 927 bp, Cannabis indica
tgttcatacaaaaatatttaactcaaatttaactttttcttttcttattttttttgctaaaatgcttttttttaaaatttttttttacccatggaacaataaaaatgagagatttttttaattagatagaaaaattaagcgtagaaactcaaaattttctaattttattcattcatgggtaatacccattaagagtgtacccatatatactagcaaaaagttacgtgcgaggcacgtatactaaaatttatgctaagtattttttactttatttaaaagtcaaaaaattaaagaaaaaatattattagttattaggtgagataattattatgtatatctagataatataatttatagttttaacaattttaaaaaaaataccagatgcaatatattagtgtttaagaaagcttaataatttaaatatgttcttaagttaatctaaaaataaactaaaaattaatgttcaaatacttaaggaaacacaacttaattgttgtgtgtaagataaaaaaaaattaaaaatcaatctttaaattgttgataattgaagataacctctgtctaaaaattatagataaaaaaaataatgatactcatgggtagattttaatcttcctttgctccaacagagacaatagtgtaatttttatattttacacttttcattctcgttgagtccgcgtataattgagttgtccattttttcgttaataaattgaatatggtagtgtcgagtcacgtaaatattagttttatttaagtttcaatgaatttttcattttaaaatttggtaactaatgatgaattattatttgaacgacttgataagtataccgtgtgtatataaacatatgatatgcacattgttattaataataaataataagctaattttaatatattcatactcatatagtaagttaa

SEQ ID NO: 262021 - DNA, 1802 bp, Cannabis indica
gggaaatagacacaattgacagaacagttttagcgtcgagcaaggagtatagtattgatatgatacccaaggtatatacatatctatatatatatatatatattattatagtattgtaattgaatgaaaacattggctatattagaatggtttaattcaattatatattttttattcttatgtagttcatgatggcaaatggtgctttggttcgtgttcttatccacacaaatgtcaccaagtacttaaacttcaaggctgtagatggtagttttgtctacaacaaaggaaaggtatactatcactttcaaaatataaactactttaatatctcttacctatgtttgatagaggacaaaagggagtcgaaagaaatgtttggaaggaaaagtggagagaagtaaaaaaaaatgtttgtttggttagaaagaaaattgggaagaagagaaagtagatagaaaaatttgttgtgggacctactaaaaattttctcctttaaattagagagaaaagttttacaaaatattaatgtaaaattactagtttatttttgtaaaaaaataaaaataaatatactaataatttaaaggtaatatagtaattttataataatttaattttctttcttacttaccaaccaaacaactaagaaggaaatagattttttattctttcctatattttgttagtgaaactttgagtgtacattaatttgattggaagaatgaaaataagaataaaaatgagtagggtaactattattttggaccatttgttttgtaaaagttattaattggatcctatcctgtattttttaaaattgtacaaataggactatatgaactgatttttttcaaaataaaacttaataataatctgatctagagatattatgacaaaactagttacattttctgtatatgttcgtgttaaaaatcgtcttaaagttgattatattaaaaactaaaattgttataaattgagctcaggttccatttttaccatttaacaaaatagaaggtctattttgtcatttaacaaaacagatggtctaattggtaacttttacaaaacacaaagtctaaaatggtatttatccaaatatatttaatatgtataaaataaataaaaaaaaaaaacaaaacataatataaaaatgtaatcaaatttgattttatttttcttcattttattactccaaccaaacccaccctgagagtaacaataaatttctttttttgttaattagatatataaagttccagctactgatgttgaagctctgaaatctccattgatgggtttattcgagaaacgtcgtgcaagaaagttctttatttatgtccaagactatgaagaaagtgacccaaaatctcatgaaggactagatttgaacaaagttactgctagagagcttattatgtatgtattaacctccactaatgcatgtttaataattagatttggttttttaagattttcaatattgattgaatgatcaattaataattagatgtttgaatgatgtaataatttaattttgtgaattcttttcatgtttttgtaggaagtatggattggaagatgatacaatagatttcattggtcatgccttggcacttcatattgatgattcttacttggatgagccagccatggaatttgtacaaaagatgaaggtgtgttttgttttgctccatctttctcttataaccaatctaagaaatttaactttatagataagtgctactatcaacctttttctcaatcttcatgttcaaaaatatatgttagaatatttt

SEQ ID NO: 262022 - DNA, 1082 bp, Cannabis indica
tctaagatcctagtaaaataattccaacagtggaagggttggcggatgactttgatgcttagtggtgtttggtgggcagattactgtctgataaaccggcaaatttcaattcactccgaaacgtaatggcgtcactgtggcgttccggtaagggcgtgtatgtaaaggaattagagaccaataagtatttgtttcagttctttcatgaagtcgatatcagtagggctcttgagggcacaccatagacattcaacaggatacctttgatcattgaaaggcttaaggaaggtgataatcccaagctatgtgtattgaatactatagaaatatgggtccaactttatgatttacaagtagggttcaagagtgaacattatgttttaagagcgaacggggcttacgtcggaaagtttgtgtcttcatgcatgaatatcgatcgaccgacctcttaaaaggagaatgaaaatatttaagaacaaggaagagtggttatgggaaaatttcaagtatatatgaacgggtgccgacgttttgctttatttgtggctatataggccattcggagaagttttgccatagattgtttgaggaatctctggattccattgtcaagtcgtacaatttgtttatgaaggctcccaatcacaaacaacatcgtcaaatcggcgcttgatggctccgggatagtatggggcagccaatggagggtttttctccggccatggccaacctgagcaacaagcaaccagggtcgggcttcacggagaggacgataggaaatcgcacgtaccagggagacggaaatctcggagttacaggtggttatgggcggtcgaaaatcaaggagaaaaaagtgggattgatattaatgagtcaatatcaggaaataattttaaatttaaaaaagagaggttagttgtttcaaatcacatttttatgcgatgtggtgtggtgcaacggtttgtgcagtatagacagtttaatgaatacccctaaccactaattagtatgctcttattagtaagtattaattttggtattgttataaaataatataaagtagatgagaagaaagaagaaga

SEQ ID NO: 262023 - DNA, 461 bp, Cannabis indica
aactctagctacttctagcacaatcgagagagagaaagagaattgaagagagagaagggttttcttccaagtttcttcaagttaacccatttactcctattttaacttaattaaaataaacctacaacaaataataaccccacaaaatgaaacaaacccaaaccaaaatgaccacattgcccttggcaagaaaaacaaatactaatggagcaaaaaaggtaatttggtcattttctaaatctcgacaattaaccaatatttttaatgcctaacaaaaatacccagctatctataacattctaaaccatatgaaagcgtgactctctaatggtctaacatctcgttccaccgctaccaaacacaattacagaaaaacgagaaattcacataaataacataatagatatatattgaatctaaataaatctccacaaatacaaaatcatacacaataattaaat

SEQ ID NO: 262024 - DNA, 4962 bp, Cannabis indica
gcacatctttgaagcaacatcctcttatttggtcagctgttgtaagtattatgaataaaatatcagaattcttaagctaatcattgaaagtggtcgttatatgctatattggtattcataactaaatacaattatattataaattataaaataataaaaatggcataaaagtaaagtatttattgtgatgcaaattttgcatctatattgtatgccaaacttttggaacaccattggaggtgattttttgccaagttagctgtattttatcaatgcatgccatctccaatggagactcttatgaaagacacaaccagctttataagtgtacaattggggtaaggcttatgagttcaagttgttgataacttcaatagtattatttgctaaattttggcaatcgaaaatatgacattcatagtcaaagatttgtatcattctggatggaaaacctaaatttaaatggtgattaattttatgactttgtacttgcaacttgcaagttacttaaatgctatgaagttcgaacatttattttttttttaactaagatttttaattttatagtttttaaacgttttgtcgctaatattattaggaaaacaattgaaggaaatatcattttctgctggtttattcttgtgtaaataatatttacaattcattgtttggtttttggaactttttcctctttagaatctgcccaatgatgcctacaagctacttgctgttccttcgccaattggcggtgttctagtaatttgtacaaatactattcattatcatagtcaggtatgtattttttgtttgtttgtgtacatttaaggttcgagtaaaattgacttccgatttgaaatggtctgatggatgaagccaaccttgtgcagtcaacctcatgcgcattgggtttaaacagctatgcagtttcggccgataacaggtcaaactctacataatgcccttcattatcgttttctctttatttaattttttataaataaaattaattatgaagtgaaatatgctaattttgagttatttccttatacgatgtataaattgggatgctttgtattattcttttttattctcgttagtttttgttttcatacattctatttttgttttcttatgttttatttcagtcaagagatccctaaatctccttttagtgtggagcttgatgctgccaatgcaacttggctgtcaaatgatgtggccttattatcaactaaaactggcgagcttttgttgctgaccctagtgtatgatggaaggtaattgtaggcatcgtactttagttgatttttctatgtcggctgatgaatccaaacttgtgttttatccttccatctcacctacatggttgattaacttatttatcccttgtttccaggagagattcatttaaataattgaggatttcttatttttttccttttctaatgaaaattgatttttgttgttcaccaactctgttttacaactatcatattattataatctgcagggttgtgcagaagcttgatctttcaaagtcaaaagcttcagtactgacatcggttagtcataaatgttagaatgttatgctatttgttattgttagatatgcatattgccagtcctttggacttcatttctgtaataacaactgcagttgcatctcacaatctgctaacactttttctatattttttttttggtaggggattacaacaataggaaattcattattgtttctaggaagtaggttgggagatagtttgcttgtgcagtttacttgtggattggggacagcaatattgtcttctggtttgaaagatgaggtatggtagaacctaataaagttttctcctcttaactctagataacattcacgattcatctattcctttttttagtatttatgatttcgccacatagggtctcgtggggtcatatgcttccatcccactggattttatgaacttatgtaagtgacatatttattgattattgcatcaatatatctggttatttgatgtaaaataatttaagggtgtttattttctgatttactgagttatttgagtttttttatactgtgattgtgttcttattgttgtttctagtatgacattcattcacactttccttgaattatctatgttttgtgctacttttcattgtaaccacggttttcctctaccacatgtgaggcttttcaacaaattagaatcggggtcagtctaagacaagtgacccttttctccttttcgaaaaaagaaataaatatatctttgtggcctagaaataactttctaaacatatgaaatagctaatgaaatccaatgagaaaataaaataagaatttttaggatgtacttctaattttccttggattgtaccttttaggggtcaggtctcactggtgtagaccttagcctatacaaaatgagattctcctcccccttcgaacactcccttttgcttttggaatggattgaatcggttcacaacattatgtttcaccttatatctacggacggagggacttaggccattgtgtacgcttaagccctcactcagttatatgagaaaacttttatattagttagctctatttaagtctttgtttgactataaatgtgtataaagtcctcactcaattcggtcatcatacccaattccaaaggccaaacataataaattataccactaatatttaaaaccgcatccacatttaaatgaaagtaagaagtcctttgattcattttttattcaagttctcttggaaaaagaaatccaacccctcactgagcggaaatttgtatttcatcttatatcatcattaattaactaatggtcaacttagtttttgatcctgtaaattagttgtttcttgataaaaagacttaacaaatgggagagattatttgtgatatgcatatatttattttttagttgtgaaaaatgaatacacaatagctggggtggactataatgttttgctttggtgtgtcattgtgagtataaggactaaggttttgtaatagacatcctgtccgtttttaagatattctgaatactttatgatatcaaaaataaagttttaaatagtcttttgcatgcatgcgtgtaagttaaaatactttatgatacataaattattcagaattttttaaaataagcaggatgcttagtataactataatgtacaccataaattactttgtaatttctttactaaagacaagaaatgcctttatggtaggagcgaaaaaaaattgatagcctcactgaaaaatattttctgtctctgccactggtttgtgtttatctatcattgacttaaagttctaaaacatatatggtgacatttaaactaaatctgttttgcgttctttcttttaaccataacttttggagtttcttaaaattatccaaaactttgcttgaaactcttgtttctctgatgatactttctgtcgaaactaacatggtcttcttggcttagtagtatctgcttcttaatcacaaatactatttatgtatctctgtaaattcaatttgctgttaaaatatttttagataacagtataacactgtttcgcatttttcccagtaattagttttgagctctacttttccagtaccttctgaaattttagttaaaacttaaaagttactgcttgtttgtaaatgtacaggatggagatattgaaggagatcctcctacggcaaagcgattgcgtagatcaccctctgatgtattgcaagatatggcgaatagtgaggagctatctttgtatggttcagctccaaataactcagaatcagctcaggttatttacaattctgggatgacttcactgggttactgttcttcccaacttaatacctgttgtgattttctttgaaattagaaagaggagggaagaagattaatgtggtacaattacaatcattgtaccaccccttcttcattatcggtacaagtggtggtgttttgcttaataaattacatcttaaaactggatccacataaaagcaactttcttcgaacttaagggatgctccaaattatgtatttcccaacaagtaaaatcaattggttttgcaatttagtaatatctactatgtacattataagatgagcctctttttctcgaagtcgttcatgtgtgcatcattgtagtaataactacatccttagtctattgttacttgttatgaaagacttttggccatcgattttcttctcattcttagggcttttaaattggtgatttactcaaatttgttagtattactgtgaggttaattgctgcatttgtggcctaaagttctgaaatacatcctattccattgtgattgcagaagtcattttcatttacagtgagggattcattgataaatgttggtcccttgaaggacttctcctacggtctacgtattaatgcagatccaaatgcaactggaattgccaaacagagtaattatgaattggttagtttttatttactatgccacgagttatattattcctcctccactgtataatgaacgtagcttattatccaaagaacaatgatgtatgttaggctttctaccttctgatttccttggaccagttatccaaaatgtagaatttactagtatatccaccgaaacatgaatatctatcctaacgagttttttgccatattgccttgggtgattcttcaggtttgttgttctggtcatggaaaaaacggcgccctctctgttcttcgacagtctattcgcccagaaatgattactgaggtctgatatctttcctttactgtgagttgtcattggagacaaacaactttcaattttatatttgttaagtactctttgcttttaaaattggtccaaacctcgttttcaactatgggatgtacatagctgttaataaattgtattatttggttatcatatattttattttatatgtat

SEQ ID NO: 262025 - DNA, 597 bp, Cannabis indica
tatatttaaatgtacaaccagtacatacaataagctatttcttattactttcataactagataaaagttatacatctaggtacatacagatatattttactaccactagtacaaaaagtataattcacgtcggtttttaagtgtcacttaaagaatttatgtcggtttataaaaccgacgtatataccgtagtcgcaaatagttttttattagcgacatttttaaaacgacgcaaaaaacaattttcgacatttataaatcgacgctaaatatacactcttcttttttatcttccacgtcgggttagaaatgacacaaaattatttatggcatttctaaactgtcactaaaaacttataccgtcggttctaaaatggcacataaattgttgaaatacttttttttttacctattgcgtcggttataaagtgaagtataaatgtagaaaaggaaaaattacaaattttcatataattttttccccacctgcattatttaattttaaaatgattttatataataataaatacataatacaaaaaaactagcatacgaaaaaagagagatataattatgatatttcattattcctaccta

SEQ ID NO: 262026 - DNA, 778 bp, Cannabis indica
tcagctaacggttctatctcgtccactgaataactcggatcagtttctaactcgatagttttagttgcgcttgagccttctatgtaggttggcaaaaatggatttcctacaaaagagagtgactgcaaatcattagggtcccttattggagaaatgtcactgctacttccagcttcttcggtaatggacagaagactgttaacatgttttggagactcatcctcattttctgcccttgttcccgaaagctgaccatcttctgcagtttcggtggaattaaccatctcaacatctttttcttgaggacattcatcactaacagatgcagaattatacaaaccaggattagagctcagaatttctagcaaagcatcagtcacagaattccagttaccatcagaaacttcagattctttgatcaaacaagaatcgacccaagcgatatcttctagtgaaagagcttcatttttctcatcagactcttgaggagaagatgaaccttctgccacatcatctcttagaaccatggctgcaaaatatgaagcaacatgtcagtacaaaggaaaatcaagattattggttggagttatctttttctataccaattgcctggcacatatcttcaaaaacattcatattccattttacatgaaagtgctgtaagtagaaaacaatttaaagtcggtgcactgacaaacagcgatcaatggcaagctagaagctctctttcaatcaccaaaatgtttggtttttcgaaaactctaatatgcatagaatg

SEQ ID NO: 262027 - DNA, 728 bp, Cannabis indica
tattggaatgaggccttttgggaaggtgcccaaaaacaaatccgtgagggcttggcccaaagcagacaatatcattccagtggagaaatagatagtgtccgacggtccttacatatatttatagggatatgattttatcctgttattgtactttcacggattgtaatctgtgatgtacgacagccgtcagatgagggagttatttgatctgacggctgagattgatctaggggtaattggggttaaaagtaggaacgtaccctgacactcatttaatgtaccatgagacccatctaatgtaccacagaatacattccgtaaaagtacatgacgggacaaaatcattttcctatatttatatatatatttagttagtgttatgtatcaacgttacttttaaaatatcataatatatatttattaaacacattataaacgttagacaaatgttataagtattaaatattattactatttttttaattattatttttactacatagtacttatctacgttacatatatatatactagttgggtcacacacgtgcttcgtatgtgagcccatagttcaaatattttttcaataaatttgtaatatgttaatttttttagactatcttcaatagaagatgtaaaaattgatttatatttggtacaaataatgattttgtgatatttttgcatcaatttttactattatgatctaatgtattattataaatttt

SEQ ID NO: 262028 - DNA, 1793 bp, Cannabis indica
tgtttctttattgatgttgagtaaaatggattacattgaaatggagttttatttagggcattaaacccaacatgttcgcccaaaaatgtgatttcctttttgttgtgtgcctttccaaggtttgacagaggggacaagctgccaaatttctcaggattgtgtaagaagagtgacatatgggcgacctccgagatagtacattgtctcagactccttttcgtaaattgttcctcgataacccatgagggtatcctccttaagttcacatgttgcgtgcctgttaagtgtgaattctttgtctaggacttgacattcgatttaacattgaggagcgatgcaggaatcagattaactatccagttttgttcgctctaaatagggggtttaagtgattaatctactatgggcgaggtaatgggcacgatatccataatgggcctttgtgagagtccacgagtctcccttccggaatcatggataacatttacctcccaagccgttgtggctcaggagcaacggaggcttgctacctccctccagttttgggatctcatccaggtctattaactaggttaatctcttggtattatccactgcagtgtcgcaagaatattctggacttttcacattctattggcactgtccacgtggtgaataaccattagtgcatgaaagttagtggtcttttggggcgtgtgtcgcgttgtgttgggaatcgtactgacgtcaggttcatattagcgcttcctcttaggcgaatgtcatcatttatgagggtttcttcgatgttgatgagtgcatttaatgcaccctttggtatttctaaactgttggatcagcgggatttatgttttcctaaatttaatctgagcccttgggtggggggatggagatcgccaactttattataaatattgcccaaagagattgtttggaacttttggccatctctttagattttcaaaattttcagggagagagagagagagacttcttaaacccaaaaactcttttccaataaatgtttgacctggcctcccagctttttgaaaaactattacattttccttcacgtttttatccaaactccagctccttgatcatcgttccagtgacttcttcattggatttttatagggatctctactaattcgctatgagattacacattctccatgccaaagtttcactaatagctggtggtatatgataggatgagctagaccgttcacacttctagaaaaccacatgcaccctctgttaccacatgtaagtacgccatttttcaaaatttttgtattagttttactcgtttaggttgtcttcagggtaaagggttgtagttaatatgccatgagttcagcacttttcttgggttttcttgatcaaaactgtgtgctccaccgtacggggcattttttgcatttgttttaatgagaacatagggacccttagggatatattggattttagagccttgctatgcgtaggtgtttacattaagagtagccctaatgatgtggacatcaatgtttgatacgtagaaggaaagatgacatctcggagttgagtagtcgtgagtcatagtaggtcaacctgggagggttccttagccttgcgcccatgtttacttcgagaactctagaatggaagttcagactttaataacttgaatccaatccactatctttcagtattttgtaacatgaagaccatgagcagcctaatccaagccttgggagctgaaattatacgaacctgcaacttggaagccaacctgggcacctagggtt

SEQ ID NO: 262029 - DNA, 1235 bp, Cannabis indica
tgtaggtaaaggaaaggcgaaagctgaacaggagtgaacctgagctaggatgaggttgtacatgtcgaggcagcgtgacctagagtgttcggtctcgggacatctggggttttattctgtagttgctgtgcgacttggatattatgtattttggagtattatgtttaaaaagtttaaaaaaaaggggatctcggaacttgtaaatagttttttatattataaagtttattaattagtacaaaagttttaatttgatacatttttcaagaaaattctttgattagcaaagacagcattgtagcgtgccttagctttagggcgttatagtagtggtggtccaagctagaattaaaactcattgtacatttggtataaatttaagtcgactttaaattttagattccaaatagaaattttatctccaaaatacaatacagttcaactttcacaagttattaatatcatttttctatcaatggattcaaactatatgttaataaggaatgtgagtttaatattctgtgactgaatccacttggactattctaagaactctttattgtaactgacctaagtcatcaaaagatcactaccacattgttatataaatctatggcatttgtatcttgttcatagtggttttgacaagatcattctctgcaaagagtcaatatgcctatgtccactgaaagtgaatcatctatatttgtagatggatatacattcaggggtggatatgagttttcattatattcttaagaagatcactctagattttaccatatgaaaaagaaatatgaaatgtttgaaaaagttcatgaatttctagcaatggtggaaaaccactaaggtaagtggttaaagatcttgcgaactgatacgggtggagaaatatttggtagatatgcagttcaaagatcattaggttgattttttgaactatacccaaacttacctccctagaaatttgatttgcatattgatgatagtataaggtctataattagttactagtcgttgcctaagtccttctaaggaaataccctaatgataggaaaaattcagaatgatggaatggttgtgtacttagcataaaccctaactagattcatggatgacctaattgtgatcttaagaaaagctagaattgttgaccaaggtttttaggtttgttagctattctaaatgattaggggtggaccatcccatagtcattagataagaaagtgtttgtt

SEQ ID NO: 262030 - DNA, 612 bp, Cannabis indica
taaggtcatacttgatcttcacattaagtccatccagatattcttctttcttacagaaatcggttggcacaaatcccgaggctaacctcgccaaccaattgaactgaaaagtatactcggtcacactcatattctcacgctgggtcaggtgagcgaactctttcctcttaacgcttctgactgcctcattataatacttggcgttgaagagttcctggaacctttcccaggtcatggtggtgatgtcgtgaatctgagacaccatgtcccaccagaccagagcgtcttcttgaaactggaaagtggcactcaccactctgtcattcccggtgacacccataaagttcaggattttggtgatcaccgttagccactaatcggccttcatcactttcccgctaccactacctcggcctgagcagcaggggcgggtgccactggaacttctggcaccggcacagcaggagcaccgtgctgcctcaatctctgaatctcattatcttgctcctctattctggcttgcatttcagcaaacccaacttcccaattctaggcttcctgattgacctgggcagcctgtggcgagttgacatcaccccgaccacgagccct

SEQ ID NO: 262031 - DNA, 780 bp, Cannabis indica
tgtgttgggcaatttggaaggcctgaaatcttgttgtatggaagaataaagcatcctcaagaactgaagttattgcatcagcacaaataactcttgatcattggcgtaacgcttaagataacacttccttatcttctttattttttgagaatagaggagatggagctgagcgttggactacacctgaagaaaataaaatcaagataaatgttgatgctgcactctttccacgggataactcttatggattcgggattgttgctcgagatagctcgggtaagctcattgaggccaaatcgtgctattatggaggtgcctatgatgcggaagttgttgaagcaatgggagtcaaagaagctctcagctggattaaaagcaagaactggtctgatgtagaggttgagacagatagcatgctcactgtgcaaggcattcatagtaatcaatccttaaattctatttttggtttgattattcatgactgtcaacttttattctcttctctaaataatgttaagatttgttttatcagacgatcaacaaaccgagttgcccatgttgttgctaggtactcttgttttctctctggtcgtagcatttttgagtataatgcttgggatgagttaatctcccttttgtatttcgaatgctaaatattcaatgaagttactatttcattttcaaaaaaaaaaaaggtgtttcagtgtggaaaaaaaataaataggcagaggatatatatcacgcgtccattatataattcaaatagtaataaaataaata

SEQ ID NO: 262032 - DNA, 681 bp, Cannabis indica
taattgtgagatgaacttagtttctaggttaatccttttcattcctatttcctacaaaatgaattaattaaataaataacttataaaattaatattacctcagccaaaattaagtaagacaaaattagaaacccttaaaatgacattttgccccttataaagcacttaaacttaaaaccaaacctaggggtattatggtaatttaactaaccaaccaaaccgacatcttaaaattctaaactagtcccgaatacttccaatacaatccttcatttatttttgtgacatttttgaccactctactgagcttccacggttgtcgggcccgaaaatattttatttcaaaaatagtatctacgatacccacataatctaatataatctccgtaattaataaattatgctttatttaatcatttattacattcacactaattaacctaagtaagatcataatcttacttcttaccagaataatttgcatatttaataaaatatgctcaattaaataccataatattttctgggatattacaactatattcccttcttatagaaattttatcctcgaaatttacctaaaaagctcaggatactgctcccgcatctgcgactccaactccaaagttgcctcttcaaccttgatgttccaccatagcacttttactagcagaatagtct

SEQ ID NO: 262033 - DNA, 1956 bp, Cannabis indica
tttttaatatttttaaattatatgtttatcacttgtaaaaaaaattgtaatttataaaaaacatagattgatattgttggttaataataataaaatatttttaaaataaaataaaaataaaaaattattttttcttaaaaatattttatttttgtaatatacaataaataattaaataaatttatagtaaaaaataatttattatagagtcttttaatcaaaatagtttttttttaaaagttgggttgtaccagctttagcttttagctgtagcttttctataaattttttaataagtctttttttaattacttaccaaacaccattttgtcacagattttttaaaaaacagcttttaacttttttcaaaaaatgtgtcaagcgggccctaatattatgaaatattaaaagaatatctctaggctaactcacttgtgttctctcttcactcattcataccaacccactcacaaacctcattttttcattcatttcttaacgaagtttatggcaaagttagcattagactttctgaccccatgctgaatgttgtcctcaaccatgtgtggatccacttctagaattaggcatatttcgtcaaatagatggagaaccacgacgatgagacagagtagggaatcctggtggaggatgctgagctgagacatggccagattgagatcctggacctctagacaggggaggagcactaaaaatgttagtgtgagaataataaggtgaagagaatgtacctcttcctctagtaaatggttttgtatgagtaagattggcctctgttttagcaatgtcaagttctcacgtggctttttccaatcgaacctcctgtgccattaggagatctttgatttcagccacaaaatactcattagttcgagaattgatagaaataatgaagacattgtagtcgcttctcaagccattgaagatagcttcaatgggttcaacatgattgatgtgatgaccaatcgaagcaagaagatccaccaacctcttgatcttcagaagataataacctaatgacccctgcatcttgacattgcgaagcagagttctgtattgacctatgttagctcgattgagagttgtataattctcataaaaagtgctccagatctgtgcagctgtgtcacaacccaccattctcgtcaagatcttctcagacgtggaagacagtaaccatgaaacaagaacactatcttgttgtttccaatcctcatactcagaacttaaacgattcattcgacaatcaacttcagtgagaaattaaggaggagtaagatttggatcaaggaaattctataatcgtgcacctatttgattgcagcaaagacctggtgtctccatggtaagtaattgtgttcaccgattcagaccaaaagagagtgagaaaaggtagtaggtggagatgtttttggaagagccaaattgttattggctgaggtttgagacgaacctccatggttgtcaagagacgaggttgccattattgaaagaatgaagctctgataccatgtaaagttttagagagaaagaaaggagagaaagaattgtattgcattgaatagaccaattacaagcctagactaagattctctaacactcctcaataacaaaaatcccaagtgaggtctttgatcaaaatgcaaaatgagataatgtgaggtcgtctactttaagattcccaaaaagtctttcacctcaaatgtcaaagtgaattaatttttcacaaagattcgaaactacgtttgacttcattcctataaaagaatacgtaagcagcttagttgttaagattaagtgcaatcgctaatatcgcaaaatggtataaaatacaattgtcaaaatttcataaaaagttattcacctatgactttttctaaatgttcaaatagcaataaatttctgaaaatggtacaagtggcttgattcttcata

SEQ ID NO: 262034 - DNA, 690 bp, Cannabis indica
agtttcgttcttggctggagggactgtcttatcacgagattgagaggctcgaagttccttctcagcagaggcttgctgggctcgtgttcgagtagaagggcctgttggagtggagccaggaattgatgcagcaggagggggaactgccaacggaggaggagattccttcgaagattcagatgaagaagaccaggtgcaaagaggtcttaccgatttgcaaataacttgcttgggtggacgttttggcttctcggtttgagattcacgctagggaagtgatgaatctccaggctttgcaacagcaggagaatgagctgaagcagcagggggagcattggaagaagttgcaacggtttcttccaactttttagtgtgccctagattcttggttctcaccatttgggatctgaaagagaagatgaacagaaacaacacaaggaacaagaaagagggttcgggtaggtggtgagttgaatgacaaagtttggtttatataaaattggaagcaagacaagaaaaaggaaaccaaatttgaaaatttaaatggtaaccgccagcccatgaacaaagaaagggaaactgcccactcctcaactcctttcccttttttttaaaaaaaaaaataaaaggaaatacaaggaaataagaattaccaacaatatttctaaaaataagtcaatctttcaagat

SEQ ID NO: 262035 - DNA, 1018 bp, Cannabis indica
ttttttttctaatccctgggtccagatccggatcccaatctcgggtcccagcctggttccatttctggtgccgagtcacgagctgggttctatgttcaagttcgggtctgggtcgggtaggttccggtcctagttctgtttccaaggtccctatcctgattcttggtccaggtaccggttattgtgtgggtttgggtcccggtctaggttcgggttcgagtcctagtctcagttcgggattaggtctctgtttggtttttgatctgggtttgggtttgggtttatgtcctggtcctggtcctagtccttgtttggttctagtttcatttgcgattctgagttcgagtttggggttgagttcgggtcggagttcgagtcctggtcttagtttgggttcgggtctgaatttcagtctaggtacatatcaagctccggctgtgggttcgcctcctagatcttggtctaggttgtgtctgagtcccaagttccaatcccgatctgagtctggattcagttctgtgtcaaagtccttggtttctatcctggtctgggttcgattttgggtccgggtccgggtctagctttgggtctgattctaggtgtgggtgtttgagttcgggtcgagtctgtgtttgggtgtgtgtccaggtctggacccctatgtgggtctaggttcgagtccaggtccaagttcggggcccgagtgcgggtccaagtttgggtctttgtccgagtccaggttcgtatccggatccctatctaggtccaagtttgtgtttgggatcgggtcccagatttaggtccaggtccgggtcacagttccggtctgggtacacgaccgtgttcgagcccgatttccagtctcagtttgggtctgaggctacgtctgtgttcggttctaggtctgggtccaggtccttgtcacggtcctagtcttgttctagggtcctggttcggcgattcttgttcaggttctaattttgggtccctggtctaggtctgggttcgggtttggttc

SEQ ID NO: 262036 - DNA, 2453 bp, Cannabis indica
aatttttatctagtctactttctatgtttatcttgttaggcgactaagataacgacatccactcagcatttattactatattttggttgatttgtttttctggaactagatctattagactacaacaattaaactgattcttattcttcttctgccatgctctcaatatgatttcagggaatgccccgaggagtgtagggcagctgtggcgtccctgatgtttgctgcagcacgattttctgacttacctgagttacgtgacctcaggcaaatgttttatgagagatatggaaattcccttgaattgtttagaaatgaagaggtaatttttatgaatgctcagttgatatctgaatatattaatacattcacatttatgtatatattaaactgactcaatatcttgtttctgctaactagtttgttgagaatttagcatcgaagccttccacattggaaaataaagttcgtttaatgaaagatatagcattagagttttcaataaagtgggatgccaaagcctttgaacaaagaatgaacaaaccgcccacacttccacaggtatgctcattttattgtggcttcatattctatcagctttttttgatgactatcataaagttctcatttaacattagttgaaaccagttataagccttaatattttaattacttgaaatctttttttgtctgagaatttcaggaccctcccaaagctcgtgggcctttctatcttggtgatgataaaagcaatttgattaatgggaaagataaggctctcaaagcagataggcctggcattttgtttaatgaaaggtttgacctcaatggtgctcacaaatcaggaaaggaaaaagacagttctgtctcaaaaatggatgcagttggctttcataccaggcccccgaggaatggatttaattcgcacaatggttgtgaagaaaatgtcaagaaaaaagacagtcatgataatttgcttcgagggaggagagaaaatggttttgatatacaggtggctttgaatttggaggaggctaccccaaaaacagttcgatcaggtacttcatcccacagagaaagattagatcctatagatgcctcattcaagcagcaatatggcagagagaaaagcattttgataactgattgccaggactcttcattaaatgtaaagccagttatagccagcccacagatgaagatcaatggtaaagaaaagttgtctgacgataactttggtggtcagcacatcaccgaaagttatgcaggcaaggatgaagctaatcctaggcccaagccctattacaataatgcaatcccacctccttatgtcaaacgtggtgataaatctaaaagtaggaaacctgtttcccatcctggatcttcagatgatggtttgaatggtaacgatttagctcaggatagagtcaatgctggtcatatggctgtagtacaccgaggatccgatcattctgatcaagaaaggcatcatgatggatctgaaaaagctaacctacataatgatgagaaggatcgtatttatcctgagggtgtaactgggaatcctataccaaaaccaagatcatccaggaggagacactcaaaatcacggccaggtcaaagtgaggctggcaaccttgaagatgatggagctttaccaacaaaatcaagaagcagaagaagggatgactcaagacgaggcctacaaatattgtttgacgatgaacaccatcgaactgatgaggaggagagaataattgacaagttgctaattcattacagtaaaaagcctactgcccatgaagcaggaaaactgagaaagaagtcttccagaagtcgacatgcacatcacagtgttaatgacatggttgaatcccctcaaaatggaagcagggttgggtctgacaaggaggcaccaatgatccctcctgctgcacgatcaatttcactccctcatgaacactcagggccatcagcggcgacgaaagtatttgctcgtgcagcgtcctttcaacctgagcgatcagagggagctaaccatgtgcatcccaagttgccagattatgatgacttggctgcccgttttgcagccttgagaggaaggtaaaccattcacatcagaatctacattgtaatcagcagtatgattctgaccattgtcgtcttggtttccttgagtggctctacttgtgtctttttttttgagtaaatcaccaaaagaaaacgttttagttattacgtttgagtagctccacgaagtttatcttccacatcttaatctctatagcataattaccccatatcaataccatttttagacctcatcattgtaaaagttactaatgcgtgcagattcagttaatagaggttataattccagagaagttgagtttaagggttgagattgcatgtatttttttttcaccaaatatctttgacaaataaaaattgtt

SEQ ID NO: 262037 - DNA, 550 bp, Cannabis indica
accgcatatgattaatgctttgatttattaaataattagggttcataaaagagattaaattaataattatgaaatgcatattttggaaatatatttaatatatcatatatgttattatgctattttatgtaaattacacaatttctgtgattgtgttcggaagctatggacagcgacgttaggcctttagagagtcatattgtatatattttaatgtatgttatttgctcgtggtgttttgttaagtgttgaattgtcgggtttagtaatgaccaattagtccttgggagttggtaactaatttaattaattagaggggtagttaggtcttttcctttttaaacccttattttggcttctagtggaatatatggctgcctttttaatatttttttattaattttattttcgagagtaaaaggattagtgaagcttagtctagaagtctcaaagttgcatctctctcttcctctctctttcgtgcaccccaaagaaccagcaagggaaggaatttattctggaattgtagtgttgcaacctgaaacaaaga

SEQ ID NO: 262038 - DNA, 464 bp, Cannabis indica
ctgaaattccgccaaagcatccagccaaatcaacacacatccaatctagattgctttttcccaaacaacaccgagttcctatcaaaccatatccaccaccacaccatagccaacaatgaaaaagtattaagatcaagtacctcaaaaagaaacaccaacaactccgccaaagatcccgcactaccacgaactagcctattccaaacccgcagctgagcccacaacggtcgcaatgaagggcaaaagactaaagcatgctccggagtctctgcttcctcaccacacctttgacacgacggttgaagaggaagctgttggaagttattttaccaggaacttagatctactcacaagtatgttgatttaacaacctaaatatgaacttctaaaacgataggaaattaagcacataagagtatcagaaatcttacagtgattgcagcagaatatatgtctcctcccac

SEQ ID NO: 262039 - DNA, 589 bp, Cannabis indica
taaaattaagcccttacccaaacttaaaattttacattgtccccaatgtgaaacaaaaatttaaagagaagaaaacttaccttaggtccatgccatatcaacaagtggttgacgcccataataagcgtcatgcaggacaacttgaaagttatttttaaaaatgccctcaagcttggcatccaatgagtttgaaccaaaatcagcaccaacaacacaagactttcgatgatgagcttagggagaaactgttgataggttgtagagaatccaatatggagaatgcggtattagtagaaaataagggtccattggttgttcataatatagtgtcgttgaagaccttaaatcaataattacatgtgattcttcagccaccaatgacacttctttttcactttcctcaaataacctctcaattggttgttccgtttcattatgaccatccacatctttgactatgatttaatctttaataacttcataattgaggatgaatgtttcttcattcaccaaattgatttgtttagcaagcatccattgtattaaattttcagtcacttcaaaatattctttctcttcaattataggc

SEQ ID NO: 262040 - DNA, 608 bp, Cannabis indica
gtgcactctcatacttctgtgcaagggaacgtcatatctcctccacaggacaggagcaatgagaggtgtagcttagaactgtagagggttagggcagacttctacagttcacgaactgaagtccctagttagatcgcgctcctcagattttgtattttttgtctgagctcaaagtggattctacttctctgatctatacatgcttctattttcccttctcctactccgtgcctgaaggaggattggtttcctccccctcgggattggattaagctgaacaacgatgttaaagtgggattagaaagtatgaggtgatttgggttcaaacctctcggttagactttacaaatgtgttatgcaaagaaaagcggtggcttgttgtttggctttatcggttgctaaggacatcggctccgagtttgttattgtagagagcgactcgagggtagttattaatgcttttaatgggaaggagctccactggacaattgaaaactatgtctcattttgtaatagttcttctcccttgtttattagttgtatgttctctaatattaattagtagaacttgtaactttgtagcccataatgtggtaaagtgggcgttt

SEQ ID NO: 262041 - DNA, 767 bp, Cannabis indica
taaacgttaaaataatataatttttttacaaaaaattgtgccttatctaattatcctttaaatataactaactaatccaattacaatcgattgtaaatattagatatttaattatgatccaatcgaaataaatattatttttttaatatttaattagattagattaattattagatataatgtccaaaaatttaatatatctaattcaattaataagtattttcattgctataaaagaagtatatttatttattttttaatacatgaaaatcatatatataaatatttatatatatttacatatttatatataaataagcttcactatcagtcgactaaagtctaaaaataacattttgcaacactgaattaggttggccatgcatattcatattgtgccatgatcccctaggcccatgccaaaacaacaaattaattaagattttgaaaccataaataaataaaaataaaatacaaattaatttatataaatttgactaaaaaatttagagtcaagatgtatactggccaaatgtttgtttagttaattattagttgactttcccaacttaatattatttgttttctgtaatcaagttaagtgataagcatatctaatatatataagttattaattatacaattttatatgtgtataaatatattatgtgtataaatatatatatatatataatatatatatattatatagctgctatttgactcaatctagctctatatgagatcatgcgtgaccgaatggaaca

SEQ ID NO: 262042 - DNA, 910 bp, Cannabis indica
aacatccattagatctaatatataattatatgggatccgaataggcctaataaaagtattaaatgtgatccaatgaaaatccctactaattttctgtcggtataattacatataattgagttttcttcgttagccctactaagattgtttatgggatttgtgaatatttgagttttaataagcaagagtattataactataacatgctaggcatttgttttggcaataattcattatatatatacacccaacgtctcacatgtagatcatcaatcaaattaattagccaagcaaataaactataatatataatattagatatgctagtagttgattatcttcatatatattattatagtaaaacattgatacattgtgattgtctgatcaaaatataatgtacttttatatatatattaccaatactcaatataaacatgaacaataatgagccatctaccaaaacttaaataatgaaataataaaatcgtgtcaatacgtaggcacaaataggagctattgaattagtcaaactaattaaacaaaataatcgtgtaacatgatgtatgtataaatattaagaagaagaaagaaagaaaaaaaaaataacaatgcgtgttttggtggctttctcattaaacaaacaaactccaatttggttactactattacataactaggaaatatctaatggagtaaatataattttcaattttgtgtttggcctgttattctatctattttgttaaataatataattttaaatatatatatatatctttatatattaaaagtgcctatttaacggcattttttggtttaacagaatatacttaaaaataaaaagaatattctgttaaatttaacgattaggtttgatgtcctgttaacaaataaacccaataattaa

SEQ ID NO: 262043 - DNA, 3056 bp, Cannabis indica
cctctcttggaaatggataaattcctttggtggaatgtccgaggagccaacaacactcaaaaacaaagagcaatcaagcaatttattcatactcagggtgttggttttgtggggctcctcgagacaagggtcaaggttcacaaattgggaaccttgtaccttaatgtgtttgatggatggtgtttctcaacaaacatagcttaggatcgacgtggaaggatcgtcattgcttggaatccggtaagatacattgtagatattactaaatgtacaagtcaactaatgcatttaaaaatttctacaatggatcatacttttagtagctttgctactatcatttatgctttcaatgacaagaatggtagagagatgttatggaaagacttgacagatctagcaacaaaggataaatggtttttaatgggagatttcaatgatattctctcaaaggaggagagagtagggcataaagtcaagtactacccggatatagcttttgcgaaatgtgttgagcattgccacttggaagatgtgaaggcaactgggaattttttcacatggtcgaataaacagcaagggaaagatagaatttgctccaaaattgatagagctatggctaaccaagcttggctagatcaataccaaacgactgaggttaattttttgagtgaagggacctttgatcactctcctaatgttctatctttgtatcctaagagagctgaagggaggaagccatttcgttacttcagaatgtggagcagttttccaagctttggaaagaaggtgcaggaggtttggaacaagcaggtctatgggaccaagatgtttcaagttgtctccaaactaaaagctcttaaaccgggttttaaggagattaataaagctggtttttttatatgcatactgctgtacagagggctctgggtgatttagaagatgtgcaacaacagttacagcaggatcctctcaatgaggagaagattgatagagaattagcagccagaacaaagctaattcaggttcagaaggactactcaacattcttacagcagaaggccaaggtcacttggatacaaaatggttatctaaacactacaatttttcatgcaagcatcaaacaaagagtaagacacaaccagattttctctatagaaaagcaagatgacaccagaatcattgatcctaatcagatctcatcgacatttgttgattactacaaagagctgctaggaacaagattgactaatagaagaccggtgataaagaagatcgtgagcagagggccggttctatctacacaacaagttgaggctttaatgatgaaatttactaaagaagaagtaagaactgctctctttgatattcctggaaacaaggctccaggtttggatgggtattcgagttttttcttccaagattgctgggagatagttggagatgacatctttgaggcagttacttcttttctggaatcaggtaaccttcttaaggagatcaatgctacaattttgacattaatacctaaaatgaagtgccctaacacagttaaagattttaggccaatagcttgttacaatgttatttataagattgcaactaaactattgtgttctagaatcaaactcatcctcccaaatttagtctccatgaatcaaggaggctttattaaagggagattcatagggcataacataatgatttgtcaagatttattaagacattatgggaggaagaccaacaaaccttcttgtatcatcaagttagattttcagaaggcatatgacaccatagaatgggactttcttgaagtttcttgaagaaatgatgtagggacttttatttccatctaagttcattaaacttgtgatgacatgtgtgagaaccccacggttctcactgatgtttaatggaactttacatggttattttgagtcagaaagaggtcttagacagggtgatcctatgcctcctcttttatctatgctgggaatggaatacctcactcgaataatggggagaataggggaaaaaagagacttctacttccatgacaggtgtgcagccacttttctaaatcatttagcctttgctgatgatgtattactcttctgcaatggagatttcaggagtgtctattacttgctacaaggcctcaagctattctctgatacatctggattgaatccaaatgccacaaaaattgccatgtacacaagtaatatgcctgaggatcatgttaggaggatcatggcaatttctggctttcagcatcaatcactacctttcacttacctgggatttccaattggtgctaaaagaatatttgggaaagattgtgagatccttgtcgagaaaatgacagctagaatcaaagtgtggagttctagaaatctctcctttgtggggagagtggttctaataaattcagtcttgatggccattcattcctattggtgccaagtcttgatattgcccaaaaaaaatagtgtctaacattgaagctatatgcaggaactttctatggaatgccaaagctgagtatcacgggccaggtgcaattgcttgggattttatatgtcaaccaaaagcatctggtggcattggctttaaggatatagattcttggaacaaagcggctatggggaaatacatctgggctattgcaaacaaagaaaatagtttgtggatgaggtggattaatagtgtctatcttcatgatagtgattggtgggcctatgaaactccaagccaatccatctggtattggaggtgtttaatgaagcttaaagaccaattcaaagctagtcaacagtccaagatgctgcagcaatatagtataacagccggttataaaatgctggtgcaagctccctcaaaaatccaatggacaaggcaggtatggagtcgtttaaatgctccaaaacactatttcattttctggcttgctatgcatcaaaggctcaaaataagagaccgattgttcaaaatgcaaatagtcacagatacaaaatgtatcctttgttgtcataggattgaaaatatagaacatttgt

SEQ ID NO: 262044 - DNA, 1465 bp, Cannabis indica
tactcgtgcattcgtggccaaggcgcaccacaacatcttttggaggtttaggtcacgtcccgtgcaagcggcattaccggtaagccaatggaaatgtacctgttaatctctggcagcttcttagacgcactaccggattgacccgataatatccatgagtactccaactcatggagacatatgagtccccttgtagtcctcatatggccgccatactagtcccgctgactagtagtaggtcacttagcaccaaggtgctagggggtggtggagagcttacaccagggtctccccttaaagagcattctaagctcttagccttctccaggaacatacatgattttggctctgtagacatatggccaaaacatataccaagtcacagagtttctccaattcgattgcactattgtattcgtagacccaaataaatggcgaataccaagtcccgaatcaatccagacaatattgaagatatttacggaaatgtcactgccatacaaactaagtatcagcatgcacaccaacatgcgctaccacttgaccaccacttggccaacttgtggacatcacctagcttgtgacctgccatcttagcacgcacgttacacaccgcacggtttaagaaaaattcaaactgcgatcgcaccgcaaaaaatttaaaatcacatttttttgcggtacagttggacggtttgtgcaatttgatgaatacctttaaaaagcaacattgaagaagatgaatatgcgaggttcaaatgaatttcttgttgaactcaaggttctaactcatgttcattacttgaactttattggtattattgattactatatcaacacatttcatatattaataatttaattacaaaatcacaccttaaagtatatatatatatatatatatttatatgaatcccccattcatccaatatggaggcataaggctagcaggtagcctattttaaaattctacacgacatgaacaactgaaagaagaatctgactgacacaatacatttatgtattataaatatttcgagaatttggtttgataaaatgtaggtcttaatttatccattatatatatgcattacattgtgtgtattacacaatacatcggtctttatccatttcaaaagattgtgatatatctttaataaaatgtagaggacacacgagcctgcagtccttctggcatggttttaagagctccatatttaaactcatgcaccataataacattccaaacaaaaaacatagagaaagtgatataggaagggaaatttgaattttcatgcttaataaactcataaattggtttttttaaaacaattactatgtataatttgtaaaatgggataatttttcctaaaccccaaaaaaccctcccattttcccaaccgtccctctctcttcctctttttccaaaaaattgactgaccatcgggctggccatcgggcccat

SEQ ID NO: 262045 - DNA, 1052 bp, Cannabis indica
agagttgttggttgcaaatggattttcagagaaaaggaaggtgactctaatgatggtacaaagaaatttaaagcaaggttggtagctaagggtttcactcaacaagaaggggtagatttcaatgaaatcttctcaccagttgtcaagcaagcctcaataagaatgatactgtcaaaggctgctaaatttgatcttgaggtggatcaaatggatgtgagaacagcctttctacatggaaatctagaagaagaaatctatatgcaattacctgaaggatttgaaagcaaagacaaagaccaagtctgtctcttgaagaaatctctatatggtcttaaacaagctcctagacaatggaacttgaaatttgatgaatacatgagcaagattggttactgtaagagcaattatgatccttgtgtatattttgctaacaaaatctatcttctattgtatgttgatgacatattggttgttgggaaggaaaggtctgaaattgacaagttaaagcatctgttatgtgaagaattcgagatgaaggatctggggacagcaaagaggatactgggtattgacataagaagagaaagacctcacaagatcatgctatctcaaagcaactacctcaagaaggttcttgataagtttggaatgttcaactccaaagctgtatcaacaccattagcacaacacttcaagctatctgctactcaagctccaacaactgatgctgaaagaaaacacatgagcaatataccctatgccagttgtgtaggaagcctaatgtactcaatggtgtgtacaagaccagacattgcacatgccatgagtgttacaagcagatatttggcaaatcctggtatgaaacattggtctgcactcaagtggacaatgagatacattaaaggtactctgaacactggattggtatttgatagcagaaatcaaatacatggtgatgtaactggctatgtagattctgattatgcagggaacatagatactagaaggtccttaacaggctatgtgttcactgtctatggagggtgtgttag

SEQ ID NO: 262046 - DNA, 1039 bp, Cannabis indica
aatctctgcttttgtgggacaacaggtaagacagtagttagcacgtagagtatgcacggtggcgcttatattgagattgatatatgtgagaaattgtaaccaggattagggttattaccctaatatgagcggttaatcgcctaggttattaccctaatgatataagttgaataaatgctatgccatgctaagtgtatgattatattaagatttaaggattatccaatcaaggcataatcacgttggactcggtaatcagaaccgaagaaccattctaaggcctattgtaatagacgtgtgagagcaacacgtagatttacgccacgtaaacataaataggcatgtgagcgcaacatgcaggtctgtgtcacacagacatatttgaatggcattgttgtttgtattatatgatgagcatattgttgatatgttttatactgtcttgctgggcttggctcacgggtgctctactgtgtaggaaagggtaagactatttctgatcagccatgagtgtaggagctgaacgaagaatgtacatgtccgagccatatcagaccaagcgggttggggtctaccagtgttgtatttttttagactctgttttgccgcttaggctggctgaaagaaaaggacttgtaataatattttgtaaatgtttttgggatcccaacttctgtaaattttagattgtaaagtttaaattattacaagttttattttaattctgtttataattaaagtttaatttccgcgctaatcttattagtaatccaaattaggggattaggtttttcgtaaatatctttggtagcgtgcctaattatttagggcgttacactcctgatgctagtggaagcactgctctccctatctctggtcctggcaaggagagtggagattccactatcgagcaaagaaagagaactttccacctacatgaagttctggtgaaagtaagaagtttcgtggaaattagggtaaagggggacgccagacctactcctatccggagtgcccgcgctgcaagaagcatcacccc

SEQ ID NO: 262047 - DNA, 616 bp, Cannabis indica
aattttacaccccgtgagtaaactactttgttcataactctgcaacaaactagaaaaaccttcagcacaaagaataaacagatatggtgataaaggatccccttggcgcaacactctttgaccaacaatgggccccaactccttcccaccatgtgaaatggtataagaaacagaacatacacattgcataactaaattaatccagcgaccatcaaaacccatccttaccatcatagcccggagataaccccactcaagcttgtcataggctttgctaacatctagtttgagtgccatataaccatccctccctcttcatttcctctttaagtgatgcataatctcataagcaatcatgatattatccgagatcaactggccttgtaaaaacacactttgagtatcagatatgataaacggcataacactcttaagtctattagcaaccactttggacacaatcttgtacaccacattgcataacacaatggtcgtaaatcccccatatccataggctgttttttttagggattaagaccaaaatggttttattaaggtctgtacgaagagaaccattatgaaaaaattacttaaccatattgatgacatcatcctt

SEQ ID NO: 262048 - DNA, 1191 bp, Cannabis indica
taggttgggtccgagtcccaagttccaatcccgatctgtgtttggattcagttcttggtctaagtccttggtttttatattgttttgtgttcgagtttgtgtccgggtccgggtctagctttgggtctgattctaggtgtgggtgtttgagttcgggtccgagtttgtgtctgggtttgtgtccaggtctggacccggatctgggtctaggtttgggtctaggtccaagttagtgtcctgagtgcgggttcaagttttggtctgggtcaggatctcggtccagatgtaggtccagcatttccatcccagtctagttgttggtccgagtccaggttcgtatctggatccctatctaggtggaagtctgtgtttgggatcgggtcctaaatttgggtcctggttggggtctcagttccgatgtgggtacacgaccgtgtccatgcacgagttcgaatctcagttagagtctgaggctaggtctgtgttcagttctaggtctgggtccaggtcctggtcaaggtcctagtcttgttctagggtccgggttcggcgattcttgtttaggttctaattttgcgtaccaagtctaggtctaagttcgggtctggttcttcgtctgggttctagtcctagtctaagtcctacgtctagacaatgattagtggtctgttccgggccccgttactcgaatcccgagtcaaaacctggatcactgtcacgggtctcggtcttgttctggttcaggtcccatttttgaatttgggttcaggatcgagactgggttcggttctaggtcccgacccaggttctgtgtcctagtgtgcttcgatgtttgggtctgagtttaggttcgggttcgcgtcccgagtctaggtttgggttgggattcaggtctgactcctaattcaggtgtaggtatgatttggagtccaggtccaaatccggttacagatctggatctaggtcgaatttcagttattattccaagtccaagtcctagttccactcccggtcaacttctggtttttgttccaattttgggtcacagggtatggattcgggttcacttttgggttcgggactaggttcaggtccgggtgtgggtttcggtccttcacagggttcgagtctagggctgggattgaaatcccgacaccgactacgcgttttgtccaagccctcggtccagat

SEQ ID NO: 262049 - DNA, 1405 bp, Cannabis indica
acgagtagaggtaccctactcatgactaagaacttgcagtagtagtatttacgctaacaaatttggtggcattacttatatggcgagaaatgtgagatatacactaatcataaaagtttgaaatacttattcacccagaaagacctgaacatgagacaaaagtgttggctagtattggttaaggattacgactaggagattctttatcatcctgggaaggccaacgctgtagccgatgccctgagtaggaaagggtagagtcagatgaataccgtgaggcaaatctccaggtagttagcagatgagatgacccgagcgaagattgagtttgttgtggcacagatggctaatattaccgtacaatctactcttctacagcaaatcaaagaagcacaattgcaagatccagagttagtgaaatcttgagatagggtttcagctgtaatggttagtgattttacagtggatgacacgagaatactacggtttatgaatcatgtttaagtgcctatagatgatggcattaaaagagaaatatttaatgagtctcatacgaattcttattcagttcatccaggaacaacaaagatgtaccaagatcttaagccatgtgtttggtggcctgaaatgaaaaatgatatagctgaatatgttgcaaagtgtttaacttgtcagttagtgaaggctataaaccaaaggtctgcagggttgcagcaaccactgcatcgttcggaatggaaatgggaagacattactatgtatttcgtggttggattgcctaagactacaggacagtacaactctgtgtgggtcatagttgataggtttacaaagtcagtgcactttttacctatttgaacgaacttctccattgatcagtatgcagaactgtatgttagagaaattgtttgtcttcatggtgtcccaaagtccattgtttctaatagggatccaaagttcacatcgagattctgggagagtctacatcgagccatgggtactcaattgaaattcagcacaacatttcatcctcagacggatggacagtctgaaaggaccattcagattttagaagacgtgctacgggcatgtgtgttagactttaaaggatcatgggtaaagtaccttcccctgatcgagttcttgtacaacaacaactatcaggcaacaatcgggatggctccttatgaactgttatatggaagaaaattcagatcacctattcactgggatgaagttggtgaaagaaagttcttaggtcccaaagctgttcagagaataagtgaggcagttgataaaattagagcgcaaatgctcgcggcttagagcagacagaagagttatgcagatccaaagcgtcggaatattgatttttcagatcggggatatggtatttctccgagta

SEQ ID NO: 262050 - DNA, 555 bp, Cannabis indica
cagtagtttggagagttttacaactaaaatttgagtttagaaaaattaaatacaagtgaaatgataattgagtgaatttacccgaaaaaaactcatactataaatttagataatcatggtatttagtattgacataaaaaaaaaagtaaatatcatttttcgactttgtgttttgtaaaagttattaattggaccttctgttttgttaaatgacaaaatgaaccctgtattttctaaaatagtgaaaataggaccatgagctcaattttgaacaattttattttttaatataaccaactttaagacaatttttaacacgaacagatacaaaaaatataaccagatttatcataacatttctacatcagattattattaagttttgttttgacaaaaaatcagttcagggttctatttgtacaattttaaaaaatacagggtctattttgtcatttaacaaaatagagggtccaatttataacttttacaaaacacaagatctaaaataatggtgccgtgtggtaatacttttgttttttaattttttaattcaca

SEQ ID NO: 262051 - DNA, 517 bp, Cannabis indica
caaaaaatagtgtcttgtgtaattattcctaaataatattggataagtaccagtggcggagccagcccaatattttagtggggataattttttttttttgaagcattaataaaaaaatataacttttattgaaaaaaagataaaatcaaaattaatatatgtaagaataaaagtgaaaaatataaattttatgaagataagtataaaaacatataaggacatatatagaaaaaaaatatttttatgggtcagaatataagatacttaaaaatttatatgaacaaaaaattgagaaggaagagggggtacaaaaaatattgcctcactttgtgtcgttattatctttaggttgcttttattgtgttttatttcttttgtttgggaatacattgtctagctcgttagagttagagatttgcaaaatgtgctcattgtaggcgtgttcatcaaatcgcccaaaccgctcaaatcgcccgcactgtaccacactgcaaaaaaatgtggtttgaaatttttt

SEQ ID NO: 262052 - DNA, 761 bp, Cannabis indica
ccctatacaatgtacatcatctatagaggattattgatcattgggataacaacgatggataattgttagtgtatctatatggtggaacatatagagcgttctatatagctgagagtgaaattctaagttctatgtgtggatgcaacaaggaattaataagtcagtggatttacctagtaagttcttggtctgcttattggaagctcggatatataggcccatggtccccatactagttgagacaatactacttgtaagactcagttaattgattttgattaatcaattacaattttaaaattagactatgtctagtttgtgaattttcactaagcaacggcttaattgtgaagaaagagtttctagggcttatttgttaattaagagactttggctagtctaataaataaataaattaaatgacaatattattcaataattatgtttagttattaaatagttggagttggcatttaaatggttaaattggaaaaattggcgtttttgagaaaatgagatttagaaatgagaaaacagcaaaattgcaaaagtggggcccaatatcctaagcctaggccggccacttaagaaggtttttatcatttatttttttattattttaataccaaataattctaacataaccctaggtggttgactataaataggtactgatggcttcaggaaaagatgatgcatctaattacttcagagaaaactgagtgccttctacttaaacctagtcgccagtccctctccct

SEQ ID NO: 262053 - DNA, 580 bp, Cannabis indica
ccccagtctcgatcccgaacccaaaatcagaaatgggacttcggacctgaaccagaacagaactgagacccgtgacagtgatccagattgtgactcgagatttaggtaacggggcctggaacagaccagtaatcgatgtctagttctggtacttagactaggactagaacccagacgaagaacaaaaacgcgaactagacctagacctggaacccaaaattataacttaaacaagaattgccgaaccacgaccctataacaagactaacaccgtgaccaggacccggacccggacccagaccttgaaccgaacacagacctagccttagacccaaactgagactagaactcaggcccagacacgatcgtgtacccacatcggaattgagacccggacctccacctaaatttgggacccgttcccaaacacagacttggacctagatagggatccaaatacttacctggactcggaccaagaccaagactgggatcgaaatgctagacctacatctggagcgagatcctaacccagacacaaccttggacccgcacttgggacccgaacttggacctggac

SEQ ID NO: 262054 - DNA, 5736 bp, Cannabis indica
ggggcatttatgagaaaatgtgtcaatgaggcatatgagctgtaagaagagatggccatgaacaaccaacaatggccaagtgaaagaaataatactaagaaagtggttggtgtgcatgaggctgatgcaatcacaaaattaactgctcaagtcgaagccttgaccaaactgatgacagccaagtgcaacaaccacgaatttaatgtgaattatgtgggggtccccatgcctatgagtagtgtcaattttgtttatgtagatgacttactcatggagcaagctcaagccattgagaactaccctcaaaactgtcattatcctcaacaagggaattgtcagcagcaaggattttatcaacaaagatacaggcagcaacaatcataacaaccccaacaaaataaaaagcccgctcagcaacaagttctagtaatcagtctaatcttctactacaatttatggctaaaacttggtcttctatcagaactttggagattcgagtggggaaattggctgctcaaatggcctactgcacccaaggtaattttcctagcactacagaggtaaacccaaaaaagaattataaggcaataacattaaggagtgggaagaattatgagggaccgagtggtaaacagttggttaaagaaaagaagaatgattaacaggcacaggcaaaagtggataagaggcaaggtgaagagaaggttactgctgacctttcttgtaaagaagctacactaccagttatcattaagcatcacatcaagagtccctattgtaatgccctactagtttaggcatgctatagtattttcaaattactgtgcactcctttgctaatcaatgagtttattggaaaaagtaattaattaaaactttcataaacaaactcaaactaaataaatatatacaaatacataattttgggatcccgtttatttacgactgctttcaaaatatatttactgtaaaagttgtcgcccagcgactaacataatataagcctcacctttcccgaagacttaaacactctaggtctaactggcttcatatataaaattttcatccagctctatacgcattctagttcaattttggcccttacttgtacataaaaataataattgtgagtcaacaaactcagtaagaaaagcataaacataaacatataaccatatcgtaactagacacccatacaactaaccacgattgtttcctgatactctaaccgacattctcagtactctcatcgatgttatcagtactctggatgatatattcggtgttcaagtacatgtaagtcaatctccttcattatcttttgagtttattggaatagtcagtagaaattttgctggaagagaggatttgggtattttttgtgaagattttttaattgtgtggttagtgaaagattgaattttcttgaattggaattgttttgtatttttgagaagaagaaattataggggaggtgctgcctaattttttttcaaggtttatatcaaccatggcctctacaccaagaagaaacacttttcgaccaccaaaaaatagtcaagcctcctcatcccgaaacccaaacttaacgcaaccaccaccaccataaaaccaacctcccaaatttgattcccacaaattcatcaataaagaggttgtgcaaaggtatagaaagattcaaaagagtggggtgattagggaactgtgattttaaacttcaagacgaaccattccttcacgattggggttatgaggttattagaaaggaaatagtaagaagaagttggtaaatgttttgtggagatgaatatgtgagagaggtaaattataacatgatgtttgagttcttcgccaattttccattcaagaatgaaaacaatgaaattaatatgagaggtgtgtgggtgcctttaggtatcgaccatattgattgttagttcaatcttcatgaggttcctcaagttagggactaaacatggaacttaattcaattcaaaaactctaaagactaaaaaaaaaagaaaaagtggttgaaacattaagaatgaagggagctcagtttttaactggaaattatgaccaaaaataattgtttagatggcaaataaacctggttgctcaagcttggatttattttgtgaatgctcgcttgttgctgacgtctcatctttccacaattgatcatgagaggtgtttggtagcttatgccatcatgaaaaatctttggtcgacccctttcccacaatttcaaactcatagctcaattcaaaacaactggtagtccaacacgtggcactctcatcactgccttatgtactcaaaatatagtttggctaatggagggtgatgtggttcgcaaaccaatgggcattataacctgaaagcacttttacgattttctgcaaccttctctcacctctcaagaggagttttgtaagcaccacaaggcacatgaattcgaagagggtgaagaggaagaggacagtataggaccggctgcgagtcatagtattccattacaaatagaggcacctattgactcccacacccaaggtactcatgatcggttggattatctcattcgataaaatgaatatttattccaattgaatcaagatcaagccaatttttacaagttcgtgatttaaattcatcttttgcaatgtggacaatgaatgatgacacaccagatcatttttttagagcccactgtcatggtcgctaaaccagccaccacctcctccactgccatattgatatggcgctcaggttaatttctcttctctatcctttagtgtcactaataaaaacaatggactaaattagtttcggggacttaaacgtttttttttttaatttgtattgttagttttgtactttttagtttatgttagtgtcatggtaaaccttagtgatttgaatatatcccatccattgttactttattttattaaacttattaatacagtgtgcttgatttgattgtttttgtacttaacttttacgcttgttggaaaattaatatgatttgtaaatgtaattatttgaaccttattatacatgcttgataggttagaggattgataagttggattggattgaacttgcattacttggcctttgaggcaaaatcattgatgatgtgtgctttgaaaaatgatttaggtaatttttttaaaaaaatgtttgtgcctttcaagccaccattgtaatctttattctagttcaccctttttgagtattgacttgttattctttatttttacacatattttgagctaaaaataaatccattattatcctctcttgtccctaacaatatcagaagcgtatatcttaagtttgggagattgtaatgtagaaaagtttatgttatgcggcaaataaaggtactattgaaagaatttcaagacacaaagttatttgcaacaactcgaaagaaagaaaaaaaattgtcaatgtagtgtcacattggaaaaaaaaaaaaagagaaaaaagaggaaaaaaattaaaagagagttgttgcgaggttatcaaagaagaggttctctcatgtacttagaagtaaaagaggatattgggatcatacgtgaaaaattatagggtgattagattggaaaaagcttatggtataggtgagcctaaatgaaaattgtcatctactattacctaagcctaacgttaaacctcatttaagtctatttgattttcaaagcatatgttgttgacattagcggataagtttaaataatgcaagcttattgataatcgatttgtggatgtgttggattgagttaagcatgtatattaatttctaatagttatttttgacatttgcaagttatatttttcttttctaatttgagtgctaaagttagtattgggaacgattggattgaaaatccagttatataacagctgaatcttgtgagtagcggtggtgtggtgtgaattgaagttaaggcttgctttgggtcgtttgttttagtttagtattgatctttactcgagggcaggtaaagtttaagtttggggaagttgttagcttctaatttgtgctacatttaagtatgtttttaaagtgtttgtaattagttttagtttcattttatgcaattttatactttagtttgttaatatttttaagtttagtaataaagagaaaagtgaacaagttgaagaaaagtagtgtaaaaattaattaattgtattgtcgctagtgcaccaaaggaaccgttcatggaataatttagaagatttggtgcactcaaagcccttaaagttgaagaaatgaagaaagtagagtagcgccatggcattaaaattcaatgtcagggcgctcttgtgctaaaaatagatagagaggttgagtttcaaaggaaagagtcaggcctcaacactggagaagctacgttgatgcatgaggagagagattacaatttacctaaaaaagggccaattgggctgtgacattgggaagggtatgttgcggcccgctatgacgaaatcaacatagtctttttggacttttaggacacgggtcgcgacatgcactggaccatgctgggacccgctacagtgaggttgtgtcaggtgggtttttaaatcctaatttcagagggtggtaacttttgacctttttaaattttttgggtatacgaatttgaagaggagaagtgactggagagactatcaccattgttcatcgatgagttcttctccttctcttttaatttcatgtttctaattagcttaattcaattattcacaaagataatgagtatctaaacgtttaattaaggtgttaatggagattgtttgatatttttatatagtttaatgcaattttagttcttcctcaatttcttatatgtatctattttatttgcgcttaattcttataattgcttaatcgcaaattatatgtttatgatttcaatgcaaaatctgaaaagtgagtgttgattattctctagtaaaatagacatagattttgatattagacgaaagtacttgtatatattaattatgattttttttatataatgtaaattatatatataatttaccaagaagtgtaggactttaccatacaatttaaattctatatatcccaataagaatatagattgaagtagttaatctactatcacatacgaattggaataaaattaaaatttgcattagaccataaaaaattgatacaatcaaaattaattattctaaatttttatcattcctatttgtccttcttttattgctttcaattttaatttttaattttcaatacttcttaaaaattattgccatcaaatagaattaggaatgtaactgtttagtacttaactgtagtccttgtaggaaagatacaaaacttccactgttattacttgtaaatgatgtgtgcacttgcgtcttagaaaaatccacaacaatggtggttgtggtgttggttttgttattatgctcgatttgtgattgaaaaaaaaaaatgtttccgtggtattggtggttgtggatggtggtagtggtggaagaatgaagaagaagaaaaaaagatctggaaaaaattgtaggaaagaaagaaagaaagaaagaaagaattgtttttatgatttatttttattttttaaattattttatttttaaatatttatttatgtgcaccaataaatttgtaccatgtgtatacatagacaatccaacatgacagttaacaataaaaaatagatggaa

SEQ ID NO: 262055 - DNA, 574 bp, Cannabis indica
aaatacgggggtaatatctcgaactgtttaaataaattttgaggacaaaatttctataaggaagggatggttgtaatatctcgataagcctaatggtaaataattagggcttatatttatattatgagttaattaggtaataagtgggattatgatcttactaatctatttcagtataaaatttaaattctctataaatgagtaaataagtgtaatttataaattatagagatttatatagcatgtgtgaatgtaatatgagctatatgtgaaataaaaatattttcaagttcggcgaccgtcaaaacccgataggtggataaataagtgtaatttgttaagaactcagcgtcagtgatatcaaaattgccaggttatggcataaaatggaaccgttgtagggtttccttatagcaacgtgtagatacgggcattagtgacatatgataagcaccggacgtaggtacgggctcgtgtgattaggcgattactcatggcgacatgtagatacggcgtcagtgatatgaaaattgccaagttatggcatagaatgaaaccgttgtagggttttctc

SEQ ID NO: 262056 - DNA, 1450 bp, Cannabis indica
tttgggatgattttgccaaagtagggtcttttagagcatttccaatagtaaaactttagaggatgtttggtgaggtggatatattatgtggtaaaatattgagattctataccattgaagaaaaaaggatgacattctagaaatttacatggatactatattgtagcattaatactatttattttcttgataaaaaattgaagctaaaaaattatagtaaaaattaagatatatattaaagaataatatgtgagattataattataacatttttaaaaagtattatacattagagtatttttaggaataaaagtgataaaaataatgtgtaaaaaaataaaataaaatattatatttttaaataatgtgtaaatttttaacattattaaagaatattattattagagatgtttagtcttgccgtgactagataaatcttagtggcgaagcgagccatttggcaaaatagcatgcatgacaaaaaaccagtcttgccgtgactagataaatcttagtggcgaagcgagccatttggccaaataggatgacaaaaaaccaggacagctgctagtaaaatatccgaaagaacagattattggtattggggcagtcacagttactgacagctactcggtttgcctagactgctttgaaccaacatggactgggttgtattgtatgcttttaatccacattgacacaactacacttttttttaatttactccaatttctgtgataagaaaaatatatatataatgataaataaggaagtgtgtacgcttatttggatattaaaaaaaaacgtgttcatttggcatatggcatatggcatatggcattgacttttggatcatggttggtatcggctgcgccagctaatttttacaggattatgttctccgaactggcatccgtataggagccaaatctcctgtgtaatactgtcttagaatagtgtcactgggtccccttccttcctttggttaccatcttcatttatctagctaatccatgagtaccatcacagaagtgtgtacgcttgaccaatatatatttcaagagcaatattaattgttctactcagtagtgactaatgtgtagcacaatctatttgaggttgagcccaaatatcttttgcatacacacatccgtatataggtgttccatgtgtgtaaaattaagacttgtcgtggacattatcctacatagaataaatgataaagaattaagccatttataagaacataagctactttactcattgccaattaattttgagatggaacttcataattttcaacaacactacaccaccatcgagtatcatctaaaaaaaaagtttaatattaataattgtatacgttataattattaagacatcttgtttaattcatttgtaacttaattaaccataataagctctcatttgactactaaataattttaat

SEQ ID NO: 262057 - DNA, 724 bp, Cannabis indica
aaaatatgtccatttaaatattatttattttctgggatattacataaagtgtccatagtcaattatgccatatttattataaaaggtttaaaaaacccatactccatgtaaattctacaaaaatcattccattacatgagaaaaattgtattgtatacctactttactttatttgttttaatatttacctttatttccatattctttaagatatactcacttttatagatgacgtgcctattatactctttatgtactacacttaagtaaaaggtaagcatatattagacaattcactcataaaagtgggacagattttaattaaataaaatatgaaagtatttttgattaattgataaaaaaaaagtattcctcaacttatcccaaaaatttaatttgaaggcccaaattaatttgcaatcagcactctcttcccttccttacccctttcctccctaccaaacacattgaggtaaggattaagtaactcaatccagattttaatctatcccttctctaatacttcttaccaaacaaagtgttaatgacacggtgttacgatagttgagaatgacaaatcctagggcacaatcgtcagctaagattgagttacacgggcacaaagggcacggagagagatctcgtctgcgcgcgtctttaaataaaccctcactttctactggtgaaaaaagcttcacgaactcgattctctctctctctctct

SEQ ID NO: 262058 - DNA, 891 bp, Cannabis indica
acaaatgagtaaaaatagaataaaatcacataaaataccacataatttcttataattttttttttgtgtcatcctttatataaatacataaatatataaatttatgaataaaaaattcatagttgattggatacaattaaactatacattaaaattacatgtactattggatctacagtagtaaatataccagcagctaagttcgtttggatctcgactttcttgttatagtgaatcacaatacctataataacagccataagattaccattttcatatcaatatgtatatagtgacctttctttggaattataaactcaaatctaaccagatagtgactaaattattggttttgattactaacactagaaaaaccttatctgaaatgttaccaagttagaagctttcttttggtgcctctcaaaaggccaaaaaccattttcctccactcataacatatacccctatcttcttagcaaaggccaatatttcatttgcccatcaaccacaaattttttttttctcctctccaaagataaaaataaaataattaataatattaaaaaaaaaaacaaatttcttatatttatgacacctcgattaaagacatcacttctctctcatttcttcaatagtgatctctttttacagacataacacactctcaaagcttgctccaagtaatttttcagcagtcctcctcaggtactctttttggaaccaaatttatttacaatatgtttgattttattaatggaaacatgataattgtgtactaagctttaggtgattggaggttcaaaaaaacttctcagtggtcttaatatgtcaataccctgctttttagactatgatatcagcataatcccactcttgttttattggaatttc

SEQ ID NO: 262059 - DNA, 871 bp, Cannabis indica
cagatatatgctaggctatcagttagtatggattatctgctaccacatcggtacgactagagtaccgagtataggctggattcgcgttaatcattcgttgtcatggacgtccctgattcagttagggttatggtcaggtgtatgggcgcttgattataacccgggttttagtatgtttattatgttatgcgtttcttactgagtctgtcgactcacagtgctatgtttatgtgtaggtaagggcaaggccaaagctgaggaaccgtgaggacgagccaatgaagattgtacatgtcggggcgattaggcctggagcgtacgatcctcgggacaacaacgcttttgtagttagtcgctgggcgacaaatattttgtaaagaactagtaaacttttgtaaagtgttatgtaatcgggatcccgatattttgtatgaaatatatataagttttaattaaataaccaaattttaattaatcacgattttcattaaccttgttgattagcaacgagctgcacagtacgtttaaaatcacgtcaacacgcctatgctagttagggtgttacaaaaagaatatatttgtagattaaatgaatgtcccatagtataaaattaatatatatataatgtaatgaaaattatttatacgtcaaatttaaactaatattcaatttttttctttctttccttcacgatatatcatatcacatacaaacgatatacgtaagaccaatatgaatataccacaaacttaaactaatatactattaaatgagattttttctccaagatatataatagcatacacaaaatatatactaaaatcataagcagaaatactagaatgaaaaattaatataataaattaaaaa

SEQ ID NO: 262060 - DNA, 508 bp, Cannabis indica
aaaataaatataaagtttaagaatattacaattgaacatgttcccaatattaaaataacaataaaaatataataatgtacaaataatatattaatattatatatatatatttaaaataatctaaaattgatataagtttaattaacctaaaacaaattactaacatcgttaaatttaacagaataatctaatattcttaaaatattatgttaaaccaacaaaaactgttatagtcacattttatatataaagatataaaaatatgtaaatcaattctctttagcatgggtaaatggggggttttaatttatatattttttggtttaattatagtactcctaaatagagattctttaaatatttgaataaccaaaataaaaacacattacatgttctaacttttatttctttattttaagacttctttaaaatatacttttcatttttctatatttatagaatactatttattgctttaaacatattttattgatttattttttgtttt

SEQ ID NO: 262061 - DNA, 899 bp, Cannabis indica
cctgttcccatctcgcctactcgctcaatccacttccatgctatttgccaccctcctcctatattcgcaccctggctcactacttcacttggactattccctctatacaaagctactgctccgtctcactgcttcacctgctcgtcggggttgatctacttagatcatgggacagcaatgggcttctcaaattcatcaaatgctctcctctattccttctgtgtctacttcatagtcatcactatcatctctgcacaaccaacaaattgaacaaacaaaacagtgcatgtgtgtgaagtttatactatcttaattaaataaaggagagtttatacatatatagggtcataaacataagaatacatgtgttgattttcctcatcccagtggtgatgatcttgaggatgatgatcaattccggagaagaagttgcttcctagggtactctcggggagtttctcatgaacgctgccgaatagagtgactaaaggatcaacctcaagagccaggctgctttgacgagaagccaacatcacacttcgtcctgtgccagctggtttggccacccatgattgaccactatcatgcccgtagattcttatttgatcatttatttcttcattattattgctattattattgtttggtgtttccggccgattattaggattcaatatatcattagctggggatattaagtattcctccatggatgatttttctccagtttcaagaccctcaatcagcaaggccagctcccctttaatcactattatattataaattcaattactttaaattagaaagaatgatgtataatatataacacgtattcaaaagatacaaccaaggcatgaattaatgtaagtactactgaccattatcatctgtggtgccac

SEQ ID NO: 262062 - DNA, 314 bp, Cannabis indica
ttcatgttatcatttatttgttaataaattcatccaaatccttatcacatttatattcttgtttattgtgtcgtcagcacagtggaaagtaatcaagattatgtgattaaatatatattcctagatttatcagtacacagggtttaactgatatgacaatctacaacatagtttacttgcaccttggataagtgctatgttctttccagggcattggttaaagtaaagcttgggttggatgcatggagtatgcatcagaagggaccgatattgaactttgatttagatatattaaacttaccgtaatatctatt

SEQ ID NO: 262063 - DNA, 882 bp, Cannabis indica
tttctcggcttcttgactattggttctcgtgcatggcgtttagctgctgaatacataatttcactaacttctgatcctcctgagatcacattcacggtcctcgcattctgagggggttcaagtggactctcttgtattttatccccttctgctacagttgctttgcctttatcaaaaaggaaatctcgtagttgtcctcgacgaagtagccctgcaactttgaacttgagtgttatacattcagccgtggtgtgtctgcgatcgccatgaaattcacaccatttggtcatatctttcagagcttccgacttttgaatcttctcaggccagttgactttatttcccatgcctttcattacagcaaccacttaaacagggtttattgttagagtatactctgggattggtgctttatcttgatagcctctaaacttttgggacgattgtcccctttcttggtaatcacgtgatcgttggggtggagctcatccactgccttgaaatgatctggatctgttggtggggtatggttcaacatgatcggatgacttgcgatctactcgtcttggcccccgattctcacgagagcttaagtagttggagatcggttgcctgttcgattcatcttcctcccatttgatttgagcccatgctttggcaagaacatcctccatggtcctgcaatggtattttgttaattctttatataggtcagattctaccagaaggccttttcgaaaagctgtgacggatgtgtccatgttgcaggctgtcattgacaccttctcggcattgaaccttactacatagtctcttggcgattcgtcccttctctgtctaattctatagatgtcatctattaacttctccaattttctgcta

SEQ ID NO: 262064 - DNA, 683 bp, Cannabis indica
aatactacaacgaatgtgcagtctagagcccatactcaaatccccgctcagaaagacactgacgtagctcaacccaaccaaaatgccaatgaagtcagcccgaccgtacaggcctagcttgacgaactgaagagtatgtttcatggcatggccgagcagcgtaacaatgatcttgagtgaaaccgtgcacacggaactcccttctcgccagaaatcaacctcctgccactacctcacaagttcaagatgccaacgtggaagatgtacactgggagagaagatcctctatctcatctcaagtatttcgatatgcaaatggatttacaaggggtgcgaggagacatatgttgcagaatcttcttcgcaactctgtcagagaccgcacaacaatgatatttcaagttggctccacgaaactcccattgcacaattctcttcctcacgccaactcccattgcatctgggagatttggtcgaagtaaaacagcgaccaagcgagccactccgggcatacatcagcagattcatgacggaagcgaccaaggtatcacgggtaaccgaggatggaaagttatccgagatactggggggcattgaagtccttggcgaactatggaaagacataaggaaaaacggaccggtcgactcgatgagtgatttccttgaccgggccgaaggtttta

SEQ ID NO: 262065 - DNA, 1120 bp, Cannabis indica
gttaatcagagcaatttagatcaaataaataataggtttgttaaaaaaaaagttttgaataaacaattaaataaacaaacaatatccatgtaacaaatgtgaaaataagatattaatataattaaattattatttaactaaccaactaaattttgaaaatttagggttgttaaaaacaaccttaattatctttttaaaattagaaaatgaaactaatttaaaatatctaggtttctttgaattattttatacaaattaaattaaatatcaaataagataaatgatttagaaaaaaaaaaattcaatatcattttctaatcttataatttaataaaattaaaataataaaataaacaaattttgaaatagttgtggttagagaattattattttaagaataaaataattagctcacggctgaagaggtttgattggcttcactatcatattattcgttattttgacacaaaatttgcttttataaatacaaaataaaaatgatagatgctatttttccatattttcacaggtcagaggacattggtattatttctactctgctcactatggtgagctggactgagattgatcatttcttctcttggtcaagtgagttcaaccacagttatttataaattccacgtaatctcgtttgtacaagtcttctccaaaacaatagttattttacaatcttgtttgttacagatttcagtattttaattatttgatgagttttgttttttccttgtttattttaatgtctatgttagtggtattttcagattaagataaattagtttgttcttgtttatgcaggacaatatttgatcctaactctattggttccatttagaacatttctattttggtcttataaggagttatttacctaacttatcatcatttgaatgatggttattgaactgaatgtgggactaatattttccaaaatatttgtgtttttttttctagtttaaggagacttactatggaggaatgtttccaaaataataataataataataataataataatagagataaagtgtatgaaggggagtagtacttatgattgtattgatgaaatagatgtttagagtagtacctaagattttatttt

SEQ ID NO: 262066 - DNA, 1486 bp, Cannabis indica
gagtcctacaagtctaatgaaaagacagtaatctcactaagagataataactgtcgaccaatcacactgatacaaaaggagcaataaactcaagactcacacatgagcataaaaagatacaaactcccaaaaaaaaaacctatacacataagatgcgcaacactaaaaaaaccaaatcaaacaaacaacaaacattataaaacagcttcaacaaccatccccgccctaagacaggcaaatcattagcaccagagcactatcattgatgagtccatatatgtcttattataaatatgatcaatttatgtattaatattcttaaattgaatcaccttacttattttcttggtcacaaaaattgaattaagattaattgttaaaaattagtatcccataatatattaaattaaatcaatctaagtgtgacaactcatttaactactttttttagactccattaacattcaagacaatttctttgtttccttaaaatgctcttagtcaattacctatttaatagcattgattcaaaaatttaattactttcataattactatagttgacattcttttcttattataataaaaaaaaaaattaactcaaatgagaaatcatattctacaaaatccatcacacttcaccaaaatattttgcctctcaacagaatccttccttattattcacacagaagcctaattaattgtttttctactaattttaattttagtaataatctagaagactggaactttgtaacagaacagccacttattgtttggattaacaatttgattagtttgttgttgtttttactcttttttttttagcaacaaactgaaacttacaaaagtcaaaaacattttatagtaaattatgactgttctttgatagtaatgataaatttaggtaatatgtatctctcccaagtagccctcttcatcttgtttgactcacaacctttgttattggttttactttcagttcaattgaatagcagaagtgcaaggaggacaatacacacttcacacagggcaaaatattttatagtaatcacatcataaatgtatcataattatactaattagttttctgtgaccactagtttactggatttaaacatattgcaaacttagccagcaaccaaaatatttcaaatgatagaaatcattacagtaatctcagcagccatagaatagagttatccctacccaaaatcattgtttaagaagaccttttgctatagataatgtcttcaaagatgggaaaatccacagcaaaacatctctcaattctgattctttctctggtttacatttagtaaaaactctaagatgatcccaattaaccaacggaaaaggagaaacaatcttcaagtttccaaacattctcttcaagtttttcggaaagatgagagccttcattcatgtacagagtaaaggaaatcgaataaaatataagatagacaataaattgaaataacaccac

SEQ ID NO: 262067 - DNA, 661 bp, Cannabis indica
agtcgtcaaatttgttattattttgagattcattcttgaatatttataattttctcctggatttaacttttacagatgataaaagcagacaagtcttcagagcctgatgcaagagctgctcttctaaaactgaagcaaaaggaacaggtaggaataaagtagatatccaatgtatctcaactcacaaagaacattttctcttctttctctgttctttaattttgttcttcgtgagagcaggagacgaagcagaaagttcagaaacagtttagaggattatttgacaagaagccaggagaaattgctgatgttggagctgaagacataaaagataagaccgtagcaaaagagccaaataagggtgaggaaggagattcagatgacaataattctgaggattctaatgaagttgtcgaggatgcgcgtcaagcgaggtggttttcattttggcctggcggtagaaaactctttcatcacttggcctggaaagatgtacaattttgtgatcaatagaggaataaataatgacacctttttggaaattcaaattcaaaatttatatattagttatattggctctgttaaaatttgttcaaagagagtaagaataaaatataaacaacttagaatcaaaggaagttacctagttcactaaaatgtg

SEQ ID NO: 262068 - DNA, 799 bp, Cannabis indica
attttcccaattctgggcttcttcagtagcttgggtggcctgggcaacctgtggcgagttagcattgccccgaccacgtgccctgcccctaggacctctacctcggccccgagcatttgggggaaactgagctccctgaccttcatttgacccaaccgagttgccctgactcctggtatttttcctggcgtccatctagtctgaacagcccgcgtagccaagactagcatggtcatatcatggtcaacgagaacctactaataccgcttatttggaaattaaaaacatgcgcctattctactatcaggctactaacatgcttcctagcaggcttttcttaaatcatactatttaaaataagctactaaatcactaaaagcttactgaacagtagaacgagctaactactgatgatgactgtacatgtcgtgaagatcttcggaagacaacctggcggctctgataccaaattgtaactccctaactagcataggcgtgttaatgtgattttaaacatactgtgcagctcgtcgctaatcaacgaggtttataaaaatcgtgattaattaaaattttcttaattaataaattacttaaaagtaatacatagataataatattccgggatcccgtttacaaaatactttacaaaagtttgctatacatataattaaaagtttgtcgcccagcgactaacagtagaaaccctgatgtcccaaggatcgtacgctccaggcttaaccgccccgacatgtacaatcttcatctgctcatcctcacggttcctcagctttggcct

SEQ ID NO: 262069 - DNA, 637 bp, Cannabis indica
aaagtttcctcatagtccacgtcttctctttgggtgtaacccttggcgaccagtctagctttagaagtttcgacatcgcctcccgcacctcttttcttcagtgataggtttatcggttgtatcaacttgcaaaggttcaaccaaggaagtgggattatcctctacttgagtagaagatgatggaacatcagaaggtgtcatcctcaaggaaagtagcatttgtagagacaaacactttgttatgcttatgactataaaatagtccacccctagtctctttagaattttcgaaaaaacatgcaaacttcagttcccgattccagtttgccttctttctttctcaagacatgagccggacacccccaaatcctataattgtgtaaactaggtgtacgaccattccatagttcaatgggtgtcttaggaattgctttagatggaacaacatttagaatgtcgtttgccatctgtatagcatatccccagaacgacatagacagagttgaataactcaacatagacctaatcatttctaaaagagtgtgatttcttctttctgctactccattttcttgttgagtgctaggggcagtatattaagattcaattccaagttcaattaaatgatctttgaact

SEQ ID NO: 262070 - DNA, 688 bp, Cannabis indica
attataaaagaaacatgatgctctcatctcatccaccaactcactttcaaccaaattaaacctagttttcatcctctgacaactagtagatgagagactccttttcttagtgattttgcaccttatcattgttcgtcatcattcaagccatagtgatagagtatcatgctcacacatagcaagccaagtaatcaatcatagtgcggaagacggtggtaaccaacccgaaagagagaaaggagatccaggctcagatcttgtaattactctgcaacagaaaggaacaagggttagagatttcaccggaaggagtcattattattccgctgaccatcattgtaaggttttctaaactcttatgtgtttaatttcatcgtaccagaaaattcatatttagggtttaatgaaacatacatgttagtaaatctagatcctggtaaaataaatcccaacaactggcctcaaagccatggtaatgatttactttcatgaaatatggatttaaaacgataattgtgatgatttggatgtgttcatgttggtttgtgtgtgatttgatgtttgtatgtgaattacgaattttttccatgaaactaattttattttcaatttgaaaataatttaattggattccttgtaaaaaaaaaattaagtaattttagcttttacggatctcgattccgataaa

SEQ ID NO: 262071 - DNA, 958 bp, Cannabis indica
aaatctgacaaccaatgtcaaattcagaaaaagataaataaaatgttgttgcaatcgtgttgaaaaaaagaaaaaaaaattctctcatgtaattagaaataaaagggtattgggattgtgtgaaaaatttgttttgggtgacatgattggaaaatcttatggtataggcaaacttaaataaccatttcatctaccattaccctaagcctaacactacaagcctagaaggaccttttgattcttagttgtgtactgatttatattagtggggaatagtgagtattgcaagcatatgaaattttgggttagtggattgatggttgtaattcacatgcataaagtggttcaattgttagttaattgcgttctgtggtttcatgagctgaatgaaattaaattgaagtgtgtcaagggcgtaattaaactgaaattccataagtaaaattttcataatcatgttattgagtccacctaaaaattactcatattctggagattaacttgtttaacttttgttgttcgttttagtgttttactcgaggtcgagtaaatgtttagcttgggggaatttgttaggttgttttttgtattatttgtagattaattttagtgtatttttaatttagttttactcatgtttggagtaattttatgctttttatcttttattttcgcagatttaatatagaggaagattatgaaaatcaaaggaaaaagatgagaaaaaatgacaaagatgacaaaaaagataactgtgcaaaataggggtcatgcctagggaaaaagatagcatgtcgtggcccgtgttgaagaaagccttgaagacgtgtgaaaactgtacacgggccgcgacctaggaaaggcatgccgcagcccgtaccctgaaaaacctaaatccacatgtgaagaaggcaacacgggccgccgcccaggatgagcatgttggaaattattttac

SEQ ID NO: 262072 - DNA, 784 bp, Cannabis indica
tgaacctggaccagtcgcaccaccattgaaggagtcgtcttcatcctcaccggttctgagccatttcgatccgattacgtgattccgtcttcttggctgggcacgcataccagccccatacggcttaacgattttatcagcaggcacaacaaacaattgaggacagaacctatccgaatgacccaatattccacaaataaaacagaaggtaggaacatattcatacttgaacatagcccagaatccttcctcagcagcagtacgacgtaacttcttccttctcttcagtggagtgttgatgtcgagtgtaacacgaacccgcaaataatctcgccatatgccttggaaattctttgggtctgttttcacaaaggttccaatataattccctaactcacgaagagttctttcagttttgaagccaggttgcaaacaatgcacttgaacccacatatccaatttagaaataacaacagaacgaggatcttgtccccgttgaagcctttcaaaaacaaattgagtacggttgaatgtccaaggacttccttcaataaccctttcaagatcaatctcatggtagaattgaaacaaataccgatttggttcgagttctttaacgtacataccacgtccgggttggaataacgatgccatcatatgtctcattgcatcaaaatcaatagccctctcggttagaaacttccctacaatgcaccaacgatcttccccactttggtctgaatcatcaaataagtcatatacagtatccccatcatcttctcct

SEQ ID NO: 262073 - DNA, 712 bp, Cannabis indica
ttttacatccgtctagaataattcgtctacccccagagtaaccaccatctcgaatcctttatgagttggtgtagatataaggacttctaatatatacatccctatcatctaacatataggtcactttagaaatctttcttgactatcttttaatgttccttgtttgattacatcttagatggctcccactcaacagtaggagtctggttaaattcatacatagaagtacatttaacctcttactattgttttcagggttatcttgttgtgacatattatcttatagattaagtcatcaacatagcaatctagtattaacattaatgtaaaatacttgcttaagattaagtaatcattagagataccataaaacatttcatgaggattaggaatttttgcctaagtcattcgaatagactatgcaaaaattctactatcttattctcaaagtcctgacaagttatttctatccatatgaatggttagatttactttctcagttgaattctaaagttctatcacaagtgtcatccaaatgagatgggcatagaattttaaaattctcccactcaaataaggtactgtgattatgtgtacaaggagttttattggtatcaatatctattacaacagtaatatattaattggaacacaaattaagatcaagaaaaaattctaataattttgctaattatattacatccatgtttaa

SEQ ID NO: 262074 - DNA, 1488 bp, Cannabis indica
actccacacctcttgagttactctgtccgccctctcctgtccaagctcctcaatgttttcgatctattttttcttagaattggcccgccagtcacgcacccttagacattttatactcaccatagtctacaaatgcatgattatctcgtgggcacacaaactttgtctacaaaaaaattacacattcaaattagtacatttattaggaatttaagaataatatacgaaattataaatttaaaaataatataatgaatacctcaagtctgtcccacactgcattaatttcagttttaaaaacatctcccacttgaacttattcatggggatggtgttatagatcatcactttacacatgttgaatttttttttccatttagaccacatgggctactcgtgtcttcatgaatagaatgtgtagtttggaatcctttgctttagaaagcgcttccttaatatttttacctttgtatttactttttacccctttctttttcaaagagctgcaacctggtgtagacatactatacatagagaacatatttccagatttaaaataaacaactatattcacaacatattaaataagaacatatgtgattattattgctataatatattgttacaattacaattcatcattatcaattatatatacaacattatcatcactatcactttccaattccaagtaatcatcattttttcttggtcatttgaaccccatcatcgtcattgataatgaaatcatataaccgttgagaatccagattcacacgatggatgtttggaacttcagttaagtcaatatcatgacggacatagtcaacattatccaactatagaagttggacactaactgagttttgatagtattattttcctgtataaaaagatgcatgcccatcatcgtctaggaaatctcacacattccgcgagatgtactcgttcacaatcagctagtctttaccattcttaagattagggatgtaatatatcaatttttattgagatgtaagtatgaacaattcattttagtaccactccaggttgacgcaaatgctagtgaaaataccatcactatccacagtgacgaagccagaaatttggctgagtgagggcttgaataaatattaagtcaaaactaataaaaataactaataaatgtatcctttcaaattttcatcttcaaccaaataaaataaaactttgtcataaaaaataaactaaaaattagaatctgcctcgacgacttttcatgttttgaaattgctacatgatgacttcattgtcaagactattgaagatgtctttctgaatgtacacaagtaaaaaatgattcataaattgatctcacattcgagtgcgcaatctacttttcaaaatatttatagaagaaaatactctctccactatagcggtaacaacaggtagaatcagtgctaatgcaattagtcgatacactagaggataaacaatatacttctt

SEQ ID NO: 262075 - DNA, 851 bp, Cannabis indica
tgagcacccacacatcaaaagctgaagtgagtttgctatctgttcagaaatcacattggaaaaatgaattacaaatgtgtggaacaaaaaaatataataataagtgttattattattattatataaatattctttttataaactagtaaaaacttaaagcgaatattcttttattaaaataataataataataataaaaaaaagcaaataaaagaaatcttttctctacttccaccacttttacggtatatataaaatactttagagaaatagtgtattcttgtaagatcataatcttctatgcaatctccaataatggcttcagtttagtacttccgctcatcttttatcatcttcttcttctttaatttagcaaaagttctatagatttatgatttagcttttttttatattaaagcatttttttaagaatatgtttagatcatatacatatttctttagtgttttacaaatcctaacagacgaaaaataaacaggagagagatatacttgtaaatagtgtttttattttttattattttattagtcaaataaataatatttagttatttttaaaatttaaatttaaaattatttaataagcttttattaaaatacatagcaaaaaatacatcttttcattatgtactttgtgtacaattttacagattttaaaattatttaataagttcttattgaaaaatatgagtgaaccactagtatgttaacatgtgtaagcttagtctattttaataagatttaatggactaaaagtgacaaaagtaacataaatgtaacattagatatttaattcgctaaaaaaatgtgctatataagtgtataaaatctaa

SEQ ID NO: 262076 - DNA, 1948 bp, Cannabis indica
aggttaatgaagtgagcaaacccgttgaggaccaacttagtcaccaattagctcaattaaccttcgtggtacaataacttgctttaggccaacaagtgagacctagtgggatttgtcaaaccatgggccatgcaattgatacttgtcctacattatttgagggagagactgaggatatgaacattgtaggtaattctcctgatcaactaagtcggttacactagaacccttttcacaatcttacacacctagctagcagaatcatctaaatctttgctattgcaattaacaaaatgatccacagtctacacctacaaaacctagtttcaactttcaacagtggcctccacaaaattttgaaccgagacaaactcaagcaccacaagttgcaccaccatcaaacgccaaaccctctactgaagacttaattaatgccttgcccactaatactctatggttccaatagataactgaagcctcattgaaaagtctaaagaattaagtgggccaactctcagcatcttataatagattggaagctcatattttttaatatttccctcacaacctaagaagaatcccaaggagaatgctagtgcggtaactttgagaagtgaaaatcaatatgatcgacctatcatccaataccaaatacactgccaccacaaccacaagttgatagctcagttgatgaaatagtgtcaccaaagccaaccaacccttcacaaccaaggcctattgtggtcacaccaccacctttctcaagaagattgaagaagactaaaaaaggaaaaagttaacaacaagaattcttgatacattccgcaaggtggaggtgaatattcctcttcttgatgctattaaacaagtgtgacagtcagtaatctcatgatctgtaaggggaaatatcgagtaagttgtgcaatcccacatcgcttggggaaggtcaagtgtgatgattcatagattttgtaggtatgggactacatagttgaagatggcttaagtggattgattggtactacctatatcaataaggtgcatcttgttttctggtagcacatcacgaaagaactccatagttaagcatgcttgacctggggtaattttaggatgggtgacctcctaggaagttttctcatgaagtgtgcgagtgaggacaaagcacgctagaacactcgtgttggtctctagggacagtcatcagtccaaagagtagccagagtgacgtacccgtgtataagagtaattacttcgtgggggaaggtccaatggaggcttgaagcagggacattacaacaagcgtcatgttatgccaagtttttgaaagaactatgtactaataagcgtaaattgaggggtaatgaaaaagttagtgtgtgggagaatgtttctacaatactacaaaagaagtttcctccaaaatgtaaggatcctagtgctttcactattccttgcactattggcaataaaaggattaaaccgtgtatgttgtatttgggagcttctataaatgtcatgcctttctccatatacaattatttgaatcttggtccacttgaaaaactggaataattattcaacttgcttatagatcgaatgcttatcctagaggtgttcttgaagatgtgttagttcaagtcaatgaattggtgtttctagtagacttctatgatcttgatatggaagatgaatccaatccatgctccactgtgatttttttgggaaggccatttatgaaaactgcaagaacaaagattaatctgcatgaggggactttgaccatggaaatggatagggagacaattagattcaaaattttgaggctatgaggtatccaagtgatgtacatgttgtttattctcttgatgtgttgtgtgtgttgggaatattttaccaggatctagatttactaacaagtatgttgaattaacatcctaaatatgaa

SEQ ID NO: 262077 - DNA, 1015 bp, Cannabis indica
atggacataatcacacaataaacttatttttcaatctcattttagcaacatgaaattttaaatgaaatagttaatatggctacctcaaactcaaaccaaagccaagctcaaagatcactgaaatcaagcttgatctaagcaagttctcacaaattcaacaatgtttagaaatggattgagagaaatagagggggggtcagtttgagagagagaaaactagaaaataaatccatttctcaaccaaaaaacccttttgtttaaacataatcaaaattgcaaaattacataaatgccccatggccatacttacacataatacccatacaaagcaatatagtcatttcatcacatagcacattctcataaattttagattaatcacatataaatgaaatgccaataaatcatcccaaaattgtattttggccgcgaacccgattcggtccgaaatacccgcttgtgactacatcgcgccgacttgtcagattacacctgaaaaaggaccaaataggcatactatataataatatagttcataagcacgtaattaaattaaatccataattttacccttcttgggtcaaaattactaaaatgccattggctcaccaacggggtcttaacatgtcataaatcatattaattcacatataataaattatataataatataattttataataatacacaattaactagttaggattttctaatctatttcttaaccttagggtattacaattaccccctccttatagaaattttgtctcaaaatttacctgaacaactccagacatttctgttgtatattcgtctcgagtttccaggttgcctcttccactgtatagttcttccataatacttttttcagtgcaattgtcttgtttctcaagactttatcccttctatcaagaacttgcaccggttgttcttcgtatgataaatcttactgtaattccaatgcttcataactcagaatatgggacaaatgtgagacatacttctgaagcatcg

SEQ ID NO: 262078 - DNA, 644 bp, Cannabis indica
gtgtgatctactcgtcgaggtggtcgttttgatatacactacccctattttcggcgacatttccgatacaccaatttttaccgccaccgattgttaatgtgcaccgcttaggtgaggtttcggaaccccaaattttaaatatagtcatattatatgtcgttggactcggttttgaatgtagaatgcgatgatgataattatttaaccatttgatggtataggtgagagtaatatgtaagattggactaaacaattggagctcgggacttgagagcttaagattgtcttttggataaagtttaacgacttgggagaggtagggactcaacttgattattggacttgatttttatatgtgttgtataacattggacatattccaatttttatgatttacaaattgtttgaaaaattaaaaacttaatctacatatttttctggactgttctggggcactgagtgccaaatatatttttgtgtgcaaatatttatgcaggttatgatttttgggtttattcaaaatacagctgttatgctgccgaattttatagaaaataaaaaagaatatgttctttgttatcattattatttgcctgctttggttatactgatgagagccatgttgatcatgttcggtgcatatt

SEQ ID NO: 262079 - DNA, 774 bp, Cannabis indica
ttttttttttttgtaaaaggaatatgttcttttgttattcttattatttgtctgctttggttatactgatgagagccatgtttatcatgttcggtgcatatgattgtttaacgacctagtctctgtgtcatcataggtagatcaggtgtgcactcacctgtaagtgaaaaacctagaatctattcagggagttaattgaatctgagccccgatattatggtaattatcaggtgtgactactcaattttggatgttgttttctatgattggtattgagagctaagggtctagtggacggtgtgatatgcatttgacgcttgattttgtgattatttgtggtctctctactttgtttatatattttgataatgatgatgagatatttttttaaaaagctaaccatgctggaatttttattaaaccaatggtcatttgatattagttgttttcctactgggctttataagctcaccccttgttttctctctttcaagaattaattcatactagtggatgaggatggtaccgttgaggaagaaaattattattacttttgtcttattctacttattaaactttcaatgtaactgattttgtatttaagctgaaatggatggtttgatgacttaaattagctaagtgccaattagaaatgaagaatgatggatgctagatattatttagtattttatttaacttattaaatctatctattcggtgactacataactttgggaatattattgttcttttatattaatgagtggtcctgat

SEQ ID NO: 262080 - DNA, 1274 bp, Cannabis indica
  modified_base (1221)..(1221): a, c, t, g, unknown or other
tgacactacataaagctatgggccggagatcagtcatacggtctagattctttttttcgggatcaaaatgacattagcagcatcacaatcattctcaaaagttccactttcaaaaaactttcgcacacagcaataacatcaccccccacaatattccaacacttttgatagagtgccagagtcataccatccgatcctgggctcttatcagggtacatttggaaaagtactttcttaacttcttcctccgtaactagttgacacacctccaaattaacataatctggcacaataggataaacacaattaataaagtcacaagaagttcctgatgactgaaacaactcttgaaaatagttggaaatcatatcagccaaccccgtaccccaacgaaagccagttacccgcatcatcttgaagttgggtgatttggttattgcgtttactagtagtggcagccttgtgaaaatagcgtttagctcactgtttccaatagctttcccaatgatcaagagcctcgtagagtttcctttttgtatcctgatactgatgcaccgaaacactatctcttccggggtgtaaagctttcaagtcagctttgtaccgttttattcgatgattcaaagagccaataatttcctttccccaccgagccaatttctcagcacatagagccaacttgtcactaaactcatgcagatgattttgttccaaacaatctttcacaatttcaaagcataaaggatctttcaaccaagtattctcaaataaaaaatgagaaacatgagagaagctacctgatactttcggttcaagaaagagaggggaatggtccgacgtagagtactcaaggttggtaaggctagcttcaggaaatgcaaggctccgagattgcgatactaaaggacgatctaatctcacctcaacccaagcattggtgccccgacccttctcccaagtgaaaagatgcccatgaagctctaaatcagtaagtccacattgttggagggtcgtgttgaaaccgttaataagccattgagggtactgtcttcccccgcttatcttcatgccgaacagtgttattcatgtctccaatgacacaccaaggtaagctcgaatgattggacaaggtgcgaagaaggttccatgtgtgtttggcgtctgcttcgatcttggctcaccataaagaccagtgagtcgccactccctatgtttggaagnggaaacaactgcatcaataatgattatttgaaaaaatccagtaaaagtggctt

SEQ ID NO: 262081 - DNA, 1300 bp, Cannabis indica
attcaattaagcttgatacagaggagagagctgaatccctcacttgggttccttccaaattcaacttcttcaaattcttgagcctttgtagtgcttccaatgacaaaattggatccatctcagggccaccatcttggtaaattagacctgaagatatttgttatacacactcaacaaaacttgtataataaccataaaccaaactataaatgaccctgtttggcttggcgccttttgcttctcgggaaaatcttttgatttcggagttttgaagcgtcaaaagtacttatgttgttggtttttcccatgaagagtttcccgagaagctaaaagcataagcagaagctcagctaaacaaggcctaaagttgatttctactaaaagttgaaactcactgataatccaaccagcaattttaaaagtcaagccaactaggatcattgtatcacactatcactataataactttacataattcacacaaatttcatacctttgatgtttgtattgctcaagtcaatttctttcagacaaggcattaggctgatgtatgagatggctatatcatcaattgatgtgtcagataaggataatatttcgagtttgggagtatgtccggttaagatctctattccaatgttgcttactttcgtcttgctaaggttaagatatctcaaattttcgcctatacttgcaaactcttcgacttcatcgtctcccaccatggtagagctgagattcaaatgttccagcatgttcagacggggtaagaagcgaaatgttgagagtgacgagtttgatagatcaagataagagagaaaactcatttcggtatgcataaaggcttcagagtcgtctatgaaggtggcaccggagataacaagtctagttaaaggagctttatcaccattccctttaagtagagattcaattgtgcagttactcatgttcaagcattcgagtgacgataaatttggcaactttctaacattggtccaagttagattcaagaaactcaaactgggaagaaattgaagaacacaaacccctttgtctgatacttcacttccccaaagatcaaggtattgtagttttgtgagtccctaaaaccaaggaaataacaacatgagccaaagcactaaaaatctattccttctgagagtaaaacataagcctactaaacccaaccaaaaaatttattgttccataaactttcaagcttgaaataaaactaaaaagaacaaataagattttttttgcctcttgattttttttgtcttttgtaataaattatcctcaa

SEQ ID NO: 262082 - DNA, 1198 bp, Cannabis indica
cctcctgctagtggtaatgtaagtaaagggactgacattggcaaccctgatcataaacggaaggctgaggcttccagagtatgagggggaaatagaaagttttggggaaacagaggtggccgtcagggtcgcgggtcttcattccgatcatatcccgagtgtcccaaatgcaagaaacatcatcctggtgagtgtcgagccaaggaatgtttcgagccaaggaatgtttccaatgtggtgtcgtgggccactttatcaaagattgtcctcaggccaagaaataggtgcctaagaataatactacatagaacctggggcgactctttaccatgactcaagctgacgctgatgctagtccatcagttgtgacaggtcagttgtctattaatggcttttcatatattgtgttgtttgattcgggagctactcactcttatgtgtcgagtagagttattgaaagtttccataagccatgtgatatctatgcttcggggtttggaaccctgttacccttgggagaccttcttgtatccactaggtggatttggtctttgtccttttggattgaaggttgtgaattgactgtcaatctaattgaattgcaactatctgattttgacataatcctgggaatggactttctgtctaagtatggggcaacgatcgactgcaaacgaaagatggtggtgtttgagcccgatagtgctaacccagcggtgttcatgggtaagattcagggagcacgcataccaagaataacactgttgaaagttaaggatctgatgagcagaggttgtctgagattcatagtcactgcagtggataccagccaacctgtgacatcagggcctgagaatacaagattggtatgcgagttccttgatgtatttccagaagatttactcggattgccacctacctgggagattgaatttgttattgaattggttccaggagtggatcctgtatctaaagcaccgtatcgaatggctccagtagaattgaaataattgaagatataattgcaagaattattgaatctgggattcattagaccgagctactcgccttgggggtgctccggtattgtttgtgaagaagaaagacgggaccttgtgaatgtgtattgattactgggagttgaacaagctcaccatcaagaacaagtatcctttacctcgaattgatgatctgtttg

SEQ ID NO: 262083 - DNA, 7360 bp, Cannabis indica
aaaataaaaataaataaaaaagatgatataaagggagaaaataataagaaaatagaaaaaagaaaaggaaagcttaaaagtcttttgcttttagctgtttggtttaaattggctttcatttcttacatatgttaacttcatttttcttatgttgttgttggtggttatttttgttgacacacataagtaataaggggctgattggtttttttcatgtattattttcataaattattaaattgatatgcttatgtattaatttcatcatacctttcaacttgtttcaactgctgtacatggttgttacattggattttaagtacattcaaagttacttgtaatttttattattattcagcaaatgttattgcttcattgttccagtaagtggaagctggtgtttttaaatcacgttgtttttttagtttgcaatatggtacatgcttcttttcatttttctatgaatttgaaactgttgtcagctcatactgctttcttagtttttcttttcttggtataaatttattatttaaagtcctttacagagaagtttagtgacgtagatgtcttctacagtatatgatatgactgtatacatgagaactgtagcagttatttttctcttccttcaccgtggcctccatttgagtgtcctattaaagttcatatgaatatgctgaaactatttggagataataagaagaaaaatgttaacattaattcaagcacttaaaataaggcttctattctcccacataagatataattccttccgtctttccatcttttaatgtttctacagactactaaacatcaggaaggagattatgtcctcatcccatcataataggaatatatagcagctaggtattacaaaatgggcgcttctagctcaagaatagaagaagataaagccctgcagctatgtcgtgacaggaagaagtttgttaggcaagcacttgatgggaggtgcgcactagcagcagctcatgttgcatatattcagtcactaaggagcaccggagtggctcttagaaaatttgttgagcctgatggtccagttgaatcttccttgtatacgtccaccactgcaacacctgaacctcttgctctgactgagaagacacattctcatttttcattttcttctccatctgtgtcgcgacatattgatgctactgaaatattttccccaactccttcccctcctagctctagtcgaattcacataaatcatatgaaattcaatggtagcatttccaataaggttgaagaaaaacccccagtaccatttgttgggacagtgactacatcaagtacaccacaaaataccactccacgttccactgaagtgcctgaaggctcaccatttgaagatgcttcccttccttctggaactcctccatgggatttctttggtcttttccatccagttgatcatcaaacttcttttcaagaagacaaggctatgagccatgggtttgtgcactctgatgatataaatcatcttagggaagaagagggaattcctgagctggaagacgatgaagaaaagacatctttacgtggaaaggaagattctcaagattctgaagatgaatttgatgagccagccacagtttctctggttcgaagttttgaaaatttcaatagagtgcatgatgctggtgatgttaatgcttcaacttcagtgcctcctgttgaaactgcatcttcagaaacaaagtcattgaatggggcaaaggaaaattctcctttcttgccttccacagaaactgcagcatcaagttctgaggtactgaatggggaaaaaagcaagtctcctgatttatcaccattgagagccaaaaaatcagtcgtagtagtcccggttgagacaaataaaactcaagtaaaagaaggttgcatggaaaacaaggttgtccctaaggacttattttcaagcataaaagatattgaacttctgtttttaagagcctccgactctggtaaagaagttccaagaatgcttgaagcaaataaattgcactttcgaccaatgttgccagggaaacaaagtaagattctctttttctctcactcagcccctacccccttctagtttcattatatatttgtcaaaggttatcggttctaatttttttacatggaagttatgttaatatatagtgctatttgatatactctatctacaatttgcattattaatatgccaatgtcaatttgaagatgggtttgattaatattccataccagtcaaatgtaaaaagtaatgcataatctagccgattctttgcttgggtggggctcatgacttcaaattttggtatctgtattcttcatactatagaatatgcttgatccgtacaattttagaagaaggtccatctttcataagtttctccttctctgcacagctagaagtattcttcttttgcatattggtgagagattaaaacaaaagactttttactgtatcaggtggctcaacagcatcaaagttactgaaatcctgtttctcttgtggagaagaagatcctagtcaggttcaagaaggtaagttatctatacttgctgttgctggtgatcttgtatgtgttttagattttagaatctttttaaatatatattttatttatgtaaaaggagaagaacttgttattgcaattactatgaatatttcattgacttattcaaccatattcaagagatcaagttttatcatttggaaaaatcaaatcatgtggaatgtgttggaaaaatcaagtcccttgacatgtagtagttaatctcctggtttcataagattattttctgtaaacctacctgaacttggaggatcattttcctattaaaattttttccgatttgtcctcttgctaaatcatgcctttagggggttctcacaaattagattgcatgtgtctcttagatttaatgaaatgaggaattcaagtcaatatttttctattacttttatttagtattagaagaaggtcttctttgcttgtcttcggtagggattattgtaaaccttttgttgctttttaaactatgcctattcctgtatcaagactcaaaggctcagaacatctggctactcctctcattcaaaatccttttgctactcataacgatcacccttacatttgtatcaccaccatcaaacttggacctcataattaggtagaatggtttcagtttttgagaccatttctcaaggcaaggggaaatgggacaccttagagggctgtttcctcattcaaccaagggaatgaagaaacctggtcttggttttgtcatggttcatcaatttgattcatccagatattgggagggcttatatttagctttccaatttgaaagaaattcgggaagctgcagcagagccactctaattttattttgcaatggagacaaagccccaagatctgactctattgaattgattatttatacaataatcatcgagtttcctttatctcagtttattgaaaccagagttgcctgatatctactgtcccctctttagaaataattaaaaaaattaattcttctttttattagaaatgaaaataaagattttttttcttcattaaaagtcaaaacagagattatattactaacaggacgattggttatcatctaagctacaatcaaatgagatactaactacgaacctattttgcactccctggcctttttaatttaccatctaaggataccaatttctttcttgccgcaccaaggccttagcgccaggatggactaatttgttttgatacttagagcaatttttcttgcttttaaggttgaagttaaagttaatagtgattccatctagggtgcctacaaagtaattatcatagccctgttcttaaatattgttgtagttgtaggagtccattttctttaaggcccattttggtttagggaaaacaattcaatttgagtagaggaataggaaaatgctctatacaattaaaagccactgttgtcatagttttggtttacagtgctagattccaattgactgggctgtatgacattgttccattaatttgattataattttataaattatgttcattcttttttattttttgcagaacctgttcaaacagatgttaagtatataacttggcacagaacagcatcttctcgatcatcttcatctaggaatcctgtaggagcaggaaacttaaaagatgacatggaggacctgactggtaatgcatttgagaatattggcatgatctcgggaagtcatgcctcaaccttggataggttatatgcttgggagagaaaactatatgatgaagtcaaggtacggccaatacgcaagctttagtttctgtatttattttggtagacaataaaatagttttaatttatagaactacagtgactatttttaacaacaacaaattagtaactccttaattaaatatatgtgtatatatattatatacaagtgtttgtagagctttgatataaaagtgtgtgcacatatcattaccttttatgtatatgtttcattttacgtactttttatgcttactatgtcattttccttttcaagaattattcactgacccctttacataatgtgttggagattctttgaacaacttcctagttttggatctttgtttggtatatggttgaggaatgtagaacatctgaagcaaataagtcatgcaaagatcttttatgtgtagtcattaggctgtatagcaaggatttttgcttctcattaaatcaatttaaaattactttattaaattccttgtttcaggccagtgagagtgttaggagggagtacgatattaagtgtaggtttctgaggcagcaggaatcaaatgctgagagttctctaaaaattgataaaactcgttctgatatcaaagatcttcattcgagaatcagagtggctattcataggatttattctatatcgaaaaggattgaagaaataagagacaaagagctccagccacagcttgaggaattgattggcgggtatgtgtttgggtttctaatcgattctggttttatattttttatttatatgttaatttttatggacaagcactttctaccgtgcataaatacaacttatacttctgtgaaaaaatcttaatattcaattgtttatgcatgttgggcgaaaaaatgtcaacccttgccataacttaggaagttgagactttaaatgcaataagattgttatccttttgcatgtacatacgatgatacaattaaaaagttatagtattatgttatatatcttataataaaaatattgtactaagaatcaatattttaatttcacctaattattttgcttttgcatttcatttaccctgttctttgttgtgcctacggcaggttaagtcggatgtgggaggttatgttggattgccacaagcttcagtttgacattatctcagttgcgcttaacaatggcaatgccaaactctcagtgcaccaagaatcacataggcagattactctccgtcttgaaaatgagcttcattctctgtcatcaagctttagtaagtggatcggtgctcagaagtcctatattgattctctaaataaatggctcttcaaatgcgtctccatagcagagaactccaccaagagaaaaagaaagtcatatagctggcaaaacgtaagaaactacggtccccctatatatgtcgtatgtgatttatggttggaagagatgaataaattacaatataaagatgtcgtcgattctataaaaagtttagctgctgaaaccaaccacctttaccacgccacgagaaaaaagatggtaagccgacaacaggagcgcatctgcagttaatggattgagagacgatggtttggaggacgtcatttcaggtttgatagctcggtcagcttggtggcatttttggacagttgaataattttgcagattcttctgttcaaatgtatgttaaactcgataaagccatcgaaaatgctaagcatatttacgaaagatctctgtctcaaaatcattctcaatttcaattccaatttcaagttgcttgattgaagagagatcatcacaagctaagacgaatagatatgcccggcaacgatggtgtcaagttccataaaaactgttgtcttggatacacaaacaacctcagaatacaataccaggtctattgagggctgcattttgtatattgggagaagaataagaggaaattggaagaattcaactatagaataaaggagatggtaaaactgtctgacttggtcttttatatatatatatataataggtataataggagggtggtatttatagttacaaggctgtaatgtaattacaggtgaggatgaagattctatgcaaagcaagaaacagtacttgtatagtgtttttcttttcctttttctgtaaaccataggaactgagataaaacaaaagtccacccctcgctctactgtaattattattgatttataaatgtattgtagactatagaatgaaagtgtctgttttggccaaaaatgggtttgggatgttaaattttgtttgttccatactccaatccctcattatttataaaaaaatttaagagcactatgttatattcgactaagtcaataatagattgttttgggactacaattgttctttttcagtttcacccccacaccacactcttttcttatcccaaattctaacatgcttattccaaattctaacatagtattaaaacaaaaataaaaataaaagaaaaaacttctaacgactatccgacctaaaaaaaaaatctgatcaaaaaagtcaaaaaaaagagccaccaaatccaaaaaccgatcaaaaaaaaggtagaaccaaagtcaaaaagccacttgtgattcgggaatagtaagccaaaaaaagccgtttatgatcaagttatccaagatggtgagcaaataaaatagctactatgttgacttgagggggatgttagagagtctcacattactaatgtgtggaaagataataaatagattacatttactcctcctattgccaattggtttcgagatagaagtccattcaccttatcccaaattttaacgcaccattatgaacatgggcggagggagcggggtcttacgggttatttgccccccttaattttttataagttaatttttgtatgcacattttaaaatattttattttttaccctcataaaatttataatttttggttaattagcaattttcccccgaactttgacatgtactaaatcatgccccctgaacttttttgaccgttaaaaattctccctaaactattaagattgttagatttaaggactttatctaattt

SEQ ID NO: 262084 - DNA, 628 bp, Cannabis indica
atgcaatcttacaatctcttttacatacaaatctgcatactggtccactgaaaaggttattttaactgataaaaagtgagcagacttcgtaaatcggtccaccactacccaaattgaatcaaataaacccgtggttctaggtaatccaaccacaaagtccattgtgatatcttcccatttccactcaggtagggttaaaggctgtaacaatcctgtcggtctctgatgttcagccttgatctgctgacaagttaggcatctcgatacgaattctaccacattcttcttcatttgactccaccagaagtagggtttaagatcttgatacatcttggtggtgccgagatgcaaggaatatggagtggtatgagcctcttcaagaatttcatttctaagttccacactattaggaacacaaaccctgatcttaaacaatagcattccactatctgacactataaagtctttggcttgacccgttgaacctcttctctgacttttactagctctggatcagttagctgagcagctttaatacgttctaacagatcagagtgcagtgtcaagttatgaagtttgcctacaacaaactcgatgcttgatctaaccattgttggaaattatttta

SEQ ID NO: 262085 - DNA, 3117 bp, Cannabis indica
cctagcaccagaaatggaggaggactttggcttgtagtttgagaaatctcagtatttgaacgttgacacatgtggaccttacacgttgaatgtccaccttggaggatcaattgagaccagtgtcgtagtggacttgcaggaacaaacttgcacttgcggcttgttccaaatcatgacgtttccttgtcctcatacatgtgttgcagctcaacaacgaagtattagtatgtatgcactatgctcgccatattatacaacaaaatattagaagagcacatatgaagatacaattatgccatcttgtgatgagggtgagtgggaattgcctaatgatataaagaatatgacaattgaaatgcttgttgagaagcaactagtaaggcgaccgaaacagcaaaaggttgaaagaattaagttaaatcgaactggttgtaatggtaaaaggattgtggtaaaacaaatctgtagcaagtgtggttgcaaggggcacaatagaaagtcttgcacctaccgaggttaaaaatgaatattgaatttagtcgtattgttatctgttgcaatgttattgaattcttgataagacaaaaaaaaaaacgacattgtgtgtagacaaaattgatcctaaacgacattaatctactgcaatcctacgagtgagtttcaaaattgggggaagagtcctacgcttaaggttagaaactcaaatggcgcctcacgatttgcgtcgtcagtacaagagaccggcgatctccgatcaacagaggcggagggagctctcgcttcggcggcaggagcagaatcgtcgcgatgctcagcttcaagctcgccgcttggcctctactttactctccctcgaacatgcctctggctccgaagatatcgaacttgtaccggaacctgaacctgaacccgattcccaaaccgaacacgaacccgggacatcttcgaacgacctcgatgttcaccaagcttccaagctgaaaggctcagaggctcgaaagtggttcgcaagacagcttatgctccctgagtggatgatcgatgtccctgatcgattgcctcatgactggttcgctccttctataatatgtaatgtcatatgtgtgtattatatttatgtatgtatgtatgaagctcgtgttgaatttgagtaggtatgtatttgcgaggccttctgggaagagatgcttcgtcgttgcctctaacggaaccacaatcagtagacaacgaaatgggtctgtgcttcaccattttccatctaaacttcccaatgggtctcgttccagggacgtttctgggccagctcagtcttattccatacttgactgcatatttcacgaggtaaatgattctcacagttgattgctctgtttctgtattgcacttcaactgtttgttaattagtctagctgggttactgtacgcagttagatcaaacttactacgttatcgacatgttgtgctggcggggttactctttgtatgattgtagttcggagttcaggtttttttggatgaactctaagctagctgaaactggagcttgtgaacctccctcgcatttccacaagtacaggtttagtttggtacccgtttacagctgtgatcacagtggtttccacgcagcttatactggagaagtaccttatgtcaaggacggtctattgttttataacaagtaagcctttctcttatgccttgttggtgcttatattgttaaaagcttctgttttttggtgccaatgttggagttaattagagaaatcattgggagactataatgtaacattgctatgccaactcttttattagctttgtgatcttttaaaattatatgtgattatccgaggctgtagaatgcatcctaatgctacttcttgacactggtattataacaacttcaaaaatttattgttctgttgaatttgatttcaccaacacctctttatgctaaaggattctgttttcactctgcaagcactgtgtttatagaatatgtttacaagcacaccatatttcttatgctgttcactttgtcttttctcagacatgcacattatcaaccgggtaatacaccattgacattagtttggaaggatgagggttgtagtcaatatgttatcgatacagataacaaaggacaggcccttagtcaacaacaggtgcttgctttcttttgcattatttcaatgtctattgtgtgtgcatatttttctgttttttcaggttaacattgagtagagattccataatgttaatatttgattatttatttattttttcaatatcaggtggttttagagctccatgatgattgcaaagtgacaacatcagatgatcctcctgtagtacttggcttcttagatcaggagtttatacaaaaggtaacaccaattaattatttatagttttgtatagtcactggcggtaaaggaacttgtactcatgccaccctagcccacaaagtatgttgaagctgttcaatttcgtggaaatttaattatgatatttctgtacttctcagttaggattgcattctggaaatcttctccgttttgctattggtgatggaggattgagtgttgtggatggaaagttcgagaaggctgatttacattatattggcaaggtcaatagagcacgtgcttttgcagatagttattccaaggtttgtggaaaagatatcataatgtacttttttcagtggtttttttttcttgatattccattatactagatgtcgataagtcaaacaaagggggaagaaacttataatgacatatataatttgggtgaattgggcagtgtagtcattagtagtatgctatacctctaactgctttttgatatttatatttgcaggttatgtttcaatatatggttaggcactcacctctaatagttgatgatattgtaaatttaattaactcatcaaatgatgaaggaaacaagcctagtgatgttgaaatggctggttgatagtgagtggaatacaaattattatgttgttacactttaaaatgtaagtactctctcgacgactaagttatatatttggtttagttgaatgcatctgccaattttaatccattttcttttctgaatcactgtcttcta

SEQ ID NO: 262086 - DNA, 921 bp, Cannabis indica
ctttcttttctttctttaaatgtttcttacactctttagcaggcttattgtgtggacatgattaaaaaatactagtttcacctaattggaatgtaccatttgaagatatatgtgggaaatatgacccgagggaacgtactaagatatatcgaaggtttaggtctatgaaattaagaccttttcgggtgaagggaatgaccgaagggaagtttggagatggaccttctgcagagttcttttcttgagacctttccgtatatcgttggcctccatgtagctgtaagggtgcacatttgtgttggaacatgagcgggaccaacaaccacctgtgcagggataaggtgaattttgctttgccatagagctttgagtttgggccgccatggaagagatcttactggttaacaggaggattctcagtaaatgacgttaccagtaagatctctcctttggtggtccaaactcaagctctatggcaaagcgaaatttcatcccatccttgcacatgtggttgcaggtctcgcttttgtaccaatgcaacgcgtgcccttttaggtacaaggtggccaatggtatacgaaaagggcttggaatcttgaggtcttgaaaaacaactttcatgcaaaacgtccaatctccaaacatcctttcggtcattcccctcaccctcaaaggtcttaggtttcattggcctgaatctctggtatatctcagtatgttccctcacgttatattctaccagtgggttttactattatggagttgactacctcgggattggctacgttacactggttggccatgttgcacctacaatttagagaatagttagctcacataaacacattatacaagtcgaacaatatttgcagtgatcgtctgccttgtcgaatgtacatgtgagttgtttacagttgcggc

SEQ ID NO: 262087 - DNA, 462 bp, Cannabis indica
catcatcaggaattgaaaatattagatatataaattggcagctaatatagcaagcaaggaagtcaacaaagacaaccacatataaacaagaatacaatgcaaacagattaaactcacaataaaatgaatgcacaacaaaacatactgcagagtaaacatactgatcagctagtgagacaaccaaaacataattataaaataaaatggaaaaacaaacttgaatattacaatgagtaaatataatcagcctaaggaaagccctcagatctcatagctaattaatctggtcaaaaacagtataacacaagaattttcaaatcagccttactacaaccgttcaacccacccaacaagagagagagagaaatatatatatagacataagagcattgctgtaggacaccatgaagtgccctaaaaagggaggatagatagatagataaatagagagagagagagaga

SEQ ID NO: 262088 - DNA, 607 bp, Cannabis indica
ttaaacattttgttgaccaatctttggtaccggcgtttttaagaccaaatggcatgactttgtagcagtagagacccatatctgtctggacacttgtatgttcttggtcttgcggatgcatcttgatttgattgtagcccgaataagcatccatgaagcttaatatttcgtgctcggctgttgcatcgatgagctgatcgattcttggaagtgggaaatagtctttagggcacgctttgttgaggtctgtgaagtcaatacagactcaccatttcttgttcgacttaggcacgagtacggggttcgtaacccaagccgggtaaaaggcttcaattatgaagttgttgttgcgcagcttttcaacttcgtctttcagggctactgctcgttctttatccagcaatctttgtttttgttgaactggccagatgttaggatcgatattcaggacttgcaaaataatagaagggtcgattccgaacatatctgcatgtgaccaggcgaaaacatctaggtttgctctcagaaattttatcaattccaattttacttcgagcaacaaaccctttacgatttttagctttctggccgggatagctggatcgat

SEQ ID NO: 262089 - DNA, 971 bp, Cannabis indica
tacggcaaattttatcatatataatccaagtttcaatatcgctcccttccaatgtatactccatatatccgatactggtaaactttgccaatgccttggaaggacataacacttatccaaagtgtaagtatacctatcgctgattatcatgccagtctaaatccagtgagctgacaacttagagaattaaactcttgaacatataatcatgattatattccactgtgttgacaacactataatcatgaagaaatacatatgttctggacttaatagaatttaaacattaaatataatcatcaaataaatcacgtgaaccatgcaacataaaataatttctgatctttattaattagtaaatctgattatattgaaatggattttatttaggacacaaaatccaacaaaaaatcctttatggttcatataattgatatgggactaagggagatgccaattttcttatagggcaagtgggagatttttagggtttatggcttgaaaagcctataaagacattttagattattagttaagagttgaatattttgatatatgcatgaatgttaaattattaatcttttttattgaataatttatataaatatcaaaaaattcctattcatatatgaggttgtaacttgtagatgtacaaagactaagatcacttagctatgaacaaaacagtcacaacatattaaatttatagaatctttaaccaatggttactaggatgattcactaatgcctattcattggtggaagtaatctcggttagtatgatatctaagtgaaggtgttgtatacaatatagataatatatggcaagaacaaatatgaataaagtgttagaacttattttagcaggatcttgatttactagcatgtatgttgattataggactataatctaacatcctaaatatgaatttcttaaagaaattaaataaacacatataaagttatagaaa

SEQ ID NO: 262090 - DNA, 887 bp, Cannabis indica
ccaaacccgaacccagatcaaaacccaggcaaagacctaaacccgaaccgagactaagactcgaacccaaacctagaccaggacacaaacccacacaataacagggacatggagcaaaaaacaggatagggaccctggaaacaacctaggacagggacctagtacctgacctagactcgaacttgaacataggaccagctcgtgacccggcacaagaaatgtaaccaaattgggactcgaaagtgggatccggatctggcctcggggcttggacaaaacccgtagtcggtgtctagatttgggaccttgccatggacccgaaccctgacaaggacccgcccacacccggccgtgaacccagtcttaaccccaaaagtatacccgaacccgtacgctgtgaccaaaaatttgaaccaaaactggaagttgactgggactggaactaggacttggacttggaatcataactgaaattggacttagatccaaaaccgtaaccggactaggacccagactccaaatcagacatagacccgaattgggaaccggactcggatcccaacccaaacctggactcgggacccgaaccccaacatgaactcagtccaaaacatggaaccagactagggacacgataccagggtcgggacatagaatcgcatcccaatctcgatctcgaacccaaactcagaaatgggacctaggacctgaaccagaactagaccaagatccgttatagtgatccagatcttgactcgggattcgggtaatggggcctggaatagactagtagtcggtgtctagatctaggactcagacttggacaagaaccaagacgaagaacccaaaccgaacccaaaccaagacctgggacccaaaattagaac

SEQ ID NO: 262091 - DNA, 766 bp, Cannabis indica
aaaaccttttgcgtccacgtgtccttgtctgggtggtccacgtacattgggcaaaatcagggacaacatttacccccaagccttgtttagttgtgaaatgaacaaggcttgctcagatgcttccggttggctcctcggtttcttggcacgtgcttcgggcgcgtgaaggtgtatttaatgatcaccattactgcagcgattcactttttgcaggcgtcgattcgtttcttgtccatttaattgatacggcacattaatgggtgtcagacggatactcaagcgtttccaccgcctcgatgacaaaccaactcagccgttggatcctgggaattcgaatcgtgtgccttcccaaccgcacgattggtaggcgatcgcgcctgttccacatgcactttggcctataaaagccaccattctcccttcatttggttactttcagactttcaccaaatttcttcaaattttccagagagaaagaaaccctcgaaccagaaaaccctcaaacaccataggtttcttactgaccttccttcgctattgtcagtcaacgtttcaccgtcgatcaacaacaacacccagctctaaagctttatgtaagtttttcgcatcccgtactttattgtttgtgttcattgcatgcttcactgttcatctactttttctgggtttgatattgaatttttagggaagtttcgtcttgagtttttgtgtaatgcgttagattccccttttctggtgtttgagttacttttattatgcgtattat

SEQ ID NO: 262092 - DNA, 876 bp, Cannabis indica
cccctttttcatcttacctgccactatttataatcacatagtaggcagttaattagagaatgtaatctttttacaataattatcctttggaatcatgggatctgattacacatcacgctgagtaaacgcagtttttatttaaatttcacacagctatgaatataccgcttttactaggccagaatgaatgagtattaaagatatatggtaagccttatcgtattgtaatgcctcgctgggaagggagttgagttaaccttaatgacgagcgggagctcgtcatatgtcttcccgaggttgacaatgcttttactttaattctgagaactgaagtttctggtgacgatatgatctttttcacgtccagaccttcttacggcaaggtggatgcctcgctatctctcacttttattcacccatctatttatacttagttagtataccatgcattatacgctaagtatctctgttgtcattatatctccaccacgtaacgaggttagtgcctcgtcttgtacacttgaagttacatggtttctcattggggcacaggttaacagttagtacatttttatctcgcataagagtgttcagtcaaccgagttgtaaacatgctctgttaattgtgcttttaacaagttattcaatttaaagtgtaattatgattacgtgtttgagttctttattctttctagctcgacacgtgtcttcctctgatctgcttgccgaatttcgggtaaaacagtgattaattaaaattttgcttaattattataaacgtaaaataacatacatatgcaattccacaatcccgtttacaaaaatatttacaaagttttactgtgcaataaacaaaagtttgtcgcttagcgacaa

SEQ ID NO: 262093 - DNA, 540 bp, Cannabis indica
aattaaaatttaaaatatgagaaaaaataaataaatttgataaaatttgtaataataagtttagttggaaagttgttggtgttggaaaaattattatcgttgaaaaaatcactggaaaaatcattagaaaagttaccggaaaagtcatcaaaaaagtcattgttgttggaaaagtcactgttgtcagaaaagtcactagaagtagatgtctcagatataaataaaaataaatccgattctataacataataaataaaaacaaataccacaaaataactcaaagcgattataattgaaatataatcggttctgtaacataataaataaaagcaaatataacaaaataactcaaactaattataattaaaatagaatcgattctataataatgttataataaataaaaacaaataacacgagataatttaaaccagttataactaaaatagaattacttatataacataatgaacacaaacaataaatatgcaataatgcaaaccgattataattaaaagaagaggaaatcagttcctaaaa

SEQ ID NO: 262094 - DNA, 4039 bp, Cannabis indica
tattatttaaaaataatttgaaattaaaaaaaattataaataaaaaataattaaaaaatcctttatatgtgatagtgcatgacattgaacttcaggttcaataaacttcagtttcaagttcaatccttatgaacttaattcatttctaagaatgagtcatacgtgtataattagaaatacataaatttacacattttgtaaatgcatgatcatataatcttatcacatcgataagaaactatgcaataaaaatctaacaatggctcaagattgttaaagaaatataatttaaatattttctatgtgcaaatatatgcacattcttcttttgagccttataaattaacaatgagaagaatcttctggttcttcaacaaaatttagtcaaattctttgacaatttattgcatatgattaacacatggacaatccagcatgacacttaacacctaaaatggacagaaatggtaaattgctaatagtttcctagttttgggggttttactgcccaaatttgagttttgagggttaagtgaaatcaaaatgaaaattttggaggttttgccccatttaccctatattttaatcataactagatgcatcatttttttgtatctattttttatttgttgttagaaaaataataatgttacaaaattaaaaatattttgatattctattatgattaagacccttaaaaattcacataataaggtgtgattattattttttttaaatgacattattaattattagtataatgcattatttatatgttatttcattacgaattgattttttttgtatgtgcagtaaaaattgcggatcgctcaaatatgactatggcaattgattcatataaacgatttatggtaagtatattatgggaaaaatttatagtaggagtattatttttctttatatattattgtgtacattatagttataatagatattttatctatttgaaaattttgaaataatttagtatgatacaatttaaacatccaattgcaatatttttttaaaaaatatatatgtgtaataactatttaaaattttatttttcagtatcataaattattagaaattttctaaaaacagatggaatgtgtaccctataacaaaaatttagatctgatataaaagaaaatatgttatagtttctcaaaataccgaaaatatagatgtcgttactgagagacaaagtaataaccctactattgttagttattgttgggggtatcaagtatcaacccaagtctcacatcggaagaataagcaagagttgtcttggatataagtgttccacctactctattagtatgaggctttataggaagatgcccaaaaataaatcgtgagggcttaggtccaaagcggataatatcatactaatatgggattcaaggtgaggtaacaacccgacaaggtgaaataatagagcccaacaagtggtatcagagctaaaagtttgggagttgagatagtgggctacatttacgatttgtgagagaagtcctcaatgtgatgacctcgcaattgaagatctatatagtgtcttgtatcgaaagtctacttaatatttaggtagtcaggtggcgagtcttgttgatgattacaacggtgcaagatggagatcggtgctagaacttgtatcgaaagccttcctgataaaggtaatggtcaggcggcgagttccgttggtgataacggcaacataaagaagtttgccggaaggaaaagcaatgtatgtaggtaccttggtttgaggggatgattattggagtatcaatccaagtcttacattggaagaataggcaagagttgtcttggatataagtattccacctagtccattagtatgaggtcttttgggaaggtagccaaaaataaacttgtgaggacttaaactaaagtggacaatgtcatactaatgtgggagtcaatataaagtagcggtcccataaaatgattagattgattagttgatagatatcattaattattcgatttggatcaattggagttaacataattagttaatttaaagtaatgatatgttaaaatgtgagaaagaggtggatcaaatttaaattatattaaccaaagactttttttagtactttaagtattttattgtactattatatattttaattaatttaaagtaaatattttattgatattatttatatactttatttattgaaaaatgtgatcttgtagagtgatatagaggccataagcaagcttggagtaaagtcttatagattctctattgcatggacaaggattctacctagtaagattatttttctttttattatttataatttaattggcatcttttttattgataaattaattttcttgatttattgtgatgtagtaattaattttggttgaaaatatttcttttttttagatgggtcactaagtggtggagtgaatgaagctggtattagtcactacaataatctcatcaatgaattagtcaaaagaggtaagaataaccaatacattttatgttctacatatttcatttattggtgtattaattcattagaaaattaataagagttttaaataattaaataaaaaattaaaaaaaaaaccataagaagtacaattataatttctaaaaaaatatgagtaaacatatattatgttgataaattaataacctaaatattctaatcaaatatttaagaaataataaaaaaatattttcaattacaccacaattttttttgacaattatatcaccaaaatatttaatatagcacttattttttaattagttaattttttgaaacatgtaatggaatattttaattttattatagtgatatttatattctattaatatctcattgtaatttttaaaaagattattactcttcaattgagaaataagataaaattatttactaataataagtaattgtgtacttaaaataattcaataatatatattctctttggtatataattaggtatcaagccctatgtgacccttttgcactttgattctccacaagctctacaagagaagtatggaggatttttgagccgatcaatggtgtaagcaaagctatatatacactaatatagatgaaaattaattttttaacatcttttagtagaaattataactcaaactttttatctatatacataattgtatacgttataattataacagaaaatttacctattttcaaaacatttaaaataattaattatgttaaaaataatattcaaatttttcagttgcacgcgtatttatttttcttataagagtgcaatttgtattattttgaactttgtttttgttgacataatttatttagtaatttttcaaaaattagtagaagatctattataactataatgtaaaatgtcatataaaaagataaattataatattttcaaatactgaaaacataaatgatctaccgataggtagtacaaacatgacactcttagtaaaattgcactattaatatgtaactatagtaatactcatgtttatttacttatttacatattctgaaattttcttaaaatcttaacagaaaagatttcaaagattatagtgaactttgtttcacaagatttggagatagagtgaagaattgggtaacaatcaatgagccattgatagttgctcaaatgggatatgatttgggagtggcagcaccaggcagatgttcatttccatttttggcaggtccttgcaccgaaggtaattctaccaccgaaccatacattgtcacacacaatatgcttctcgctcatgcaaccgctgttaagctctaccgaagaaagttccaggttagactcgaactttctcgtataatatattactaaaaaagattatcaataagtagtttgaaaggttgcatttaagctattaagttactttttatgtcaaaattcataattttaaatgttacacttaaatccctgaataaatttatttttcgcaataaaatcatattttgtactaatttagtgtcattattagtcatca

SEQ ID NO: 262095 - DNA, 103 bp, Cannabis indica
atactcttagactacaccaaatcagatttctagacttgccttagtgcttaaagtctgctgataagatggcgattactctgggggtggactaatgattttggag

SEQ ID NO: 262096 - DNA, 3513 bp, Cannabis indica
atgggaatttgcaattatacaaatttttctgatcactatttaaaagtactaatgccattttcttttgtgtactcgaataggttggttgggacgagtcaactactggcgaaaggcgtaatagggtgtcaatctgggagattgaacctgttacagctccatttttcatctgcccccctccatttttcagatcaaagcgtccaaggcaagcggggatgccaggtaagagaattgacaatataaccgttctttgactttgtggagtttggttaagtgattgacttattcggtatctattttgtagatgacgattcatcggacatagataacctatttaagagaacaatgccttggctcggtgatgatattggcatgaaggacaaccaaggttttcctggcttaagcttagtccaatggatgaacatgcagcaaaatcctgcatccttggctaactccatccagccaaattacatgcagcattcgttttctggctcggttctgcaaaatcttcctggagctgatatttctaggcagttgggcttgtcagcacctcaaatatctcaggcaaacaacttacagttcggttcccaaagactacctcagcaagcacaacagcacgatcaactcccgaatttacctcccacaatgaactctataggatctgttatgcatacgcagccacagcaacagatgagcgatgctactcggcaacaaccaagacaaagtatggttaatcaaactctaccttcgagtcaagttcaagctcagactctgcattctcaaaatcttgttcaaacaaacaatatgcttcagcaacaaaattccatgcaaagcaatcagattcagagaaacctctctcaaaatcatcaacagcagcatcagcaacatattactagccaaatgcaacagcaaaatctaatgcagtctcaactacaaactgatcaattgaaccaacagtatcaacatatttcggataatcagctccattttcagttgttacagaagcttcagcagcaacaacagtcaattttagcacaacagtcgtcgctgcatccacccgctcaacatgctcaaaaccaagatcagcagaggcaaactttggatggttcccatagtttctctaggtcttcgactcctagccaaatctctgagatgccacaaatggtgacaagctcgcttcctcaaccgaacattacagtcacacaacagatgactcagaataataacatcaatcaaaccaatgctcgattctctcaaacaccccatcaacctaagcttcaacatcagcaacatggcatgctgtctgaaatgcccgggaacatgggacatcccccgaactcagtaacaaatcatgttgtttcaggtggtaacagtgcagcgacaggagttgtgggagctgggcaatctgggataaccgaagatgttccatcttgctccacatctccttctacaaacaattgttcaaatggagttccgccggttatgaacagtagagttcaccgaagtacaatcgtggtggaagacatggctcagtctgctgccaccatcttgagtcccaatggattggaaacaatgtcttcaaatgtcaactttgtaaaagatttccaccaccaaaagtctgaagtcaaaccttcattaaatatcccaagaagtcaaagtcaaggaatctgtacccctcagacatacctgaatggagctgctcaaacagattacttggatacatcatcttcaacaacttcaatttgcctttctcagaatgatgtgaatttacagcaaaataatcatcacaataatcattttcctttcactacacagtcaatgctttttagagaagcgagtcaagaaaaggaagttcaggcaaatcaaggaaacaatggttcttatggtaatcccatcgacgatcatttaccagcacctttgaatcccgatgctttattgacaaaagaattggtggggttaggaaaagatttcccgaataatctttcaacgggagacctgttgagcaactatgaaaattcaaaagatgctcagcaggagctttcatcttcgatggtctctcagtcattcggtgttcctgatatgacattcaattcaattgactcgacaatcaacgatggcagcttcttgaacagggggccatgggcaccagcaccgccatttcaaagaatgcgaacatataccaagttctttttatatatatatatttcaactaaaagagccatcttttgattctgactttgttaatttcttcataaaggtttacaaacgtggagctgtgggaaggtctatcgatattactcgctattcaggttatgatgagcttaaacaagatcttgctcgtagatttggtatcgagggacaattagaggatagacagagagtagggtggaaactagtgtatgtggatcacgaaaaggatgttcttctcgtcggagatgacccctggcagtaagtctctttcatttgaatttacatttactcttgtttcacactgttagctaacattgtcttgtcgggtactttagggagtttgtcaactgcgttcgctgcattaagatcctctccccacaagaagtcgagcaaatgagcttggatggaaatttcggtggaggcagcggtccacttcaaaatcaagcttgcagtagttctgatggcgggaatgcataaagttaacaactttcttcatttgaagtgaaaccgctcgtgatctctttcagcatgttgtaacaccgacaatggatcataaagtcatcggtgttgattgcaggagcaaacaaaatataaaaatttgcttctgctcggaaacactagcgaaatgagaggtgattccaaggcaacaaaagttctaatagagctggctatggatttttgactaagtcttcttgttggactgtaaaagggaaaaaattatactaattctagttttttttttcttttggtaaatttttgaagttttctcactcaaatgcattgtagaaagtgcattgtagaaagtagaagaaaagtataatttttttttttataagtgatagttcttctgagtgtaaatttgtagatttcttgaatgaaattaattttatgttagtgaaatgcttgtgagtctaggaaggcattgtatcattgtattctaagatttgtatttttggggctttagcattattattattattattccatgttgtatagattagagacacaacaacatacatgaagtgctttgatgttgaggttgacccttttcttgcttgtactttttacatcttcattttgagtaaagagacaaaattctcaagtcaaatttagtcaaaggagaaatctttgaaacttttgaaatctcttattatttatattgcccaattgtatctcttattaaaataatgagagagtacaagaatgatagaaaaaaaaccatgtaatcaagttttttattcactctgaaaaattggtaagtaaacttgcaaaattggtggaattttgaaccaatgttaattatattaatttttgttgaagaaaaga

SEQ ID NO: 262097 - DNA, 3198 bp, Cannabis indica
tagtgtgtaagactgtgaagaatccaattaattgaaggagaatcgggcttagatcttggtgatactctgctacagaaaggatacaagggttagaggtctgagtggaagaattaattgaaggagaatcgggcttagatcttggtgatactctgctacagaaaggatacaagggttagaggtctgagtggaaggagtcatttaattccactgcaaccaatgtaaggtttcttgaactttatatgtgtttaaatgctattattttagaaattcatatttaggatgttaaacaacatacatggtagtaaatctagatcctagtaaaataattcccaacagaggaaccacttcttcttccttttcatcaatcaaaaccagctcctagttcccgatagcttcattgacatgtcctcctagaatcacacttactctagggtgctccagcatgtctgacttagggttgcgagtctgagcaagggcagccaaaagatcctccatgggttttgctgtccaaaataggcagaaggtcagaatgacaccaaaaaattacaaatgcaagtgtagtgcagttaaactaatcctaacctggcgatctaattctgccctaacaaattcataaattaaaaagctggtgtcatcatcccctaaaaagctatctgaaggaagaaactaacttgaggtgaggtaggaggaatggtccaaaaggatcggcacaggacgaccagaacccatccgggaccgacctaagaaatgacttaagttggagaaataaaaacttttggcgttatcaccccaccaggaatggggcatctgaaatttatacaatctcttatcgaattccaccagccttaagttagcgtagtccttgacagaaggaacgaagtgaatatgcaaaggagacttacagactcgggaggtacttgcaccaggggctctggagttcgagatcgagaacgaaaatttgggccggattggagatttttctttccatgcctcctccccggagaccctctcgaaggcagcctgaaggtgagcatacgcgagctcctactcccccttgtatctatacttgttatatttgtcttccgcaaatgagataatgcctgccctaagtgccttctcactcctaggattctggacattgggacaaaggaccttggataagttaaaattgtcaacagattgactctctagaattagcttagccctcctatagttgaccatcattactaggtcacccacattcaagtcttccttcttgtaactggcaaatacttgcgcgtgatttaggaagtgttggatgggggtagtacaatgcatggggggatcctgacccagtccgttagtagatctgaacgctcgaaggctttgaacccagaatagaagaaaaacctatggcgatactcctttacattcttctgaaaatgaaagggtaccggagtctcattggcaggatgggtctgatgtttgtaaaaaccatctttaaacttgtcccccttcttgggtactgagagtagtttgtaaaaatataaaatttcagcagggctgggtggagcccaacttctagctatataaaaaataaataggcctgataacaggcggtaagcttgtggagtcagctgatagggtgaaagcctaacaaaaatatggaagtcaataaagtagtcttggacgggtaacatggccccagacataaggtgggtctgactccaagccccgaagccattgtagttatggtttggcgtctcctcgtcccttagaagacagtgttatactccaaaatggagggcttaatcccagccacagtgacaatattctccagttgataggtacaagtcaatgtcgaatagagttcgtgagcctcccaaccattggaatggcacgcgaacttcttgtaaatgaccagggctttcataacctcctcgaaggtggcctgcttctttggccccttcttggaggattttgccccaatagctgcgggtgtagacataggatcgctctggtggagattaagaatttcttggttgaacccaaagaaactgtgtttatgaagatcgcgaaggacctcactcatctgaaaaaaaaaacaagaaatccatcagttcgcccccacattaaaccctaagtcgaaaaggggagtggatgtcccctaaccgctggaaagaggcccccttcggatggctgttgaaaggaatctaacgattcagaaagacagacattgggtgcaaaatatcaaagcaacacaaggaaatcaaagaaaaagaaatataggagtgcaaaagctgcttcgaactgcaagaaaggggcgtacgaagaaccctccaatttcgatcctcttttcagaaagaagagagaagcaatacatacataatgaaaatagtaggccaaaaatatagtgataaaagacacatgccatcagaccccccttgaagggggcgtcacaccaactatgaccatggtcgttattccgaggaaaacaaacaaagcaagtaaatatacataatcttatcactacttgccctatcagataaaaagaaatatataagcagaaaaaacttacacaataaaggcaaggcaagggccaaagacgtcgtgtgatggtaatactttgcctgacaacgacagagaaagaacagaagaaaatcaggggcgtctggaattttgccaaatgggtttgaaaatctagaaattgaagggcagtagaaatgaccctgttgggggaagtgttgtcttttatagaccatttggggtgcgaggcagtgtcgagtaaacaccatcatgcggtggggattcacaacagttcagatccccttgatccaacagataggatgaaagagtatgatgaagagaaagggcagttgaaacatttgagtacctctctaacaacggcattgatggaagggactgtcaataggtgggaaacgaattgttgcctagcaaaaaaacaaaggtcaataatgacgatcataaatattgcccacgcgcccgaggcacgtgtcattacatttattgatacttgagacgacttacaagtctcatttacttacgactaaataagacttgggggtaaatgctgctccgctttcctcccaatatatgtggcagttgttgtatatgacacgtggcaggtacaggcacgtctcccggagatgagttgaagacttaactaaaccacctcaagaaacaataagtacgatttaa

SEQ ID NO: 262098 - DNA, 607 bp, Cannabis indica
aaagaccagtcaagttattttgtgacaataattcagcaatgctatattccaataacaattcgagctcatccaagtgaaagtatattgacataaagttcctagttgtgaaagaaagagtacaaagtggacaaatatccacgagcacattggggcaaactccatgatagcggatccactcacaaaaagattaccacacaaggtctttcatgggcacactgatcatatgggtgttttcttgtttgaggatatcatgatttagtaagagtttgtattttgtttgctttatgtttgtataacgcatttatgtatttggttattttctgatcataaatgaagtttttagtttattcactctctttcgttatgtttatgtctaacctcactttggtttaaggaggaccacttagaaataggcatgttcggttcacattacatgaaatttctatgctacgcatccataactgatctatgattgatcttaacaaatcttgtcttgaaaaattttatcttaataatttttatcttttatttatttaattaatttgaaaaaattattatttattacaaatataaataattactatttctgtaagtctttcattaaatt

SEQ ID NO: 262099 - DNA, 640 bp, Cannabis indica
aaacccaaatccaaacgacatgtcgtgacaatgtgcatacattacaaagatttcaaaattaaaaaaaaaattatttataggaaaggaaaaggaaaaatacccattgaaattaggagtggtgcaatcgacgacacgctcgtgatcttcgtccatcttgaagaaggggcagttctcacaacccgattctctgaactgaatgatcacccacccccacaaaaatttcaatataattttagaaaatggtgaaactaaaattagaggaaaaatgagtttcgcggtgttagaagcatgaagttttaaaccctaaccctgaaaatgtgagtaagagaaaacaaagaagaagaagaagaagaagaaggatacctgatcataagtcttgacaaggcggcaacgaaggcaggcccttagttcgtggccgaagctcgtcggaatttgggcgggagcagttcccattcttctgtcttgccttctgttttcgctttcccttattcaatttctctttccaagtcaaataaaggaaaatttgactatgcatacatttagtatggtcttatcatatgctactctcttaaacctcaaaaaaaaataaataaataaataaaataaaataaaatatatgtttttttttttaagttaagag

SEQ ID NO: 262100 - DNA, 980 bp, Cannabis indica
taaaccagtccaatgatcctcactaggattggacataaatcgactcaaagtgctgacaacatatgctatgttaggccttgtgcttatcatagcatatataacacttccaatggctttggcataaggaatttcttccattcttttcttggatttttcatcttttggagattgttcagttgtgaatgcaaaatggccagctaatggaacttgagtctcttttccatcctttatattgaacctcttaatgaccttctcaatgtaagattgttgtgtaagcagcagcctcttttccttcttgtctcttctgatttcaatgcctaggattttcttagcaactcccatgtctttcatcttgaactcactatttagtacatactatagtttgcttatttggttttcatctttacccatgataagcaggtcatcaacatagattaacaggaaagttgcaacttgtgaatttagatttgtaaaatacaagcaggtgtcatacttagatctaatataaccaactttagtgactacaaagtcaattttcttgtaccattaccttggagattgctttaggccatataaagacctcttcagtagacgaaccagtttcccttattttgattccaccttgaaacctttaggttgctccatgtatatagtttcttcaagttttcatttaaaaatgctatttttacatccatttgttgtatgtcccagtcaagttgaacagcaattgcaatcatcattcttattgtcttcatcttgacaactggtgagaagatttctaggtaatctacaccttcaatttgtgtgaatccttttgcaactaatctagccttgtatatctttggttcatctttagtcataccatctttttctctgaaaatccatttatatccaattactttctgcccatctggttttattacaacaatccatgttttgttcttctttagtgaggtgatctcttcattcattgctgcatt

SEQ ID NO: 262101 - DNA, 849 bp, Cannabis indica
ttaattactactaaactatacttatgattctatttggcaaatcaataccttttatgatttaaagagaataaaaataattcaagaaacttaaataacacaagtgaatattaatcaagatgagacaatagggaggagaatcctgttgtttgtttacccaattgttaatgcctaattgctatccttttcttgaagtgaatgacagattataaattaacctaactcttttcagatcttttaggttctaaatcacatgttctctaattaatctcttaattaaactaacatgaaatcagcattaagcaataatctaattgtcacataagtcatgtgaatactctcgtttcacaaagaacctcgattatccaattttagcattctcaattctcacttttcagattttgaattgagatcatagaacatgtagaaggtgatcaagcttacacatggaattaaacacaaatatagataatttcacaatcaagaatggaggaatggcaattattcattaactaggcaaaaactttaaacaacattcatcatcctccctaaatgggaaatttagttcatattcaaatccataaccattcctaaaacagaattcaacataaagaaattaaaaaggaatagagaaagaaactgttggtggaatgactctggatcttcactttgctcctctagccgctcttcactgcgttttagctccaaatcgcttcccctaattttcaattgcagctttctatttatttctcatttttagggttcaacgaacgaaaatacccctgctcgtacggactctcgccgcgacgactggagcccccaaaaactacgtttctgttttccactttatgg

SEQ ID NO: 262102 - DNA, 2383 bp, Cannabis indica
attccatttccattcctattcctttgaaccttgaccccgaaacctggaccccaaaccccaaaccccaaacctcggaccccgacccccgacccggacccccgacccctgaccccacacaccctgaaccctgaactctgaaacccattaaccctgaaccctaaaccttgaaccctgaacagtaaaccccaaccccaacaccccaacacccaacacccaacacccaacaccctgaactcagacccttatgttgcatttggtaagaggtaatgaaatggaatggaaaggaaacaattttcattttattcttttatttggttgcattttaaagtagtgaaatgtcattccaatggaatgccctttccaccagattggtggaatgactcttctattttaaaattgaagaaaagaccattctaatgtaacaagagaaaaaatttaatgattttttgtcaatgttttaagcattttaaattttattttattcccattcccatgaaccctgaaccaaaaacccctaagccataataccctaaaacccctaaatcttaaaaccataaaccttaaatccaaaaccctaaaacccaaatcccaaaccccaaaccctaacttaagcaccctataccccaacacctaacacccaacaccctgaaccctgaaccctacccctaacacagacccttaggtggcgcttggttagagctaatgaaatggtatggaaaagaaataattttcattccattcttttgtttagttaaattttcaagtattagaatgtcattctaatggaaggcccttttcaccattttggtggaatgactattctattttgaaatggaagataagaccattccaatgtaatataagaaaaaatttaatgtttttttataatttttatgcattttaaatttattttatacaattctcattcccattccccttaaccttgaaccctgaaccttgaccccagaacccctgaccccaaacccctacccctacccctaccccgtaacccctaacccctaacacctaaaccccaaccccaaccccacctcaacctcaaccctaaaccctaaaccctaaaccctaaaccccaaactccaaaccccgattcccattcccattcccattccttggaaaattcccattccttggcccattcccattcccattctcattcccattcccattcccattcctcggcctattcccattcccattccctagcccattcccattcccattccctagcccattccccaatacttttaacccggaccccaaacccccaacccctgacccctcacaccctgaactcgaaaccctaaacctataacaatgaaccacgaaccccaaaactgaaaccccaaacccgaaacctaaacccaaaactccaaaccccaaaacctaaactccaaactccagaaccccaaccccaaaaccccaaaccctaaaaccctaacaccctaaaccctaaacccccaacctagaactgctaaccctaaaccctaaccccaacaccctaaaccccaacactcaacacctaacatccaacacccaaaccctgaaccttgaacctagacgcttaggtggcttttggttagaggtaatgaaatggaatggaaaggaaataatttttgttgtattattttgtttggttgtatttgaaagttttaaaatgtcattcccatggaatgccctttccaccattttggtggaatgactattctattttcaaatggaaggaaacaccattctaatgtaacatgagaaaaaatttaatgatttttttaccaatttttaatgcattttaaattttattttattccatttctattcccattcccattcccttgaaccctaactcggaaacctggaccccgggccctaaaccttggaccctcgatcccgacccttgacccctcacaccctgaaccccgaactctgaaaccttgaaccctaaacgttgaaccctggacactaaacccttaccccaataccccaacaccctaacacccaacaccctgaacccatgcccttatgtggcgtttggttaaaggtaatgaaatggaatggaaaagaaacaattttcattttaattcttttgttggttgcattttaaagtattgaaatgtcattccaatggaatgcctgtaacaccctaaataattaggcacgatacccaagatatttatgaaaccctaatcccctatacaggattactaaagagattagcgcggaatttaaactttacggtaaccgaaatgaaaataaaacttgtaataatttaaactttacaacagttgggatcccaaaaatatttacaaactttattacaagtcttttttcagttagccggtctaagcgacaaagtagagtttaaaaa

SEQ ID NO: 262103 - DNA, 590 bp, Cannabis indica
tatttgaagtgtaaaatacttgctagagattaagcaatcaaattaagataccataaaattgttatgaggattagaaatcttgactcaagtcattcgaatggactatgcaagaattcttctatcttattctcataattctgataagttatttctatccacgtgaatggttagatttgctttatcagtagtgttcttaagttcctatcacaagtgtcaaccaaatgaagatgggtaaagaattttaaaattctcccactcaattaaggtagtgtgatacattatcaaagaactttattggtatcattatctattacaacagtaaatctaaactggaacatataatcaagatcaaggatttattctgataatagctaatttattatattgatttccatgtttaaaattatgtgtcacaaagagtactgtggaatatagtccacccctaagtatatagagattatgatccacccctaaaggttatagagatcatgattctctaagtgttatagagattatgtggagcttcgaatataatccagagttcaaaagatataaaagattgttgaactgcatattattcttaacttttt

SEQ ID NO: 262104 - DNA, 1778 bp, Cannabis indica
ataaattatattttaaaaataaaggataaatatgattacttacaaagttgtgacgtatagaaaccaacgatcttgtgccttgcgtcgttcgatattttatcagctgcctatttgcccgttttttttgcggttcaaaaaaatttcgctgatgaagagttcacaaataggcttccaactctccttattcaagtggtcaggggacaagtcaaggactttcttccattcttccagtttagtgtaatattgcttaaaccacttacgtctgatggtcttttgctcactatatctctttgccatctccgtatatagagtccctattagtaggtctcgatgaaaatttctgtctatattaaaataaaaccgcatgataaagcaaatgaggatttatattgattcttaaacgaccttataaaataattaaaaccatagataattaaaaataactcacccttatttgattaatcacttgatctttaaattgttggggtactttaaaaaaaattgtaatgatgacttagacacaaattggttacttgttggcccataaatcaaacataagcactggcttcagtcccaactactttgcatgtactgaggtccaccaaaacctctaatagtttaccagtttccctcctttgtttttcaagttcactatttgaagcaaggccacgatcctttctgaccgttggttgggctttatttgttcgaggaaaaaatcattctattagtacattagaaaataataatgtatttatagtacgaataatgttagagatgaaaaatatgaaacctgattagtaggatgacgatactctagaaggattaggggggtccataccaccaccttccctactgtggtgcgtcactgtatcagttgacattgtacttactttggagaagaacaatataaaaatgtgaattttttttacaaaatttaaaaatccacgaaatgcaaagtaaataaataaaagtcgacacaaacataaatacaattttaaaaaaataatattattcaatcattagatttttattacaaacaaaagtaaaattaaagttgcaaagaggaatcactatcattttcatcattcaccaagttttcattttcatcctgaacaagttgaactagtaaattatcgatttcttgagcaatataatctttatcaaattcattgttttccctctcaacatccattggttggttgttatgttcaacaattacatccggttcatccgattgcaaaatcaactccccaagatcaaacatcaacacaaaatttgatgagttcaaatcatgtacaacatcaacatttgtctcatcttcattatcatcattgtcctaaattttttcgatggttaacatcttcaacaacattccaatcacgacttctaagtggatcttggagatataaagctttttttagcttggttagaaagtatgtacgactcatcgtgataccaaaatccttgtatatttatactatttatattatttttagtgattgttttctttcttattggagtactgttataccacttgcatgcaaataatgtcactatatatgcaccaatataagatatggttattacattttcaagtgtgccataataattaaacccttcagttccagcaacactaactcctctattttgtgtgtttcacttttcatctttttttgtcacaataaatcgaacaccattcactatacaaccttcgtagaaggttgctaaataatttgagctggatgctaaagcgatcaattcatcaccattttgtaagg

SEQ ID NO: 262105 - DNA, 1101 bp, Cannabis indica
atacattccgtgaaaatacatcacgggacaaaatcgtgtccctatatttttattcttattaattttaaattatgtacgtaacatatgaaacttgttactgaattctacatattagcaatgcttttatctttttgctgtgcaagagttatacgctacactatggaaagtctctattttgaaagcaaccatgtaccctacaaaatgtgcatatatagtatagtgatacgtatactgtatacatatatattgataacgttattactatatatatgtatatataataatatacgaaacaattatccatgttatgtgccttatatcattaagccctctggcccttattttttgtataatcaattaattaatggaagtaattatgaagtagaggcttggacattaagaaatatatgtatttattacatttacataaattgtggttctttgctttaaataatcccaagaactgatcaccctaatccttatatatatatctcaacagaatatatagtcaattgtggcagagttaaattttataaaattatagtaattaatgcatgtatgatactgttaaggagacataaaggagaccaagaatttttacacgaaatggagaatttgtaattaattaactaatttgtatttgttatttatttatttttttttctaaaaaaaactttattattactatctactttgtattcatattccaatacaaaggggacagttttgtctcccactctttagttgtctcgaatcaatagctttttgttatatatatatattatatgtttatacaacatactctctcgtctttgccgggatagccaaacatgcattgacaaatattgtttatgaaattaatatatattaatttaaacgtacgtgctatgcatatataaatattatatttttttttcatgtatattaatctatacatttccttaaaaaaatgtataatctaaatatgatactatggctcatttatacacacccaaaaaggcctcagttgttgactttaaacgttgagatagaaagtttgaagacctgaacaattgacaaagaaaatgatccgctaattagaaattttgtcctttgaacttt

SEQ ID NO: 262106 - DNA, 814 bp, Cannabis indica
ccaaattggtgatgaagtctccggctgttttgcaattttttgcaaatggccggttgcctaatgtcttaaatgaaactgtcatttccttaattcccaaggtggataacccttcgtcagctaaggattatagaccgattgcctgctgtaacactatatataaatgtatctcaaaaatgatttgctccagattgtctgaagtgctgccttccattgtcagtagtaatcaaggtgctttcatcaaaaacagattgctggctcataacataatgatttttcaggatctcttgaagggctataccagaaagaatgtttcagccagatgcattatgaaaattgatctcagtaaggcttatgatacggtcgactggaattttgtggaagatcttcttagggtgctctgctttccttctcgttttatcaactggatcatgacttgcttgaaaggcactagctatcatctgcttcttaatggaagaattcagggttcctttaaagggaagaaaggcctccgccaaggtgacccgatgtcgccgcttctgtttgtcctagttatggaataccttactaggttgctgagctcctattctagtaaaaagggtttcgggtttcaccctctgtgcaaacatcttcgtttgaccaatctgtgttttgcggatgatcttgttatcttctgcaagggtaatatcaactcggtgaggttaatctttgaagctttctctaagttttgtaatgacacaggtctgtctgctaactcctctaaatcccaaatttactttggaggagtgcgggaagatataaaagctgtgattctgga

SEQ ID NO: 262107 - DNA, 2850 bp, Cannabis indica
ttcttttttttttttcaaataaagagaaaaatcatggatattctgattgtctgaaatcattattaatttttacaccttttttggtctctatcttgaaagttaattaatgaaaatgaaacattgattagctagtatggcaatgtcatatatatgtaaattaatatatttacgatattcccacactattaaaattttcctttcgtgtgagattaaacctattcaatacatgattaaacataaaagcatcaacctaccatccattattatctttgaacaaagctcattatcaataatgtgtcatctttatttggtgggaaccccaatcaattcattaaacgaactttttgtttttgaaacctttttgtaagagtcatatggccccatgatgaactgtctaattatgttgattacttgtaataactttttctgggttttgacattacttgcaaaattattctctaattttatacattaaaatcccaacaaaaactattggggcaacttgtcacatgacatacttgattgagccaataaagagtataatatttcacttatatatgatttaaatttttaaccagtatgatttattattctcattttcctattcttttgcagttccttgatgatgataacaagtgctacttggaaatcaattacaccttcgatattcgaaaggaatgggctgcaacttaattagccaaaccgttaattaaaatagcaattatcttccctgtgatattgtgctgcaattagttttttcaagaattttcaaatcttagtcataactacttgtgattgttttcatagttatgataagttatgtatgagtgctttcatagttttgataattactatacttttcctgctagtgatatgtattgattttcaaaacttggggtctaagaaaagaaacataaattttagagtgaggaaattctttggtaattatctctaataaagaagaaagcttcttatagcctatattcttatgtataactttcttgcttttagttttactttttccttaagtctagatattattttactttatatatatatatgcataaataattttactgaatataaacaaatatacatgtatattttaattcagatctatgacataacaaaattctttgctaacaaaaattctatagaaacaaattaatatattaattgtctttgaccaaagttgttttaagccaatatcaatacagtacccaatcgtcaacatgaaaaatgatacggtaggtagcacattaattcaatttgaaaaatctatgatcacaattaaggaaaaagaaattaatcaaataatttagattattattttaagataataaggcccacagattagtaaatatatatgtcctattcataataagtcctactagctaagatatgcaaatatgtacatgtagtgaaaacctattattgcccaatatagagaaagtagatctctactgttttgataaatattttccacttttaattttatatacaataacgctgacaaagcttgaagtagcaacaaccataattgcattaaaagaatgtgctctaatctcacactccaacaatttttagtcttaaaaaaatacaagaagcaatcggccttttctaagaggattctcaagtaggaaagacaatgagaggtataataaagccactactagaaatatgagccattaatatattttgagcaaaataataataataataataataataataataataataataataataataataataatataaaaaaaatacaaaaaaagaatacagcttagataggattgtttctagctcatgataaaaagcaacatctcatcctacatgtatggttacacattagctcaaagtaagttatatgcaaagcattttcctttccagacaaacacaatcaacatcatatatatatatttttttattataattaatgtaatagaaaaggaggaggaacaacctgtatttggtcttataagtaatgtaattataatggtaatggaatagtattattaataatggaatataatatatttgaatagtattctaatttttaatttatttctgtgatgatttttgaatggaatataataaattaatagtctcataacaaaagaaaccatatattaattaatttataattaatagctttattaatttgaaaaattaaaaggtacaagtgttattttacaatagttattccaataattagtagggaaataatataattacaataaaaaagcactacaaactattcaaagcaagcaatgaaatacaacttttaactttattataggttctatcgaaccaagcacacacaattatgaataaaactaagcaaaataaaattttctttaattcttttagagataatttggaaaaattgaaagggatcacttcatgactgtagtatgttaactattatatacataataagcagtaatgaaaacaaacaatgctcataagctctaaaatcacattctatttagaacattaaactaaataataaacatacattaattattgggcattaattcatcctccttgagccacttagaatcatcatgttgtccaattacaagaacacaaaggagtataaagaggatcaatgatcctccatgagccacttaaaatcatcaactagttgtccaagatcacaggaacacaaaagagtataaagaggatcaatggaaaaccttcttcctcttaaaccttaccatctcatatataatctcttatgttttcaactttacccaaatctctcttatatatgccttaaatattctagagaaattatagtaaatggcctcaaatcatagaactatgttagtttatgtc

SEQ ID NO: 262108 - DNA, 3379 bp, Cannabis indica
ttttaaaataaattttaaaaataatttttaaataataatattaaatataccaatataaacatgttataagtacaagaatatacacaaacagtccataatgacacataagcaatcaaccagataacatcttaaatttactaccaatttaatagtttcaaaaattttaccgcaatacaagtgaaacgacagttagaagaaattagccgtcagaatctcttttaacttttacacatacagaagtattaaactatctctcttcttctcccttgtgtacatataaaaaaaacaataaaaatgtatagtttgctcataattatgtttgcagttgtccatatagcagccaaccctttaccatctaaaatacgaaatagccatttgcaaaatttgaataatggatttgaaaaatcatctttttggtactctggtcctagcccttgtccagttttgagaaagaactttacttagagacgcacagttaaatactttccaccttaattatgtaccaaataccaaaagtaaatcaattcaaggtaaacaaaataagtcaaaacacaagttttaaatgttgatagtgttgttatcattcttactgcttttgatcaacttgccatgcccaaacaacacaatgtcatttaaagctggtcttatatctttgttcatttttcttacccaatcaggtgaaaggagagcgtaaattcatatatctcaggtagacttgaaattagtcctttttttccttcctttgctccctccattttcagagaccatctgtcctttttcacttccagcaaccaattttgacctaggcagggtatgtgggtgtaaataactactttctcgtcatctttttctgtaaacaaatcagaaagataaaatccagttgaaagaagaaggatagtttggcttgccaattattttcttatacaattccatgagatttgtatcatgaaaagacaaagaaccagctaaaagggcaaacaagatcaccccacaagaccatatatgcacttgtttggcagatactgtgaaaatgaattaattataggatctagctaacaaaataatagaaaagcaagaaccagaaaggcattttactttagtatttagaagaaagaaaactctgaacttatcatagtgcagaaacaagattagagtcgtattcaattttcatcaaacatacatgagctgcaagaaagaagtaatttcatgttaacatcaaaagatgaaagagtccaaaagaaatgtcaaagaacaaacagatacctctggagctatccagtatggaattcctttatcgtttgcttcataaacctaaacaagtgtagcaaattagaactacttaatttcacataaaagagaagaatcctaaatactgatatagtagcaaaaatcagaactaacatcactcacaatttcaagttcttaaagatgctaggcttcgtctaccataccttttggattgcatataccttatacataccatctgttacaagaagcatccaacatctaagatacaaattaaagaaataaaaataagcttttttcattgaataatatgccttatacataccatcaaaggtaatctaataatatatatacatcagccatataattaatccaaataattagagaacacaatgaatcagcattagatacgaaaatctcaaatctccaaaaaaattaaaataaaatgaagtgtctaaacccaaaggaaaaaataacagaggatatccttgattctcccaacacattctcgtgtttgcaaaacaatcaaaccaatatcactttctcatatttcttataaaaaaatcgtataaatatgtctttatcaaaatcattgaaacatgttgcttgagatcataagtgttagctccatttccttcatcaaggcagtcttggcagcctcactctcgacctctttctcataagaatgaaactcttttacaagccgtttccaagtacttgttttgatcttcaaacttgttagtgcttccataccaatagaatatgaaatttctgagttcttattctgttcttctataaaaaccaaataaatttcggctaaagaagaaacacaaaaactcgtgttttggccattttccaaccaagcatcaacccaaatcttgccaaagatagataaattttaattataatgataacatgtcaatataacttcagatacaaattggcagcaatcgtatagaaatattgatttaattgaagttatcaacaaatcatagttatacccaaataaaaaatcttagattctcagttaatgccgaaatcagaataccaacatattcatctgtacccaaatctaaacacatcagatttgatcagatcatgttaagaatcaaatcaaggtgagcatatctgaattaaatcaaaacagattagaaaagttgaaacatatatcagttacaacatacctatgcttcgacaaagtggaatggaggcgaggagctcgtccgctgggattgattgaagggtgtaggcgagttagcttcgttactaaaatctcaaatatccgcaaaaacgattgcttcctgaaatattaaacttatttaatatagagttaatttttagaaatttcttcaattacttgagtgagtatttcaatatttactaaacatgatagagtattcttatatttattagtttgtttgagtaattttcaattttttagattgtaccttcacttgtattagtagtgggcataaaagatgtagaaactaatcctttaataatatttctagaataatttatagagtcctataaataaataaagatgtaatactactattttacaccaaaatatagcctattttacattattctttccaatattcttcttcttatttctaacaaagtggtattagagtcaagtttgtgaaaaaaaaaaatagcaagtggagaaatgatccccttttaaattccaatgctcactaaaagcaactttgacaattggagtagagtagtaagataaatgcgctattaggagctcaagatgtatgagatattgttgagaaaggacatacaaagcaagacaatgttgttctttctaaaactcaatgggataccttaagggattcaagaaagatggaaaaaaaactctctacctcatctatcaagcgtggatgaagatgcattcgagaagatctcaaatgcaactactaacaaagaaatagggagaagcttcaaacttgaaacaaaggagtggagcaagtgaaacagattcttctttgttgacttcgcttttagccaacgacaatgagtctattttataagcgataaacgatatgtcgtaacaatatatatatatatataataaagcaataataagacacatgtaattttatagaggttcagcctcgagcag

SEQ ID NO: 262109 - DNA, 880 bp, Cannabis indica
gatgagagcatccaatttttgtagaatgaggacattccatggatgagagcatccaatttttttatggaatgaaggctttccatggatgagagcatccaattttcatttatagaatgagggcattccataaatgaatagagagaaatatgagagaggtaatgaacatcaaaataaagagagaaatgaataggaataataacattccatgaatacttacccttgaaggttgttgattgctgacaaaaatttatcatagttctctctctctctcttagattttttttcaaagtgtcgatcttcttttctgttctcaattaccctatttataaagcctactttcaatttaatttatatttttcttttattaacctcaccagccatgtaacgtaatgggtgagagaaaatagggaagtaggtagttaaagagtagagagagtctcctaatttggctctcttaatttaattgattatttttttaattattattattttaaaatcaattattcttttttaaattttttaaaagaataattataatgaaataattataattttatttattctctttttttcgttcaacaataagtgtctagaacaatttaagatttggaaagctttggtggaaactaaaacaaacttaaaggttaagacacttagaaccgataatggtctagaattcatcaacactgagtttgataggttttgtaataagcatgggataactaggcatgggacaattgtgaaaactccacaacagaatggagttgttgagcgtatgagtagaaccattttgaacaaagtgagatgtttacttcttttgttggggtttggaaagccttattggggagaggctttagctactgcttgttaccttgttaat

SEQ ID NO: 262110 - DNA, 782 bp, Cannabis indica
aagtatacatatcgttaacaagttatagactcacaaagagtgaggttgatcccacaaggattgtagttaagtattttaaaattaaatttttacttcgctatttagctatacaaaatttaagagaaaattaaaataaaaaacaataaaaacattgaaaataagaagcaggtaaattaataaagaaattaacaatgaataaaaattaggaatttcgatttcagttgcatctattgattatatgatttaacatgattttattccaattactaaattctatgcaatagcaggtttactaagataatttatagtcttctcagatatataaatctcaattacatgcaaattttctactctcgtgataaattaaacatgtaaaagatattaattaagcacaaaaaccctataagttatccaaactatataggtactctcgtcctatatcgaaatttggttctatttcactatagcataattgacacccacttctcagattttgtatcaaaatcatatataattaattgatggtcatgcaattaaaagaaattaagtaggaatgaaatagaatacatagaaattgagaagaaattaaatcatattaaaaccaaaaattaatgtcaaataatatctatctaaactctaatgaactgtttagctactcatgttcatcgtatcaatttcacacatatttaatttagaatagaagaagaaaatagagaagaaaagaatgttgaaaagttctgatttgtagaaaatttagctctgatacataggaattaacctct

SEQ ID NO: 262111 - DNA, 907 bp, Cannabis indica
cctatctctctctttctctcttcatattttcataccttgagtgatagagtaagtgcccacacacatcaagttggtcctcaatcatagtatgtaagactgtgaagtatccaatcaacaagaaggagaatcgggctcagatcttggtgatactctgctacagaaaggatacaacgattagaaatctgagcggaaggagtcatttaattccgctgcacccactgtaaggtttcttaaactgtatatgtgtttatttacattgttttagaaattcatattaggatgttaaacaacatacatggtagtaaatctagatcctggtaaaataattccaacagttagttgttaacttggtcaaaaagttgtactttatattttgaaaaggaaatatgagatatttatgcttcaaaatgataaagatgagaattttcccataggctcaatgaaattgacttgataccaaccctaagatgacgatcaattgtcaaagagttttatcgtggaataacttaaaataaaattttatgtattttacttgtatgcgctcatgcatcacatttatagtaattctaaaataatatttattaatcaaatgtaatcaatatgtcacattatttatttcaatcatgtctaccatgctgaatttcctaactactttactaccacgtaaaaaactgaatggtgatataacttttatatatgaaaatcgaatataaatttaatgttagtttgtgagaatagcaaatttgtcctaactgaggagcatcctgaggagaccgctgctaatgccccaaaaaatattcgaacagatatgaatcttggattcaaaccaacaacaaggctaaatattacatgcttgtaagtatgaacaatattcttagtaagatgcatgaagatatggagaatgcat

SEQ ID NO: 262112 - DNA, 892 bp, Cannabis indica
tctttccgagctctgtatgattaactgattttaaatgccatgattgaattttatgagtatggaatcaagggttaaccctaagtgtgaaatatcccagatttgtgtgactagcattaccggcacctgatcaggagcacctggggattcagaatctctatctatagctggacaacaagtaagatagtgattagcacgtagagtatgcgcattggcgcttatattgagaatgatatgtatgaatgtttagtaatcaggattaaggttattaccctaataggaacagtctaatagcctagggttattaccctagtgatatatgtgtataatgccatgctatgttaattgagttgagagttaggggttatgcattcaaggcataatcaggttggactcggtaaccatcaccgagatgaatctattctaaggccttaatgtatttagacgtgtgagagcaacacgtgggtctacaccatgtagatttaaatagatgtgtgagcgcaacacataggtctacgccacgtagacataaatgggcatgtcagtgtcatatgcaggtctgtgtcatacagacatatgtgaatggcatatttgcttaaatagtatgaggatcatattatatttattatgatttatactgtcttgataggcttggctcacgggtgctctgctgtgcaggaaagggtaagacagtagctgatcagccaggagttgcaggagctgggcgaagaatgtacatgttcgagccatatcagaccaagcgggttaagggtctaccaatgatgaacttttgaattctattttgccgttaggtcggctagaaataaaagacttgtaatagagtttgtacagatttttttttgggatcccaactgtttaaaagtttaaatgtatt

SEQ ID NO: 262113 - DNA, 984 bp, Cannabis indica
aatgtttggctggaacccctgaatattttggcgactctgctagggagtgttttccttaatatatatatatatatttattcctataaatacataaaggaaaacgctcaagtttgttctcttatttgaatccaaatgtatatctccgatacccgagagcaagataatcagatcagatcagaaaccttgcgaaatgataataatagtaccaatctgacaaacacagatgatgttgtgttaacaagattggaaaagcttcaaaaagcccaagacggcatgatgcaattgttgagctcacttctgccacagtcacaccaagaagcatctgttgatagaagcggtttacctgaagagcgtgtgatgaatgaatctcaaataaggcaagtacgtattattgaacaaagaactcaagcaacacctgataatgttcgagggatcagaacttctgagattgctgaaagggttggtgaagaagcccaatcttcctctgaatttgttacaagatgaattgatcgctcttcttaaagccgaaagagggaagtcatcatcatcagtaacttctatcgattttcacccaccttacctctttgaagttgcaatgaagccttacccaagaggttatatgagtcccgtatttagaaagtacaatgggaaattcggcaatgctaaagaacatatcatccaattcattgatgatttgggagtgtacacccatgatttcgaacaaaggatccgagagttttcaaaatctctcactgatcgcgcttactcttagtatgcgagcttgccttcaggaagtgtaaggagttggcacgatatggtctctcaattctgcgccaaattcttcatgattgaagataaatggagcatagctaacttgtcaggagaaagacaaagcttcggagaaagacttgttaattatgctcaaaaatttcgacaaaaagcccttgattgtgccaaaactatggctgaaaaagatctagtcaa

SEQ ID NO: 262114 - DNA, 517 bp, Cannabis indica
tacagaagttctaaaaatataatttaaatattattactgtttaaaattaaataatataatttaaatattattactgtttaaaattaaatttagatatttatttagaatcgagatatttatccaaaaaagaataataataattgtgttgacataacacgtccctttgaagtttttggttttttgtgctggtgatttgaccctagagacataatatatctctttctatagagataaaataaaataaagacacatgacttataacatttattatatatatatatttatataatttgaaattacgttttagacacgagctttaataattcctactcccatataattgtataaagatatcatttaaaaattagactatttaacatttttgttattaaattataatatatgtattatgtattttaaaatttgttcaatcgttacaaatagttcttaaattattcgtattataaattgattattctatcaagttttattacacgtgcatagaatataaaatgat

SEQ ID NO: 262115 - DNA, 879 bp, Cannabis indica
caaatattatcaatcatgtgactgaggtgaagattcattctgttgactgacagagtgcaatttaaaaggatgtaaagaaaaaaagcttaataaaaggggcaagaagttcaaaataattacaaatatggccactgccaccgaagacgctataaatactaaatatgtttagaccagtcaacaaaataataatattggtaatagtaagattttaaaaagagcaaattggtcattaactatcacaccaataaatcatatttataatagtaagatatagttatctattttttattataattttttaataaaatattgaaaaataataataataagaataatttacggtataaatactaaagtttaactctcaattataaataaatatttaaatttaatttttgacggtaataatacttaagttataattctggttaaatataccaataagaaaataacttagatattattactttcaaaaattaaacttaaatttttatttgcaactagaagttaaacttaagtatttataccacaaattactctaataataatatgctatttccttagtcaacaaagtttgtctctttcagaaatgaagaacaaaaaactaactaaatattaatcaccgtcagatgagcataattcgtgatcggacggttagggttgttagtaattttactctagatttgtccacactggattgaaactccctaagccttatataaactctcttctctcatcttgtctcttagttactccgccacgaggcagcaaatggtgtgggacccacatgtccgaaatcatccatgtaacgtccccgcttcaagcctccattgggtccatacacccacggaataatggctcttatacacgagtacgtca

SEQ ID NO: 262116 - DNA, 1908 bp, Cannabis indica
tattatgttaattaataggatattctgttaaaaattaatgtaaaaaacccatatccttaaatctcacataaccacaaatttatatagtatatagatagatatttgatggggacttaatagaagttaaattaaaaatattgaagttataaatattaaaagttgttttgttgggtttgaggagttaaattagctgataaccaccaaggcggtgcaaaataataaaaccctagctatatattagtcgacttcacaatttaattggtacgaatataactaacactactaaaatagctatatatatttatttatatatctatatatatggacttacacatatatatagatgatttatttagaagaaaattcaaacacgttaattatttattgctaatattaatacaactaatttatttaatgatgtttaaagaaagtctcatttttaaggaccaatcaataaacttatattatatattcatggacaagactatacatatgagatgtctaaattatttaaagtttcatattggtgtaattaaattactacaataaactactactttcagtgataattttgtagttacaatatatttttttttaattaaatgttacttgtaactaaaacataacttttaaatataaattgttactgatttagttttagtcacaacaagtattgtgactaaaaatatatttagccacaacaaattgtaatttttgtgactaatacattttagcacagaaattttagtcacaacataagaataataatttataattaatcacaattttttcactttagtcacaagttttgttgtaactaaaagtaaaaattttttgtaataagtattaagtcacatataatttaatttagtttaactattattttaaagagactcacactactacaaatatcagaattcgcgacggtcctaaaaacgatttttttcgggaccatcactaaaaaaaattaactaactatttaaaatcgtcggaaaaaatttagtattcccgacgtcttaaaatcgtaataaataaaataggtgacgttttttaataaaatacgattttttaatggacctttatacccgaccaaaaataaacataaaagttaaggggtgttgaatacataatcttttacaaaataagaattttaatataaaattattgtataattttttttcttcaaaattttgggaggggaagtagctctataggaatcaagttgtggcatgattaagatcctattaatctattatcttttgtgagtaaggtacggatattactcaaatgggtatagagtacttataaataatcttattttaattattaaaagtaattgatatagctatattaaaatattagttacgtctatatttataattagttaaaaaaaatattagtagtctgaaaataaaaaaaaaattaaagtattagagaaagtaaattattatgattttttattttggaaaataattattcttaaaatttataatttgtatatttttatgtgaattttagaaataattgtttaaaaagattttaatataagaaagataatcattgaattaaatggatagttggtattgaaaaaaaaaaaaaaaatcaggttaaaaaaattaaacttatcttttctgaggtggaattctaaagttataaattttcaattgttgatttggctatgctatttcaacaaattgtttgatatgtgggaatggattggaagaccatcctcatttgttttttggcagctattacagcaacaaagtgttgcaagaagtttgtaataaaaaagataaatatcattttggactttctgttttacaaaagttatcaattggactttgtattttgttaaatgataaaatgaaccatgcattttctaaaatagtacaaataggaccctaaatt

SEQ ID NO: 262117 - DNA, 741 bp, Cannabis indica
agaatggtctctattgtagaacttgattttcccatgaagctcttgaaatgagacaaaaagtggtgaacaacttttgagtaatcctcaactacttgtccctgttcattgacgaaagaagcaatcctgttagtatctcttctattcttaatgcgtacattgaagtaagtagaattctagtccccaaacttgatccagtcaaccttgctcttttgtttaagtaggctgccataaagattgctacatttcagctttttctctctagcttgatttagttccatctgtaaaataagagaatgagggtcaagttgaagagcaaggtgagccttgttgtatgtttcccaagccaactcaaaatccatcttgacattttcaaaatagaaagagttaaagtttctcaatagtggttgtaaccttcttaacttgtaacttaaggttgccaagtttcctcccttagcatctttcctccatgattcaagaaccttctctttaaattcactatggtggaccacatgttgaaaaatttaaatagcctatatcccaagtttctcaattttaactcttaatcacacaaaaacaatgatctgagacatcctcctactgggaaaaagctttcgtgttaggatggagatctagccattcctcatttttaaagacccagtcaatcttcgagtagattctctctcctttgtcttgattactagtccacgtgaattgagatccacttctcttcatttcatcagc

SEQ ID NO: 262118 - DNA, 617 bp, Cannabis indica
ttttgtttgattgttttactgttgttttactgttgttttgccatgattatttattgacgtcgattttactgcttttgtttattcttgccggttttaatggttttttcttggtgatttccgtctccggcgtctccccacacacgaagaaggttgtttccccacacacacagtataaatgttatgctgttgggcttgggcagtacaaaagtaatgaaattgggctgggacagtaaaaatgttatttttgccgtgtcccagtataattgtaaagttttggtccaaaaacagtatttttgtaaaattccctataattaagactggtctgaaattactaaattagccctatctgccttcaatcaatcattactaactttgggcccatttctcatcttcaatcagcccatgtttttattttcttcttcacttaaaaacgaaatttgcttttatttgatggttggtttggatttttagcattgtaattaaatggcttcctcacctagcgttacttctagggatagtgacacaaagcgtttgtaaaatttttacgatttcttttacatatttatagtattttataaaaataatacgaaaataatataaaaattatataaaaataa

SEQ ID NO: 262119 - DNA, 6147 bp, Cannabis indica
ttattgccacttttatatagttacagattacagattatagattatagataaaaggtattggcatttgatttcattcttcttcaggcatgagaagttcttttttaactgagagtaagttctttcccttgcttcattggttggtttttggataattttatctcatgcagttagttctgccactcatatgcttatgtgtgtgtagcattttcataacaagggagtaaaatattttatcaaatgtataaatgtttattagatgttttaataaattacaggatacaactgctgctgtccttagtgcagctctttcttccaaggcatcagaaccatcaacttcaagagtttctggctctgcatcttctgatcaaggaagttcaaatttagatgctcaatcaccttcaacagacaaaagtaaatcaccagattctataaccgaggttaactctgacaataaaaaggaggatcaaattcgtcaacacactgttgaggtagatataagattctagcaattgtgtggttatgtgagtaataataagcaatatgcatgatttggttactctgttatttttttattctacaggatgccacaacttcagacttacaagaagttaataaaacagcatgtgctggtaagaagcccatctcatccactaaagttgatgacaaagaattacagtgtcctactgtagttaacctggataaaactggagccgatcattcttctacgagagttaaagctaaatctcttgctatgaaaaaagctactggtaatgatttagatgtttcagatggcgggtcaaaatcacttaaagttagtgaagttaagcaagatgatcaggtgaaagctgtagatagtaagaagcctacccaggttgatagctgtgctaaagtcaacagaacgaatgatgtatacttaaacattcgcatgcccaatggtggaaacttgcaaggcaaattctctgtatcgagcactttgagaatggtaaaagaatatgttgttgaacatcaagatagtatcattggccctttcgatcttgccattccttatccacgcaaggtatacaatggccaaggtaggtatgggatagattcccttgtgtttttcatttgcactgttcattgtgttggtcatggccatgtctttgataatcacgtgtgatgtgccaattgtgcttgtcattattttaatggagaaaaaaagaggtaaggaaattatagagaaaacaataagcgtggaaaactaaaataaaaaataaagataaaaaagaatcaatttttcatgtttggtatggatagaattgtatggtaaaaagttcattcaaatttgtttcctacattttccttatttttcaaactaaaataaaaactccattctgagtaataacaagtttgaggaaaataaactacacgtcatagctattctttttatcggctttgaacttacatacatagatatgcttttgctttggcttggtagggcctaggaatgcattttagtattttttaagcattagaagatcacagataactcacaggttgttaaagctcagggtaaattgtttcttttttccccctagcattcctgcacactttcacgaatgtagtctcttcttttttttttttaattgggatcctgcctaaccctacaatattaaggactaggaaaggacactataacaattgctatgtaaataccctcgtggactttattcttttctgtctcaattttatgcagatttaagcaaaaccttgtcagatttgggcttgtttgatagacaggcattgattgtggttactcatcaaagagtgactgatcaaccaatttcaagaaatattgttgagtcctcgaatgagagtactgagggttattttgcatacgcgaaaagattgttttctttcatcaaccctctctcctatattggtggtggttctagctcttcaaattctggacaccaatctcaacctggcgtgtgggaatacagtgagttttcttttctctgctgtttttttttttgaaaaattcttctctgctgttaaactgcagaacttctgaacaaatgtcatgatgggaaaattgacgagatgttaaaattttcatgtatttacgtagaaaatcaaataatttattaatcatattggcaatccctgaaagttacacatcatgttagcaaactttcagattcacacataattttcttgtcgtgcggggccattttctgtttgttttaaagagtttaacataaaacttatgacttcaattttcctattgtaggtccagtacagaacaatggcaaccaagaacagaggcctcactcagcctctcctcaaagcccttctgcaggcagcagaaacgatagtaagaacaggcagccgacgacatcccgttttggaagcaatattcacactttgaagcatgacgaagatgatgagcgattcaacgacagaaattctttctggaatggtaactctacacaatatggtggtaatgacaatggaaactaattgatattcactgagctccaatttgctacgccacaccagtttcattgtgtctacttccaagcaaatctgaaattggccctgaaaatgactgtagatgaattacctttgtgcaaacgctgttttttttttaaagataatatggagtcaaaataagaatgttgaaatgtataaactgttacaaaaataatatatttcataaaagagaagctgaaatgaagaaattgaaacttttataataacttaataaggcgaaaattgaattgtacagtttggccttttatcccagccctggggctgcacacgggaagcccgaaattcggcacatctctgtctggtctgaacccagtgcaactgcacacttaaaaaaaaaagattagaaaacattgggtttgggtgacatccgagtggtgttcggtccgtatcagctgaaatatattttgtataagaggactgctaatcactatattttacaccctcttttgcactctatatatataaaataaatatattttaaatattaaaaggaagtaaaacaagaatatatattaaattctataagagtaaaaataaaattaaatatatatattatttgtaaataatatatgcgaaaacaggattaaaaaataatgtttactgtatataaaattttggccttttcattatattaattacactgtatataccattgcttaatattaacaaattataatatgataaatgtaatttaaaaaaattaacttaaatagagcttattttcgcttgtaaataattattatgagtttagttcaatatatattaatttattattagaacattataactacaaaagttcattattttccttcgataaacacaactaaatatataattgtgtataaaatgattacatactaaattatttcccatgtttaaaaaagtgctttcctaatgctaaattaataataataaattactgaacctgcataacaaagctaagatctatcttttaaaatacatcatcaaaacttcacttttattattttacctcaaactttttcattacatcatacaacttctttatttttcttctctatttcatttaaataatatatttataaataaaatatgatatatatgggtaatgtgtatatgatgtgattagaaatgtcaaaataatattaaaaatattttaaaaaatcactatttatgtagttaaatgtgaataaagatttagctcaaaatcttgtgagttgtttacctcatctgatggagctaatatttaacatcattctttaaaatttttacattttagctattatcaagcactagttgggagtgctctaagaaaataagagatcatcaattaattgaaataattaacctatttaaaactaagtactgatcaaaatataataaaatttactacttaataataatagctaaattagacagataaataaggaaaaagaaacagagagaaagcagagtatatttgctgaaatgaatcgtattaattgtattaattcctcaaaaaaatatacagaaacgttaatggtatatatatagtacatgggagaggatcttttcctaaccataaaatatttattttgccaatgattggctgaataaaaggaatcccaagattttagggaattctagaaatctctaaatgacagctcatggtatatcaaatgatgaggtgtccaagagggataaatatctaattggaaaatatctaatcttttcaacatgatccctcaagcttggcttgcttgatcaacaatggcaagcttgtccttcaagtatgaaaactgacttattgacagtggctttgtaaatatgtgtgcggtctgctctgaggtgggaatgtgcctaacttcaacaattccttgtttgatgaggtccctaacataatgcacatccacctctatgtgtttggtgctgctgtgaaacaggggtttgaggaaagttgatttgcaccagcattatcgcaccaaatgacagtaagcaatttatgtttaatcccaagttctgtgaagagtgaataaagccaagcgatttctgtggcagtttgtgacagagccctatactctgcctctgttttttgccacagcttttttgtttcttagaacaccaggttatgagatttcccccaatgtaaacgcagtagccagtagtcgactttcgatcatcaatggacccggcccaatctgcatcactaaagcattcgacattccactcctttgacggcttgaagagaatgccttgtccaatcgtgccttttaaatatctgaggagacgtttgcaaacattccagtgatgttgggttggactatgcatgaattggcttaacttattcactgtgaaggcaatatcgggatgacttagtgtcaaatactgaaggcctcccataacacttcgaaaaaagcttggatgatcaaaaaccttgctgtcatttagactaagtttgtcactctgagaaataggagtgggacttggcttagagtgtaacatgtgagttttgttgagtaaatcaatcgtgtacttgcttagtgagagatgaataccataggcccctcgagtgattttaaaactaagaaagtaatttacgcagccaagtgttttgagcaaaaagaactgctgaagtttggcaataataccgcgaacagtgagattgttgttgcctatgagaagtatatcgtcaacataaacaaggagatataattcagcatcaccttgtttgtagaagaagagagaaggatcggatacagagctgcagaaaccaatggaggataatacttgctgtagacgatcgaaccaggcccgtggtgcttgacgaaggccatataaagccttctgcaacttgcagacataatgagggtgtgaggtgttgacataactagcaggttgctccatgtaaacagtttttgaaagtgtgcaatttaggaaagcattgtcaatatcaacctcctgtatgtcccattgattagaggcagaaagatgaaggataactcgaatggtggaacttttgacaacaggactaaaggtctcataaaagtcaactccaagttgttgctgaaaacctttagtgacaagacaggctttgagacgttgaaccgtcccatctttattgagcttgacacgatacacccatctattatcaatgacactcattcctggacgtcgaggcacaaggatccaagtcttatttttcaaaagagcataaaattctgtatccatggctgacttccactttggattttttttaaagcctcgtgcacattctcaggttccaattcagtcattaaagccaaaggtaagggtgaaaaggcatgaaatacacggggtttgtgaatgccaaccttggctctagtgatcatagggtgggagggctatggtggacgtggtggagggcaagtaatttggttagtttgttgctaaattggggaatgctgatgtggttgtctggtgtgagaaataggtgacagtggcaagtcaatgtgaaggggtatagttgggtatgatttgatagaggctgggctggtttgttgtgatggagttgatgatggagtaacaggattgtgtaaatgagaaacatgtgagctcgaggagtgttcatcttgttgacaagcttgagaatgagtttcactaacaacaactacacca

SEQ ID NO: 262120 - DNA, 888 bp, Cannabis indica
actcagaatcgcaaatggaactagaaccgaactaggactaggaccaggaccaggacctaaacccaaacccgaacccagatcaaaacccagacagagacctgaacccaaaccgagtctaggactcgaaccggaacctagacctggacctaaacccacacaaaaagcgagacttggagctagaatcaggatagggacctgggaaacagaactaggatcgggacctagtacgctaccaagacccgaacttgaaccttgtaactagctcatgacctggcaccagaaatggaaccatactgtaacccgagattgggatccggatctggacccagggcttagacaaaacccgcactcggtgtttggatttgggacccagccctggacccgaaccctgacaaggacccgaacccacaaccggacttgaacccagtcccaaattcaaaagtggactcgaatccgtaccctctgatccaaaattggaaaaaaaaatgggaagttgacggggactggaactaggacttggacttggaatcataacttaaattggacatagatccaaaaccgtaaacggaccaggacccagactccaaatcagacctagactcgaattgggacctggacccggatccccacccaaacctggactcgggacccgaacctaaacctgaactcagacccaaacatggaaccagactagggacaaagaaccatggtcgtgagcgagaaccgcaccccagtctggatcccaaaccgaaactcagaaatgggacctaggacgtgaacgagaaccagaccgagacccgtgacactgatctagatcttgactcgggatttagccgagcatggaacagacccgtagtcggtgtctagatctgggactcaaactaggac

SEQ ID NO: 262121 - DNA, 707 bp, Cannabis indica
aatccctattcattaaaacaaaataacaaaattaataaacatacatatattaaaataatgtaattataattaaactctaaattaaaaacaaacctcattaataccaacagtaacagtcttctcctgaagagcaccaacctccttaacattgaaagtgttgagcatagcaatgcttgagatagtagacatgggcttcacttgaagatcgtccataatcatataagtaaccactcctttcacaaacccaccttccacctcagcctcagaagatgaagatcctccaacttgggtagccttaggtagcacataatttacaaccctcccaatagtacaacagcaactagggcaagtagcatttgaaacatcactcccataattataacagcggttacataagtatagggtttgtttggaggtggtatcatcattagtcaaggagaaaagtgttgaagagcctccaagggtagcacactttggcttaagaaggatatttttatccacattagtttggatgtaagtatcaccaagattttgtaagctttgataaaggttacctaatgtaccaaccatgcctttggtagagagaagccttataacagtcccaactggtattgatagaagtgagaagaggaaatctgtgaagtcctttcctgcttcggcaaagagaacccttttctcctttgaatctatcagaagtttgagagtaa

SEQ ID NO: 262122 - DNA, 628 bp, Cannabis indica
tgcatgccttctttccaaatcctcaaaatgggtcattaattctggtgccacagatcatatgacaggtaaatccagtctcttttcaacttttctgtctcatagtcccacttctattgttaccttaactaatggatcaacaacttttgttcttggatctggcactattgttcctatacctatgctcattttgtcatcagtcttacatttacctgatttgtcttttaatttgctttctgttagtcaactcactcgcaattaaatcgttgcatctcattcttttctgataattgtttgtttcaggatcttatgacgaagaagattattggtaaaggacatgaatctggtggcttatatgttcttgacccacttccgccaacctctattgcttgttcgagtgttgcttccacttttgaagctcattgtcgtttaggtcatccatcccttcctttgctcaagaaactttgtccctaatatagtaagctatcttctttagattgtgagtcatgtcaatttgccaaacatcatcgtgttaatttgagtcctagagtcaataaacgtgctagtattccttttgagttagttcattctgatgtttggagttctattttgcctcaacctggattcaggt

SEQ ID NO: 262123 - DNA, 645 bp, Cannabis indica
aatgctatgtttgtgtacgtacaaaagttcttactgtctagaaatttattagtttctctccttgaccgcctgagattttttctcgtggttatatatagattacaagaatttcaatttttgagaagtatcatgaaaatctaataaaaatccctacttgggttttttgaattttcattgtctgattttgtcattaaaatttttcttttttttgcattgaatttctgctaaactacttcttcgtcgtcgctttctttttttttattattacgatatctatgcttctttgtgggagtaacatcaatcctagaaataggaaatacttataatctacaactcccattgtgaataatgtgaaaagttacagttttagagtatacccgcactaggcatatatatttacttttttttttagttctaagataattgtaaagaaagtagaaaaaaataatgtgcaaaggtaccactttattactttgtgaggagtatttctcttttagtatctttgataataaacattttgttagcagctttcaattttcctaatttcattttatttctgttgttttctacgtaccaataaatactatagctaatattttataactggattaagcttgttactttcattatttactaaagtagcaa

SEQ ID NO: 262124 - DNA, 1051 bp, Cannabis indica
atagaaagtgtgagtgacccatataataagttgtttgttagattaataattttaatatatattttaaggtgcttttataatatatattttaatacaattcttatttgtttcggtattcaagataatttttagtcttttttttttcatatttatgtacgtaatagttatttaagatattttataaatttttttaaaaaataggaataattgacaatattaaaaataatgtacaaacaatgtagtttaaatcgtgtttttaatgtaattttttttttaaaatttttaaaattttacaatttatattaaataattataaagtacacaaccataaaacaaattaaactaatttttttttcgaatgccagaacaaataaagtgcatccttttaaaagattgtgttgtaaaagttttcaatatatatttcttcatatataatattatcataaaatttaatatcactaatttttgctcaccaaatcgtgaaaaaatcttggttttgattactttacattttcttatttaatttttacataattgtctactcttttaaattgtactaaaagaaaataaaaataaaataacataattaaattatttacaattttccggttcaaaaaaataaataaattacaatttcccaaaaataaaataaaaatttgactcatatttcaaccaacgacgacgtcgttttgatcataagagttcgaatcgaacaccttcttctcactctgaaactcaaacctctcatgcttttgatgtaacaatggagaatttcatctaacgcttaaatctccaagaagaagaagaagaagaaacccattacatactcttatccacctcaaaatcacacacatatttatataaactatatctacacaatattcttatatatataaccgaatttcagtgaatattgaactcaattcgctatccaacaatggagctaaggatccccaaggttttctcgctcctctttgtctttctctaacttcagtctcgttgttagatcaacctcttctcccacccaaactatctcggaatcgatccccaa

SEQ ID NO: 262125 - DNA, 574 bp, Cannabis indica
taaataaaatattatatatatgagtaatgtgtgtatgatgtgattagaaaagtcaaaataatattaaaaaaaatttgaagaaccactattcatatagttaaatgtggagaaagatttagctcaaaatcttgtgagctaaaataaagatgagtttatctcatctgatggagctaatatttagcatcattctttgaaaattttacattttagctattataaagcaccagttgggagtgcgttaagtttattagttttcattctttgtcaaacaactagaaaaacttgagaatctctttctatagaattcgaatctccgttctttcttcttcataatttcgagccttatagtaaaagagtgcatgcccacccatagcaaatctagtactcaatcatagtgtgtaagactatgaagaattcaaaacctgatcaagctcagatcttggtaatactctgtgatagaaaggaataagggttagagatctgagtggaaggagacatacattccgctgcaatcaatgtaaagtttcttgaactttatatatgtgttaaatttcattgttttagaagattcata

SEQ ID NO: 262126 - DNA, 740 bp, Cannabis indica
tcttgccccgccaatctgtctagcatttgctccgtcaattcatcttcagttaaactcagttcgagaggatcatctagcagctttttctcactcacaatttcatcaatcaaatcaatgaagaaacagttatcacttgcctttgggtatgtcatagcctttagcacattaaagaccacttcttctccttggactctcagctttaattcacccttctgaacatcgatcaaggcttggccagttgccaagaatggtctcccaagaatgattgggacattgctatcttcttccatatccagaacaatgaagtcagctggaaagatgaacttgtcaactttaactaacacatcctcaatgactcctctaggatgagctagtgatcgatccgccaattggagagttactgtggttggctttgcttcacccaactgcaatcttttaaacactgacagaggcatcaagttaatgctggctcccaagtcacatagtgcatttattccttcaattctcccaatagtacaaggaatagtgaaactccctggatctctgagtttgggagggagtttcttctgtagaatggcgctgcactcttcagttagggccactgtctcataatcctccatctttctcttctttgacagaatctccttcatgaacttcacataacttggcatctgctctaaagcttcagcaaagggaatgttaatgtgtagtcttttgaagacttctaggaatttggtgaa

SEQ ID NO: 262127 - DNA, 897 bp, Cannabis indica
agcatgactaagtctatatatatatttagtatataataacatatatagtagtatagatggatgaagaacaagaaaataaaagcgaaataagagttgctcaaataaatattacaagtgaactaaagatacaaaataacctcactttgcatatggaatcatccctaaccttccaagaagattagaccattatgctaatcattctcataaaaaaatatgagaagaaaagtgaagagaaatttttgtatagtttctttattcgaaaaattacactaaaagatggataaaaagtggtgttccaaaggggtcttatctcttccctatttatagccaaagtgagtgaattaaaataattaaataaattaattattttaatatgttctagaaatttctggcataaatgaggtaggtaagatatgagaaggatagaatggtaaaatatacaatgtacaatttattggctgaaagaaataaaaaaatgagccaaataaatgcaaaggagtataaaattataatgaattttgaaattgcatttcaaaacaatttgaaaaatggcagattgaaggaggaaacgacacttggcgcgcatgtatttgctgttggaactcgaattgaaggaggagcggacaagtgttgctcatgcaaaggctgctgggagagagaaagttgcgcagagggtcccacgcgtggctggcgctagcaggttggacagaggagaaaggcgcttaacacgcccctgtctggcggtgagcgacacgcgcccgtctgggccctttgatcaaggaacggagggctcagatggggcatttggggctcgcacgagtgggcttctcctaggcccgaaaatctgattttcttttttaaaaaaaattactcaattttcttcaattcttcatttct

SEQ ID NO: 262128 - DNA, 2610 bp, Cannabis indica
atcattcattgtctttaatttcttcctccatcaactgccaacatatattttttcttctttttttcttcttcgatttgttttataaatgaccattactcgatcttcatctttccccatcaccattgctgaaaaaaccttcaaaaataattgttaaatctctcaccaacaaatctaaaggcaaacgacccattattgaagatgatgattcacattttactctgcctacaaataaacatgatcatcgtccttttaagaagaaatcaaagagtaatgttgctgaaaatatttccctccctgaaattaagaaaaggaagaatcaagttgataagagtttgaagggttttttctagtttctttatcattttgtcctaacttgcaattttacttttattttgagttgtgcatattcttttaattttattcaagtatttagattgtttagttgttttaatgtttgtgtagtgttatttttgtttagtgttattttatcatttgtgcaactattgaattctcacatttctcgccaacttcacaccaaaagtattatatatgaacttgtaatgaaagttttaaatatattagatttgacatacaacttaaacaaaaccgttatgcaactcttaaaaaactaatataatacattttgaacatgacatactacaactgtctagcaattgttatgtaactttaaaaaaaaccattgcagtatagaaaattaataccaatctattaaagtagctttttcatgttgtgagagttctcatagaaatttaaagaattcaaataaatgtcctctctctatttcagttgcagttaagtgttttcttagttgcattccactgcttgttttaagttgtgtaccggttcatcatatttgcagttcattgagatgaattggccactgacttcgtaatttacataattcattccttacccattataaaacatgagaaatagaattgcgtcatgtacatgagaatttgagtcgtgtatttccgatttcgagcactgtttatttatataataatattttattagcacactattagacaactgctatacaaataatttttttactgtttttttctctttttgcactgattaacaatcagttgttcctcaatattgtttttttttttgtggataaataactgctagaatactgtaaaccaacgttaaataaactaatcaaaaatatttaaaaaactgatcatgttatatattgtattttaggagagtgttgcctttaattatcagtgtgtgaataaaatagaaagccaacaataatgcaactttaaaaaagaaacaaaaatttaaatcaatatttccagattcgttgcgctagatgaatgtgaattttttgttattgtcattatcagaattgaataattacaggattaaaaatctggaaaacaactttaatgcaacaattatgatatcatcaaatgtattaatatgtgtatttcagattatacttttttttggcttggtcgggaaccctagtatattgttcattcatatctgtatttttttgaatctgtaattcgaatataggaggattagtttgtggaatccgaatcgtaattgatggtgaatagaatttgtatttcaaactagtttatatgcagttttttaccaatcggtaatgattgattttctgattaattccttcttcttctcaggtcacgttaccggaattaatagtggatcattggctggttgggttgatttgctattgcctcctttaatcgcacgatggctttgaggatgagaagcgtggtttgtgtgtttatgctgtctgaaattgtgtgtaagaggtattcttgtaatttgttttatgtgggctgtataattgttataatgaccgacccaatgtatttttataatttttttttttatcttttttggttataatagagaaaagccttattaaaaattaagtattaaattaaaaattcaaatccattcaatcactacaaaaaatcttactaaaaataaaaaattgtgactaattataaattatcaaatctacgctatgactaaaaaattcgtgactaaattatcaatgcttgttgtgactaaaagttatcactaaagataatttttttttagtgaattggattttgaatcttaattagattaaattagataatgagtttcaaattaaattaataattgaattggttagaattagattaaaataaaaggttaaattgaatactaaaaacaaatataattttgttttctttttaaatataggtcaagggagatagtctaacgttatactacttataaccaaaatggttccaacccttccccacgcgcaccattcccatttttccactccccaaaatttcacatcgacacgtgtcctctacagtacaaatctctaatctcctctctcccaaagcgagtgccaacatattattgtatcctaaggcgcgtggatcaaaaccaaaaaccatgaagtggttttgtgaagcctaaaaaggatcgctcttagttttctaaaataaagaggttttagttaaactggcagagaaagacacaactactaatccttccttaatatatttccacaaaaactataatctttttttttttttcttt

SEQ ID NO: 262129 - DNA, 394 bp, Cannabis indica
ttcgctcaaactagtttcttcatcaagaaactgatttcttcattaagaaaccagtttcttgttactttttctggttgactatgccaattttaatgattttttcaaagtttgctgtcggtgctggaaaaagtcgtcgaagtagctgccagtgtcagaaaaatcgtcagaattggcattgtcaccggaaaaatctcaaagaaagtggtttcttcatcaagaaactggtttcttctttaagaaaccagtttcttggtgattttttcaatgatttttcccgcgacaatggcaatttcaatgaattttttcgatgtcggtggcaactccgacaactttttcggtaccgaccgctactccgatgatttttccggcaccggcagcaaaccctgacgatttt

SEQ ID NO: 262130 - DNA, 2672 bp, Cannabis indica
gaccagaccgtaaccgaatttttcgattccacaacatcaccgaatatagcgatcggtttcggtatttttgacatggcggtcagttacggtttttgaaatagaaaaatagttaaaccaaaaaactgccaaaaaccaccaaaaattatacggtcgattttatacagttataatttctaaacggacggttacggtttttgtaaaataacaccgtaactgaccggtcggttataaaattgtaaaaaccgaccataaccgaccgatttttacccctaatacttttattgctatttagttttaagagcaaaacaaaaattataaaaaagttattccttaatcaattatttttatctctggaacatgcctaacatgtttccattctacaactcctccaccttttaattatagtttgagcctataccagttatgggacatgatttattgtcaccaactttgacagtgccctcattaatcttctgataatcactaaattgggactgttctgaacatatgtgaaaggagcatcaagaattgagtacccaactagttcttgagccatctgtagacactaccaacacccgtacacttccataactatcactatcacaatcaaaaaccaaatcaacatcacctgatgataatttctgattacaattcttgaggataggaaagtctctcttaaggtgagtggtcttgttgcacacaaaacatttcctcttgaattttgagtatggcttgccttgatttttactttgtcatgtgtgttccttgttccctttcttggaattcttttctcaaacaaacaatctttcaccattgatgtcatccttttgttctgacttatttctctttaattctttcgacattaaagtgttttaaatctcttcgagtgtcaaagattctttaccatacatcatggtatccacaaaatgctcataactttccgtgggaagagagttcagaactataatagcttgatcttcatcttcgatcttaattccaatgttctctagatcaagaaggatcttgttgaagtcatcgaggtgatcttctatattttttccagtcagcatcttgaatgagtacaatttttgtttcaagaactatctatttgctaaagattttgtcatgtagaggctttccaactttgaccaaacactagaagctatcttctccttcaacgccccacacaggaccttgtcccccaagctcaaaattatggcactgtgagctttgttgagcatttccaccttctctttctctgtcaaagttgatattagattctcttctcccaaaagagttgcttgaatcccctgttgaaccagcatttccctcatcttgaccctccatagaccgaaattgttttttctagtaaatttttgagatcatactttgcactgcctattttcttagaagttcattagattcttgaactcaaatcaagataatcttcttcgagctttgataccaattgttggatttgcaatcccaattactatgatcaaaactcacttattagccctcgagaacacttggcagtaattccaataacacacacaaaacaaagactcaactctctcacatgaataaatatagctctcttatttattcttaaagtgtttacaagatgtttgtttttcattgatatggattgaacctatttatagcgataggcctaaggatacaatttagatggaatggttaagttcgttaataattaacttaaccgccactgtacctaactaaatgtacacgtgtaaaactaatccaatacatttggagtcaacctaggaacctacaagattgatttctattattatatgagttacaccattgattagaattgctaaaaagtaccattggtacctagtaccctccttagtgtcatatcactagctagtggtataattaagtatcaaatcccatataactttactaatgccctggaaaggacattccacatataattgtgtaagtaaacttcattgctaattatcatgtcagtataaaaccagtgaactgataaatcatggactaagtactttgaagcatataatcacaattactttctactgtgatgacatcactataattatgagtaactatatgttctggatttaatagaatttatatattattaaacatataatcataaaagtaattatgtgaaccatgcaacataatataatttttaatcttttattaattagtatatcttattatattgaaatagattttatttagggcgtaaaattctaatagttcacttcgtgtatcacgatggttttggaactacatttacttcatgttttattgctcacgagaatacaagaaaagtgactaaggtaaaagtgttatatttctagagagagatgctttgactgttttctaaatgtgaaaaatgaactagtggagctctctttttataggaaagtattaaaataataataaaatatgatgttgatcttggtcgataatgatgatttaatggttgaaataactttggatgatgatcgtcaaattttggagctcaaatcccggatgctaaatcatttttgggtaatttgtggaaaaatagggcttatcttggggacaaaatttggacttaaaatccttagaattgcgatatgggtgtgagacatgatttgaaagagctcttgtttactacaaaaaaa

SEQ ID NO: 262131 - DNA, 712 bp, Cannabis indica
  modified_base (695)..(695): a, c, t, g, unknown or other
gaaagcttacaggagttgatgtatatacaatattcaacaataaataaatagaaatatagtagtgtacgtagatatgtgctaagttacacccgttgtaaatttgattttctatacttacatatacctaatattttatttctaaactaatacatatcatcattgaaaatatatgaccactttatctaaaacccaaaaatacccctctcaaatttttcatacttttttttagtgcaaaaacaataaaaaaaaaaaaaattgatagtccgatgggatccgatggtggtccgatggtcacctgatgctacttttgtatgtacaaaaacataaaaaaaattggtagcagatttggtccgatggtagtccgatgggtggtccgatgggtccgatgggtggcccgatgggtggtccgatggtggcccgatggggtggcccgatgggtggtccgatgggtggcccgatgggtggtccgatggtataaatggggtgatgtaaataggggtattttagggatatcataaaagttatcatatcttacaaatattagttattatttgtttagaaatttttttttaaccaaatgtaagcataaaaaatcaaatttcccatttaatttagagtgtaatttagagagtagaagagtgacatctttaattttttattataatctcttaattaatatttgtacttgaaaaatntatactatttttttttt

SEQ ID NO: 262132 - DNA, 792 bp, Cannabis indica
agtgtaaggtctggactctctgagagcatcttccatggtttcaacgaagaggttgaggtttcttgggggagggatgtagagagtcaaagggattgcagagaaagctgctgtgaaaaagaactgtaacatggttttggtttttgtttagagtggaaaatataaataaatagataaagttgatgagagggttagctttattgagtagtgtgtgtgagagttgtcacatctcacgtccaaatcaatcactctaataaaacaaaaaaatttaaattttgatgtgggagacacaactactcattatttcctattttattattattataaaatgttttggaaaaatgaatgacacagtagagaaaaaaaacgtggaataaccccagcatgacactttaaagtcataaaaccattattaataaaacttaccaaaggcagtatactgccaaaaatatttaaaaataaaaaacagtataaaagttaaaatgaccgtgcgacagtacaaatgaaaaaaaaaaatgataaaggcagtaatgggtgtaaattttccgaaattaaaggcaatgtcaagtgttggagagttcaagttcttaaccgccaaaatgacattatctcataaaaaaaatttatacgagtaatttttgtagtataaatatataaatttaatttttaattttaaataaatattaatttttaccgtaataatatttaaattatatttctaaattgttgtaagtacttgactattgaatttcacagtttatgattgatccatgctattaaatttttattttttat

SEQ ID NO: 262133 - DNA, 1031 bp, Cannabis indica
tcggttatggttacggagtccaacccgattatgccttgaacgcataactattaaatctcactctaatcatatacttagcatagcatcgcatttactcaacttatatcactagggtaataaccctaggctattaactgctcatattagggtacgtaataaccctaatcacagttacaattactcaaaaatatcatattcaacataagcgccaccgcgcatactctatgtggaaactactgtcttactttttgtcccgcaataacagagattccaaacccccaggtgctcctgattaagtaccggtaatcctagtcacacaatgcgggatttaacaaatagggttaatccctaattccactttcacataatataagtttggcattcaaaatatagataatcatatagagcttggaacgagctttccaacgatataaagaacgtccaaaacagagtcccgagtcaaacgttatgaccaaaacaaaattgagaaaagggatgccctgggtttttggccgcggccactgggttcgaaaacccagaaaactagattttaaggtctaaaaatgctcacttttccatatattccaaccttaatcaaaccatacccaaaattaacttcttacaaataaaaatcatcacaacaaagagctaacaacatcaattccaacattaatccacaacatccaaccaaagctccaaagctttagtaaaatcaacaaaattcaaactcacaccttgaatcatcaaatcccaaaacacaaactcaagaacaacactaaaatcagagctgcaaactcaatcaataactcataaattctgacctaaactcacattccatgttcaataaacatatatcacaactaaattatgctttacacactctatttaccaagattaaacatcaaaactataaacatgcataaaaaagcacaccacacccttttcatgctcatcttacaattaaattcagtaataagattaaaccaaagaaagttacctcaaatcttaattcaagagcaagctcaagattc

SEQ ID NO: 262134 - DNA, 625 bp, Cannabis indica
tccagatacaatacagttacactttctcaagtgtttaatatctatcttctagaaactttttccctttctctctctcgttcagctcttgctgggctggtgctatggcgaaaactagggcgaggcaggggaaattgagttctgcgatcaagaaaccaaagaagcgagggccttcatcatctgataaggttcgtaaaacgaagaccatggatgcaattattggtattgaaccagtggaattttcagaggaggaagaaaacgatgattctgagcaggtgaatgacgatgggagggaggatatcgatatggtgccggctttatcacctagatcttctctgcaatcaatcaggagacaagatgaaatcagcagggattttcaattcttccttcaagctaaccgatcctgtgcgactgctctaaaagaaggtaatcctattactcctcctattctgcgttctggaaatgtagtgaggaatttagaaaatacctttaagaatactggtagctctagcaaggtgaagataaccttagaggacattgaggagtgaggttcagttattggagtccgttctatagtatgctacgtctaggttccaatcctccttgtctgtgattgaagaatttatta

SEQ ID NO: 262135 - DNA, 723 bp, Cannabis indica
taagtcagacctcccacacactcgaccaacctctacatttatttttctcactcaaaagcaatgggtaagagattttatgcaaaatattgttagtttttgttgtatttagtgtaagttgtatgaattcacacattgttagttgtattttgtccatttttattctaaaatgaaagtacactatgatccattttttgcattttttttctaggtttttcatttttttgtgatgtttaaacgacgaatggcaattttgtgcaattttcaccgaagttagaggttagggattgttgaccgaggttttcggcaaccaatataatttagagagctataagggattaagagagagatttttacgtggttggggcgttaatgagccttagtccacgagtctgtgtatttatgatagtatttattacagagaatgttcttggtggatttatactcttctagttcttatgaaacccagaattctcgacccctctttaatgagctttggggggtatttatagtatttttgtgggatgatccctagaattatggtacatgcatttctgtaactatcagtaaagccacacattcccaatgaatatatcataggtaatgcatggtctaattcctaggttctgtagggattttatgagtgcagtccttcatcctttttgactgatgtgattcctcacagagtagccgtcactagactttatcgatcatagcctagtaggt

SEQ ID NO: 262136 - DNA, 897 bp, Cannabis indica
  modified_base (48)..(48): a, c, t, g, unknown or other
attttttttgtttttgtgtatttgtgaaattatccctttgttttttcncttcatatataacttaattttgggatttgaattgattttgtggttgttgcccttaattttgcccaaaaatacgtggaccaatgtggcaacgacacgtggatccaagaggtgtgactcttggatcaatcgactaagtctcttagcttcaggagtgtcaaaaaagaatgtaccctcccggaggagaggtaaaggctccacgtactcccggagaccaggggaacgccaagggatctccaggaggaacaggaccttattcgaacagtcacctctcatttaatgccgtatgggaaaaaacgtattggaactgccataagcaataattctgacggcgtaacccttcttatacaactattacactatgattaataaggctagtgacgactactttatgagagatcacatcaatcaagaagggataaaaaactatatccacctaacccctaagatacctaaggtataggtcatgtattttctatccaagccatacggagccgctcacctctcttttatgtttttgggaatttggttcaagattgtatttcacttatgctttctttgccttttgttaaaatccgttttgttaaacaattaacaaaccacctagcacatgctgttgctaggatgtcacggtctctctctggtcgtcttatttctgtgtctaatgctccagtttctatgctaaatattttgtactcagagagttaatttaatgaagttgacaattcataaaaaaaaaaatagaaataaaaaattacaagttacaaaaatacctttatataaaattaatagaaatagagaaattcattaaaagaaaaataatgtctaacaattccatgaaaataaaataac

SEQ ID NO: 262137 - DNA, 712 bp, Cannabis indica
tgaaatcaaagagtcaaactccacaaagggagatgtcaaagctattggtttcttagatttcctcttgtcaaaaagaggagtttggtcaatgagaattggatgatcttcaacaacttgaatattagaatcaacaatgacacctgttgtacccatctaagtatatatataaaaacaaataggggcaaaaacataaagtcagtgttaatacaacaagtgttgagcaactaaacaaaaacgttaaaacaaccatacctcaagaccaacaccatgaccctccttaagctcaaaaattttagaattcggaacctgtctagaatcaccacaaagcctacctgaagacatctgtttttttttcttaaaaataataattagaaaaaaatctagacaatcacaaccagaaaacatcaaacaaacaacattaccataatcactgctttcacacccgactgaacagtagcctcacacatctatttgagtggctccgtcattgaaagcaacaaaattcttgataatgaaaaaatacaaacaaaaaaagagaaaaaaacaaagttattatttttaaaaagtgttaaaaaaccaaaaaacaacttcaaataaactaaaaaacaataaaaaaaaacaataagaaaaaaaataaaaggaatcaagattaaatgcaaacaccataatttataatataaccattacaaaaacataagaaatacaaattaag

SEQ ID NO: 262138 - DNA, 736 bp, Cannabis indica
tgagataaactcccaaattggccaaacatcggctgttgggactgtgatcctccaaaaaaatcagagtagaaaaatagaggagactgggaggagcgtccaaacatgtttggaataagaggagattgggaggcccttccctgcacattaggagattgttgattctgctgtaaaggttgttgttgcggccttggacatgttgcactaccctgaggttgggtaggtaaatattactggaggaatctgtcaaatcgcgggtcatacagatcagaagtgtcctgtcccggcgaaaagcgttcacgcaatctctgaaacatctcagccataataccaacgtcttgagaaatagtagaccctgcctgagattgagtttgactttggctcgaagagctagatgatgttgttgatctttttcccttctttgttatgttttaaccgactcctcgaatatagtcactcctgtcacccatgaccttgaattggatgtcagacggcacctcagaagatccagaatcactgccagattggctttgaagcctacttctcgccatctcttcctcaatttctttggtgagttgctcctaaacataaataaaattttttaaataaatcaattatgtgataattttaagaaaaaaaatgaaaatattagtgtaactacactatatttctctttagctagcatcattgtacccaagttttatccttcctcagatggctgtctctccaaagttggtat

SEQ ID NO: 262139 - DNA, 650 bp, Cannabis indica
aattaaattcaacttcaaaagacctttcatcattgggcttctagcattcaaaatatcatttttacaaatcaagatccacaagtgtttagtcaaataaaatcaaaccgtatatacttttcaaactaaaatattagacatatgcattatatgttcggagtacatatatatacatataacaaaatacaaaatacaacataaaaaataatatctacatccttattattattattattattattattattattattattattattattattattattatcacaacaactattgccattattattttttacctacatactatttatctctttctcatacacatacatacatatatacatatgctactcatttaaatcatttctaatacaaactcaatatttatacattcttcaagttaatcgatgcactgaaaaataaaaattcttatcgatacatacattttaattttttgccagtcaacgcaactactcttctacttaaccacacttgactcaaagagtaagagacatactatagtggccaaaaattgcaccaggcccaaatgctttttagcttacggcccaaattagaattacaatccttcaaaaccaagtcagtaaatataaccctctcatccaaaatacattgggctttgg

SEQ ID NO: 262140 - DNA, 3816 bp, Cannabis indica
ttttattccttcccatgatacaaggtaaccccaaatagaaactattctccaaagcctccaccatccccaacatctcgctcattctctgtctagtagcaccactagtattattattgaaaaagatggatgacttagcatagtttacctgctgaccagaagcacgttgatacacttgaagcaattgtagaactctagaggcttcactctcattagccttacagtacacatagctatcgtcagcgaataacatatgagaaacacgaggggctcctctagaaacttgacaaccagtcaaccaacgattacgttcatactattgcaaaagagaagagagaccctcaacacacaccaagaagaggtaaggtgatagcggatcaccttgcctaatacctctccgtggaagaataggccccattactttgcctccataagtaacattataagcaaccgttgacacacaacacataatgagggagacaattttcttgcagaaacccatccggagcaacatagcttccaaaaatgaccaaccaacacgatcgtaagccttactcatatcaagtttgagtgccatacaaccttccttacccactcttttccttttcagataatgcataatctcaaatgaaaccatgatattatcagaaatcaaccggcctggaaggaaagcactttgagtagtagagatagcattcggtaaagcaagcttcaatctattagcaatcaccttagaaataactttgtaaactacattacacaacgagatcggtctgagatcactcatgagttcaggcacctttttcttagggattaacacaatattagtattattcagatcactaggaagagtttcatcagtgaaaaaagttcttaccaatttgacaatatcatcgcccacaatatgccaaaatttctgataaaaacccggtgtcatgccatcaggacctggcgatttgtcaggatgcatctgaaataaaactttctttatctcctcagtagtaacgggttcaatcaaaacatcattttgttcctccctaatagtcggctgaaggcagttaagaacatcaccataatcaccatcctcaaaagaaaaaagttgctgaaaataatttgttaccacatttggcaactcatcctcccaaccaacccactccccatcattatttcgcagcttgtggatgagattactacggcgcctcgaagtggctttaacatggaagaatttagagttttgatccccttctcgtaaccatagttgcttactccgttgcttccaaaatatctcgcgttgtagcaagatattatttaaattattctgggcttctttatactttgtcacagcagccacatctcgtcccttcttccactttcttatttcagctttgcactcatgaattcgcttcttaaaattaccagtgtaatcacttccccatgcaagtagcatttctccacattgttgcactttatccattaatggcaggccggctgtttgtaaccatttttcctcaaccattttcaagcaaataggctccttcaaccaacaattctcaaatctgaaggtcttattcctaacaggtgccacggccataacagtattcaacaaaagagggcaatgattagaggtagagacctctaaattaaagagcttacccgtgggaaataagtccagccatctttgagaaactaaagctctatcaatgcggatttctatccaatcgttagtgcctctcccacgctcccaagtatacgggtatccattcaaatccatatcatgaagatcacaatcctccaacactccgcaaaaaccgtcaataagccaattcgggtacaaattaccaccacgtttgtcttgttgggaagtcacattattgagatcaccaacaatacaccaagggagatcatatctcgcctttaaatttctcagcagctcccacgttctccttctcaaattcctattcggctccccataaagccccgtaagtctccatgatccattttcactactcttaaccgaaatatcaatgtagtttgtaccaaaaccaagtacttgaatctcggtattatcccgccataacatttccacacctccacttcgaccttgtacatcaacaaccatagctccttcgaatccaagagagactcttaattttttcaccatatcctttctacacaacgtttcacaaagaaagacaatattgggcttcttttggacaacaaggtcctttatgaattgaaaagcccatgggttcccaagcccatggcaattccaagatattagactcagaatgtctggtgggcctgagaaccaagacccaccttcatcatgtttttttagcccacttcaaactcattaacttgtgccataatcaagtcttctttttccattgccacatcactcccactagtcacgtccctagtatccatccttctcttttttgtttccaaataaagagtcatttccttatgagcagagttgactctttccaaatcactatcatcttcatcttccaccacattctttcctttttgcacacctcctccattactcccctggatatcatctcctaaaatcaaggacaccccattacgttctgaaatcatggaatcaatttccataatttttgcagcagcaccaccatgcgcaacagcccctgtcctccgatcaccgccatcaacatcggactgaaggtcctcattaccagttttcagccactgtgcacctattagataattcctttttcaagtctgcgccttcatggcaataccgtaaggcttaacaacctgactaagatcttgttcaaaatgttttggacagaaacgttcagaatgcccaatgataccacacacaaaacagaatgtaggcaaatgttcgtacttgaaattggcccaaatccaatctccattctccttacacaacttcatccttcttttcaatggtttctcaatatctacggttgcccgaacacgtaaataatcccgccaaattctattaaaactcttcagatcagtttttacaaaagtccccacataagtcgcagcacttcgcaccaccttctccatcatgaatcccaaaacaagatcatggatttgaatccacatatctagtttgtgaagatgaaccattcttggattttcccctctcttcagtctatgaaaaatcagcggagccttattaaacatccatgggctaccatcgatcacattttgaatatcaatttcatgataaaattgaaacaaatatcgattcgtatccaactccttgacataaactgcctttcccggttgccaaagggaggccatcagatgtctcatggcatcaaaatcaatacttctaccggttaaaaactttcccacaaggcaccatctgtcatcaaaaatcagttcctcaccctctgcctcctcttcgatcagtattccctcttcctcatcatcgatttgtatctgagcatacctttcatcaatcccattaatctgactactactagaagccataccgcaaaacaaccttaaacacacactgacaagaacaaaacaaagaacagcaagggacaaacagactcactcacaacatgtcaaaaagacaagacttttaataaaatcaaacccaatttattttaatctaataaaaattattttttcattcaagaaattttaggctcctgcattagtagagaggtttttgttgctattataaacatttagttgttgtttatatcttatctattgactgagatttttagtaactacttaattttcttttacgaaaaaataattgttagtaaaaatgagtatgtttatgtggttcaagtgttaata

SEQ ID NO: 262141 - DNA, 810 bp, Cannabis indica
aaggataaaatgggacaaattgaaaggtataaatcgcgtttagtgacaaaatactttactcaaagagtgtattaattacactaaaaatttctcacttgttttcactaaacatttattcagaattattatgaatttagttgcacactttgattcagagttgcataaaatagttgttaaaactgttgttatgaatggagaattgagtgagcaagtctatatgtctcaacctgaaggcttcgaggaaaattgaaatgacaatttggtctgcaaattgaaatgatccatttatggtctcaaacaggcatctcaccagtggtacttgaagtttgataaagttgtgacagtactgttggatttcatcgagaacaagtttgactagtgtatttatatgaagatcagtgggagctgtcatattttttttaagtggacgacatttcacttgctagcagtgatttgtcattactaaatgagaccaaattttttttttctgtatactatttttgatatgaaggatcttagagaggcatattttgttttggagattgagattcattgtgataagaatcgaaaatttcttaacttatctcaagaaagcttacattaatcatgtgctcaaaaggttcaacataaattttttgtaagcctggttctgttcctattctgaaagggacaaatttactaagcaacattgtcccaagaacaacttaaaaagagaagcaatgaagaatatctcatatgcaagtgtagtagggagtttaatgtatgcttaagtttgcactagacctgacattactttcatggtcgatgttc

SEQ ID NO: 262142 - DNA, 971 bp, Cannabis indica
cttactgattttgctttctttattctaacgagtcggttgaaataaattacattcgtcatctcatctttatatttagtgaaaatgatcaaagcccaaaatacaaataagtgaatgatataaatgttcactatgttcattaattgaccagataggagaacaccaaataaaattaaattgtgtaattgtgattttaattaggtttttttttttttttaagatttatgtgtaatatttaattgatttaatagatattttattttattagtagccatgatattatttaacttgttgagaatttataatattatatcattaattagttaatattaattattaatataaataatataaaatgtaagattttttaagtaattttttttatttggtgtgaattattggagttgttaaactaagattaataaattatgtaccaaattactgaaaaaggtatactatagtggtgtagctgttacagattatataagaagaataagaaaaagaacaagaggtgtagcgaaataaagaaagaaaataaaaagagaaagagaaaagaaaaagaaaaagaaaaggagaaagagaaagagaaaagaaaaagaaaaaataaaagaaatagtaaaaagaagaatttttatttttatttatttataatttataaatttttaaataattaaagttacaagtgaaactcaaaaaaaaaaaaaatatatgacacatgtacatagtaacaatccataaagtatttaatattgaaaaactaacaataattaaatatgcaaaccaaattaaaactttacatattttgtctcaattaataaaaaagagaaattaccacatatatgatttttttttttaaaatttacagtttgagttgtgggttactatgtagatttagttacgatttaagttgctctattggttgttatgtgggttgctatgtggatttaaataaaaatacaaaaaaaaactatttt

SEQ ID NO: 262143 - DNA, 559 bp, Cannabis indica
tttggtgcttttattgagagctttagtggtaaaactaaaaaaaaatccctccttacaaagagaaatttgtccatattcaatggctgataacaatcaaaacgatggaaattaccctgaagaaaccacacatcgccctagaaaatagccaatgggatctcaaagacataccactggaacatcacgttcaaggacgaacgatggtggtggagatcaaaattcagaaagaaagaatgaagatgccaataattctaccagatacgtgcttagaagtgcggatgcttatgacccaacaaggtatgtaccgttggtggagttagagaatagacaactccgacaatgcttagcctaatctaaccgacgaaatgctgagttggaaagagaggctggagcaaccagggcatcataaggaacaaatcctcaaaatcaaccttatcatgcggtaagaagaccacgaggtagatctcaaggttctagaaccaagagacaggaaacaaaccaagaaaatccccaaaatgcgcaggaagagaaacctgagagtacaagggatgttccaatggat

SEQ ID NO: 262144 - DNA, 596 bp, Cannabis indica
tatttttacctattagtgatagagatttttcatacgaaatgtttagattagaggattgatttaaataaattttgtgaatgtgaaatttataccttaaatcgtagtgataaagagggagatcatgatacatatgactaattatttccacaataaaatatttatttgtcttattatcttgcgataattaaaatgataagcactttataaaattggttgtgcaatcacgcgatcgttataaatatcttgtgcctatcgcgatcgttataatccttgaaaaataaattttaatttatgaatattttttattttaaaattcatattttaagtagctaattattagaaaataaataactacgtatacaaaaacaaatatataaaaaatttattgggtaagacattaatcaatcaccaataaaaaaataatactttttagataaaagaaagtaaaataaaaaaattactacttataacctacatggataacatctaaacgatttttaaatgatgtgagacttttaatttgtatgtgtagtgtatttttcaaagaaaataaaagaatgtgtcataaaataaaataaaataggaagaaaaaaaat

SEQ ID NO: 262145 - DNA, 779 bp, Cannabis indica
aaaattaaaagtaaaaaaaattgatacaaaatagagttaatttctaaacttttgtttctaaactcattttttagaaattaatttctaaacttttattttaatactttcctatctcattctcattcacaatatttaacaaaactattagtttaaaatactcaatatatacatatacaatatataaaatactctcctatattatatttctcattcacaatatatatacacacaatacatatttaatacaacacaaaatacatacatatatactcttctatatcacatttctcattcacaatatatatacacactatacatactcattacaacataatacatagttaataatatagaaaaccctaaaaaatttataaaataaaaaataaagcaatgtacattactaaaattagtagaaattatatttataccttaataggcgttgagatacattgttttctccactaaaaatggtggccggaggtataaccaccacaagcactacctttacttttggtttaccctataaaatgaggaaaaatgtaatcttttcaggtatataggtttaggtatgaaaaatagaagatttagaaacaaaaacgagctaaaatggtgaaaaaaatagtaaaatgggggtgattttccgtggtggttgacagagagggtttggggtttctttggcttgggggtttattggttggttggtcgaatgaggaagatgaagggctgggccagggttataaaccctgttggcgtcgattatcttctaactattgataatt

SEQ ID NO: 262146 - DNA, 522 bp, Cannabis indica
gcaacaagccttgatttacacctgtcaagtgcccatctgccttctttagaaccttgtattctgtatccatagatgcataccacttgggatattttagtgctgcttgaatagatttaggtttagagggaatcatagcttcaagtagtggatgtttggtggcaaggtaagcttttggctttgtaatgccactttgggaccttgtcttcataccatgagtcatgtgtgatgtattgggtaatgtgggttttgataaactagaggtactaacatgagtttgttcaggatgtcgtgtggagggtagttcttttgtggtggtgtctggtgtgatgtctagagaggttggtggggctagtggtgttgtaggtctttgtgtatcgtgaggtaatgactgatgtataggtggttcaacaataggttgggtaaaatttaatgatgtaggtcctgttggagtgggtggtggagatgatgaggttgtctcaataggcccagatgttgtagcagtagtcacaacatgaacaaaac

SEQ ID NO: 262147 - DNA, 827 bp, Cannabis indica
tcgcgcgaaaaatgagcccattgttactcgaattgttggaaggctgaccttggcttacagatgtcaaggtgccgcacgggtgttctgctgcctgaaaaggtgagtccgtgacacgccgcgtggtttaagaaaaatttaaatcgcgaccgcaccgcaaagaatttcaaaccgtattttttttttttgtagagcaggttgtttgagcggtttgatgaacactcctaatttctagtacaattaaaaataaacaaaatggggaaatgttttggcagcaagtgtaggtgatatagtgcctaatgttggtgctataatgcctagccaatttcaacaaaagatttttttagcttttgaacgttaatgatcggttccaacagatcatataacccccaaattattcattttggtccataagccccaattaatcattgataatagccaagacttttgtggaactcttcaagcgcaaataaaagtgaactttataaatagttaccatttttctttcttgtaagttagaaatttgtgaggacatgtcatccttagacactagagtatgcatgtccgcttgataaataggagcgtttcttgagtttttctaaaggttatgtgtaggtggaaatgtattttaggataaaggtttaaaaacgttgtttaatcctttgtacctactctttgttcttggatcttatatacgtgttttgagatgtaatctactcgttatatatgtaatttattttcagtatcactaattaattgtattttgagtatttgttgtagcactctattaagtgtaatattcctcaacaaccaccaccatgctgaccaca

SEQ ID NO: 262148 - DNA, 511 bp, Cannabis indica
ctcactttgtcacagtcttacatttacttaatttgttcttttatttgcttttagttagtcaactcattcgcaatctaaattgtttcatctcattctttcccgatcattgtttgttttaatatcttacgacgaagaagattattggtaaagaacatgaatctggtggcttgtatgttcttaacccactttcaccaacctttattgcttgttcgagtgttgttttcgcttttgaggcttattgctgttcgggtcatctatctcttcctttcctcaacaaactttgtccctaatatagtaagttgtatttattagattgtgagtcatgtcagtttgtcaaacatcatcgtgttagtttgagcccttgagtgaataaacgtgctagtgttccttttgagttaagtttattctgatgtttggggtcctcctattttgtctcaacctagatacaagtattttgttacttttgtggatggattttcttgtgtaacttggttatatttaatgaaatatc

SEQ ID NO: 262149 - DNA, 1930 bp, Cannabis indica
aactgcttgccattatctgagactattttgtacggtagtccgaaccggcatattttgttcttcgcaataaagtcttgaactttcttagatgtgatggttgcgagtggttcggcctaagtccacttagtaaagtaatcaaccgctaccactgcatactacactccacctttacctttaggtaattgtccgatcaggtcaatcccccaaatggcaaaggtccacggactttgcatctgtgttaactcgttgggtggagctcttggtacctatgaacctatgaaaatctttggcatttgtcacacttcttaacataggcttttgaatcttcaatcattgtcaagtaaccttgccttagaattttcttggataagctttgtccgtcggcatgatttccacagaagccgtcgtgcagcttctttttgagtgacacatctgagtaatggaatcgagaatcctcttctgtacttgactccttctactatgatgtaccgtgtagctttccttctcattttccaagtttcatttcgattatctaggagtttcctaaactcgaggtaggccgctattggtgtcatccaatttgggaatgcatcaatcatttcgatttcttccgtgccagtgatgctcgactcttcgaggaactggataggaaccaagttttccttgtcacttacattgctacttgccaatcgagctaacgcgtctatagttgtattttcttctcttggaatttgtctgagaccgtagcttttgaatcgtgtgagcagatcatgtattttgctcagatatgctatcatcttttctccccgtgcttcatattctccggatacatgatttacaacaagttgtgaatcactgcagattttgatgtgtttggccttcatctgctgggctagtcttagcccagcgattagagcttcgtactcggcttcattgttagatgctttgaatccgaacttgactgcagcgtgcaggtattgccccccaggcatgacaagggccattcctgcaccagatagttgatctgtagccgacccatccacatgtagtatccaggtcggtttgtcctaattgtggcttggctgaggtatttgtaccagctgggggttgctttctggtatgctttcttttttgcctgtgcattctaccacaaagtctgccaaggctttgcctttgattgccgttcggggttggaaagtgatttcgtactggcccaactctaccgcccatttgagtagccgtctagaagcatctggtttttgcagtatttggtatagtggtttgttggtatacacccgaacaggatgagcttggaaataaggcctcaacttccttgttgcaagaatgaggcagtaggcgagtttttctattaattgatatcgacccacggcctcaatgagtcttttactgatgtaatagactgggtgttgtatatcattctcttctctgattagcacaacactcacggcatgttccgtaacagctaagtatattccctgttcctcactgtccagaggttttgagggaacaagaggttttccaagttgtgcctttagcccttggaaagctttttcacactcctctgtgcactcgaactgcttgtttcctcgcaggatgttgaagaatgggacacacttgtttgttgattttaaaacgaatttgctgagcgcggcgatccgaccagttaagctttgcatttctttggtttttgttggcgagttcatatctaggagggcttgaatcttttctggattagcttcaattcctcgggcattgacgaggaagcctagaaactttcccgagctgactccgaaggaacactttaagggatttagtttcatgttatattttctgaggactttgaagtattcgtctatgtgcccccagcctttctggattttacgagcatatcatccacgtatacttccat

SEQ ID NO: 262150 - DNA, 1104 bp, Cannabis indica
ttttccttatcagaaggaagagttagtactggagtggtaatcaagcactggtttaactctcgaaagcttttctcacatcgatcagtccaaacaaacttcaggttctttcgtgtcaactccgtcaagggtacaacaatctttgaaaaactctcaacaaactgacgataatacccagctaagcccagaaagcttctaatttcagtagctaattttggtgttggtcaatcccgaacaacttcaattttggtcagatccaccatgatcccatctttatctactatgtgccccaagaaagagacacgagataaccagaattcacactttttgaatttagcatatagcttatggtcctataaccgttgcaaaaccgctctaagatgcaactcatgctcttcttccgattcagaatattttaagatgtcatcgataaacacgatcacacatctatccaagtaatccttgaatacacgattcataagatccatgaatgctgtcggggcattggtgagtccaaaagacatcataaagaattcataatgtccataccgagtatggaacgcagttttcaggatatcttcctctcaaattctcagttgatgatagcctgagcgaagatctatcttggagaagagaagaccatcttcccctttagttgatcaaaaagatcgtctattcgaggtaaatgatacttgttcttgatggtaagcttgttcaactcctggtagtcaatacacattcgcagggatccatctttcttcttcacaaataatatcggaacaccccaaggtgagtagctcggtctaatgaatcccagattcagtaactcttgcaattgtattttcaattctttcaattctgctggagccattccatatggtgcttttgatattggatcctctcccgaaaccaactcaataacaaattcaatctcccgggtaggtggcaatctcggtaaatctttaggaaagatgtcaagggactcgcacaccaatcttgtattctcaggtccagatgtcacggattgactggtatccactgcagtaattacgaatcctagacaacctctgctcatcaggtcattagctttcaacagtgttattcttg

SEQ ID NO: 262151 - DNA, 1302 bp, Cannabis indica
ggacaccccatccaatatctgatccaattcaattagatattaaaaaataacatcaaatctgattcgatcacaattagatttttaatgtttagctgtcggttgtaattagatcggtcagatgtcattagattggataatttatgcacatccttaggcaaggcagggcagtcgttccctagaaaaaaaaaaaaatcgagaaaaatatatatatgcaatttaattagttacgatatttatttgtaattaaaaataatacttatggccatagtattagcacggtaaactaaattatatgtatggcaaaagtcaatgatttaattcttatcaagactagtggggaaatattttttgcaatcttttttaatttttaagaaatcctctaacttgtatttataagactgttctcatttttattttctgtagacactaatacagaatgcatgagtgaacgatgggaaattttgggcacgtgtcatattgattttgatcgatggaagcgtaattatatgttttgggaacagtccgaaatagagcacggtgagtccctcatcatatttatagtttactagttcattgatttttttttaaaaagaatataatctaggaatgacttcagttattaaaggagcaagagttactaaaaaatattattgataaatcacttcagctataataaaattctaatataatgaataacactgcaatattccctttcaacctgattaacttattgaatggaaggttgtagtgttatttttcacaagaataaaatttcattttatacaagaataaaattgttgcttaatttaagaaaaacaactcgttgtggtggcacaataatattttttatatttatttatttaaggaaatttggtaatatttttatttttttaattttttaatcacaaaattgaaagtaaaatttatatttttaaatcacaaaaatatgttttataactatttttttaaaaaaaaaacttaaaagaaaaaaaaaagtgtgttctataattcgtatttttattttttgattttaattaagtcgggattaatcagttttggatttggagacatggtccgagtccaagactggggcaagaatccaaatcccaaaattcaaattggaatcgaaatctgatcagtttacaaataaacttattttatataaaattcaaaagttaccatacaataaacaaataaacttatttttagtattacaaatatcatcagtataataataaatatttttgtttattaatgctaaaatttggttgtattgtcaaaatgcataatttatatatatat

SEQ ID NO: 262152 - DNA, 1203 bp, Cannabis indica
tcttgactggatcttgacttgacgacgatccagtcaacaattgcgttccacgtcttgccgaatgaaaatctctgctatcaatcacctgaattggattttttactgatttgctactgttaattttatctattttgtggaaacagtgaaagtctgaaagtccaccaccacaccggccgtcttcctaactctctcaccaggtttctctccttgcctgaggctgcaaacaagtgcggcgagtcctcggccacgaccatacacggaccaggtaaatcttacttcacatttcaatttaacttctttcatatggctatggttttgcgtctgttagttgttcgtggattgctagaatttttttcatctgctattgaattgtacttacaatttttagatgggtttcttagcttcttgttcgtgattgttattcatgcttgttttgtttagtttggatataagctgtgttttccattgttttcaatccattgaatttattcatatcgctagtgttatttatgtgtacattacataactacatttctatgtaatatgcagtgcatattcaattggcaatgaggtttccgagcctaccccattttcacttgctcaatttttgtttttataaatatgaatgttcaatatctcttgattttttttacactttgatgttttggtgcttttttatgttcctttcttcttttaagcagtaaattagaatgctatggttattctcaatatgaatagctccaaggttcagaagtctggtctcaagctactgattaaatgcttcttttggatgccaacataaatttatgaacaaattttaataaattttcactaacttgattgctcattctggctcgtagctgcagtgtgatctggtattgttcaattcagactaattaaagcaagagtggttaagaaaagcgaaacagagagaacatactgcctttccttctctctctctaggaaaactactgagacaaagatgaacaactaaaatcaaaccctgtttgggatttggatttttcatggctgggaaggagctcgcgcttgcacctactttctggtgcttttgattacgagggtcattgcttacaccaagtaatgtcttcttcttttgctatttttcctctttgctaatgtaacattgaaataaaaagcttgagcctttttaatcagaattttgatgctcggtaccaatttggc

SEQ ID NO: 262153 - DNA, 599 bp, Cannabis indica
agaccaggaatcgaactccgacctgaactaaaacccaaactcgaactctgaattgcaaatggaactagaaccgaactaggattaggactccaacccgaactcgaaccaagatcaaaacccagatcaaaacccaaacccgatcataacccagacaaagtcctaaacccgaactgagactaggactccaacccgaacctagaccggtacaaaaacccacacaataactgggacttggacttggaatcataactcaaaaaattggacctagatccagaactgtaaccggaccaggaccctgactctaaaccagacctagacccgaatggggagccggacttgtataccaacccaaacctggactcaggacccgaactcgaacctgaactaacaccgaaacattgaaccagactagggacacataaccaaggtcgggacctagaaccgcacccaagtctcgatcccgaacccaaactcaaaaatttgagctgggacttgaaccagaaccagacggagacccgtgacagtgatccatatcttgactcgggattcgagtaacgaggcctggaacaaacccgtagtcggtgtctagatctgggact

SEQ ID NO: 262154 - DNA, 2404 bp, Cannabis indica
cgccctaatgctaaggcacgctacaatgattttcaattgcagtgctatctttgctaatcaaagaacttttttttaataaaaaaatcgtgtcaaattaaaacttttatattaattatgaaactttataaactttagtaaagcatttacaagtgtcaggatcccgtttctaaactttttacagaatatacaaaatacatatatcaggtcgcacatcgactacaaaatgaaaaacctagatgtccggagaccgaactctctaggtcgcgctgccatgacatgtacaaccccatcccagctcaggctcactcctattcagctttcgcctttcctttacctacatatgaaagtagaattgtgagtcgacagactcagtaataaaagcatatagcatatgatattataccgacttgtatctaggcgcccatacacttatttacaaggcttaacagatgagtaagaacattccatactagggtacagccactgtaccacgtacactgcgtacctcattgcacgagtgttggtagggtttgttttgtaccctgagtaccactgagtgatataccacacacaccatgtactttcccgtacttgtgttggtaacaccgtaatgtactccttaacgatatacactataccaatgcactctataccattcccgtacaagtgtatgtagtgtaacaattataacaagcatgcatatacattaacacatacatacactcgcatattcatatcacatattatacacaattcttacctcatttctgaattcaagtgagttggccgacctgaacaaaaagtctcgtgctggatggatgccctaatcacaaattaaaaccgcgtaaatcacatatcaaaaccctaatccgggaaacccaaacctaaaactcaaggttctgttatttctaaaagggactacaatatcctaggaaacagggaaacacccaactaaggcactgaaatgggcaagaattgagaaaatgagttgttcagggaatctgtcaaaactggttaaacagttttacaggacctggaaaactgggtaaccggttgcaccagggttccccaacaaccccaaaactcactcaaaacttatccaaatgccaccaaacattccagaagacctaaaatgagcatacacaatataatctaaccaataaaactcaaaaaaacacctataatcaaaatgtgccatcaaactcaaacttgatcatccaccaccacaatcaacaaaactagcattaagaacttaaaatcaactcaaaatcacaactcaaaccctaacagcccctataactcaaaatcacatatccaaaccaacatcaaagcttgaaaacccaagagtaaatgatctaggggttgcctcaactttgaaacctacttgaatatttgctgaaaacacaaaatttagtagctaatccccttagttccttgctggtttgaagagagagaagggaaagagagggtaatttcttaatttttttacttttcttattttctttgtatttctctaaaaggttaattaattaaacctaattgttgctgaaaataacccaaatggacagctgccacaacatcaagtagccatataagtcacaatttgaaattactaaaatacccccataagcataaacttaggcattttaaagtctaagggtaaaatggtcaaaaaccataacgcgctcaaactcagtattctattttctccaatatacattccattaagaaataaggttctagacttacccatgcgaataaactagccatccatcgcatttgccgttgtcgccgagcaaaaattataaaaactacataattcacatataatacaaataatactcctagagtttaataaaatttccagaattgaaaaattataactctaatgcccacttttgataatgggacccacaaatactataaaaaatatcaataattagtgctaattgcctttactaatccataatataaaatgcggtcattacaattttccccccgttaaaaggatttcatcctcgaaatctaacctggatagctctggatattgagtcctcatgtcaaactctaactcccaggtggcttcctccaccttgctgttcctccaaagcactttcaccaaagcgatggtcttgtttcgaagaactttttcctttctatcaaggatctgaactggctattcttcgtaggataagtttaactatagttcaagggcttcgtaactcaagacatgagtcgggtctgaaacatatttccttaacattgaaatatgaaatatattatggaaagtcgataatacctgcccaaccttctcgagtatctgaaatggcccaatgaatctagggccttaacttaccccctcttcccgaagcgtttgatacccttcattggtgaaacccgcagg

SEQ ID NO: 262155 - DNA, 1174 bp, Cannabis indica
gagagaattaaagagagaaagatagtgagattaaaatgattttagagtgctacgtcatccttctatacttcttttatatatatatatagataagatatataattaaattattaaaatattaatatatataaatacatacatgatgatatagaaagaaaaaaaaaacgtacacatatcttttgaattttttaggccgttaattttttttttttaaactatcaagattgttggattcaaaatttttttcagggatcacgatttagtacatgttaaaatttaaagagcacgatttagtacatatcaaagtttaaaagccacgatttaatacaaggacaatcatcatattagtaaacttgaataaaattaagtagaattctcgaagaatttttaacgacttaaaacaattcaaaaaatatgatttgaaaaaaaaaatattaaaaagtatatatacattgacagaatgaaagagataatatattggaacatataatcttttaaaaagatactataataatataatattttcacaagatatgtaataatgtaaagtttcactatggttataagttataacttatatgtagcttgctatttttgcttacctaaatttattatgcattttaccttatcagatggaggtatgtttttggtgtttagtagctatattttaactatatctattttacttcaattgttgtaagtgctccactattttctatatattttaataccataaaattcaaagtaattattttacgaataagttgaaaaaattacatttttttttttttatcctattaatcaaaaatacttttatattatttttttttattaaaatatactatttttttgagtagattgtctaatataccatttactctctacttaaatttagcatataatttatttaacctaaggggtctaatgggaacatcattcataaaactgagtatatctaaaaaaatatgaatatagagataaaaattaaaacaagtaaattaaaatggatatacaatataatttcctcattatttttacaccttagttattatgtttgtctgatttatttatttcaacatttcttttgagggtatcatatttctttgaacttacttgtacacggattacaagcctaattatcacttatgtaatttttatttttttaacataaagt

SEQ ID NO: 262156 - DNA, 746 bp, Cannabis indica
ataacaaaaaatatattaattttattttttatttcaaatatcaaatttcatattaatatttattttataatctcaaactttcatttatttatttttggtccttttgtggctctataaataggatatcattttagaagtgaagtgtgtaatttttagtgtaaagaaactatagcaaaaatctctcttcacttttcttctcatatttctttaatttttatgagaacgatgagcataatggcctaatcttcctgagaagattagggatgatttcatatgcaaagtgaggttattttgtatctttgattcacttgttgtaatatttttatttaagtaatgcaagtttttaatttacttttatttttatgttcttcatccatctatgctattatatatgatattatatactaaatatatataaacttaatcatggtctttctttatatttttatttagtaattatattaatagcagtattgctcatgttctatctatcatgttcatttttatttactttttgctaaacatataaatactcttcctatgtgtctaaaaattaagaaaagtaatattaatgttcatttccttcacaatcaccaccatctccatctccatctctatctctttatcattatttttactaaaaatatatagaattagtcatgctctgtctatgcgttactatttagtaaatataatattgatgtttagttttatgtttaatctttattgtattattgcttgatgta

SEQ ID NO: 262157 - DNA, 539 bp, Cannabis indica
tccaagtcgtagtaccagtcccggtaaacttccagattttgttccaattttgggtcacacggtacgggttcggctccacttttgggttttggacttggttcaggtccagggctgggttcggttcctgacaccgactacgagttttatccaagccatgggtccagatccagatcccaatctcgggtcccagtctggttccatttctgttgccgggtcacgagctgggtcctcggttcatgttggagtctaggtcgggtactagttcccggtcctagttctttttcctaggtccctatcctgattctaggtccaggtcccgattatagtgtgggtttgggtcccggtctatgttcgggttcgagtccaagtatcggttagggtttaggtctctgtgtgggttttaatctggcttcgggatttggtttaggtccttgtcctggccctagtcctagtaaggttcgagttccatttgcgattatgagttcgagtttgagttttggtgcgggtccggatttaactctaggtccagatcagaagtt

SEQ ID NO: 262158 - DNA, 681 bp, Cannabis indica
aaaaataaaaaataaaaactattactcttgaaatttcatttataattaaaaattaattttttttatataaaaatttaaaaaattaataaaactgtgcaaagcacaaatccattccctagttcataataagagaaatggtaaaaagcaattagagttctcatatgtattactgttgtataattaaatattaaatcacccacatttaaatttatacataagaaaacttgctactaattacaacaacaataatagatcgtgttttaatgtgtagaatattctagagtgactcagagcaaagctcactaatatacatatcccaaaatcccatttttgttgagggtcaggctttgttgcagggtatatcgttgtgtattgactctcagttgcagccagaattcatcttctccgattgtttaaatttagtcactaaagttaacggtgattggcaagacctctctgccctttctggtcttgtttctcaaataaggttgctcttctccaacttccctgaagcctccttgaagtacttgcctcgacagttcaacgcaaacgcccattgtctggccaaggacgccattaagtcgagagaagaagcccataaggaattattctaattcctttgttgttgctgcctgtgcttagtgttgttgtcttgcagcttgttgtttatttaaaaaaaaa

SEQ ID NO: 262159 - DNA, 1668 bp, Cannabis indica
tttttatttatttattttttggtggagaacaaaaaaaaaaaaagattaaataaataaaaagttggatctgtttatggatgatgcagtaacaactgcagaaaatgggcctagggctttggagttcttgggcctaggagatcatgatagactaaactccctggaaggcaatgtgagtaaaagtgaaagataatattattattatggtatagaaaaaaaaaaagaaaatgctaattattacatcaacaaaacataaaattagtaattaattggtaatttctgtttgcagatctcaaaggtgaacttgataattacagattattgtatgccaggaatgaccggatacgacttacttaagaaaatcaaggtattatatatcatattttccaggaataattactgtgtggaaagttatatagtttttttttttgagctcaatgtggctatattattttggagaattacaggaatcgtcagtgatgaaggaggtgcctgtggttattatgtcatcggaaaatgtcccaactcgtattaacaagtaagtagataattttgtttagtagtatattcttacaatagaataatggtgttaattaatttggttggttagtttaattaaataataacttgaacaaaacaaacaggtgcttagaggaaggagctcaaatgttcatgttaaagcccctaaagcaatctgacataaagagactgagatgtcatttggtgaattccagaggctaaaattgaaccacctcacaaactggaaaccataggaatttgctttacgttctcattatgtttctgctagactttttaattttagacttcttacctcaaactttttatgtgtattaagaatttaattattaatctcacactatttttttttttgccatgtttctgttgattattatgcacttgatttattatttgttaactgttttcagccccttaaatttttttttttttttttttttttttgaaaatttggaacttgaatttttgggagggaaaatttgattttttttaaaaaatatttttcattatttttttttacaaacaaattgttatataatattgatatattattcattacagaatgggggaaggaaaaatattccaaagaaaatcaatcatcatccaccattaaaatatttgcacattagtccaatgccttaaggaaattagatacaagatttcaaaagggaagaaactcaaaagacttcaacaaccttaaaaaactttacatcaaggcaatctgaaattgttgcacatctatcgaacaaccattttagaaataaaaagataatgaaagcattaatttcttgtagttgaaatagccttgagcaatgatggatattagccacaatttctctagtagagttttcacaattgttacaaaactgactatttgaatcaggaatacaattttgcatctatcctctatttcaggcatcctaaaggtgggtttttttttttttttgagaaaataggctcttgcaatgatgcaaatgggattttgttggttgtttcttgagcccaaaaaatgtaaataatgagatcattgaagtattctgttgaataagtgtatgagagaagatgtgaattgcaaaactgccacaattcgcaataaattaccatttttgtataaccacaacaactaaaataatt

SEQ ID NO: 262160 - DNA, 1038 bp, Cannabis indica
gtcttgagttggataaagacgatgaaactaacggatgtggaaattgaaattgatttcttagttgctgttcaggctattaatggatcagttcaaatgtcatctcagtttgggttacttgttcaagattgtcgtttgttactgtctgagttataaaatgtttttatttgttttgttaaacggtcgctgctcattgcattgcaagggaatcctattttatgtcagattgtatatttgatgagctttctgctccatcaaatttactttcaattgtaagggatgatattatttcaagttgaataaaacttttccactttttcaaaaaaattataatattcataaattttattaacattctatcaaaagaacactattaattattaaaggggatatctactgtaactaccatactccagtaccctacccacactattcaagagaaaatttaaaacaattataaaattcatacctcacttaattattttcgtgtatacttgttttaaaagtactagtagaagaacattcaatttgaagagtcaatagtctaaataaatatatccttccttgtttttattttttgatttttaattacttattattttttaattttcaatgaaaaaaacttttgcagaggaacaaatgtatgttttatattatattatatattaatttaattaattagtaattttgaaagcaattcaggagaagatgttctactaaaataaataaatagcagatatatatatatatattgggtaatggaaaacaacattaattacctcataattaattacgttttcaacttaccaccggcggcctaccaaaacgccatggacgcgctctactgtatcagaacctcgaacataactctaaattaatgcctaccattacaccatttaattactataattcccactattttttttactaattaattaaaatcattaaattagtagttatattaaaaaaaaaaagatatatagacgattatttttaaaatttgatattatccttaactatataggattatgtatatatctt

SEQ ID NO: 262161 - DNA, 649 bp, Cannabis indica
atcggtgtgagaaaagttttttggagttaaagcagcgcttgattaccgctccagtgctaactcttccttcagataaggaaaaatttgttgtttattgtgatgcctcgagacaaggtctcggctgtgttcttatgcaagctggaaaggtaatagcttatgcttctcggcagttaaaggagtacgagcagaggtaccctactcacgacttagaactcgcggcagtagtatttgcgctaaagatttggcggcattacttatatggcgagaaatgtgagatatacactgatcataaaagtctgaaatacttctttacccagagagacctgaatatgagacaaagacgctggctagaactggtgaaggattatgattgtgagatcctttatcaccctggtaaggccaacgtggttgccgatgccttgagtagaaaggggcagagtcagataaatactgtgaatcaaatctcgcagcagttagcaaatgagatgacccgagctaaaatcgagttggttgtagggcagttggctaatattaccctgcaatctactcttttagagcgaatcaaagaagcacaattgcaagatccagagttagtgaaatcccgagatagggttttggctgggaaaactggtgactttacagtggatga

SEQ ID NO: 262162 - DNA, 495 bp, Cannabis indica
gtatgttggcttttgtgctatccaacagtatcacatcggtgcgactagagtatgactagtgtaccgagtataggctgatattatggtcggtagtaccgtacttttgacagtagcacattggtgcagctagagtatgactagtgtactaagcataggctgttactatgtcaaaagtactgtcgtacgaacgttctagactcagtaccgtgagggacacggggattagggttatgatcgggtgtatgggcactaggttataacccgggttatttatatgttatatgtgttatgattttcttactgagtttgtcgactcacagtgctattgctatgtgtaggtaagggcaaggctaaagctgaggagccgtgagagcgaggaggtgaagattgtacatgtcggggcggttaggcctggagcgtacgatcctagggacatcagggcttctattattgggtccctgggcaacggatcctttgtaaatgaataacaaactt

SEQ ID NO: 262163 - DNA, 730 bp, Cannabis indica
gtaattaataaattacgctttttatttcattgagtaaattctcaatagttaccctaagtaagatcataatcttacttcattaccaacataattacatatttaataaaatatgcctatttaaatattatttattttccaggatattacactataaattaaaataccaaatataattatttagaatcattattgaattatgcaattaatcttaataacacaataaaaagtgatgtgatccatacttaactatataaatagttcatatatatttttgaataaaaaaatacaattccctaagattaatatgttgttacagaaaaattgaaaaatcgtggacaagtatttattcatccacattctcctatactgggaatagatcttgaaagctagtgggcaacaccattcatagatttagcaatagcactgcaataaccaccaccaacatcacctaataaaaattatatctaataaatagactagaaaaataaaattgagtgagggttatcaatccaaccaatagtcacattaaaatcactattaataatggagatgctgaatctaaattgatgcgcaagagtcaacctagtcaaattgcaagcacctttttcacattaacagaaaaatcgcctaacacagcatatgatcaaaccagccaaaccacacccgtagtatcctgtatcactccacctagcctgacaaagccccttttaggaaccattgaagaaatagt

SEQ ID NO: 262164 - DNA, 598 bp, Cannabis indica
taatatatattaacttacgataattttatatgtataaaataatattataataatatattaataataatataataataacattaataaaaactatattattaatagttattttattatttcttagccactaaaaaaattctatttttaggtatttggctaatttcgagtactccaaaatactctggtatttctaaaatcaacttattccaataatcttatcaatatttataattaaaactgttgtgacaattttagcctccaatcgggtctccagggtcactgaacctaaaaatatttttatttcacaaataactcatattatatccacgtatttcaaataaatctctgtcattaataaattacgcttatatatccacttatcaagtctttagggtcgccaaacctgaaaatatttttattccacatatagctcatattacattcacgcatgctatatagatctccacaattaacaaattatgcttatttactcacttatagaaagctttaaattttatcatgaaataaattagtaggatcataattccacttattacccgattaacccataatattaatataaaccctaattatttac

SEQ ID NO: 262165 - DNA, 1356 bp, Cannabis indica
taatttaattttttttttttggcaatatcccatattaaattttaattttttttttgtataaatgccaattatttaaaataatttttataatctctctaaaaaaaaaaaatttctataatatttaaataattaatattatgtacatacaataaccatttcagctgttatcatgtaatagtgaaaacgtaacaaataaaaataaagttaataaaatggtattgccaaaacaaaaattaactgttaacaaatgaaaacgtatgtagaaaagagtttagttacaaaatactctaatatttaaattaattaataattgttctaatttatatacgtacgtaccgagatgaactcggattctttggcctgctgcttgttgctatacacgcttccttctatactctttgctgtatataacccaataacccaatttcaatgtttactatatatacgatgaaccaagtgatgattcaattaatgtatatataaataatagatatatacttgaagtgatcaaaattggctatatggtttctattaatcctgtgtaacttaatttaataataataattaaaaagataagtaggtttggagaattaaccatatggatcgatgggctataattaaaaaagaaaataacatacgtagtgggcagaacttgaacggtgtggcctggtgctatgctttgttaaccttggccgtgtaatgtgcggtgaaggagatcgacagaaatagtaaactaaattttaatgctgagatctcaaatattgatatcatcatatatatgatgcaatttattaatgtgtatattctatggaggtgagtaggttattatatatagatacttgaagtgaaaccattagctattagacagccactaaggtgagcataattaaagtgaaatattcttttgcctagctaatttactaataagaatacagagtggtggccacttatagtgtttactatataattactaattaaagcacgaatttcttttttgaatttcacgtttgcatatgtttcatattataataatatccttttcttccatgtgttgctaattattatatattaaaattctatttctatatatgtaactattaatattttataagaaaattaaagataaaagtttttggagaattaatacgtacttttctttactatgtacgtaaccatggatcatgtgagctgcatgtatatcgttttgcaaagcaactgatatttttatttagaaaaattagcttttttgttctctttgttgttaaaaattcttcctaaaataaaacagtaatataattatgtttattctggttttgttatttttatcattaaaaattaatatttttactctctaaa

SEQ ID NO: 262166 - DNA, 637 bp, Cannabis indica
ctttgaggactgccaaaatgaatactgcagctagaaaggcaatgaaggcttattctgttttactccctttgttttttgatctgcttggattttggaagaatgggtcccatgttcctgatttaggttctgaccctgaagctcatctaagagttgtggagattgctggtcttccatctcagtagaaaaagtgagttgttatttttaagtttattttatgttgtattatagttgtttaactattttgttttcctttctggttattagtgattgcagagcatttgtggctgcatttgccgagttcttcatccatggaaaagatgttcctgctgatttgatattgaagtttatcgtactcgacttgctgccctcttcttctcatatggtcaaaggaaaaatgatgaaagtattgatagcgaggatgagaagcaaagcaagtcttccaagacttctaaattgaaaaagtagggtctatttttagtcaaaatttgttgttcttggttacttttcttttcagacaattgttagtttttttatgtttgtaggtattatacttgttttatattctggaattggttataaacctttaggatatttgacattaaccattataatatgtctttttttttttttatgtttt

SEQ ID NO: 262167 - DNA, 656 bp, Cannabis indica
tgtgtttatttcatatcgtttttgaagttcatatttgggatgttaaatacatacttgttagtaaatctaagatcctggtaaaataattccaatagaattaatatcctaaatatgaattctctaaaacaatgaactaaacacatgcaaagacctggccaactcttgacaaagcttgtaggaacatgacctgcccgacactggcaggaacatgactagctagaccctagcaaatataggacctgtcagatgctggcaagagcatggtcggctagaccttaacttgcataccttgtatggccggccagcctgcatcatgccggtgtatggtcgaccaaattttcccttgtaggacattaatgtgtagccttcatttgtggacagcaagccaagctatgagttgggccttgatagccctttaaggtgcaatgaaaatatctacttttaagaagcaattttgtcatttgtatttattaatttaatatataaatatctcttattttatctgctaattaagatttaagctttcctttataaagagccttaacttaatcttaaaaccctaagtcttattataagccatagagctttaagtctgaaaccctaatcctcttctctctctactacacgcccaaagggctctctaactctctctctct

SEQ ID NO: 262168 - DNA, 1680 bp, Cannabis indica
gcccccacctttgccatgaggtgtctgtcttggaattgtcgcggacttcgtagacccgcggcggagcgaacccttcggggtttggttcgtaatagtgatgcagatttactctttttggctgagactaaggtggatgagttgcgaatggtcaatgtgatgaatcggctgggatatgatcattgtgtttgtattccatcgatcggtattgctagagggtttcgtgtggcatggaaaaggggaatacaatgtcatatgttggaagaatttgctgaaggacttcatctatctattcacatgggagagaacttccccgattggagtcttttttgtgtttatgggaccccatactattctctaaaaggttcttattggaagtggttatctgagacggtatctaattgcaatttgccctgggttctgctgggggatttaaatgttatccttgacgattcggagaaagagggaggcagaacttttcagagaaaggaaggagagttgcttagtaattttttatttgaagtgggaggagttgatctcagctgtgatagaggaatgtgtacctggcagaattcgagaattgcggaatcccgagttcgaaagcgcttggacagggctattgctgatgctcgatggtgtactgaattctctaacgctcgagtatccaagtttcccattacaggatctgaccatgccccaattcttcttaatatttggggtgatcaaactagattaagatatctgttccgtttccttgaggtgtggacttccagacctgactgtgaagtgatcatccagaattcgtggagaagagctgttacaggggaagtggttgcacagcttcagaagaaactaaaaggaacggctcatgatctcaaaaaatggaatcgtgaagtctttggattttgtgataaacgattaaacgaacttgctgctcatttacaggcgattcaatcggcaccaatttctcagtacaatgttaaaagagaggcggaaattcagcttgacattattgacatggaggcaaaaatggatagaatatggaaacaaaaatctcgggaaaattggttactaaatggagacgacaataccaaattcttccacaaatcaactattatccgaagacgacgtaatttcattggcagcatcgaagatgatcaacgagtgtggctgagacaaagagaagaaataggaggctacttccaaacaaaattcaaggctctgtatgagtcttccgaaaatgatattggagaggacttcgagtctttattccaagacaaggttatgtaggaagaaatgaagccatatgcaggactccttcggaagaagagataaaagatgtggttttccagatgcatccgttgaaagctcctgggccggatggctttcctggcatcttctatcgaaaatactgggatactgtgggcaaacaagtctgcgatatggtaaggaattttttcttgactgggactctctatagccaggttaaccactcatttatatgtttgatccctaaaagaagtcatgcagttcatttcgacaaatttcggccaataagtttgtgcaactttgggtataagattatttcctgaattctcaccaatagcttaaaaagggtagtagacaggctagtgtctccgttccaatcagctttcattcccgggcgttggattgctaaatgtt

SEQ ID NO: 262169 - DNA, 1303 bp, Cannabis indica
attggagctaattacatggatttttattgattttagcttaatgggtatctttcaatttcgatgttgaaagagttgggagttggaaaatgaagaactgtactcacctgggcatgtagttttgaagctgttggaattgtagaacagagctgaaatagtgaagatgaagatgggaacatagtaaaacagcagagaaggtttagtactaataatactgaaccttattattattattctgtatctcttccactccatcaaaacaacaacaacaaacaaaaagattaaaggttaagagtaaaaagagaaaacagtagaaagaaaaagaggactactggctggctggctggctggctggctctctcaattcacaaaattaacaatatttttcattgatgattagaaataatgttgggtgaatgaagctcctgactcaaactcaccacatatttttcaatgcaagtgtacaaagtcaaatcagtacttaacaataacatagcaaaagaaaactatttcacacctaatttgtgagagtggaattgtacggcaaagcaagttttgcagagagagtgatacagaaaaagaaagaagaggtgattaaagaaagccaggtatggtgaatatatatatatatatatataaatatatgtgtgtgttgtgtatacactatacggaaaatgggttcctaagcttttgccatgtttggatctcagactgttttgcaggctttcctttctgtctttcagctatttcccaaacccaggaatcctaattcctgctcttctccacccttttttttaaacccccaaatatttctttttggcaaaataatgttagcccacttcttataacttcatctcttttattactagaattgtttaggggttaaatggtatttgatgttatgtgcaaaattataatttaacattttcacatgtaattaattcttagtagaagtaatgattttaacagtttcacatgtttgtttggaattattttccaggattattatattgtatgttaatgtcatctcctttgtgagttaattatggctcaaacacaagtcagaattcaagtgattagatgcttttggaatattttggtacttgtattaaatacataatggcaaagtatacagttttcattcaaatggaccaaaattcttattaactctgttttcctttggactttttcgggaaagtaaaaagtacatgcattgctggccttattgagaagcttcagactagtatatattcatgatattttatgaataattaattagtaactttctataataattgttgatcaa

SEQ ID NO: 262170 - DNA, 631 bp, Cannabis indica
ctataggtgagaagtcgatgttcaccactccctttctttctcgaatttcttttattatctctcccattcctcaaacaactcaattacaataacacacacacatatatatatatatatctgtctgtttattataatccaattccccatatataattgatcatcatcatataattttttttgttaatttcaaacaaatactgatataattatacaaaatgccatcaatgcagtctagcccattctatcaaatggaaaacccagctataatttccctcctccgccatgctcaaggcctgaggcaaggagatgaagaacatacctggaaggaaggagcagattaggcctctgaacccgatgggatatgggttgttctgatcttgtacgaggccttcaatctcaggcagacaacagaaatttgagaccggagctggcctgtatgggtggagcagcggcaacaaattgagagggaaaccagagatagattcttaccggagataggctcgggagagaaaagaaagaaaaaatggagagagagagagagagagtcttaccggagataggattgcggctcgcggagttggggctcgtcgacctgaaaccgtggttggggcgaagaaggagtaggttaggc

SEQ ID NO: 262171 - DNA, 1337 bp, Cannabis indica
cacaatcacattccactgtattgataatactgtaattgtgaataactatatgttctggatttaactgattttgtgcatatatcaaatatatatattaaaccataaacatgtaacatacatgtaatcataaatcacttcaaacttctaaattgataactaattagattgtaatgggttttatttagggcacaaaacccaacagcagtctgtcgccattagatcatgcggttcggttgacaaggatcttcttatgaaaaacatgattttccgattttagtgcaggttgaaaatcaaaggttgatgagaatacgataatattccgagctctcaataaaagtaccaaaatattgacctctcttctagccaacgatactaattctattaaagcgactatataataataaaataataaaataatgattaaagcttataaacgacacacaaaatttatagagatttgaccccttatagcgataatagtctactccccttttgttttattgctttcacaaaagtttatcaagatcacaaggtccaaccaggtgagtttcctaatatctctacaaaaggtcacctatatttcagagtattatctagtgttagtgcgtcaaaagtccccccaaatagtgaattgacctcactatttatatgtcaagattgtctcattttgttatattcaattagattctatataaatagagatattaattgtcctagtattgtggaaacaatttaaagaatgtatctagacatatatatcttcagcgaatgcctctagttggccattctgtatcatattgtccgaccaggttaaactaatctcacgttccgaatagggccaatttccttgccatgtgtcatcttgccgagtgccacatcctccctgtgaaattctggataacaataccgttaaagaagaatgtcgttattagtttagtcttattctaattatgaaactttttcttaaaaattgattttgtaattaaacttaaacagatagtttggatgacttcaattagtgatgtactagttagaaagaaggaatgatgaatgctagatattatttgggtgttttattgacttataattaaatctatctatttggtgactacataactgtgaggatattattgttcattacactgatgagtaatcctgattttgctactaatattttctttataaatataagagttcttccattatttttaaatatgtattttgtaatataaactaaataattatttataagagttatcttcctacaaagatcaaaatataacctttgaccatctaaattatgaatacagtagaacctctatctaagaatactctat

SEQ ID NO: 262172 - DNA, 583 bp, Cannabis indica
caccgtaggggagagtctaatagagacgaaaacttacaaaatacttatcataagagatcgttacggtgttaaatgcttcaacgaataaccatccataagggggatgaagtttagcgtctcgaggttatattgaaaacatttaaccgtgtaaaaccaacaatggagatcgaatatccttataactaaagctcattattttaaagagattgtattttctttgatacttattttaatctatttattttaacatatatttatttaattaaaattactgatatagataactctaaatagaaattttaatttaatatttataaaattatactttaggaagatctgaaaaataaatataaattattttccatccttagtatcaatttttcaataaatattatgaaaattacttaatttgagttggtccaaaattaattaaaattaactttcaaattaagtttaattttctataaatatatatgactgaattcgaaatccaatgtataaatgtacatttttgaaattaatataaaataaactaaaataaaactaaaaaaattaattctaatttatgtttgtctaaaattaa

SEQ ID NO: 262173 - DNA, 968 bp, Cannabis indica
gtgtgggttcgcgtcctgggtcttggtctaggttgggtccgagtacaaagttccaatcccgatctgagtctggattcagttttggttctaagtccttggttcgtatcctgttctgggttcgagtttgggtccaggtctgggtctagctttgggtctgattctaggcatggctttttgaatttaggtttgagtctgtgtccgggtttgggtctaggtctaagttcgggtcccgagtgcgggtccaagtttgggtctgggtcaagatctcggtccagatctagctctaatatttcgatccaagtttgggtcttggtccgagtcaaagtttgtatccggatccgtatctaggtccaagtcagtgtttgggatcgggtcacagatttaggtccaggtctgggtctcagtgtcggtctgggtacacgaccgtgtccgaacccgagttccagtctaagtttgggtctgaggctaggtctgtgttcggttctaggtgcaggtctgggtcctagtcttgttctagggtcctcgttcagcgattcttgtttaggttctaatttatggtcccaggtctaggtctgggttcgggtttggttgttcgtctaggttctagacctagtctgattcccagatctagacaccgactactggtctgttccacgctccgttaaccgaattctgagtcaagatctggatcactgtcacgggtctcggtcttgttctggtttaggtcctgggtcccatttctgagtttgggttcgggatcgagactagggtgcggttctaggtcctgaccctagttttgtgtccctagtctggttccatgtttgggtctgagttcaggttttggttcgggtaccgagtccaagtttgggttgggatccgaatccggctcccaattcgggtctaggtttgattttgagtccgggtcctggtacggttacggttttggatctaggtccaatttcagttat

SEQ ID NO: 262174 - DNA, 428 bp, Cannabis indica
aggcttttttacgtggttttgcagttaaaattctgcatagtccacgagtctatcttattagatatttctgatacagttctatggctttctctctaatgaattttttgtccttttttcagtgtaccctgcccctatttatagttatataggagggcagttaattacaaattggactgatatcttacaacaataatcccctaaaattgtgggatttaatcacatcccgagtaaaataaatgtggttattatttgaaaatcccacagctgtgattggtccgcttttactgggtcaatgcatatgtgcattaaatacgttgcaaaatatatcgttctgggacatctctctgggaacatagcaacaataacagtggtagcgagctagagcttttcccatgtctttttgaggttgataatgtaaatcttgtcgc

SEQ ID NO: 262175 - DNA, 744 bp, Cannabis indica
cgtgttagcccaaccggcagcgaggccaaccacggggccggagaacatggagctcatccagaattgattggccacgaaatttcccaatgaaaacccgacgaggaagcgaactacgatgaattttttaggggaagagacgagacacgacatggcgaggagggcgggggctgtgaggagagagagcgtggcggaggtaactctggggccaaggaggacgcaggcgggtcccattgctaggcgggagaagattgagccgacgaaagaggctatgccggctcggcttatgtcggcttgggtgaggttgaggtcgcggcggatgagtggggtgagtggagggatggagaaggtggagaagaaggaagagaagagagatagccatgccaagtggaatgctctcatgtggggtgatgatattgagaatggacggaaaatggtggccttattatcatggtcgacgggaagggggaagagtttattataatatggaggcccttcttccatggtagagactagatagatcgatgagaatatatcagtttccaataaattgagctgtgcctgtcatatatattgaaatatttttgtcactatatatttatacatatgttctagcaaaatatataggaattattataaggaaaatgaatttataaaaatagtgtgtacaatatttatacttttatttgcttttaattatgaaaatacttcttacactattacactattacgtacacaattaaacga

SEQ ID NO: 262176 - DNA, 627 bp, Cannabis indica
aaagagttttatttagggcataaaacccaacagatttgtgtcatacagacaaatgtgaaatggcattaatgtttataagatgtgttaattatgattattgatattttacactgtcttgttgggcttggcttacaggttctctgctgtgcaagaaagggtaaatttgtttatgatcagccatgagtgcgagagctgggtgatgtatgtacatgttcgggccacactagaccaagcgggttgggatctaccagtgatgaacttttgtaactctatttttccgcttaggtcggctagtggaaagacttgtaatattttgtaaaatatttttgggatcccgaaatatgtaacctttgattgtaaattaaagttattacaagttttattttcattctattttcgtttaaagtttaaagttcccgcacttttctgcttagtaatcccatttaggggattagggttccttaatcaccttgggtagcgtgcctattatatagggcgttacagttacatacgcccatggtccccatactaattgagacaatactgcttgtaagactcagttaattgattttaattaattaattataattctaaaattagaatatgtcttatttatgaattttcact

SEQ ID NO: 262177 - DNA, 731 bp, Cannabis indica
ccttgtctttttggattgacggttgtgagttgaccgccaatctaattgaactgcaattatctgattttgacataatcccgggaatggattttctgtctaaatatggagcaatgattgactgtaaacggaagatggtggtgtttgagcccgagagtgctaacccagcggtgttcgtgggtaaagttcagggggcacgcataccgagaatatcgttgttgaaagctaaagacctgatgggtagaggttgtcagggttcatagttactgcagtggacactagccaacctgtgacatcagggcctgagaatacgagattggtatgtgagttccttgatgtctttccagaagatttgccgggattgccacctgttcgggaaattgaatttgttattgaactggctccgggagtggatccagtgtctaaggcaccgtaccgaatggctccagctgagttgaaggaattgaagatacagttgcaagagttattgaatctgggattcattagaccgagctactcaccttggggtgctccggttctatttgtgaagaagaaagacggaaccctgcgaatgtgtattgactaccgagagttgaacaagcttaccattaagaacaagtatcctttacctcgaattgatgatctgtttgatcaactgaaggggaagacggtcttttccaagatcgatcttcgctcaggctatcatcagctgagaattcgagaggaagatatcc

SEQ ID NO: 262178 - DNA, 1015 bp, Cannabis indica
attgaagtccttggcgaactatggaaggataaaaggaaaaatggaccggtcgactcaatgagtgatttccttgaccgagccgaaggcttcatcaagctcgaagaagccattcaacgagaagaaggtgagcaaaatccaggcaaaacgaaggctccttccactggtacatccacccaacttccccaatattttagcaattcaagtggcaagcgttcaggcaacaaccacaagaaaggaaacgggaagaaaggaaagttcaccgaaaagtccgaacagactccccatgatcacgccaaacacactgcattcactatcctaactgaagatatagagagtgtgtatatggcaactcagtcgttaattccgtagaggaagcccgggcccatgaagaaagataccagcaaaagggacataataaaattttgtcggttccacggagactacggccacgacaccaataaatgctacaacttgaagcgggaaatagaacatcggatcaagaaaaacaacccgcacttatagaagtatgtcaaggccaaccaaggtgagaaaaactagggtctgttgcctccaccgatagatggacacttgcaagtcattattggaggcccacacatcgctggagatacaggcaaagctcgagaaagatacgcccgaacagctcagtacgagcaagaagaagttatcctgtccgtggaagagaggacgcccaaagttccacgcgcaggagagccaaccataactgtcaacgatgaagatgctgtccagatcagattcccacacaatgacccgctggtcgtggaagtccagatagcaaacgaaatggtggctagaaccatgatcgataatggagcttcttcaaacattttgttcaagactaattacgagaagatggggctccagctcaaggatctaactccatgcctccagcctgtttatggtttctccggtcaaggagttgcacctctaggacaaatccggctacccctcatagttggacaagctccgacgagca

SEQ ID NO: 262179 - DNA, 614 bp, Cannabis indica
tagattagggcgttacaataacatacaaccaattaaatacagaaaccacatatctagtacaaccaactaaaaaattgaaatatacataagaagataaattaaaacaaattaatatacttcaaaaaaataaaaaataatatgcgaaagatgaatccttaaaatttgaatcagatttactttttttttctttgttgaataaccttcctaaacattttaattttaattagcagaagtttcttctcaaagttagcacttgaatttttaacaacatcttattagaatatttctaattaaggaaataaaataatattattgattctgataaatgaatattttatattcattgaatctggacagaatcaattacgtaatattctatatatggtcagatttctatattcattacctgatttgatttcctgaattaattgtcaaaatattctgacaattaatgtggcatagatactgatggagtatctcacctataaatatagggtctcggtccccgagctcctcactcattctgttcataacagcaaattccatctaaagagagttgagagagcgaggagcccgattacccacatcaactggtttcctttgcatatcaaagc

SEQ ID NO: 262180 - DNA, 1306 bp, Cannabis indica
aactccatgttgaagtccactatcaaccaaagactattgaaaaccttagattaaaaaattagggtaccgattaccgccccttttgtcatcacgagataacacattgttaagatcacccatcacacaccatgatagattagaacgattagcaagagtatgtaacaggttccaagtagaagcacacctactcctattcggttccccatacacactagtgaaacgccattcctgcacaccttcagaagcaactctcacatctatataagaatcagaaaacccaagcaaagacacttcatcctcaactttccataacaacgcaatacctctactcctaccattgacatctacgactatcttgccatcaaatcccaacgtcacacgcactctctccatctgagaatgattggatagagtctcacagagaaacataatactgggcttcttttggatcacaagatcctcaaggaattataaagtccatgggttcccaaaccaatgacaattctaagataaaatattcataatgattggtgggcctggacaccagtacccaccaaactcaaattctttgaaccatttacctcttgacccgttgccccatcacccatcacatgggccccatcaatatcttctaaagttgttattctcctcttcgtatcaagaaccaaaagacaagcctcctcattgatatcattagatagttctttattcttagcagctggtaaaatatcttccacaattataggatccccattaacagcctttgataatcctatcactgcctcacgttgacccaaagttacctccactatcatcggacccgaccccagcacaccatgattcccctcaaccattgccatcgttgaccgagacacctcaccacgagccgtagtttttgctgcagaatcatcgtccatgacaacattaaactgcttgagccatttagctctgatcatgtggtttctacgtataggtctcactcgtagccattccccatatggcttgattatatgaccctctccaacctcgaaacgccgtggacaaaagcttttaaaatgctccataattccacaaataaagcagaaagtggggagatgttcatacttaaagttagtccagaactcgatcccgacagtattgcgaagcttcatacgtctctttaatggcttcgtaacattacgaagataatctcgccataagcccatggaattcctttcatccgattgaacaaacttcccaatatagtttgcgacatccttaacaatcgtagcagttttaaacctcgatctaagatcatgcaattgca

SEQ ID NO: 262181 - DNA, 495 bp, Cannabis indica
ctaaaagaaagttgaagaatattctgagatagaaagagaactcaatgtgaagcctatttatacaaaattacatgcaaaataataaccaataaaaaaaaagaaggaaacgaagagtcaccactttgttgttttaaaaacacgtgccaactaaagcatgtgcactcaaatctcgaaggagtatataggtcgtcccacttcccaaagcaccctaatttaaaaaaaaaaactcttggaatggattcgaataattgtatgcataaatgatagacaataaatacaattgaaggagccataactcccccaacattacttaaagtaggcataagacataggaagagacagcgagagtaataaacacaagtctattcaaggattgcaaatacaagttacataaaaaaaaaagaggaatagaaagacatattaaacaacagtcgaatacagccaaaaattacacacaaaaagtgacagttatctaacaaaacctagaacttagga

SEQ ID NO: 262182 - DNA, 937 bp, Cannabis indica
tgttctactgttgttttgagttatattgctttgtgttttactggtgttttataaaaacacagtatttttgaaaaaatttccgtatgacagtatttttgtaaaagttaacccaaatttcagtatttttgtaagtttcccaaaaataatatacaaagagatctcaagaattcaagataatgaattaaccagtaaaacagaaaagaacaacaccaggtttaatgagttcgagccatgtataatgctctacatctcgattgaaacatcaacacatatctttattgatatcagtgtttacaaggttacaagaatcttcacaaacttctcagagattacgagaagaaatttctctctctagtttagactctctctctctcaatcttacactatcacgatttttacttaagcaaatttggtctgattctcacacaggttacaaagatttacaactaccaataaatttgtattgttgccaaaaatatctcctaaatcatcgtgacacatttacaccgccttaaatgattcatctcatcaccaacaacaataatccacgtcatcttgaaatatgcactttcagtatggacaatccggaagctctataagcacacaagcctatagagcttccgaatgcgtacaagactagcttcattgtaaaatgaactttcaagactgatagtaagttgtccagtagcataacaagctattcgggagatatacattccataaacggtacaaacttatttagaagtaccttttcgaattctataagaccttctatacatattcacactaagcttacgatatcttctcttcgaattcacagcttccaattctaaacagtgaaacttataaccataaccaacaaaaagtttagtggtaggcatcttagcatctacatctagtgactagtgcgtttatcattttctttttccatgcttag

SEQ ID NO: 262183 - DNA, 710 bp, Cannabis indica
ttagactgtcacgcctgttataacataacgcaaattcttaacaattatattgttactataacatatattctaatattaataaatactaaaaggaattttcttctttcgttttaattgtacaacatatataataaagtataccatgcatgtggtcgttgaaaatttactcatcaaaataaaaaactagctaagtcttacttaaaaagagtatatatatatagctaattataaaatgtacgtacttactgataaatataatattatatatttgcatgtaacaaatattaatttcgaaacattgacatatatgaactctagataataaaccaaggctaattttagaatttaacactgagttaattaggtgagaaccatgaatagtccaactcatcacattattttttgtctataaattaaaaaaaaagtagcagtagtagtactagtactaattcccatagcacggactaggtaactatgcagttaatatctacaaaggaaaatagtgtaaaatttcaaaagtcaatcattacaatttgctaatggtgatgacttcaaaaagtgacttcaaaagctagtagtaaaatcattggcctttatcgtaccaattaagaatatttacctagtaactactcacacagagtggcttatcacttcacccagaaaaaaaggaaaaaaaaaataagatttatcacatgagagagagagagaga

SEQ ID NO: 262184 - DNA, 952 bp, Cannabis indica
ttgacaagatcattctctgcaaagagccaatgtgcctatatccacttaaaagtagaatcatctgtatttgacatatagttgtacatttaggaatggatatgagttatcgttaaattcttaagtcgattgctatagattctaccttatgcaatgacatttcaaatgtttacgaaatttcatgaatttcaagcaatgttaaaaaaacattaaggtaagcagttaaatatcttgcaaaatgataggggtggagaaatattttgtggatatgtagttcaaagatcattaagttaattttgaattgtatccaaacttacctccccagaaactcgatttgcatattggggagagcaaaaggtcaatgattagttactagtagttgcctaagtctgtcaaaggatataccctagtgataggaaattttagaatgatggaatggttatgtactcagtgtaaaccattactagattcatggatgtgttgatcgtggccttaagaaaagctagaactgttaactaaggtttgtatgtttgacagttattctaagtgattaggggtggaccatcccatcgtcaataagataagaaagcgtttgtttcaacaaatactacttttctaagaaaatgactaagtctaaaaataaagtagcaaagtagaggagatattttttgtctcgattccaaaagggttctatcatcttattctatataagatggtcccactgcctctgttgttttgatacaactgatgaggataataccacttatgttcttacacagaatgtcactgtaccttgtcgtagtgggagggtttcaaggaactcaccctgttatgactttgaagacacttgtgatgaaaatcaattgttagtttaaacaagtaatggatagttagaataatgaaagaagaagcaaagccaagagaactacagttaaaaccatttatatggagtaac

SEQ ID NO: 262185 - DNA, 602 bp, Cannabis indica
aattctacgaagtcagaatctccgtagctattctaattcacaaaatccctatacgaaaccaattattttttaaacttaaaacgaaattaaaccataccttaagcttttcttctttaaggatttgctattctgctactaccggagcttgatcgctaggtttcggattaaaaatcgaagaaaatagatataaaaagagaaatttttgtcaaaagggggagaacgagggttcgttcgttcattcttcattgttacatatattaaacttagtatatatattacataaacatatgaactgaaactgataagtttcaattaacgtattataataataatattaattgttgcctttaatttttcccaaaatacgtggacttggataaaggtgacacgtggatctggaagaaccatcattcatgaaaatcagctaagtcttagataaaaaaggaacatctcagggaagattcctcctggaggatggcataagacacatctttactcttcgggaggctagagccttgctaaggcagttccgggaggtgtagagattacttaaacaatcacttcgcatttaatgttgcttggaggaagacgtattgaaacct

SEQ ID NO: 262186 - DNA, 1026 bp, Cannabis indica
ttgaatttgtaattgagttggttccaggagcagaaccagtatcaaaagcaccgtatcgaatggctctagtagaattgaaaaaactaaagatacaattgcaagagttgttgaatctgggattcattaggccgagctactctccttagggtgctccggtgttgtttgtaaagaagaaagatgggtctctacggatgtgtattgattaccgggagttaaataagcttaaaatcaagaacaaatatcctttaactcgaattaatcatctttttgatcaactgaaagggaagacggtcttctccaagatcgatcttcgctcaagctatcatcagctgagaattcgagagggagatgtcccgaaaactgctttccgtactcgctatggagattatgaatttctagtgatttgttttggactcaccaatgccccagggacattcatggatcttatgaatctggtattaaaggattacctagatagatgtgtgatcgtgtttatcgatgacatcttggtttattctgaatcggaagaggagcatgagttgcatgttagatctttattgcaacagttacgagacaacaagttgtatgctaaattcaaaaagtgtgaattctggttatctcgtgtctctttcttggggcacatagtagataaagatgggataatggtggattcggccaagattgaagctgttcgggattggcaaacaccaaaatcagctactaaagtcagaagctttttgggcttacctagctattatcgtcgatttgttgagggtttctcaaagattgctgtacccttaacggagttgacccgaaagaacttgaagtttctttggactgaccggtgtgagaaaagctttctagagttaaagcaacgcttgattaccgctccagtactaactcttccttcacataaggaaaaatttgttgtttattctaatgcttcaagacaaggtctcggctgtgttcttatgcaagctggaaaggtaatagcctatgcttctcggcagttaaaggagtacgagc

SEQ ID NO: 262187 - DNA, 515 bp, Cannabis indica
ttttagagacaaagagcatttaaagatagttgttggcttgtatgcaatgaagaaagagtttgactacttcgttaggaagtctgatactgctatttggtacgttacatgtaaggaaccagattgtgggtggagattaagagcgaagaagaacgtactttcgaacatgtttgaggttagtacatttcataatgtacatacatgttcccttgatctttgaggaaaagataaccgtcaagcatcacctttaaaagttgcccatctaattaaggataagttcgtaactgacggctcggatcatttggcctctgatataaggaaagatatgcacaaggattacgggattcaaatgagttatgaaaaggcttagaggtgcagagagaaggcactacacccaattcagggaacacctaaagattcatactcaaaattacccggttacttgcacatgctaaagttgtgaaatacagctaccatcacgaattttgtgatagaggatggtcgcttcaagtattgtt

SEQ ID NO: 262188 - DNA, 804 bp, Cannabis indica
tcaagaaatttcctaatgagaaattagtcatcttattattatatgtcgatgacatgttcttagtcggccaggatggtaagatgataaatcagttgaagaaagaactatcaggagtctttgatatgaaagaattgcggtagccaaacaaatcctaggaatggaaatcattcgtgacagaccttcttgaagattatggttgttgtaggagaactatgttgaacgaatacttgagaggttcaacatgaaggatgcaaagtcagtttcttcgccacttagtggccagttgagactcactaagaattcatgcccttcttcggaagaagaaaagaggaagatgttggcgattccttactcttcagcagttagaagcttgatgtatgcaatggtttgtacgagaccggatattactcatgcagtgggagtcgtaaagtcgtttccttgcaaattcaggcaagcagcattgggaagctgtaaaatgaatcttcagatatctgagagggacatcaaaaatgtgcctaagcttcgacaaaggagaaccaatcttggaagggtatgcagatgttgatatggttggtgatcttaacggtagaaagtctacatctggatatacgtttacttttgtagggggagttgtgtcatggcaatccaagttgcaaaaatgtgttgctttatctaccacagaagtagagtatatttctcttgcagaagctgggaaagaaatatgatggataaagaattttctccaagaattgggtttgaaggagaaaggtacgtgattcattgcgacagtcaaagtgcgattga

SEQ ID NO: 262189 - DNA, 693 bp, Cannabis indica
agagcacccgtgagccaagcccagcaagacagtataacacgtatcaataatatgctcatcatataatataagctataatgccatttaaatctgtatgtgtgtcacagacctacatgttacgctcacatgcctatttatgtttacgtgacgtaaacctacgtgttactctcacacgtctatttatgactacgtggcgtagacctacgtgttgctctcacacgtctaaatacaataaggccttaggatagttcatctcgaatctggttaccgagttcaacttgattatgccttcatcgcataacccttaatctcaatatgtataacacataagtaatggtgccactgcactatttgtctatttgccagagacctgtatgttacgctcacatgcctatttaggtctacctggcgtagacctacgtgttgctctcacacgtctatatacaacaaggccttagtaggctttacctcagttctagttaccgagcctaacctggttatgcctttctcgcataaccctactcatatatatacgtaatccatacattacgttcttttggtggtttatcctggtgatatataccaggtctaacccagttatgttttatacacataacgcttaacatacccgcatgtattcaatatttatcacatcatataaaatcttagggtaataaccctaactcatatttt

SEQ ID NO: 262190 - DNA, 512 bp, Cannabis indica
atgatcattttaataaatgagaaatatatactttttcaccgttaccaaagaagataatcgaaatcaaatttaacatttaatttcttttatattttcttaagtaattaatctttaagcttaaacaaaattaatgtgccaaattacttgataggttattaaaaagtatttttttattttatctttagatctcacaagattaaattataaataaacttatttttataaaactatttttataagtttataaaataccttgtaaataaaccaaatagtatcttaaatatcatataagttacaattaaaaatataaatgtaacttataattgtaactatttttatatcatcttaaagttaaacattataagtttaaacaaaattaaatttacttactgttaacccagaaacttttccagtgacatggacatcaccattttatattaaatttattgttataaaactattttaataggtttataaaataatttataaataaattaaatagtatctgaaac

SEQ ID NO: 262191 - DNA, 646 bp, Cannabis indica
atatgccccttgagatactgagatacacccagccatttgcaatatgcgatgatactcaaatgatcgtactccttggctgataggtagtctcggaacggtgggagtatcccagtaacttcagggtcatgcttgaaaacgcatgccccttgagtcactgggattctcccagccgtttctggaggtatatcacttggcccaggatgcgtgaattactcgcgtttttagtgttatctctgctcgcatattgatggggcggtcagtattcgcaaggatgctgattattctatcgagtgcgactttatagttaaatgcgggtgagatcacttattttgcttttcacacatccatcacgctgaaaagatcttctatctttcagatgagcgatttgtcggatagccaacaactcggctctggaggccgtgcattcgacggtgaagttgaccaggaggaggacagctttctcccaacctcgctttctgaagaggaggccgctccaatagagctaggcccgatgtcttctgcagacatcgaaaggatggtgcaggaactcgccgaacctgggaccatcgaccttcgagacagcgagtccacggtgtcggcccgcgactaccttatacactcgaggcatgctcctgacgtcgaggtc

SEQ ID NO: 262192 - DNA, 1078 bp, Cannabis indica
gagttttatttaggacataaaacccaacataaggttgtttgtttcgttccgtgttgcagaagtagtagaagtagtattttagtaatatttaatttatggaatttattaatgttcatatgttttttttttgtaatttaattattttttttatatatataaaaaaccccataaacttttcaatgttaaaagtaaaagccaactaaataaagaagaaaaaaactcaatacttgaatatattaaatgaaatatgaacataaataaatgaataaataaataaataacaagaacaaggagaagagatgaaagcaagctctacacaaacacaatcttaagttgaaatcaccaaaatttaacaaggtttaaccttttgtccaaaaaccttattttctcttcctaaaaacattaaaagaagaaataaataaaagtagttttgggaattattaactcttttggtgattagttgaaaaaaaaaagtgtgttaaacaagagaactttaagtacctattgataacatttaaacactctgtaattcacatcacacaccccatagttgttagtaggggtgcttattaaaccacatcaaatctttttaggtatatccaaatttgataaaattatatattagatattaaattttaccatccaatcctatctaattaatttcaacaacattcattagatgttggattggatcagttctatccgttggatgtatttcatatatatttattggtttaatttgggtttattcaatattttagacctagaattttttagatcatcagatccatcaaatattttaggtccaatatgtattggattggactagatccatacaatccaaaaaaaaaagagtaaaattttaatgtaatttttatatatacatatatgttttacgtataatattataaaatctaattactcatccaaactaaatgaagatactaattagttcgattggatgttggatgtattggatttttgaacaccctatctaacattcgatctgatttaattagatattcaaaaataatatccgatcagatcacagttgtatatctaatctttgtcggtcagt

SEQ ID NO: 262193 - DNA, 4452 bp, Cannabis indica
tcatgaattagagcaccaacacccgtgatcttcctggttttgtccgcagcagcatcgacgttcatcttgagcgatcctagagctggaggtgtccacgggatactggaaacttcagatgatgcaccagcaggttgagcagcaactggtgttggagagcgattagccgactgaggtagatctggacaaaatttttgttgtgcattttgaaaattctgccagtaatttaatgcaaaaaaagcaagatccttggcagttttaactttatttccatgaacaaccatgtttctctcagtccaaactgaccacatgacacaaaaaatcttttccatctcaattttggagtgaatggcagccaagtgaaccatataatcacctttgcgcattgacatggagttattccagtcaagtgaaaaattagcgtgcctccaaatcgatttagcatacttacatccaaagagggcatgtccaatggattcccaagcttgatgacatattgagcatgttgaatctgtgatcaccttttgtttaacaagagctgtagcaacaggaagggcatcattgtagacccgccaaatgaagattttaattttctgaggtaagttcaacgaccataggaatttccaccaagcggcagttgatgaagagcatgagctattgtcactttcttcaagagaggcagccaaatggtaccctgtttgaactgagtattcacccgaatggttgtaatgccagataaggatatcatctttaagaaaaaattcaaaggaatggttacaatacgatttacatcaggtggtgagaaccattgattgagtaaggccatgtcccattgtctttcagctgtaatgaggttcgaaaccatagcatcagcaggcccagtaaaatgatatggactgaaagttgagtgacctggtatccatgggtcgttagcacaactaattcgacaaccctcacctattttccactgcagtccagccagcaaaagtgcacgaccccaatggattgcttgccaagttgaagagggggagtggccaagtgaagcttcaaggaaggagttgtttggataataacgactttttaaaagccttgcaagtagagagttgggctgttgaaaaagtctccaagcttgtttagcgagcatagcttgattaaaatgtacaaaagagcgaaaacccataccaccattttctttcctttgacataaaagtttccaagagcgccaatgaatcttgttaccattttcattcaaaccccaccaaaaattggccatcatagactcaagttgattgcaaaagtaaccaggcaaacggaaacagctcatggcataagttggaatggattggaccacgactttgagaagaacttcccgcccccccgctgagaaatttttttcactccaagtgtgcataagcttccaaattttctctttaatatcactaaacattctctttttatctctgccagagtaagatggcaagcctaagtaacgttcatggcactcacagattggcattgatagctgtctatgaaagaacacttgggcagccagcgttgtgttgggagagaaagacatgacagatttatccgaattaagaacttgtcctgatgctctttcatacaagtctaaagatcttttaatagcaaggcaagaagactcagaagcttgacaaaaaagaagactgtcatcagcaaaaaaacaagtgagaaattgaaggtgcatgccgagctaacttaaaaccttgaaggtgaccaaggttttcttcatgttgtagcatccgtgatagtccctcagaacaaattaggaataggtaaggtgaaagtggacagccttgccgaagacctcttgatggaataagtgagcccaacacttctccatttaattgaaaagagaaactgtttgtgcgtaagcatgtcataacaagagtgatccagccactagcaaaacccattttacccataacagcttcaaggaaattccattcgacacggtcgaaagctttactcatatccaatttcagagatacaacacccttacgacccatagttttgttcttgatagcattgaccaactcaaaagccacgagaatgttatcagtaattaaccggtttggcaaaaaagcactttgcatctcggagatcacatatggaagattgtgtttgagacggttaacaagcacttttgtaatcaacttagagataacattgcaaaggctgattgggcgaaaatcttgaagacgctgaggttttttgatctttggtatgagagtgataagtgttttatttaacttggaagggtccgcaccatcatttaaaacacttaaaacaactttagtgaccaaatctcccacaactcccagttttgttgaaagaacattggagacataccatctaggcctgggcttgtgtccggagccatggaatgtaaagctgactcaacttcagcagcttcttcgtctaaggttgtagcagtgaaaataccagcaaagtagttatgaatttcagagagcatagcaatttttgatgatacccgattgcctgcagcagtttgtagaacttgatagtgttatttgttttcctggccgaggctttggcatgaaaaaacttagtgttgcgatcacccgattgtaaccaatcaatccgtgagcgttggtgccaataagtttcttcttgttccaacaaatcatcaagaatagtttcggattgcttcagattttgcatagcttcagcatttcggtgtggagcattcttgagtctctctacttgtaagtgagcttcagagatttttttcttcatattaccaaacttaccaacatgccatctttgtaagtttgctgcacaatcttggaaattaccaatcacagtagcaatgcgatcagttacagatgaagagttccaacttgctgtgatgatttctttgctttgagggtcagaaagccaaattttctcaaatcggaaacgactttttcttttttcctgctgaagccgagagtcaatgggttggaaaatagcagaaattgccctatggccggagctaaaataatccagatggtgaacttgaggcagagaaaaggtgttttcccaaaggagattgacaaagcaccaatcgagtcgctccttgatcgtgtctacagcagtccaattttttatccaagtgtaggggtcacgttcatagggagtttcaagtaacttacaatgatccaaagacttacggaactcatccatttgtgtttcatttttgaggcagccaccacttttattttcattggagaggatttcgttaaaatcaccaacggcaagccatggtaaagtgggagagacatcagctaaacgttgtaaaagagtccaagaatcagctttatgttgagcatctggagcaccataaaaacgagaaaagtgaaaaatagcatcgttttcagccttgacatgacaatcaaataaggttcgaccaaagttgagtaaggtgacatcaacactttgctgccataagagcataaaaccaccactaagaccaatacgtggtgattccaaaccattactaaaattcaaattttgctgaaaaagtgagatagagtttggtggaagttttgtttccataagaaacaaaatatggggcgattgttgtttaacaagcaatcggagatgcctaaatgcagtcgggttccccaatccccgtgcattccaacttaggattttcataatggatcgcaggattgcaaagcaattccgcggaattgtcaatgaagccatccgaatccatatcatcataggaaacattatggccagaaatttctcccaatgacaaaggggagttttgattacgacatcttttgagaaactgccgcatggaaagttgatcactttgcctcttggtagtggaagtaggtgggatgttttctttgttattagcagtagtgtaacccaaagaaggtgaggcggtagtgattgtagtgacagcgagtgtgggtgaatatatgggcaaagagaaaggtgatgtagagtaaggaagggtatggaaagtaatattgggtgacatggttggtggataggtagccacgggcatggatggtctagaaacagaacctacatccggggtgaagatattggacagattaatggcaatgagagaattgtcaacatggggattggtagcgggtggattggttggtgtagaggcagtggatgtagttactaaggaggatggaatggaggaggaagttagtggtgttatgtgtgttctgggagttgaaaaaccagcagtaggcaaagtggaagttggacgagagaaagaaaaagttgagggtgattcagaacccaaaaacatactcgggttaggggtgctgtagcattgaggcgtgggatggttgaagttagcgtggttcgagccagacgagttaataaaggctaggcattgcctttggaaaaatcggtccgatacttatcatagcccgtaga

SEQ ID NO: 262194 - DNA, 5890 bp, Cannabis indica
ttttcaattataaatttttatttttaatttttttaataatatttaaaaatataatttatttttatttgatagatatttttattaataatataaattgaaagaaaaaagttaaaaaaatttagtataattaaaaaacacaaattctatataaaataaaaaattattaccaaaatacccttaacgctctacagaaactgtgataaaaggaaaggagaatttcgtccaaaattcaaaatgattatattgggattcggatatcccaccccacgtgtttaagctcgttggttgggtgggtgaacccttacgcagaagagtagaacctaacccactcaatttcagaggctcacaaattttcttatagcgcctcatatttcggagcttcttaatctccttcctccatttcctttttgaacaggtttgtctttttcgtttcagggtctccaaatgttaatgggaaggttgtttctggatatatataagaaataggattgaaagttagcattttgatttcaaaaattaatgtttgatgttaatcccgaaatgggatttttgttttttctaagtttatagtattttctgacttaatatagctctactcgttttcttacatgtatatatatatctgatatttgttttgcttgcaggtttgagggttggtgaagaagattaaaagggttttcttttctgggtatatagatgtgttgagagtaatgaacttttatatacttttcaatataaaaggttctttgttcctatttgaatccagagtcgtttgcttaagaggctaaaatgccatctagctttctctcaaagctgaatctttctgtgttttctggttttgagaaggcagtatctgggaaacgaaattctataaattctattcttggaagagggaaattgttttctagaaatttagtaaatcacccgggtgaggctcctaaaactatggctgcttctaattccaaatctctatttggtgatgtttatgttgatgatgttatctcaagttgtgggaatggattagagttatcaaaacctaccggagtgtttttcaatgataaaactcgtagtagttgccagagagctagcctgagcttcagaagaatggaattgtccaatagccaacaactaacttgtagccactttcttgctgatgtaactaggaagaattgcaacaccaatgttgttgttgggcctcagttgaggaatatccatacctcttccttagcatgctacgctgctggtgccgctcatgatgtgtcgtttgatggaggctctcgggatgaacagctttctaatactaccatttcacctgaacagtatgtcctcttactttatgtttactttgacagtgttttcatttatgaccattgccattttctttgtgagaaggttaggagtgaattgaaacaagaattagttctgaaaacatatcaataagttataagtgagagtttagcaatctagatgaattactgaattttcatgtattagatttgtctatataggaaagaactattcattattgtgggtttgatttcagaactcttgttggagacagaagtttgaagcttctttctggatcatgttacctgcctcatccggataaggaagacacgggtggggaagatgctcactttatttgtgtagatgaacaagctattggggtagcagatggtgttggtggttgggcagatgttggcgtgaatgctggattgttcgctcgtgaacttatgtctaactctgtttcagccattcatgaggagcctaagggttctattgacccagccagagtgttggaaaaggctcactcaggtacaaaagcaaggggttcttcaacagcttgcatcattacactcacagacaaggtttgttacagatatttcatttcactagtagtgactgtgcctcttgtctcttgtcctgagaatctcttaggttagaaaaacttctaatgcttaccacactacaaagtgcaaatgaaaaagaaaaaaagaatgttctttgccaatctctgcatgcattgaataatcatttattgaccaatcttataaatgaattgctagagagtcatcatagcgtttctctgtttggtctctcatcccaactcccaagcctatgcaatacttcgaaatggttccttgttaggtggctaaatcttgggcagggtgtatgaagattttcagtttttgaaataagacaacctttttcctgctatgaaaactacatgaatttattttgttctgtgcatttttaatggtttgccttatgtttgaaaaatcagggaacgtgtactataagtaaatgttgttcttttgtctaatttttcaccaggaactccatgcaattaacctgggagatagtggtttcatagtagttagagatggatgcactatttttcgatctccagtacaacaacacggtttcaactttacatatcagttagagagtggcacagatggtgacctaccgagctctggtcaggtcagttgttaggctattgtaattccctaaagtactgctaccaaagaaagagtgcacaaacgtttaaacagctcaagtactttgaacataattatgttatgttctctcaagaacttgtgcacaaagaaaagttttgaactttgattcattatgaagctaagaattcccaatttttgcacctggagtctatatctagaaaaaattgcgaattaagtgattgcgctactcatgttctatgcatttaatggtaattgggaaaattggattttcacgcactaaaaatattttctcttttgttttgttgaatactcaggttttcagaattcctgtttcttcgggggacgttattattgccggaactgatgggttatttgacaacttgtataataatgaagttactgccgttgttgtgcacgctgtaagagctggcctagaacctcaggtgaccgctcagaagatagctgctttggcccgccagagagcactagacaagacccggcagacaccgttctcaacagctgctcaagaagctgggtttcgttattatggtggtaagcttgacgacattacagttgttgtgtcatatatttcaagttcaatcaatgcttgagagcaaactttttgataacagtagcaaataccatatcacttgtatatttcgtttgtgctttatgatggcaagtcaagtgggggcatgaaagcccattttaacatttcttgcctgaaaccaagagaaggattagtaatggctttttctagtctacaatttttgtttaaatattgtctcgtgtgatggaattgatagctgtgtctagttcttttttgttttcattttgtgccaactcttagaatgtgatttacttgactatgtcatgtaaaggtaagttaaaaagaattttgaactgtccagagctctcagttttaatataagacaaaaacttaactttaaactgtcattttttatgtgccaaagctcaagacaagtctcttgtgaatggaatttgtaacatgcccttcgatttatttcttaagctcaatttgatttgtcattggtttttgcaattttagctgtttttccttatgataagatctctataacttcagagggattgcttggttaagtacgcataagctcagttacgaagaaaacttgaaaaataatcacttattattacagtgataaacataaacataaactcataaataagggttaaaacatagtcatatagcttactatcaacaataaacttaggaaaagcagagcagtagggaagcaattatttatgttgcactgtttagtcttggagaacaaactagtaaaagcagcttctgtcatatggatcagacggccctcaattgataagattttccattttcaactccggcagcaccttgcttctctttcttgtccattgtggtttttgtatcatgatcctctggttctctgccagcttccttttctggctgttgttgttttgtttctctatctgcttgtctctctttttctctatcttcttgtcgccttctagcttcctctatttgcctttccctctcttcttcttcttcttcttgtctttgtctctcttcctcttgtctcctttcttctttctcctcatgttttctttgtctctcagcctcctcctgctccctctccatctcttcttcttctttttttcttgcttcctcttcctcttgtttcctctgtctttcttcttcttctctccgagccgcctcttgctccctttctatttcttcctcttcctctcttttcctttcatcttcttctctctttctttccttctcttcctccctctgtcttgcctcttcttcttctctctttctttcctcttcttcctccttctgtctcgcctcctcttcctctctctttcgtgcctcctcttcctctcttttcctagcttcatcttcctccctttgcttttcctcctcctcttctctcttcctttcctcttcttcctccctctttcttgcctcctcttcctctctcttcctttcctcctcttcttcttcttctctcttcctttcctcttcttcctccctctttcttgcctcctcttcctctctcttcctttcctcttcttcttttctcttcctctcctcctcttcctccctcttcctttcctcctcttcttcttcttctctcttcctttcctcttcttcctccctcctctttcttgcctcctcttcctccctcttcctttcctcttcttcttttctcttcctctcctcctcttcctccctcttccttgcctcctcttcctctcttttctttctctcctcttcctcctcccttcttttttcctcttcttcctctctcttcttagcttcctcctccctcttcctcctttcttcttcttctttttctttctcaatttcttccttcatcattctttcctcttcctcagcacaagaagtacaatcaagtatgatggaatcaccctgtggagccaaaagttggtcaatggtcgaattcccaacattaaaggacaatgccaaaacatctctgtcaagggattgtaggactgactgcttccctgccaaaaactgaggatgattgttctttcttgctgtgctaaaccccatgaaaataaatgaatcattgttgaatgacatctgagccatggggtggaacttgggcacagcaaaaacatcaccttccttgaccctaaacctcatgtttttgcactctgatttccctatacttttcttgcttgaacaaaccactcgaaccattccttctcctttcaacaccactgcaatctcagttgctcttggattccagtgaggccccatcattgaaccctttttgtgtttttaatcacatcaaacaaaaaactaattcattaggcacaattcaaaatcacaacattctgaacacctagcttagcttattagctaagttgaaaaagagatggtttttgaacactaaccttggtcaaatttaccataaagaggccaatgttggtaccctttaaaagatgaccagcttttttccttgtaactgtaagactcctaccgttgcagttctcaaaatcaggttttgcttcaaggatattaaaggcttttgtttcttgttgtttcttcttcttcttgttcattgatatcatcatcgtctcttcttttcctccaatgaaggcttttaggaatctagcttcaatttcccataagccttttttctttctttctttctctgttgagatggcatgaactattggttgtatttcagttgcacttgttattgattctattaattcttcagaagcctataaagataatgattatacatattacttactctaaatagctttgtagaatcatatacaatacttactaagttaattgaatgggtggttggtacctggaaagcttgctgaagtgttatcttgtc

SEQ ID NO: 262195 - DNA, 578 bp, Cannabis indica
gtgagccctccgtctaaggttaccgagacacgcttgcaggatctcaaataatatggctacctgggcgaattcgattgctacattcccgctcacaacgatcgagccacaaacactgaattggggatgtgcgcctggtcgggtgctcaagccaagcaaggggcattgctgcctttgcacccgtactttaggaatgtggcagacttcttccacctctgtccgacccaattcactcccaagggcattaagtatgtgtccgccctctttgttctctatgcctcgcagaggtgggatatgccctttccccatgaggtaagctagttttttgatttgaattccacccctaagcaaggcaggtcagggtacttctacttctctcaaccagtcttcaagttgttgactcgcaccggggacaaggccgttaacaaaattgggcattttattgacgagtacttcgtggtggaaggcatgggcaccacccatactcagttccaacatatccccacatatcaccgccctcttttcacgcttgctcttagggatagagctcaaagaatcgctcagttgtcgggggatgacca

SEQ ID NO: 262196 - DNA, 623 bp, Cannabis indica
gatatatcttaaatacttaaaacctactagcaccacttttatatatactcacatctacattaatttggtgagaatataaaaaatttaatgaacttctaatgaaataaattaattactcaagctggaaattcacacatcttttatttcttcaacatcaattcgtttttgttttgttttttttctttatattaattattggcccaggcagttcgaccaggagacctcccagtggccccaaggttttttcgagcctatggaattcaaaccttggaacaaatgcctaccagagctttccaaagttcctccttacaactagaccaccccttcaggtcaaaacacatcaattcgttttaaactaagtaataaaagtttttaacctgatgcttaaaacagaagggaattatcatcattacctgtgtggccattggtgaaggcgtattataaaatggcatgttagaagagctgccagttagagactgagcagaagctcctcctataacagcactattatgataatttccagggatatctcttatgttactgccttgcatgtgtttcaagtgcctgggactgaaatcttccaagcttaagctcctcgcagaagaaaaattgcgatcctcatt

SEQ ID NO: 262197 - DNA, 716 bp, Cannabis indica
attatggaagtggaccatgtaccccagcttgcgaaatgtcgcattcttgtggcaaccctggaggaaaatgctcacgactggttcagccaattgcctgaagcatctgtatcgacttgggagaccttcgtcgacctctttctcacgcactttcaggccaccatgatgtatagaccaccctataccactctggctaatattaaacaggatatcggtgagtctttacaagattactttaaacgttttaatgctgaagtaacgaaagtagagaaggcccccgagtctttgttagtgtgtatgttgataacaggtttgtctttcttgcccaacaacaaaatttccatcatagcccaataaagctctaacacaatcaactttgtatttcttgcaaattgtctcacacaaaaaaattaaattgggtctcttttgagaaactatttcttcaaggaattgaacgacccgagggttcccaagcccactacaattccaactcaacaaactcataactcacaaaaattacacaccactcaacagcaaaaatcacataccaaacatgtcaaaacgacaagacaaaaatgattattattattattaaattagtttataaattatagatcaaatgaataacaagcaaggaaattcaaatcgtgtatggcttctcgcaatcgtatcattctcaagcaaggaaaccagtttagaatttgctcttctccgattgt

SEQ ID NO: 262198 - DNA, 748 bp, Cannabis indica
aggatagggacctgggaaacagaactaggatcaggacctagtaaccgaccaagacgcgaacttggacctaggacccagctcgtgacccggcaccagaaatggaaccagactgggacccgagattgggatccggatctagatcaagggctgggacaaaacccgtagtcagtgtctggaacccggatctgacaacgacccgaacccacacccgaacctgaacccaatgccaaacccaaatgtggacctgaacccgtaacctgttaccaaaaattggaaacaaaactgaaagttaatcgggactggaactaggatttggacttggaatcataactgaaattcgacgtggatctagaaccgtaaccagacctggacctggactccaaatccgacctagacctgaattgggagccgaacccggatcccaacccaaacctggactcgggacccgacccgaacctgaattcaaacccaaacatggaaccagactagggacatagagccagggtcgggacgtagaaccgcacccagtctcgatcccgaacccaaactcagaaatgggacctgatacatgaaccagaaccagaccgaaacccgtgacagtgatcaagatcctaactagggattcaggtaacggcgcttggaacagaccagtagtcggtgtctagatctgggactcagactaggacaagaaccaagacaaagaaccaaacccgaacccagacaaagacctgagaccaaaaattagaac

SEQ ID NO: 262199 - DNA, 2039 bp, Cannabis indica
atatatatatatagtcatcaatccaaaacggtacattatccatttttacaagagaccttaaataattaaggaaagaatattagcttttattttttggaggaaaggaaaatgtcactataaaattttgttttaagttgaacaaaatgaagtgtcattactattattatttatatatagataggttttgtttagtagcagtaataatatgagtgaaaatgatcaccacatgcagttacttaaacaaatattttgcttcctaaaatagccaaaatcaagctttaaaacagatgaaactacagcctaattttcaagtaaaaaattcacattgtttaactttttctttattcttagagatacaaagagaaaaggaagaaattgaagccatgggacatagtgtagtttcttcttctcttattcttgtcccaatgttacttcttttctctttgtttctatcaccaaccaaagccattcaaaaggtaaacaaagcataaactattttctaatcattaatttattttcacattttgttttcacttatctatatactcaaatgtctttaattgtctttgatgttcatgtagtcttacattgtgtacatgggagcacattcgcatggcccaaaccctacctcggttgatctagaaaccgccacatcttctcattacaccttgctcggaacttacaaggggaggtacataattttgatacaaaaatttaattattcctattttttttagttttaactacaaaaaaaaggtatttcttgtcgattgtgttgtgttggttcactaaaccaacgtgtattcgtctaatgtatctgtttgggtgtttgcgtcggttatcaacagatgaaattgcatagatgcatcgattgataattgatacaagcgatgtttgtgtttgggacccattgacacaaacgataaattattttttgtttttttttttaagaaaaaaaaaaagaaaaatctaccattctattgcaaattgatgcaaatgtttagcgttagtcgcctgagtactcacaattaactactgcattagtgtacatgccaattgcgttaatcaatgacgttgaatgacgtgaatagtctattttgtaataatattaattgagtttttgttctcttaattttgtttcgatctaatttttatgcagcgaggaaaaggcaaaagattccattctttactcatataatagatacattaatggctttgcagcagttcttgatgaggctgaagcttctgagattgcaagtaagaatcttattcgattttcctcatcatttctttccctttttactctattttttatgtgtaataataagtagtttccattctgttaatgtagagcatccaaaagtgttgtcggttttcgaaagcaaaccaaagaaactacatacaacccattcatggtcttttcttgatttggagcaaaatggtgttattcccaagagttcattatggaaaaaggcgcgatatggtgaaaatacaattatcggaaacctagacacaggtgaatatctcactttgaagatttgttatgaaaaatctaccattgttttttagtttctaaaatccatgaaatggatatgactttaaatattgttttttgcttgaaattttggtaggtgcttggccagaatcaaagagttttagtgatgaagggattggacccatcccaaagaagtggaaaggaatttgccaagatgatgtcaaagatgggtttcgctgtaacaggttcatttctttgtttttcacattcaagtattttcagtaattagataaatattatgtttggtgtgattaaattatatatataaaaaaaaaattgttaacaaattctcttgcaattaaaatttgaattttttgtaaaaaaaattaataataaaataatagtatcaaagaatacataatgttagcatggggaagaaaatatttgtgcagaagtacttttttatagcatatttgtagtttatgtaatggaaaagtgctatgagtcattaacagggtcggccctaggcataggcgagttaggc

SEQ ID NO: 262200 - DNA, 974 bp, Cannabis indica
cacccgtggcacaaggtcgagcttcttttttttccttttttagtgtgatgttaagtagtttcatgttttttttaaaaaaaattatttggtggtgctagctgtaaatattcatttttctaaaatgatttgattttcagatctttcacaagcgaatgccccctgaagccgttgacctggtttcacggcttcttcaatattcaccaaatcttcgttgcaccgcggtaagttaaatcactttacactatgaaacaatattttacatggtttgctgagttttttttggttattatcctcttaacacatcctgatttccagttggaagcttgcgctcatcccttctttgacgagttacgggactcaaatgcaatgttacctaatggacgagctctacctcctttattcaattttacagctcaaggtaatatactatatttctatataggatgtaaaccctgattccccttcactcttcccttttacctgttttatctgttgacatctaatactccggcattttgcagaattggctggtgcatcaactgagttacgacatcgtcttattcccgagcatgcaaggaattaaagttacgtgaacatgtgtggtcttgtctgtgcaatgttgttgggattttgattgttttatttctgttgtcgtacacaagctatgctgccgtgccctttttaagccaagaaccaccacagtttgaacccctgcagagaagtcggtgtgttgtaaagtcgtctcttggaagtttttttatttctttacctctgacaattcatatgagcaaactgctgaggaactatcacgttgatggaatgggtctgcatggcgcggaaggttgaaaactttatacgtatctacaaatgtggcaatgttgcatgcttccgtttcttactgatatgtgttctcatacaaacgctttggttttggaatctaacttaaatgtgatcttccttcaaaaaaaaaaaaa

SEQ ID NO: 262201 - DNA, 585 bp, Cannabis indica
ccattagaaaaatgctccagcatcttactaaagcgagctccttgcactagagtaagtaaattactaggcataccacaagccataggtttccttagataatctcaaacctataatactaggaacacgaagctttgttaagtccattgaattgacttattttcaaaaaaattcctttcttgtccttgtaataaaaaacctttggtaactccatatgattggttttaaccatagttctcttggctttacttcttagttccttattctgaaaatccattacttgtttaaactaacaatggatttcatcacaagtgtcttccaagtcataacagggtgagtaccttgaaaccctcccactacgataaggtaccatgaccttctgtctaagaacataagtaaaattatcctcttcagttgtgtcgagacaacagaggcagtgggaccatcttatacaaaataagatgatagaacacttttggaatcaagaaaaaatatctcctctattttgctactttgtttttcagacttagtccttttcttagaaagtagtatttgttgaaataacactttcttatctaatgactatgg

SEQ ID NO: 262202 - DNA, 820 bp, Cannabis indica
gagtttggattttgtaagaagaatcttttgtaaatgaagaagattcttgggtgtaaagtgtgagagtttaaacactttgtgggcactcaatagagaaactcgtctaaattgtattgtacattttcttactcaatcaataaagaaggcttacagtggtgttccataactggagtagagccatagatcacatcaatctatcggacttgaaccagtatatatattggtgttgttttctttatttaatagcatttatagttttctaattttctaatactttgtttgcccttatttttcatacgattgttgctctcggcttgataatcttgtcattgctaattgtttaattgtttaaagtttagttgatttgattctgcactattagttcataattttttcacaatttttaaaataaggcttagaatgacaaaaaaaaaaaagtttaacaccaaattagtgtagagacttaaaattcaacattattaatggtgtagaatttggtgtacactaatttaattaggtgtgccattaaagtaaaaaaatgtgaaaattcaacactaatttaataaaatggtacagcattggagatctctgcacgaaattattaaattccgttgtaggcccaagtctgttaattgaatcgtagttaagagtttctttgcctttgttatttagtcacaataataatggcattagaagaagatggctattagctacattatggcctaaatacatattctagaaataatttaaggtcagaaacctaccacctcaattattcactcaaccataaaaacgttgtcttattcaaatgtacctttca

SEQ ID NO: 262203 - DNA, 753 bp, Cannabis indica
aaaagtgaatttgtgaaggatgctcacttctatttataggcagaaaaatgaaaaaagggtaatcatttcaaaatgccttagacgcatcggttccccccaaaagcaaatattgggaatcaaacataatcaagtgtaaccgtcaaacgtggtgagagaaaattgggtttcgaagcattaatatagtcagagcaataattagccaaaaactgaacagacgcctggtcagcctcacatcgaatcgcgaacagacgcgtctaacacgtgtcacccattcaaatgcaagggcagctcggatgaaatctacacgcaacttcagaagtcccgtacaaacttggaggcaaatgttatcccaatttttgcactctgacgtggcatcatacgatggtgacacgtggaatcaactttatgtacctgctcgcaagagatatgccgaacagagcaccacatatattcgctcgaacaaagccttcttaactgggcagtgaacaatccgaacagcacgccaacacttagcaatttcaactttcgcatcgtgagttattttgggatcagatcatagagatatggcaagctgtccgaatcccttgattagtgtattcagtatttaatatgcaatctgtccaattatatcaattatatcaatggtaatctgaagggaaattcttccctcccaagcttatagccctataaatagtgattcacattcactggtaaagggtcaaaaaacttggctaagaattcatattcagagat

SEQ ID NO: 262204 - DNA, 1693 bp, Cannabis indica
ataatgattcactttgagagtgaaggcttatttaattaaccatcatcaattttattaaattaaacatgaaaaagttgggattgaaaaaggcttatttctcctcctagaaccattatttcagactgtacagaaaaaaggtaaaaagaaaaactgcttcactatctatctctcactacttcttggttactgactcctccctaatctctaatcaaagaaacataaacaataagctaaagaaagaaaagagagaaaaaagtaactaagtgaccgaacatcacaaacatgtcttctcaagttcccaacttcatcatcatctgctctgctcagctgatttgcttttgttcttattttcctgccaaattatattatattattaatattatttgtacagaaaaataataaggtaagaaaatatactaacaaatccttatattaaatacataaattatatttttagttgtgaaatgaaatcaaattgtctcagatagattcagatctcaaaaaataaaaaatattaaaataactgtgtcagaaaaatgtaatggataccgctggataatttgtaattgaattcaaccaattatatttttattactttttaaaaaaatttagaagaaaaaatagatttcaaatattacaatttaattatgcagaaaattataacttaattattttattctcatttaaaatttatgttagagagaagagaaacgctgtcgtttgaaatttgaaatagaaaatgatgaatggtattatggtatggtggctatggagtatggatgcgaacctttgttgaaaagatgtcttcagtgcaaagccctgacatttttatcagggtttcctccgccgagaggtgaacatggtaagatcggccttgagaaaaccactacgttcaacgaaaacccactattattgatactgatgttactattattactctcacctaaatcctcccccaaatgcaaatcctcttctctaattctcagaatctgactgtgtaccaactccttctgcttattcctcctcccactaaaccctcccaccgacctcggcgactctatttcctccgacgattctccgctctcttgctccgtaatttctcccgcctccgaacaaatcatattccccttggatttcatcatcaatacccgatcgatcgaaggttctgaagaatactcttcttctttttcgatgatattcttcttcttctttttctcaatttccttattcaaaaccgtcatccttacacgaaacgacaccgttttcagtaataaataattttgattcgaaataaaaatgcaaagctgatctctctgaggagaagtgaagaggcttctgggcttatattgtggcctttcgttacgtgaagtagaggagagatgagctctctctctgacacgtgtccgaagagttaggtaacggagtcttctctttctttccaattttttatttttcctaattcattttaagaattttttttttttgacaatcaactttttaagaaacttttatttacactctaaacctcattttaattatttttatctttcataaaaaaaaaaatattaattatattaattttatttattttttaatttacattttttaaaatatacttattaaataaaataaattatgttataacaaaaaaaataatgatacaaactttatcaaaaagttacatataatttac

SEQ ID NO: 262205 - DNA, 773 bp, Cannabis indica
cttcccttatccacatgagaggtttgaattttgtacaaacttcaaaatttgatgatacagtactacgaggaggaccttgccgactgttactagtgtttggtgatttttactacgaggagattttctttctcgctctgcactcttgttccttagaggtagttccaacctcaaagtaggtacctctatagattcatcaacttggaacttgatatcaccatcctcgtttaaatcccccatatgatcattattgtaaaagatagcatcaaactaatcaaatgcattagcagctatgtgctcatctacattagtaggggcctggttattcaaaccaatcacatgatctatttttgggacaaaactcccaacaacacttcgtggggggacagttggcggagtagtccccaaatttgcatgccttttaaccttagtcacaaacagtggcagcaagttctccacactcattttttccttcatgcttaagaacaatcttacttgaccatctttcactaaaacctccggtggtatcatattacctttcatgtatatgtaacacacctctaattttagttcatacataaaagggtcgacttctaactcttcatacaaaattttcatgtatcttctataaaattgtgtcaatctcaaacatcaatattttactttttgggttattgaatatccagttaaaacttttaactacccaaaccccatcatacaatacaatcacaaacatagttgaatctgataacaaaaaatggacaaacaatgaattc

SEQ ID NO: 262206 - DNA, 1051 bp, Cannabis indica
tatttatttatttttaattttcccaccttaaaacaatcatatatatcaatctacaaaataatgttttaagaagatccctcagtccacacacaaataaaagttacaatactataattaagttaatttttgatcgatctaaaataatctaaaaaaaaagccaaacaacaagtgtgtacacttggagctaggaaatgaattgggtctaaattaatgataaaattgtaaagaagagtactaaattacaaatatattttgttatgtagttgcttgacctctaatgtcgcagccattttgccccaattcttagggtgctaacactcaccttgggataaatctaattcagaaaaaaggtcggtttggaaccctgtaacatatcttaccctaatacaaaaacaataacgatagaaacatcgaaaatgatatataggaaaataaacgagcaattaataagaaccaatgaatgatggcatgaagtagtactattaatactattaatatataatgggtctctttggaactttggatttggattgtattgaactagacaagatttagattgtactaaaagtattgtaattttgtgtttagtttaatctatatatatttatatataggagatatttatatataggagaagtatgaggttggtattctaaaaatagttttatttatttttcccttaattcttttttttttatttattttttattagtttgagaaatattaattaatataaaatatatttatttactccttaatttactcattttttattttttttattttttttttctaaaaatgatatttggtttattaacttttttaattctcatcacttactcttttttacttcactcatttattttattgttttaaataaatgataactctaacaaagttttggctttttttgtaaattattttctaattatattttattattttttaaaaaaaattacttctactatgtataacattattactatatttattattttaaattatataatatatataaaagaaaattaacccactatatatactatttttc

SEQ ID NO: 262207 - DNA, 575 bp, Cannabis indica
aagacccatgacccgtgacctgcactagaatccatacccgtactagaattcagactcaaacactgacccagacccagacctacaccaagacctggacccatacccggatcgaaacccaaacccagatccagaccgaacgtagagctaaactcttactagaactcagacacgaacccaagactcaaactcaaacttaggactcggattggactaagatcaggattgggacccaaacccagacaaggaccgagccttgaacctggactgggagtagaactcggatttggactgggatccgagactgggatcgggacccgggacctgagactcgaaccaaggacctaaaaactgaaccgtgacctagatgggggacctagtccccaaacccgaacctggacgcaaacatggacaaaggatccagacctagatgggggacttggacccaaaactgggacccaaaaccgggaccgagaaccaaaactcgaccccaaactcgagactcatgactgaccttcaacccagaacctaggacctgactatagggacacaaccccgaaccctgacccaaacccaaa

SEQ ID NO: 262208 - DNA, 558 bp, Cannabis indica
cactttcttacagctcattattataattatattttaacagttgccgaaaacctcggtcaacaggggtcaatttattaattaagggactttgtatggtctaattaataaataatataaatgacaattttatttgataatcaattataattattaaatatatagttttggcatttataggattaaattagaaaatatggtattattgaaagaataataagtagttgaaataaagtggcaaaattgtaactagagtttggtcttttagtggtcggccctagtattgatttttgccaaatattttattcttttttaatccatataattcagccctaaccctagtcgaaacactataaaagaaacatgatgctctcactcatccactcttgtcaacttaacttttgacaatttgaatattgccttcaacctagatgagagagttccttccatagagatttcagcctccttcattcttcaccattcgaaaccttgagtgaaagagtgtcatgccacacatagcaagtcaagtactcaatcatagtgagtaagacggtggtaacc

SEQ ID NO: 262209 - DNA, 901 bp, Cannabis indica
ttttttttttttgagtaaaattacttgttattataaattaagaagagtattcatttacaataacagagtaaatgggaggagggatttcctcaaaccaagaacaagcctcatccacccctaaagcaaactttgccaaaccatgtgcagccatattggccgaacgtttgacatgtgaaaaagttacattagggagaaaggataaaagacatgaaatatctaaaattaaatcactaaaagtagagattgaattgaagggagctcgaagggcattaaccaccattaaagcatcagattcagcaatcgagatgggtagttgttgttgaattgaccaatttaagctatgaaagagagcagaagcttccatttcatgggagcgaaaattgccaatgagctgctttgaaagagcagcaataacaacaccttttgaatcccgaataatagcgcccactccgattacacctctgctggaatccacggcagcatcaacatttaacttaaaaaaattgaagtctggtggtcgccaaagctgtgctgcagggactacctgcaatgaaggccgaggattcgaactgggaggtgaaactgttgtagccgtggcctggtgtgcttgctggtgtgcagttgcagcagttgttgcagctgtaccatgtctctgttgtgcattgcgataattggagaggtatgttgcagcataggaagccaaaccagcagcaggccgtgcttgttgaccatgaacaacacgattgcgctcattccaaatcgtccagagtgtacagaaaagttgctccatctcagcctttgaaagaattgatgaaaggtgaaaaatataatcacctttctgcattgtagcagccagatgccaatcaaaactcagactagaattacgccaaacagctcgagc

SEQ ID NO: 262210 - DNA, 901 bp, Cannabis indica
attgaataaaatttataaaataaatttaacaatctcaatatatcaaaaaaatacaattttatacatgtgaaagttgtgtttaagaatcctaattagccctcatttaaaggttttgtttgttccttgctcgataagccgaaaccgaagctttccccattttgtcgtggttgagggtttatcgtagctagctatgtacggcagccaattcgacggtaacgccgccttctccggcggcggattcatgccttctcagtccgttcaaaatcccgactcttcattctctcccgccaaggtgaccttttcctctctctctctctaactctcacttagtctctgtttcgttctatataggatggtgtgttgttgttgctttacatttgtaaagaatttctactatttcaactcttttctcaactgcactcgtacaggtttagggctttgtatgctgtagtgtgtttggttgctgagaaaatcaagaaattgatagctagttatatattggagcgattttgttgaactgaaattagaagaaattgaatgtgggtcgagatgctgcctaaattcacagtttgataagcttttgaattctgttgcagaatcgtgatgttcaagctttgcttcccgtgacagtgaagcagataagcactgcatttgttccaggaagtgaaaaatcagaatttgttattgatggtgtggatgtcaacaatgtgggttcattccctgattttcatttttcaatttttgttataataaagttttatttttagggtgtttttatcttggatattgatttctttttaattaggtcaagctagtgggaattgtgagtagcaaggttggaaggattactgatgtcacttttgtgcttgatgatgggactggacgtattgattgtaacaag

SEQ ID NO: 262211 - DNA, 598 bp, Cannabis indica
ggatcactctactgggttttgattctttctaacaaatcaaactgcaacgtgatattagcaagttttccaaccacgaactcaatccccgctcttgtcatatcttcagccaaccctaataaaatcttcttcaatttgtagacttgccctggaccattttcacttagagcatctgctaccatatttgcttttctagggtggtagagaatctcgcaatcataatatttaaccagttccaagcattgtcgctgcctcatgtttaaatccttttgactgaaaaagtatttgaggctcttgtgatctgtgtagattttgcactttttgtcgtacaggtgatggcgccaaactttcagtgcaaaaatgactgttgccagttcaatttcatgagtaggataccgctgctcatactccttcaattgcctacataggcaataactttgtcagactgcattagaaaacaacctaacccctatttggaagcgtcacaataaatcataaacttttcattaccaacttgcaaggttaacactggtgcgctaattaacctctgcttaaattcctagaagctactctcacacttgtcagtccaaacaaacttata

SEQ ID NO: 262212 - DNA, 532 bp, Cannabis indica
  modified_base (495)..(495): a, c, t, g, unknown or other
acagctagaaattttttccaaaaaaaaaacgaagaaagaaactaagctagaacaaaaaaaaaatggcagcagtagaatcagcataagtaaaaaaaaaacgaaatcaattgacatattaaaatgcaaattcaaaattcttcgagaaaattattaacacagaaactcaccatctaaatgaattctttttttcttgatttcacatgaaagcatatgaaagcaaaccacaaaccaactatttcacatcttaccttgtgccaatggcagagtataagtagaacaggggcaggcagtttaagaggtgctgtagtagtttgggtagtcgatcgtcggctgtcgactaaagagatggactgctctggttttgtcgaaaggtgaagagaagagcgggagagcagaaagaaaaataacgagtgtttttggaaggaaattctgaaaacgtgatattctttttttacgttttttttttttttattttttttttttgttttttttttnttttttttttagaagttgggtttggtcttggtcttag

SEQ ID NO: 262213 - DNA, 2110 bp, Cannabis indica
ctccttgtcccaaacatttccaaatacctattcttgtatttttttttgcttaatacacataaaaactacaacataagtctatttaacacttactaacacacacacacacacttccatttattacaaagacacaacaaactaaacacaattacataatatagactctaatttactctattatttagcttaaaattcaagtttaaagatatcaaaataactctaaatcttagagttatcatcgggtcccatgcctacgcagccacaggggctttgtccccttcccatccatcactcgcgcgtgaggcgcacgacctcaccctggccgtgtgtgcgcctcacgccccagcccgcgactgggcttcgtttggctccggtgccaaacaacccaaaaagtcaaatttgcacactgttttttaaccaatccgtgtgtgacacgtggccgaggttacccaagtcatcaaatcagagcataacacatgacgctccggttttaactttgtgtatttatatttttttaccacatacaattataataagtttaattacgcattcatccttttaccatcctataaatagaagcttggtttttagaattcaatacagttttacacagaaaaattcagagaaaacgctcaaaacgcttagtgttagtttatcgcttttcttagttaattttcttatgggtttccaagttcccttattatgcaggtggatggtgaaacttagtgtatttaattaagcatttatttttattttgattctcagtacaatatatgcttataattttcgcttcttaaaataatttctttcatctttaatatcatgtatttttgattaaaattattaatgcttgggtacattttattaaaaataatattctttgattttttgtatttacattaaattgtttcacatttaatgcttagaagttataattttaaaagcgaaggaaaatctatttttgttagaaaataattgatttgattactaattaaattatgagaatcaatataaatataaatatttttatatacacttaagtgaattctgaacccttaattattcattcaaatatcactgaaaatatatgttactatcatttttaccattaaaacaatttattttattttgttactaaaaacctcaccatttttagaactaggttagagttttaatagcttaaattaaataaatattttcttttatctaatgtaatttttatgggttcgacctcgttcttcacaatctctacactacaataaagattcgtgtgcttgcgagttgataaatgtaaaacgtaccattttttgtcacaacaaatgttgttttcatgtccgattggttggttgttgttattttttgtgtggaaatagttgttgatcaatttttctgcaatttttgggttttggtttattttcatcttctccgatggtgtccaataggggtctgatagtggcccaatagtttgttcaaatttgaggttagggataatgtttaaattggttcaatagtgttcccgatataggtatggtggtttagcgtgtccgatattagtctgattgtgtgtccaatggtgcgtttttatgggtaggtctgattgtttgtctgatattagttcgattgagtctgatggtttagtcagatttttatttgttggaattgttcagaagtggtccgatggtgtttgatattttacagatttattattttttgagaacttttttttatcactggtaggtttttgttctaaatttttaattgtgctttttttctttggatgacaagttcaactgtttttgcagtcattatgtataatagtgtttagaagcttgagggtagagattgggtttataaccaagataatcatttgacattcgagactgatacgaacgtaacgtactcacatttggttgatcttttgtgcgaagaactcgatgttgataaagtgtagtattacttaaaattcgaaaagaattataagtacatgaaaagcttattatatcgccctgaagttaatggaaatgataagcgtctaaggttatttttgtttatgcttgtgaagaagccagatgaatttactcccttgtttgtgactttggtgaagaagaat

SEQ ID NO: 262214 - DNA, 697 bp, Cannabis indica
tattgtcccacataaattaaataatttgagccatttataaaaacatgaactacttcacttattaccaaatgattttgaaatagaacctatgattcttgtcgtaacccatgttgttatagatgacttattatttttacatttaatcaagtggggtaatattgtccaatgtgtataatttggtgtatccttagcgccaaatagtataaaattccacactaatttagtggaattgtccctacaagtactgcacagctacagaatgaaagaacttacaggattccagagcaaaagatctcgcactagccgcagaagccaaacattattgaacctgtaaggattaagaagatgagtctggatgtgcaaacatgaaacaacaccaagttcaagacagataatgagggaaaggttatcatctcagcttctaaactaaccctattttaagtggatctctactccttatttgataggaaaaaaactcctctgagcatttccaggatgctggtgatactccaacctgattataagaaatttaccatgtcaggcacttgcaaaacctaaacaatctgcaaaggtttcaatggagaagaaaatggatagaagctaaacattggattaaatctaaacaattccttctcaatcgagttaaaacattggattaaagctaaacaattccttatcattcgagctataacattca

SEQ ID NO: 262215 - DNA, 610 bp, Cannabis indica
tcttcttctcccgaaatttggcaatagcctcctcaggcttaggatagaagtcgagcttgatgctttggccatttgtctgccaggccatatagacgtcgtcgtcgaagcgcttgacgcagcgcttgcaggagacaagggacaggagctcattttttttagccttcttcaaggcctggtctctaaagtccttgagctccttcaactcgacggccaggttggccttggactgaagtccgcctggtgcaactcctctagggacttcaccttggcagccatttcgtccatggcctccttagcctcccgaagctcgcgcctcgccctggcgacggcctcaccctccgccttcagcgcctcccgatgcctcgcctccaactcagcctccctccgttggacctcctctcggagcttcgccttagcaagggcctcccttcgctcagcctcttcctggatcgtccgcctttcggcagacaagtcccgcaggatcctcagggcctcgtctatgcccccgaatttggacataacgaagccatgattgactatggtcttggaaaggcggctggtctccgcagtaatttgaaaagggagataagagtgagatcaaatgccttag

SEQ ID NO: 262216 - DNA, 745 bp, Cannabis indica
actaaaaatgttcagaacaaaaactttatgtgcttgtaataggaacacagaatttatacttgtcatattccacaacaattttcttgtttagacagctgtgtgaacagattatcattgaaaagaaaaatattaaaaaaaaaaaacagggaaaaaaaaagaacactgctgaagtatcatttctatagactttaaaaaaattttgctgttaaacaagaattcacctttagggccgaaccagctaagatgatgtacccagtgttaatcataaaaagattgatatattgcaaaccccatgtgaggttataagcttttttacctgtaaaagcaaaaggccaaaatcaaattaaaggagataaaatacaacaaaaagggtaacgtactatacaaattcttatccactttattgagcataccgtatataaatcctgctagatctctgtacctaatatgcctcttccctccaaattcgtgaagcttggcaataagggagtttgcatacaacgatatagctgtggcaaaaataagaccaactacaccaaatatccaacccagaggaaccatgatggtcccggagtatcccaaaacatatgcgctattgataccagtcgtcaggacgaaacccacttgaaaccatgaatctataattcaattttgaaaagatttagatttaatcagaatttcgtctatgtcaattgtaatatatgtcattacaatattcatatatcaaagcagctacttttttttt

SEQ ID NO: 262217 - DNA, 501 bp, Cannabis indica
caaatagaactaaagctcactcactgtaaaaggtgaaagctcccaacgtcatgcaagccgaagactgaatcaccccttgtcccttgatctccacacaagaactccgatagtgcatgcaagccgaagactgaatcaccccttgtcccttgatcaccacacaagaactccgatagtgcattccgggcaagaggcgccaaaatctccaagcgggattgttggtaatagtacaaataaaattctcctttttttttaatacttagatggtaataatttaatattacaggagtattagcttctaaggtgagtgagacaaacgtgaaacactactataaaaatggtttttccggacgtttttaaacagtcatttaaattttaaagtattctcgtctgtttctataaccgtcgtttatacgaccgttgcaaaatggacaaaataagcgatggttttaaattatcgctaatgtaaaaaaaaaactaattaattttattacaataaaataa

SEQ ID NO: 262218 - DNA, 645 bp, Cannabis indica
attgaagtatatttaagtttgcttaaggcagattataactgctatagcgaggcagaattgaaaactgctcgaaaataaaaaaagtttggtagataaccaactacttaaacaggaagattgcgaacaatggaaaaactcaaaagtactttatatttgatcaaaatatagttgtttacattgtaaataaaaacgcaagcaaacacaattgtattaaggtcgaatgaaaatagtacagggcatttaagataagaaaaaacccaagttgggttatgaacttgtctttacaaaaataccactaggggaaaaccattaagtcatcttcctaaacaaagaatgtgatgggagggttggtaaacacaagacagaccgtctacacatagcttggagaaacactggctacacgtagctcgagaaagaccgtctacatgtagaaggtctaacctctacatagacctcattaacctcatcaaaagatctcatttcctccagccgagaccttattcccagcctcaggaaattccgtgataccagagagaggtcgacgcaaaggtcttctggtgtaagtttgggtcttgggttggttggattctctgatagaaaccacgccaactttcctccgggtttccttgtcagcctgaggaggac

SEQ ID NO: 262219 - DNA, 6788 bp, Cannabis indica
aatttatcataacatcaaaaactaatgaattaatcagaatattgcatagggcggtatctatggtaaatattttccagttgctggtctaggcagtataaacaacgattccaggcaagccagtatactcagttgcagtcacaggatcagaatataaaccactcaagtaattcagttgttggtgttgttgttgcaggtatgaatagcaaaactaatgagctcattcttaagaaaggattacaaagtaacatttttttttcttcaacttaatatgtgaatgaaaattatgcatacataatacaattattcgtggagcataaatttaatagtctctattgaaaaggaaaaaagaaaaagtgaatgaactacaaccaatggtaaagcaagtgacactttacatagatttaagcagctttaaacgaagatgtgaaaattcaaaggaagaacgcagaaatcaataaaaagtgtatagttctcttatgtaaaattatatttacgaaaggaaaagcatataccccatggcagcagagaagagctcctgtttgagtggctaaatctactctgttcaaaatggtagagaaaagcagtgtgagttagggttttgtttgtctttgtagagtggaattaaaatttgggttgggcttctctgcttaaatgaattcaggccttatattaaaacggcccaaattttaagtacagaaaaaaagggcaatttttacaaatacaaaaaaaaaaaaaaatagttgtactaaattttaaatatttttacgattttttaattttatttatagaaaatacattctttctatatgtattttaattttttgttgattttcttatctgtatgttattttttgttgttgttttgatattatttaaatattattttcatgttatttttatataatttttatggtgttatttttataaaaaattgtaaaaatataaaaaggactaaattaaacttaaaaatataattaaaaaaatggtggtatatgtaattaaaaaaaaaaattgctacaaaagagttcccaaatggaagtaaggtaacgcctctctttgcttcggtgtttctgtgctaaaaggattagaagaaagcttttggggtcatatggctctcatagtctcacacatggcttctcctccactctccttcaccccaaattcacactttcaatttgtaaatttaccaaaatgtcctgggcagaaccctgtattttcacttgttttgaggacaaggaccatttcttcttcttctagctcaagcttaagagcagagtcatcacttggagttggagttcgagctataagggaagaagtcgtccaatccccaaattccgagtcaaccctcaattctgaaactaccctttcctcctcttcttcttctaagctcgttctcgttgttggaggaactggtggcgttggtacgctcttcttcttcttcttcttcttcttcttctaggcactcactcaatcactcttttttatccttttattattatcttttcttctacacgcagtcttgttgtaatcatcatcaactcaagtatatgtgtgtttatatgtgtatatatatatatatatattcacttgcttttatgctttatcttcttacgtacgtacttcaattctgtgttattttgtagtgaatttattgagaaactaagcaaattttagtgattcttttatgctcttctcagggcagttggtagtggcatcattgctcaatagaaacatcaagtcacgtctattgctgcgcgaccctgaaaaagcagcaactttatttggtgaacaagatgaacaaacattacaggttccaatccaaattcatcctctcatcccatgaactggggattcattactagttttcttatcatttttccttcagccacagtcgatcacttttgacacattttcttgctttgtttgatacgtattatgttgtggtatgtttggctggttggatttcattcatttgtttggttgtttgcttgctttataaagtattgaaatagcttttttcaccatttttggtggaatggttatccatccaaaagtgggaggaaatgtcattcgaatgcacaaattactcatgctatatttaactcaattcatccatcccattactttcatctgttttcattactcccaaccaaatacaccccttaatgttgtacaacttcttgttcatttatagatatgcaaaggagatactcgaaaccctgaagatctagatccaaccttttttgaggtttgtcatttaactacatggctgttttttgttttgacataagcatttatttgttcattcatatttgaacatgttaatttttttttatgtaaatcttttgtttttcagggagtcacacatgtcatttgctgtacaggaacaactgcttttccatccaaacggtgggacggagataatactcctgaaagagtaggtaaattcatctacttgaacttttagtgaccttgttgttgataagtccagaatcaaaaagaaatgtcacaattaatttttctttttgtttacattgtagaaatgcttgtgcagtatatgtgtttttattttgttcataaagttgcgtgccttttcaagacccaattatgctcataatttaaaatacatgcatgaagtctgtaacactcaagtgtaagcatgctttcaatgcttttaactgtagtattttccttttgaagattgggaaggtgtgaaaaatcttgtatctgcacttcctccctcagtgaaaagggttgttcttgtttcatcaataggtgtaaccaagttcaatgaactcccatggaggtaagactaatggtgagttataaagctagcaattgatcttcttttgtatctataagaattgagagagcagaaaatagagttcagtgattttgtactcatgaatggctccttccatatttttccagttaaaattttttgtttttacgataatttctctgtaatctttccaagatggaaatttctcaaataaattgggattattttccttgttcaagattatattttaaaatagctagaacatcatgtagcctgaaatgaatctacccctagagtacaactaagaaaattacttaatcaaatatcattaccaactatttaactgaacctgtcttttgtttctatttttggtctagattttattatatctgtatctttatgcgctaaatagtatacattttctgtccatcatgtctatgttgagttcatcaacagaacctcaatctacatgttttttgcttaggctattcactagatacttgaggaccctttgttctctgagcagagtaacctctcctccaactaatcctttccatgtgatactgtttcttaaggaagcaggagaaaaaggacatgaaagtgtctcgttacaagaaagtttcatttaatgcaaaatcttaaataatactatagtctatagatgatcagttgttttgttaggaaatatattttcatgaatattccataagtggaaaggtaccatccattaaaatagagaagtgaattcactacaaggtttacacaagatatttttgtgattgctatttactagaaattacgcaacaggaactcagtttggatactaaccttggtagacattgactatcataacatttttcctttaaattttcagtttcattggttaacaacttatgtgttttatctttttccattagcattatgaacctctttggtgttctcaaatataagaagatgggagaggatttccttcttaattctggtctaccgtgtacaataatcaggtttgtcaaaaatactgacacatcgcaagagtccataatggcaaaagtttgtaataatctaaagtattcttttttcttttgccattgcatgcaaaccagagccggcagattaactgatggaccttacacctcttatgatctaaatactttgctcaaagctacagctgggcaacgacgtgcagttcttattggtcaaggtatgttatgtttaacaataatattagagggtatttcaataattataactggagtgcacactattttaatttgactctatcagtctgctgcttctatatcacaccacaattaggagtggattttctttaatatgggtaaaacagccaatcgtcaaatgatatcgtaactgagtgttattagagagtgagagaggctgcacatatctgagtatgtttgactaagattataaattgttaattttgtaagggatcactagtaggactggacatctgatctaatccaatccaacatttttctcctcatcctatccaatccaattagtaattggatttagaaaattgtcatccaatccgatccaattatatctcaaaatccagtctaattagtaattggattggatcagttttgtaattggatatccaattacacaaacctaaaacctaaaaacatgaagaaaatgattgatattgaaaacacgaaaacctaattgatattaaaaacatgaagaaaattacataaaacctaattgatattgaaaacgattaaagggaaaaggaaggaactattaggttttctcctagggatttaaaactacacacatgtttagaaaaacacagcaagtcaagcgtgctattcttttagttaggtggagttaaattattttttagggagattaattaattaaatgtattggtaaataaagagaaagcctaaacaatataattcaactattctttttttatatttttttaaaaaaatttattgcatatgaataatattttaatatatattaattgtaattggatttgatcagtttttaattggattttgagattaacatccaataaccgatccaatccaacttttcacatccaaattgaatcggattagatcttgttcagccctaatcacaagttttattatggcttgtgggcatctataagatcctatctatacttcaaattaaaaacataagtgtaatgatttcactgaagatttgaagcagtcaaatatttttgttatctttggagggagaggggaagaagttgattacccataattctcaacaccactatgaggcggccttacgagtggagagtagtttcctataataattttcaattaaaatatgtaggatgtaatattgaattttccaaaaatgatatggcacttggtggtgttgggtaccactagtgccctttagcagttctcttttgcttaaacattcaatgcacaggttctctacttattggatatttatttttcaaacaactaagtgctattatgtaaattgttgatcctatccaaacatttttatttgcatatctttggtttggcaaacattgcaatcaattctcaggagataaattagtcggtgaggttagcagactcattgtagctgaagcttgcatacaagcacttgacattgaatccactgaagggaaaatttatgaaatcaactcggttgaggtaactctctcaagttgatttagtataagtggctctagacaaaatttcattgaaaactgactactttactctgcaatgtcaaaagataaattaatatattttaacatctcttatttgtgtagggagaaggtccaggagatgatcagcagaaatggcgagaactatttgaaacagcaaccaaatagccaagctcactatgtaaattgtaaaaataagctagctactccacatggtaaatttcatgtaacaagtattattgtctataaactgtatagaactattacatatgttacttttgttaggtaaagttattcgtactccacttctacggcttttgttattcaaatccaggcacaggttctacagtgttctacttccatgtctacatgtcagacttccttggctttctcattgttaataactttgaattcattgtgtaaattgctgtgtataaacaatttctgtgtataaagattttgccaagcaaaagcatgagctttgacaaatgtacatctagtcatttacaataataatagttatattgtagaagatagattctttaggtggtgtttggtttggtaattgtaatggtaatagtaatgtaatggaataagattgtaataggaattgattgttatgtttagtttgtactttgttgtaggaaagaatattggaataggtggtaaagtgataattattcctacttaagtaataaaaaagtaaaaaaataagtgtaaaattgtaatgaggattcaacttacacattaattacaccttagttgtaaagtactaactaatgaggtgtaaaaaactaagtaattaagagtgtaaatggattaggttggatctgattcggttatgatctggtttaattcgaattatgtaatgatatgtcctgtcctgccccgttagatccagctacctggatcggattagatctgacttatcttttttggattgaactaattcgacctgatttattatttttttttaagaattttaattttatatcgaaacataattttgttttcctaaatctattttttaaaaactaataatgcatcattttttttcttttatttgccaaaatcaatgaaaaggaaagagaatatcaaatttttaccacattaaaaatgtaattttactctaaaattaaaaaaaaattactaaaattttaaaatctattactaatattatcattaataatattaattaactattgaggttgtgaggactctgtcaaaattgagaaaaagaaaataaataaataaataataattaaggatgtggcacccacaatttttttttattctttattaaattctctctctctc

SEQ ID NO: 262220 - DNA, 607 bp, Cannabis indica
aatatcatacgtactaatataataatgaataataatattaagttttgaaccctggtttataataatccagtaaaaaaaaaaagaaaacaaaatattataaataatgatattaaatattgtaaaaaattaatatcatccctaaactaataattcataactgaattttgcatatggtatataattagccaaaatattgttaaaaaaaaatatagaaaaaaaaaacattaaatactaattaagctcattaaccttaatggatcttccactactagatttcatcatgtgctgtcaacaacttcaacttctgcattatatcaaaatacacaaaataatatattatatattaattgttatatatattatatattttttttataaaaaaaaaaaacaaaaatcacaaatatataagcccaatgaataaattaattcaaatagaacatacctctaattttagattgttggtgattagtagtaataattcaaacttttggaaacaaattagctcaatccttgtgtgccagtgtaattggaaaatcttttatctcagttctacctgaaagttgcttatcaaattaattgacaaatataattccttaatttttttttc

SEQ ID NO: 262221 - DNA, 586 bp, Cannabis indica
cgtagacctacgtgttgctctcacacgtctaaatacaataaggccttagaattggttcatctcagttatggttaccgagtacaacctgattatgccttaagcgcataacccttgaacctcattacatatgacatgacatggcattttcatacatatatcactaaggtaataaccctaggcaactataccattcctattagggtaataaccctaatcccgattattaaacgatcatacatatcactttcaatataagcgccattgcacatactctacgtgctaatcactgtcttacctgttgtcccgcaactgacagagattccgaattctcgggtgctcctgatcaggtgccggtaatcctagtcacacaaatctgagattttcacacatagggttaacccctggttccatactcataaaattcaatcatggcatttgaaattcagataagcatacagctcggaacgagctttccaacgatataaagaattcccaaatcggagttcggaataaaaagttacaaaatttcaaagttcgaactcaatctgcccaaaaacatgagagtgggtcgcggcatgcccaagcc

SEQ ID NO: 262222 - DNA, 1781 bp, Cannabis indica
cataaggagagtgtatagagttaattctaaattgctaatgtgtagaaataaaatatatacataagataaataaactatttctcctatagcgcccaattaattttaatcacgccttaattctaaattctaacataaataccataaaaatattacactagtagtattgtattttaatatcatattcttcttattttaagttaataaataatttaaaataatacctaattattgtaaattatagtaatcagcactttaaaatactgaatatattaattaacgatacatatattattatagtagtagtttttgaaagaaacattgtggccgacatcgcgggaatgaacttaaagatgaggattcgaaattgattgatacaagtcaatgtatttttgaaatgtagcaataataggaaaaatctgaaacgagctttgtcacattatacaaccttttctatatatggaagaaatgatatatatggtaagtatgaaatcctcatcatatattcatcacatgcatggggatttctcatagattatatatatgactattaatttgttttatatatatacatctctattatccttgtcagtttgtcacggactgttaacaggctgctacatgctaattaaaactcattatccatttccaaactgatcggattctattgcaagagaatgaaagttaaatatgcctgaaatgatttaattttagttcccaattacagaattgtataactttgaagagaatgatcgaactcttacgtatatatgaagtgagtaagagaaataatcattcatctctactacagttctcgattataatgcgaatatataatcagcatgtctgctagaagcttttaccacatcatacgtaatataattaccatatgcattattcatgcatgcatatataatatcatcatcaccttatcattgatcgtagattttagtaatagaatcaaaactaggttaagaaatgtcatatatgttcttgctaattcttaaatcttcattaacgtgacattatgaacagacgatctatcttaacgtcatctatataaatgtgtcagtgtaaaattaatatggacgtaacttcatataattagttactataacacgacgatgaccttgaaagtaacaaactatcattgaacaaaaatattacagctgtacaaacagatttttattagctaacaatcaaaaaccggcatttcttttctcagcatatcaagtatagatctggctcactttgtcactacatatacaattccataccacacctagcctactagttgaaaaatatcctagtctctactatttaaggaccttctctagcagagagttatctcaacatttcactaccttgctttcttctctctggagagagtgaggagggtatacattacattacaacacttagtaaccataataactaaaaatgggaaagtatgttctagcaaccaccttcctcctcctcaatttgggtaccctactcacttcccttgctagaccctactgtccaccaccagaataccctcctaaacacccaccaaaaccaccatctcatcctaaaccaccaaaacaccctccccatgtcaaaccacaccctccccatgtcaaaccacatcctccgtacaagccaaaaccaccaccacattctcccaaaccgcccattgtgcaccctcccaagcctccccacgtcaaaccgccagctgtacaaccaccaccaaccatgccaaagccacccccagttgcaccaaagccccctccatcaacaccaac

SEQ ID NO: 262223 - DNA, 1638 bp, Cannabis indica
ttggtaacactcgcctaatgtatttgtgaggtttaaaaaatgacgctaaatacaattgagagagaaagaaaccgagacaaccagctataaaatccctaaatccaaaatcaaatgcatgtactgttcacactttacctaaccctcatcctctttgaccttgctctagcgatcaataggcagccccttcgtcctcttcgaaaccatccactcgagccttcatccctctttgaaactgtccaatcgagcctctcgaccccatctcatctacttcgaaaacccttcaacccattctcttcctcctcttcttaatcgggcagtgacccaaccccaacgacctcctcaactcttcttcgtcttctgcttaatcgggtggtgcgttcttctccaattagtttttagcatgtatatttcttttgtattccaaaaaattttgtttgaaattgtgttctgtgtagttttctatctcatactacaagttctctctccatcacccatcctctctctctctctctctctaacttttttgtttttggtttcttctctcactaattcatcatctataactactctgcatagattatcaacttccttcactaactaattcaagaggaggaattctttttgttgagtataggcctttgaattgtaaagctccagttactacatgcgcttcactcactgcccggatatataattgcttcactcacaggtatggattttaggttgctaatgaggattagggtgtcttatttttttaatttttctttgaatgagatcttataggtttctaactaggtttattttcatgtataaaaaaatgtttggattttctaatgcatatgggtttgagggttttgtgatggattctatagagattgatttttttcctcgccctcgggttggaagatcaccattttctgtttatagtcaatactaactgagtacttggataagatccgctaaaccgatttctattaagttagcacttaactccctatcctcaattctgatcggcatagacctaattcaccttctggagatgactaattctccaccaagcagtagggttccaaaccctttatcataactatcatacggtctatccaatttactaaaaattctggctgccacataagagtgagtggccctggagtcaaacaatacagagaagtaagagttgttgaccgagagctaacctgttacaactgagggactggcctctgcatctacctgagttaaagcaaacacccttgttggagcaggtttttcagcagtcttccgctcttctttcttaagctgagggcagtctcttttgtaataccctgacattccacactggaagcacccttgccctctacactcacccagatgatgctttttacaactggggcattctgggtaagtgtatcgggtttcggaaccatcccaactgttgtctctattgggttttgtgccctaaataaaatctatttcaatataatcagatttactaattaataaagatcagaaatcgcattttatgttgcacagttcacatggcttgtttcatgattatatttaatgtataaattctataattccagaacatatgtattttttcgtgattatagtgttgtcaacacagtggaatataatcat

SEQ ID NO: 262224 - DNA, 887 bp, Cannabis indica
atttattgatgtttacgtttttagtttaattactgtaaatcaatatacaaacggattgacaatgaatgcaattcttgtgtaactaattggacacttgctttgtatataaaggagtgatccaccatgaaatgacacctacgaaactcttgcaacagtggactaagcagaccgtgatctgactgaaccactatattcctttgtcttcttgatatttccagtttttaccaagcatttacgttcccagttcgagcactcgctgttctaggttgaatactcgcaattgctcatcatattgtttctccttataattattattattattcatttttggtgttgcgaaatttgctcgacaacatttgccaccgtttgtgggaaacggaagaagtactaatacagaaagaaaatcataatggctggaaaccaagcaaacggaggttttaacaacgaatccatcaacatcagaatgatgaacgttccgttgtcaggaggtagagcaccaccagtggatgtcatcaattgcgaagtaggtcgaggtaatgtcagacctctcaacttattccctgaaactactggccctcacgccagggaaacgtctacaccaacagccacaacggggcactttccacccttcactccggcggcagtgtccgaaggtatcgtccacctgaccaccgatcagtataccgcaatccaggaccagctgcgtgccctgcaagccgaggtggatggacagaacagggcccgacgtcctcctcgagcacccactgctcgcacagaaaaccctcaggtcactaactctagatgtcgtaataaccgtactcgtagggaacggaggaccaacccagaaggactcgacttgaatcaaccaacctcgagggaccaatctg

SEQ ID NO: 262225 - DNA, 875 bp, Cannabis indica
tctaaatatgatcatacttatatgcataagaaatctgaaacgtttgaaaagtttcaagaatttcaagcattggctcaaaaccaattgggtaaaacattaaagatcttgcgaactgataggggtggagaatatatggatatgcagttcaaagatcatttaattgaacttggaattgaatcccaactgactgcccctagcactccacagcaaaatggagttgtagaaagaagaaatcgcacgcttttggaaatggttaggtccatgcttagctattcaactctacctacgtccttctggggatatgctatttagatggcaactggcattttaaatgttgttccatctaaatcagaccctaagacacctttagaattatgaaatggtcgtatacccagtttacgctgttacaaaatctaggggtaccttcctcgtgtcttgagaaagaaagatggcaaacttgaaaagtaaactgaggtttgcatgtttgttggaaattttaaagagactaggggttgactattttatagtcacaaggataataaagtgttcgtttccatgaacgccactttccttaaagatgactatattaagaatttcaagacgcaaagtaaagtagtactagaggaaatgatttcagatataacttaaactaatgttccatcgtcttctacttaagtagaggataatcccaatcccttagttgaaccaatgcaagtcgatagaattgagaaatctaccactaatgttcctgttcagaaggtcacagctcctcgtcgtagtaggagggtttccacaaaaccagctcattatggcttgaatggtgaaatcaatatagtcgttggtgatggtattgatgacgatccattaacctataa

SEQ ID NO: 262226 - DNA, 839 bp, Cannabis indica
atacatctaaattaataactaaaaaatacacaaaaataattatattataattaatagtagtaatacacaataagtgattcaaaaaaatacaagtataatttaaataaaatacaaaaacagtaaaaaaaaaatatgaccacaaacctagaaattggtatgaacaatacaacaacaaaaaagaaataaaattatcaacagtagtacaacaaaaaaaatgagtcttaattcgtaaaagaaactgaccatattctacattttattaagaaaaaaattaatagcctcaagaaataaaaaatttaattgacaccatcttcaatttggtcttgcccaatgcattttcatcttcagattaggtaggcaaaaggtctgactgagaacctgttgaatggagggctacaacaaagcaaattcgcaaacaaacaaacaaacagtcctgagtgatcacccttcttccttgttattactttaagataaaaattgaaaaaccaataaaattatgagaagggttattgaaaaaaaaatagcttattagaattaatatgccaaatgaaaaggttcgacttgagtttggactttatctatacaacatttgaagagcctaagaaagccttcagacataacaaaagttggtctaaagagctatatatataataaccttttaggttttaaaactaaaacctaaaaataagaaagaaaaaatactagaataagatatagtaaagcatgccaacttcaataagactgatgtgtggaatattaagtgccatagctggtcctctacaattcttccttagaaatgaatatccaatatcagtcacaagttttttcaacaacaacat

SEQ ID NO: 262227 - DNA, 649 bp, Cannabis indica
aatatcctatttcaatttaaaatttcatgattaaaataattttattttaaaattcaaataaggtcaattaattaaaaaaaatgtaaatatttgaccttaaatttaagataagataaaataatcaaattttaaaaataagataattaattaagccagaaattagatttttacctattttcaagcttcaaatttcactaatatcttaaattaatttaaaaaatattaattaatttaattttgataattagatttgaaatatgaaaaacaaaaatcttaatacaaagttacaccaaaaattcgaaattaattccatgaaaaagcatgaaaaaatgaagaaaattgaaaaaaaaattgtaaatggtaaggatggtatgcactgcataacattcgcgcgcgcagcgaggatttcatacaaaatccgaggcttcagaccgagaaatctcagacagcttcgtgtctgaggcgcgcgtgaccgagtgatcagtcggattcgcacgcgtatggggtgataccaccccctatcttttttcaaaacttcaaaaaatcataactaattcaaattaaagcgaaatcaagttttgtaaaaaagtgaattgcttaatttttcccaaactatccaacaaaaataattccagaacgaaaattcaat

SEQ ID NO: 262228 - DNA, 651 bp, Cannabis indica
taagaacataatcgatcgatgttgaacaaaaacaagggcggtggtgttatgttatcataccttatcggtgtccacgtcttgcataatggcttcaacgacttcttcattgttttcttcaacatcatcagccaagcaatgtcgcagctcgtcaatttctataaatccagtttggtttttgtcaaagaattcaaaggctttgtgaaggtgctcatcatcactgcccatctttcttaggtgaacagatatggcaacaaattctccatagtccagatatccatccttatctacatcaccctgtaaattcaattctagttagattcatgtatagtgaactagtaatacagtaatacatcccacattttgcttgaatcagtgccattaagagtcatattgtaattgtaccagaattaacgaagaaaaagtgaatggttcgaaaagagtggtatacttacagcttccattagaatatgaacatctgcatctggaatttgatgaccaagcttatgcaatccggctcttagttcatccgtgttaatccttcctctgctgctagtatccataagattaaatccttcttttataccagcaacttcttctactgacaaatgctcagcaattacctgtaaattcaaaataaataaatatcatcac

SEQ ID NO: 262229 - DNA, 2133 bp, Cannabis indica
taacaaattagaggttattcttgaatagagtattcttaaatagggttctatactgtatatggtcagatttcaatattcattacatgatttgattttctaaattaattgtcaaaataatctgacaattaatgtgacgcagatactgatggagtatctcacctataaattatatagggtctcggtcttcgaacttctcactcatcctattcaattcaacaaaatttcataaagagagttgaaatgagtgaggaagccgaactccaataccgaagctatcgcagggattgaagcttaaacatcaatggccgatcaaggtatttcgatcctttcactgcatatacatttcgatatgtttacagtttattcagcattacatatcgtttatatatatatatattatattttcatattatatattatagtctaacaatacaaaataaagaaactaatattaacaccacagccaaaattaataataaacaataaaatatgataaaatatgttggtcaattaaagatgctaatatactcgtcattataattcatttgtggaacgtatatagataatctacatatcaaagttcctgtaaaaaaaagttgtttgtttgttttttttccattagtttcctatatgtagaaaatctctaggttattacatattgaaacaccatccacgtatcattccacctggatattgttataataatttatattttttttctgtttaagggacaatgattgcaatttcgtctaataacgagaaaaccccgtatcttaactatatttattttcaaatatacatgcacattaatttatgtccttaaatccaacttctttttattcttcggttgcaggcctcgttttaatcatcaccaacaaagtgttatataaatacatatgtgtatatatataaatatacatcttaaatataaaattaaaacaattaattagaccttttattattacagaaatgatgacatttttaaattagagtaattttaattattattaagtaatcaataaggtgagaaagcgatccaggtcgatctcaagatggaaatagaattgaatatggtgatgatgatgatgatgatgatgatgatgatttttgtagaaggtaatagagatacaaatgaggtgtatgatccgtgcatggatagtaaaattcaaagatcagaggggttttcatttgggattgcactctcttcaaatgaatcattcttttccaatggaacccaactttctccttgtgataatcgtctaccaatctaccatggtaaggcagctgtattcgctgtatttaggcccatggtggacgaaatctctctccttaatgtttctagctccgatttagatccggtacgtatctccttattattattattattattatttatctaagcatattttgattattcaattaaccatttgatgaacaataaaatgatagtcagtcttgtttattaatttcaagtttatttttcttcgcatgttttataataaatacccctatatatttgatatttttatcatttgtaatttatattttaaaattatatgtataattatatggccccaaacatatatctactttattattttttaaatacattttgagctttgttgttgaatagtcctttgtatgagaatgtggaaaacgaactcagcaattttggtttattaactgatgattgctatattatttatttttaaatcactatataaaatatatgttgaataactggccaattaattctaatgttctatgttctaatacagatgacacataaattatttatatgtttatatatttcccaccagaccaatttgaataattaatttcacacttttttgtgttgttttatttttgaaatattcaaatgaacactatttcatttatatatatatattaaatgtgattatgtaacgaaaattattcgtattaaagagtttttttggtttaaaattaacgattaaaactaagttaaattgattaatcaattattaaaaaaaatagtttaaatatctaaatttaatacatttattaaaatataagttaaataattatttaaaaatatcaacaaaatttaataattatctttttatatgaatcttaatttaaatttaaattaga

SEQ ID NO: 262230 - DNA, 567 bp, Cannabis indica
aattggaatccatgatggccaatttctggtggggatcaaataaggatggctcaaagattcattggaaaagttggaaattgctttgtaagtcgaaatttgaaggaggtatgggattccgctcttttgtacactttaataaagccctccttgctaaataagcttggagaatatttgaaatgcccaattctctacttagccgactcctaaagcatagatatttttccaacaatacttttttggaagcaagacttggccactcaccctcactcacttggcaagggatccattggggacgtgagcttttaatagagggcttacgctataagattgggaatggttttaatgtgttagatggtgtagacaagtggattcctggtaataatattttcacaccagtaagctatactggccctccaaatctgcccgtttcttatttcataacagagcaaagagtgtggaatttgcctctccttcgtgaacacttccagccgattgatgtggatagaatagtctccatttttttatgttattttcctagcaatgaccgttacatttggcatcatacaa

SEQ ID NO: 262231 - DNA, 512 bp, Cannabis indica
ttctttttgtggctttggtaattcgttgatttgaagcttgggattagaagatttttggagcttagagttaagggaattcaagctttgtttgaggtagctcttgttgtttttaattttgttttccctattgcatttatggtgttaaaagcttagaaaagcatatgttgaattgttgagtagtgggattgcatgttcatagttttgaatggtaatcttggtgggttttagtataaattgcataatttgtgatgttgtgcatggattataattgcaaggtagtttctaacttagaatcatgtatttttgagttgttttcttggctggaagttatttgaaatattgaagttgaagctcttgttcaagagcttaaagtaccttgaatatgcatgattttaaagtgattttgctatctgaattcttgagggtttgttgctggattttaatgcttgataatgtgttttaaatccttaatatttgctagctgctgtaagtggattaattgagaatttggt

SEQ ID NO: 262232 - DNA, 709 bp, Cannabis indica
tctggttctagttcaggtcccaggtcccatttcttagtttgggttcgggatcgagactagggtgcggttctaggtcccgaccctggttctgtgtccctagtatggttccatgtttgagtctgagttcaggttcgggttcgggtcctgagtccaggtttgggtttggaaccgggtccggctcctaattcgggtctaggtcttatttggagtccgggtcctggtccggttatggttcttgatctaggtccaatttcagttatgattcctagtccaagtcctagttccagtccgggtcaacttcaggttttggttccaattttgggtcacaggttacgggttcaggtccacttttgggtttgggacttggttcaggtctgggtgtgggttcgggtcctcgtcagggttcgtgtccagggcagggtcccaaatccagacacagactacgggttttatccaagccgtgggtccagatctggataccaatctcaggtcccagtctggttccatttctggtgtcaactcacgtgctgggtcctatgttcaagttcgagtctgggtcgggtactaggacccggtcctagttctgtttcccaagtccctatccttattctgggtccaagtcccagttattctgtgggtttaggtcccggtctaggttcggttttgagtcctagtctcggttcgggtttacgtctctgtctgggttttg

SEQ ID NO: 262233 - DNA, 966 bp, Cannabis indica
atccctttacaaaatacaatataaaagtttgctatacatataatcaaaagtttgtcgcccagcgactaattaacgaaagccctaatgtcccgaggatcgtacgctccaggcctaaccgccccgacatgtacaacctccatctgctcgttctcacgattcctcagctttggctttgcccttacctacacataaacatagcactgtgagtcgacggactcagtaagaaaagcataatataaacataaaaataacccgggttataatctggcgcccatacacccgatcataaccctaatccccgtcccacacggtactgagtctagaacgttcataagacaatactatcgaccataatgtcagcctatactcaatatactaatcatatactattgaccataatgtcagcctatactcaatatgctagtcatactctagccatattggtgtgacaacatcgatcagtattctagccaacatacatctatcaatactcagtacaactctatgtatactattattgctatcaatgtaatctaacatgcaataacatatgtacgctaaacatgtaataacatatgcatgatattatactaatcttaccttaattctgaattcaggtgtgccgatcaacctgagtggaacaactgctcagcgaattataagctcctaaatcacatcgattccaaaacaattaagtgatccgctaaatcacaaccgggacaaaggttttaaaaccaaacttaacctactgcaacttaatacaaaaatatcccaaactagcagggaataaactgcctgaaaacctgaaattaacacaaaacgatcagctgaaaaaactggttttcacctcctgctgcaaaatccgggtaaccggttttacaagcagtgtaaaaccggttagccagttttacccagaaatccaacaaaaatcaaaccctattcaaaacgtttccaaactcaaccaaa

SEQ ID NO: 262234 - DNA, 787 bp, Cannabis indica
taaatttttatatttaattatttttcttctactttaaaaaatacaatgctggtaggaccccaccgctccttatgtatcagaattttttttttgaaaaggtcaatagcagggtgaccccctgctattgatctgccgatattaataattagtaccagcgaatgtgtcagtctgcctctattgttgtgtaataacgatcatctattacaagcaggctaatagcggtgggaccccgccagtaatgacctataccgacggatttcatcatcttcggcagacttctctgccagtaaagttgatatttcctgcagtgagttgttggctcaaatgttgaatgacctgttgattaagatgcaactgagatagatgagtggaagtgtcttgactgatggcaacagtggtcgaggcttgattggtcttggcagttttagattgtttgcatttctctccatatccaggaccatatctaggaggaaattcgttaatgaagtaacatttctcaaccaaatgacctactttgaggcagtgagagcaagtaggacaaggcctcttgcttcgatatggattgttagagttgttggaggcagggcgagcagacaaggcaacaacggtcatggcattggtattgtcgagagaacaatggcactcttactacaccaccatagagaacaccttgtacaaaggtgtaataggatcaaacattaagatctgatcacgagcaccaacataagatttgttaagaccattgaggaattgcaatatttgatcacaagtgtagtaatcctgaatc

SEQ ID NO: 262235 - DNA, 1867 bp, Cannabis indica
aaaaaaaaaaattatgtatcaactttataatgtcataataaagtcttcaaaaaaatgagatttttttatttttacattttaaaataatttttttttgtatttttacgaaattctatgtaaaaactcttattgcaattaacactatagcttaaattacaataaaaaatcatatagcattccacatagaaactgccagaaaaataactttaaaaatcaatcgtaaaataaaaaaaaaataatgagataattccctctaaaaaaaaatctcacataataaagttttgctaattaaataaatgtatgttaagtgtcattttataatatatatatatatatatatattatataaataaacagacaaatatatggagatatatccttagaaaaagattaaaccaaaaaataagatatgatatagggaaagtaatgatattccgaatctagtagatttatgttgctaacagcctccattattgccgggtgatatgccaagaattcctatacctgtttctcatagtttttctcaacttttgttacagatctcttactaccccacctagctactttatttaattactattattttctaaaacactaattaatttattaattaaaaagactcactactcatcacatgaaaccgtgaacttatctctccatcactaccaatatatataatattttattgatggaagaaagactttctagaagtttgacatatatacatttgtataattaattgtcagatttgaagctatatatatatattaagctctttctttaacatgaatctgacccgtgaactgatcccattttacttttagttcatcatagtctttatgggaatcatcagttatatataacccaattcccagttactttattttcttgaaataaaaaaataaataaacaaaaaacaacttgagaagcattgagagctgcacatggagaagtcaaagtaaaactattctgattataaggttgtatatatacgtgtgtgtgtgggtgtgtgttctgtaattaatttggattcataagagggaaaagtcaaatagaatgagacaattacaggttcaaaaatttatgctaattgtaattaattaacttatattgggatccaatggagtgagtacgacacattaacattattattatttttttaatttcttctttataatataaattttttgtttgtacagatttctctgatcgatcaagccaccaattgtccgcatcaaaaaaaaaatcaagccaccgattgggcccattcttatttttgttttactatggagacgtctctagaaattaagtagatgccaaacaaatcttactatattttattaattttatatgatcaatggatatgcctgaattattattgttttgtttcgatgctttagctcaaaattcaaatgtgcataatagtgcatatatagagaacatgagtaattattgccagaaaaaaaatgtggtattaatcttttccattcctttaggtttttaattaataaatgtatggtaatcgagtctcatcaccgaattttcattaccaaatttatctgttaaggaggagctgtacccaaacgtagtagctcttattacgttggattatagctaataaggtcaatagatgatgttgtgcttgatggtagacaaaaacttattagttggttctgagggagctttatccctcttaattatagggataattacacctcataccgacatttttaatttatttacttttatactgtgtggcaaaaattttttaaaaaaatatactatcttaagttttcactgttattttttagttgttctgtaaatacaatatttttaaaaagattttcgtgtaataatatttttgtaa

SEQ ID NO: 262236 - DNA, 1447 bp, Cannabis indica
ttaaaaaaaaaataataaagaccaaggtttttttccatttttataagaatacctttccattttctaatttaatttattttaattttaattttattaattaaaaataaaaaagacaaatataccttttgaaaatctataaataaaaaataattacatgctttaataataataattttgacaaattaaaacattctgattacctttcctaattatgtaaacaaaataatatgattctagttttctttgaggacagtttagtaaccacctagcataataaaatattatttctaattattttctattttaagccaattcatttcgcccattaattattttaattctagttacagcttaataaatgtgtcaatatgtatatatggtgtagtaattatgttatattatttgttaagctataatatagagtaacatattatatattaaacaagattgatacatataatgtgtttaaataattaaattatataatatataatttcataatatttatttgttatggttataaaatttgaaaatggttttgtaacttaaggatcacatttaattatatatgtaattgggttattacatatgtggattatcaactcaatgaaataagtttctagctgtttaaaactgctacaatactcatttaatttatataatttaaatgagcgttggaatgttagaaaaagatttggctcagagaagagctacaaaaactcaatagtaagttttctaaaaatagttactttatggttgaaggcatgttattttatagttgtttcatttggagccaatttttaataatatccataaacgtacatagatttattgagcatgtttctagcttttttgtccaacgcttttatctcaataaacaccaattaaagtgctagtaacaaccatgtggtgaataaattttgattttcatatgtaatcctcaaacactataaatagatatatttggttcacttgtgaaaacactaatttctatcaagagagcatcttgataaatccacaaagctagctatttctattactcttttccctaagtgcttgtgggggaagataagctctttgacatgtatttaaatttggtgattcttttattatacacttgtaatgtatgtcattttgacatttctctcacatttttttatataaagatatatactttttaatatattgtgtcttatacgttgtttatagttttgtgtttcccagcttcgcagagcagctctctccctagctttttatcttcacaaagttgtatacacacatgaatgatacaactaattggataaatattgatgttgcaggaacccctcaataatttaaaagtcaacatatactctggaagagttaatagaaaatatatgatcaaaaattgtatatggtgatattttaaaagtcataataataatcttatgagatatattatcaccaa

SEQ ID NO: 262237 - DNA, 2450 bp, Cannabis indica
aaaactaatttaatggacaaaaagagccaaataactctataatcatagagttatcagtagacccctatctgttttggtatgcaggtagagttttttagtctactttttaatcatgatcgtgtacgttgtagttatttaaaattatcaattttttaaaaattctaaataatttgtaatacttaaaaacaaagtttaaatattttgctacacacataattttttttatacacaaaataaataattgtttgatttttaacacgataagttatttaattttttttaaaatttatatataattttaaatagttacaagtacataattatgaaaaaaaaaataaagtaaaattgttcagttagcaaaatagataaaagatctatccaaacattatagaggtgtattatctttttgtggacaaattaaatgcttctttctcaactaggccaaacatttactaatttcattcataacacaaataatgaaaataataataacaataaagaagagagtcgttttttttttcgtataagtggaagagttttcttatgagattgcgttgtcaagtgtcgatactaattcaaacccaccaaaagtaaagtacatttctcacacttgtcaggtatcataattctcttctcttttgtctaccattaaaagaaaaaaaacccacagaaatagtcaatttctttttcccaagaaaaaaaaccactgcccatccctggtttttctacgcccacaacatacatctaatctttccccaatattagttccaacctccatctgacccttttattttcaaaattacttcactacccttaactctaaaccaattattattattaattcttttactatgggcaatggcagtttgagtaattaaagcataaaccaaggttgaatctaaaatcattctccttataaaaataacaaagccactgctcactgattgtgctgactaaactaaaaacaccattaaaaagcttccattccttcttcttcccctagccatgcacgcaggagcctcctcttcttaccttagaaatcttcaatgggcccaacccaacggcccaataagcccaaaaacactcccactgaacccctacgtcagtttccgagtctccgccgtggcagccccaccgccgcagctaaagtttcagagaacgcattcgatgccgccagagaaagttgaaatctttaagtcgttagaaggttgggcctccaaatctgttctgccattgttgaagcccgtggaccaatgctggcagcctcaagattttttacccgacccggctaagactagagaagagttctttgatcaggtccgtcaattgcgtgatcggacggtcgagcttccagatgagtttttcgttgtgttagttggggatatgatcacggaggacgcattgcctacgtaccagaccatgataaataccctggacggcgttaaggacgagaccggagctagctcaagcccatgggcccaatggactcgggcctggaccgccgaagagaatcgccacggtgatttgcttcgaacttatctgtatttaacgggtcgggtcgatatgaccatgatcgaaagaaccgtccagtacctgattggagctggcatggtgagaagagtttggtgttttcgtgtcgttgttcttgtttgttgtcgttttagtgtttgattgtcgttttttgtttttattacaggatccgggaacagagaacagtccgtacttgggatttgtgtacacgtcattccaagaacgtgccacgtttgtgtcacatggcaacacagcacgcatggcaaaggagagcggggatccagtgttggcgcgtatatgcgggaccattgcatccgacgagaaacgccacgagaatgcctattccaagatcgttgagaagcttctagaagtggaccccaacaatgccatgctggcaatcgctgatatgatgaggaagaaaataacaatgccggctcaccttatgtacgatggacgggaccctatgatatttgagcacttctcggctgtggctcagcggctcggtgtgtatacggctgatgattacgctgatatcttggaattcttgatcgggcggtggaggttggagaagatggtggggttgtcggctgaggctcagcgagctcagaactatgtttgtgggttggcgcccaggattaggaagctgcaggagcgagccgatgatcgggcgcgtaagatggagccacaaagtgtcaagtttagctggatatttaataaggaagtcctcttgtaaaaaaaatggaaaaatgagaaaaaaagaaagttttgttttgtttttaggcccaccaaaaaaagtttataaatactatttaaatctgtaaacttcttttttttttttgtaatagtttgtagtttttggttaatttttttttttttgtattcaacttactagttttggttaattaataatagaaatttat

SEQ ID NO: 262238 - DNA, 566 bp, Cannabis indica
ttatctgatccacgtgtcccattttgactggtccacgtattttgggcgaattcaggggcaacaggaataaatggtaaaatgttgagtcatataagaacatgggttattctacttatcacaaattagctgtaacatgaaacattttgcttttcaacatggtatcagagccacacactttgatacagttactactcttattaccaattaattttaagatagaactccatacttctcaacattagcaattaatctttctttctcactctttttagcatatataataagggaataaatcttgttaatattcctttgaaactagaggagcatccgtaagacgttagataattttaatagtatgaaataaaaataaaaaattaaacataactcctagaaattttagtagcggcaaagtgaagagttttaataacatgatataacaatcaatatttataacatccaagtggtgtaataaataataattgatatggttctaaattgtgacagtcagtagtcccgtgatccgtaaggcgaaatactgggcaagctgtgcaatcccacatcgcctg

SEQ ID NO: 262239 - DNA, 535 bp, Cannabis indica
tttactaacaagtatgttgattatattctataatctaacaccctaaagatgaattcctaaaacaataataataaacactataaagattgaccaaaaaaaacacatatagagttaagaaaatcttacattggtggcagtggaatgttatggctcattccactcagatctctaacccttgttcctttctgttgcagagtattaacaatatctgagccagctggttctccttcaagtgttggattcttcacagtcttacacactatgattgagtacttgacttgatatgagtgggcatgtattctatcaatataggctctaaaattatgaaaataaagagagaggattttgaaaatagtaaaggaaggaagctctcaaaatttctagttgtctgacaaaatacaaactaggttaatatgttggatgagaatgacagcaccctatttcttttatactatttcatctagggttaagatacataaatgatatggattaaaaaaaagataaagtaatagcaaaataaacaataagtggcagg

SEQ ID NO: 262240 - DNA, 616 bp, Cannabis indica
attaattaatttgtgcttttaacatatatatcttccagctgtaattaatggtgtagaatgataaatgcgttttgaattaatattagtattagaataggatttgcataactacatttctaccttacggagctctttatctgatcaactttctcatctccattttaatttcgcttcttaatttctcttaataaatttattttatatttaataaactaatctttagttgcgattgtcatccctgtggatacgacaaagcatgtttactgtcgcgatcgcagtgtaactaattgggcatcaccctgcgcgcgcgtatgagggttgatgtgcgagacacgaggctgtaagtagcctacttgaccgaggaacctccgtcagttggaggcttcgaacacgggatgtccgagtaacctcgaacacggggctgtttgaactcggtcttgaccgagcagctccctgccatccgcgtgcgtgcacgtgtgcaccaaattgggatgttttcatccaaattaaaaaattataactgattcataaaaaatccaaaatgagttctgtaaaagtctaaattcattaattttttatctactttctagaagaaaaaaatactttctaaacgaaa

SEQ ID NO: 262241 - DNA, 779 bp, Cannabis indica
ccctccacaatcatctagaccacagggcgagcaagtagagtctggggctgcccaaactgatccaccggcaccgcctccacctccgcagaatctggggacaatgcagggtttggtaatgctaatcctcctgccgattggcagtaaatgtttcaagaaatgcgaagtgtcatacttcgtcaagaagaagagttgcgacgattaaagcaaccggctgcccctgttgatcaagtgttaccaccagcacctgtgccagtggtgggtaaccagcggtttgttatgccgcatagagactcggtatttgagcggttcgtgaagttgcaacctgtgacttttctaggaggtattgatataattaaggccgagcagtggatgagcactattactcgtatcctggataatatggaggtgacgggaactgagagagtgaattgtgcagcctttatgttgcaagaccatgcccacgtctggtgggatatcgtgagccaagctcgggatgtcagtgtaatgacctgggaggaattcaaaaatctgtttgaagaaaagttttacaacattgctgtaagaacttcacacatggaagattttgtgaagcttactcagggaaagatgttagtggccgaatataccctagagtttgatcggttgttgaagtttgctggtgatctagtgcccacatatttcaccaggaaacaaaaatatgtgagaggactgaatgccacaatcagtcgggacttgaagattaccacttcacatgacactttgtacaagaaagtggtaga

SEQ ID NO: 262242 - DNA, 728 bp, Cannabis indica
aacttctgcacgaggatccacctcttcttcgttctagtcctccttctagtgaaggacattcttctaaccttgtacccagccataggatgatggctcgtacaaagaaaaccatgcgtctggctgatgctactgatcctcaagtggctcagcttgccactttgcccagtgccaaacaggattcgactgtcctgatggaggaggatcgtgagggggacgctgaggtccaggaggttgaggagctagacgatgtgcgtcccggcagtccctccgaggcggagggagaggaagaggttgaacccctaaatttcgtggagtacaatgaggctgggcagccaatcgatgctgacggagacgttctagttgagggcgttgactgcgtcagtaaggagcttgctgcggcggttcctcatagaaggcagtgtgccttcggcgccaggtgggtaagtcctccgtccaagattacggaggggcgccttcgaactcttgaccaggacgggtacctgggcaagctggactgctacattcccccccacaataatcgtgccacaaaccctgacaaggggatgtgcgcctggtcgagggcccatggccagcaaggagagttgatgcccttgcacaagtactttaaggatgtggcagagttcttcggtccttgcctggcccaaatcactcctaagggcattaagtatttgttcgccctcttcgtcctctacgcttcccagggatgg

SEQ ID NO: 262243 - DNA, 1878 bp, Cannabis indica
ccccgagctcctcactcattctgttcataacagcaaattccatctaaagagagttgagagagcgaggaagcccgattacccatggtagtcaatttcctttgcagatcaaagcttatgtgggtttgaagctcaagattcaatggctggaggtatttcgatccttattcatagtgtatatatgtttgattaattccgcacttaatacttaaacatatacatttcagtttatatatataaatgtctaacatacgtacctttcataattaagaatcccatgcataacatttgcttaattagtctctcaaagtcacatttttgttttccttatatgtgtgtatatatataatatataatacaatgtatatacaaatacccttaattaattaataattttcgatcaattatgccatttgtggatgaataataaaatagagaaaatatacctaattgatcaattaaaaggttatacaaatatgtagtgaggaaaaagctcatttgttgattttgtcttttctctctataaaaatttttatttttaatcgcaacaaaatttatgattaaaagtaaaaaaattgtgactcattataaatttttatttttacgttgtgactaaaaagtcagtgattaaaagtattagtcacaaaaattgtaatttattatgattaaatgtggttttaattagtcacaataattgttgtgcaaaaattaaattagtgacaattaataactaaatattatgtttaatcacatgtaacttttttattgtgactaaaaggttgtcactaaaaattatctttttgtagtatccgaccatctaagcatcataataaatcttttcctaaaaccatatcatatgaattataaatatatataagacacacacacacacactcaattagaacttcttttctctcccacacacatatcttgtttgtggattcataacttagtatcattactaaaaggtgtagaattgctttgttagttggttccttcataaggaaagaaataaaaagtgttcttcccactacaaagttcaattgcttatatacccttttctcacttcccaccaataatagaggatccataattcaaaagtgcctttttttcattttttttcctttattaattaaatatatattttatttattttattcaagtaattaggattgctagatcaaccaatgactcccatattgtaattactactcttatccttataatgtaattttctttttctcattcttctaatttgaccaaattggaatctctcaaaaaggggtacctttttttattttccttttttctcacacaaagttcaaattggcaattgctcaagcaatgatcatgggtcggttttaaataaaaaatatatatattatttaatttttcttccttaaggcaaaaatttgatggaatattatgagacaaaagggcccattttactcttcttttttttcactagtgcaagccaaaaccccaccaaagcttttgtgacaataattataaatatatatatgatcataatatataataattaatcatgtacatcaacaaggtcaaactttaagcaaacacaacaacacatatagcaacaaatcacttcacagctggggagagagagccatttaattacctttttatttttattttttattttaaagaaaaaaaaaagcttttggtagcttcttgcactcaaagcaagtagactttgaagtcctctctcttgttttttttttctttttgttagaatttatataataattttatatttattatatataaaggaaagtgatattgctttttgataatattagatgaattgggtaaaggagaagcaccaatcaaggcaaaaaaaataaaaggtttgatgacttt

SEQ ID NO: 262244 - DNA, 519 bp, Cannabis indica
gagttatagggattgtgctgatgactcacgatacgaaagctgaattcgctaagtgttggtcgctctgcgcggatcgctgaatactttcctctgggcaggccagcgaggcaacctgctcaaactatgcttcccgagcagatgttccaagtggactccacgtgtaaccattcatgtgatgccacgccagagtgcaaaaattaggataacatttgccccctaagtctgtacgggacttccaaagttgcgtgtagactttatccgagctgcttctgcctttggatggggacacatgtcgagtgcgaccgtccgagacttgatgtgaggctgactgggcgtcccttcggttttcatctaataaatgctctaacatttaatatttcaaaatctaattttctctctccacagctgatggctgcacttgattattttttatttcccatattcagttttaaggagggaaactgaggcgtctgaggttcctttgaaatgattacctctttttgtgacttgcctataaat

SEQ ID NO: 262245 - DNA, 497 bp, Cannabis indica
gtgataaattctatgaaactttgggtagtgatatggcaaattcaagggaggaagaagaaagtgaaaatgtcattttgaggagtggtgatgagttggagatacttggggaagattttcagcaattacaagagcccacttcaatccaaagtagtgaagaaaaagatgaggaagcaagcattctaagtttgtcaacatttattgctgctcataattctgtagcaatttcacaacaaaactgcccagtttttgaaaaaattcagcaagagcatttttgcattcctcaagtcaaagagctcatggtaatggaatattatgtttatgaagatcctttttggccaccacctcctcctccacaactggtaccttggcatccatcatgtgtatttatcgaaattaagtcaagttgagcatttgggctattcaattccatatctcgctaagctttaggacatccacgacaaagaaccatttgtaagggcatatgccactctctatag

SEQ ID NO: 262246 - DNA, 641 bp, Cannabis indica
ttaccaaaaaataaaaaataaatgtgttaactgtagtagtaaaactttttttattgcattttcaaaactgaaacttttgaaagatagaagtaaatctcaacaactagctagtatgcagcgttccaaggatcctcccaaacatgtcatagtgggatcggtttagaggccggaaaagttaatgcccggtaatcatgcaggcctcgcaaccgatcccaaactacctcgctcgggaggttgctttcattaagatgcacaccattttggtataaatatggttgcttctatcaagatgcacatcattttggtatatgtatttatatatataagtgatactcaattccaagtttaattttttacattaagaatatgatcaacattagttacacattcatgttattaactccgctgttagataatagtgtgattgatttgcataaagagatattgcgatagaaatatgaaagttgtgttaaatatggttatgttgaaaaaatttaagtacttagataacttataaattttcactataaaaatccatgttatccaatcttccacatttgcatctagtagagcacgtatatacaatggaactaaaaattgatttagatattttttctgtaaaaatataaatttaggtacac

SEQ ID NO: 262247 - DNA, 710 bp, Cannabis indica
cccaagtctaggtctgggttcgggtttggttcttcgtctgggttctggtcctagtctgagtcccagatctagacacagactactggtctgttccaggccccgttacctgaatccagagtcaagatctggatcactgtcacgggtctcgatctggttctggttcaggtcccaggtcccatttctcagtttgggttcgagatcgagactcgggtgcgtttttggtcccgaccctggttgtgtgtccctagtcatgttccatgtttgggtctgagtttaggtttggattcgggtcccgagtccaggtttgggttgggatccgggtccgcctcccaattcgggtctaggtttgggtccaattttagttatgattccaagtccaagtcctagttccaatcccggtcaactttcggctttggttccaattttgggtcacagggtacgggttcgggtccactttcgggattgggagtgggttcaggtccgggtgttggttcgggtccttgtcagggttcgggtccaaggctgggtcccaaatccagacaccgaatacaggttttgtccaagccctgggtccagatctagatcccaatctcgggtctcggtttcgttccatttctattgctgggtcacgagctgggtcctaagttcaagtccaggtttcggtcgggtactaggtctcggtcctagttctttttcccatgtccctatcc

SEQ ID NO: 262248 - DNA, 1157 bp, Cannabis indica
aacattaaatgttatttctgatctatattaataagtaaatcggattatattgaaatgagttttatttagggcataaaacccaacatcctcttatgcatatcttggtgatgttgactaacccttggtgattgaacagttcatgcatcgtttgaggcctgcgatgcgtggtccaataacccctttgacctttaataacctgactgagtgtgtgacaacaaccttacaaactgaggctcatgtagaagagaatgataagaagaacacaagcaaacaatactacaaaatagaattttggtgtcagttcaagggacagtttttttttttaaaaaaaacctacactaaagatcaccccaactctttggtctcagtttataactgatacctataatgactttaagtgtcggtgtaaaagtataaccaagacaaaaaaaaaagttaagaagatatacatataaattgagtataaatatcaatttataaccgacactaaaagatcctttaatcttagttataaaccgacacgtatacaattaaatcaaattagtaatttaatattcttaaccatattttaaataatttgtcaattaaattttatttacttttaataagaccatttagaattaatatatttaataatctaaacattaaaaaaaaaaaaaaatattcttgcaaagttgaattaattagtttgtaataagagatatgagaaatggttgttgtccataaatcatttgttatattagaaactagggaactaatccgcgcttcacgcgggttttttacaataattttaaattttcataagctaaatcattgtataaaattaataatataatataatgacaacacaaatttttgaactcatatttttaacaattgaacctgctcagacataatattcatgtattttatctatatatgttaggatgattattagattatgtaataaaacaaaattaaattaacttaatatataaatttaataagatattgatatcgatgtatatcttggtaggattttttttcaaaaaatagctaatcatcactaataataatattacatataaataatgtttatgataatccacaaattatacactatccagaacttttatctcatttctttgagaaaaaaaataattagttaaatagtatat

SEQ ID NO: 262249 - DNA, 590 bp, Cannabis indica
atgtaccgtgtagctttccttcttattttttgggcttcattccgatagtctgggagtttcccagatttgagataggctgctattggtgtcatcaagtttggggaagtatcaaccatttcaatttcttccgtgccagtgatgctaggctcttcgaggaactggataggaaccaagttcgccttgtcacttacattgctgcttgccaattgagctaacgcgtttgcagttgtgttctcttcccttgtaatttgtctgagaccgtagcttttgaattacacgatcagatcatgtattttgctcagatatgctatcattttttctccccgagcctcatattctccggatacatggtttaccatcagctgtgaatcgctacagatttcaatgtgttcgaccttcatctcttgggctagccttagcccagcaaatagagattcgtactcggcttcattgttggatgatttgaatccaaacttgactgcagtgtgcaggtgttgccccccatgtgtgacaagggcgattcctgcaccagataactgatttgtagctgacccgtccacatgtagtttccaggtcggcttatcttcatt

SEQ ID NO: 262250 - DNA, 798 bp, Cannabis indica
tgtgagactttaaaagtcaatggagttagtgatgatgccattcgtctgagactgtttccattctcactcagagaacgagccaagagttggttgaattccttgccacccaactccattgccacatggaatgacttggcaacaaaatttctgtcaaagttctttcctccagcaaagtctgccaagttgcgaggagaaatcaacaacttctgtcagcaagataatgaatctctccatgagtcttgggagaggtttaaggatctcatcagaaagtgccctcatcatggtatagagaagtggatgctggttcacaacttctacaacgggctggttggtaacactagaactcttatagatgcagcagctggtggagcatttatgagaaagagtgtgaatgaggcttatgatctgttggaggagatggccctaaacaatcagcagtggccaactgaaagaagtcaaactaagaaggtagctggtgtgctagaggttgatgccattacaaagctgacagcccaggttgaggccctaacaaagttgattgcagtgcaagccaaacaagctcaagtggtctgtgagatatgtggaggtccccatcacttttctgagtgccaggcagatgtggatgatttgccaatggatgaagcaaaagccattggaaattattctcagaacaacaacaactatgggttcaatcaaggaggtaaccgaaggaacagtgggttctaccagcagagaaaccagccccaacaaaaccaacaacagctgcaacaacaaagtcctagtggaggctccactatc

SEQ ID NO: 262251 - DNA, 711 bp, Cannabis indica
tcttgattatagaaatcttgcctatgggtcgcaatattgacttctactggcagcattacctccgagccaaatgtcagcgagaatggagtatgccctattgctgttttctcagttgttctgtgagcccaaagtacttgtggtagttcatcgacccatctaccttctgcagcatccaacttcttttttatagtatccttcaaggtcttattaactacttctacttgcccatttgcttgaggccttgctactaacgagaagctcataataaacgtgttcctctcacagaactcaatgaatagctcgccatcaaactgagttccgtttataatatcttaatggatattccaaacctacaaactatgtttttgactacaaagtcgagaactttcttgcaggttatggaaactagaggttcagcctctgtccatttagtaaagaaatcgacagccacaactgcgtactttgctcctcctcaccctgtgggcagtgccccaatcagatcaatcccccatattgcaaatgggtatggtgaggtcatcattcttagttctgttggtggtacacgaggtatatgtgaaaacctttgacctttatcgcaccttttgacaaattcgtgtgtgtctttatttattgttggccaatagtaaccttgtcgaattatctcctttaacaagctttgccaatctgcatggtctccacaaaagccttcat

SEQ ID NO: 262252 - DNA, 954 bp, Cannabis indica
aatgaaattacacaaaaatttaaaggtataatttaatataatcctaattatccctaaaattatgaacacgtactaaagtaatactaaaccgactatttaaaattaaagctcgttctattctctataaagacctttctccttcaagctatatataacaactcatttcattatccaaatgtattgttttagaatatttaattaattgataatttgcatcttcgattatctctttcgttttctttagttggctcttggaagttggaaagacaaaacagttgggttattgtttggttaggaagaaaacccgagaaaacagccacatccaccaaaagcgtcggtccccgctagcgataaagagaaaaaatttctccgaaaattactgcaaaattatcccaaaaaaagaagggagataaaaaacttaccttattttccaaaattcgcttttgttaggagatatatctttagatatacttacaattagccattatattatttcttagaaaacacagagaaaaaacagaggaactggtaggacatctttcgtttcctgttcatttcggagagcttcttccgtggctcccatggtctttcttcttcgggttcgcagctgatgtcttcgttcttctccaggtatttgcttaaattctctttcttttatcattggaatgaatggtactgtatttaaaaattcagaatttttgacttttgtaataaccatacacacatgtctagatctgataagaatattatagttctcagatcttagttttgatttgaatctcgccattcctaatattaatgaaatttatcaaaattggaatcccctgtttctaataatattatttataaaaacgacattataaatggttgaaaaaaaagaagagatttttaattttgtttttgggtgtttcatggcagtggaagaagacgaaagtttcagctctgaacttctgg

SEQ ID NO: 262253 - DNA, 1065 bp, Cannabis indica
aaacatatagcgtgacaaattattgttcatatatttaataattcttttttattaatgagattcatatatataaatgtgtatattgaattctttattcaaataattatttttgatttttacgtgattatttattgttctttattcaaataatctcacctaataactaataatgttttttctttaattttttattgtatcactttcaaataacatagaaaaaactagcataaaatttagtatacgtgcctcgcacgtagtttttgctagtatatatataatagtgtacttttgcacttttaataggaattaccatgaataggtaatattagaacaatttgagtttttacgattaatttttttatttaattagaatttttttttaattttatattatatggactagattaattcatcaactgaaaaaaaaatattttgtttatatcaaaaaaaaaaattgcaatgatactaatttttttgttttcgttaaagggtcaatgatacaaaatttaatgcaattaatttctttctctcaataacatgtccattattagattacatttttttttgttgttcaaggaaactactaaacaaattaagatataacgtttcaatatttgatatatattttttaaaataaaataaagaaagcatcttaataaataaagtaagagagaaaaaacttgtcctttttggagtttttattattattttttggttacatttttctgaaactatttttataattataacttcactctctttctctctcttcaagatggctttgcaagtcctcccataattggctcttttacacattttctctctctttctctctcactttctctctctacccggaaaattgagcgtccttgttttctctatctagatatgtttgagtttaacactttgtgctgtctttaaagcttttactgagatctactcctactagtactactcctgcctctgtaaggacaactgagatagagattggcagagacgaaaataaagattaaaaaggaaacaactttacaaggtaggctaaacattttttatttatttatttat

SEQ ID NO: 262254 - DNA, 597 bp, Cannabis indica
aagatgggatcaaggtggatccaggaaagatagaatccatcagggattggctaagaccaaaaccagtgaaagaagttagaagtttcttgggtctgactagttattatcgtttgttcgtagaagggttttctaaaatttcaacacccttaaccgagctcactaaaaagaatcagcattttgtatgaacgaataagtgtgaatcaagttttcaggaactgaaataaaggtaaattacagctccaatgttagctctgccttctcacaaagaaaagtatgtggttttttgtgaagcatccatacagggtctggggtgtgtactgatgcaggccgatcggtaatcgcctatgcgtcccattagttgaaagattatgaacagtgatacccgactcataacctagaattggctacggtagtgtttgctttgaaaattttgaggcattatctctatggagagagatgtgaaatttataccgaccataaaagtctcaaatatatctttacccagaaagatttgaatatgagacagaggcgttggttagagttagtaaaggattacgactgtgagtgttgtgttttatgccctaaataaaactcttt

SEQ ID NO: 262255 - DNA, 703 bp, Cannabis indica
aaaaatgtaaaatgtgaatgtgtatatgtaagaaactatttgtcagtatttttttgtcactgatcgataattacttgtacctttatagtaatatgtggagaaataactataagtaaaatgtttatgcaactgtaatgcaactattatgaaacattaacaatcagaacaatattttcacgtaggtaactctatctacatgtctcatcgtgatttaatatgaacaaataattcaccattaaaaatttgaaaaataacaaaaatacacgcaggataaatattttactatagtattgatgtaattttttttgaattatacttgagttggaatgtttgggaactccagttcaactttttgagatctgcatatcatggaacgaaaaattgaagtcaagacattagttttatgcaaattaaactggatttctagttgaattttagtttcgtagtagtttttctgcactttttttttttcatgaatttgaaacaacctctattttgatttattctggtcctcttctcagatgaagtcgccggaattaatggtggttctcatctttctggttggatttttgtttcagttgcgttgggttgttctgtggttttctgaaggttgcccaggaagcatggtacctgggttgaaggtgtgtgtaagaggtatttgtgtaattttttttatttgggctgtatatttgtttatttggcc

SEQ ID NO: 262256 - DNA, 544 bp, Cannabis indica
tctacaaactaattttttaatatggttgaaataattaatcttctccactaatgtcaacaaccaatactttgaaatcaaaaggactttaacaggttataacgttaggcttaggtaaaggtagataaaaattttatttaggttcaactataccacaaactttacaaaaattgcaatccacaccaagaattatttagtattcatttttttcttctttttttcatattgaagaaaaagattgcaacatgttaaaaatttctctctaattctttttaagcttttagcttctcaaaacacaatacccaattataattttccccaaacttatttgaaaagtcatggtatagttaggacatactaaaattgactctaaaattgcatgaaaataaagctaacaagtctcgacaccaaatggttggataatattttcgtgagttttctagaggtgtcatgggggcccccaagtaggattttcttaacttattttgcctttgtaagtcttggccaaagcattaggctatttttagcataattgttggatcacttt

SEQ ID NO: 262257 - DNA, 924 bp, Cannabis indica
tatgttaacctcattttttcaacattagcatttgttgtgaatctgtggcacatttgaaacagctcttatttatttttatttgaccaccttccattccatcttggattattgttattgaagttgtggatttatttgtatgaaattctttaaacgatgagtgatcaaattaattacatctttaccatgtatagaatctatagatggttaatctataaacaattgagcggagacatcattagcttaatgacttaatgattgctataagttcccaggttatagctatttacaggatcattgattattgagttggttttatgtgtatttgggcttgtaattttgaccactacatgttgccatctctaggtattggaaaatgtctcttttggtgcatcctgataaatgcactcatcctcaagcgcatcaagcatttatcaaattaaacaaagcatttaaagagctacaagatcctgcaaaggtgagtttttttgcagacgaaatctactccagaattagaaaaagataactttctacacgatcaattttcaccgtgacatgtccttctgttgttgtcgtcgtttagcatgtaatttggtcttcttttcaatattgctgtctttttgtagcggcaagcactggatgagaaaatcaaagtaaaggaggaacaagagaaatttaaggtaaaaattctaacttcaatgttacaactcggtctgattgtaattgagattgatgtcattgctgatgtttcattttctcttcccctgctttaggttgaattacgagcaatgcgtgaggctgcccaatggagaaggacacaaggttagttgattgagggtctactgctatatttattttcttactacatgtttgagtttagtatgctaaataacaagttgaactagtacagttttttcataatactat

SEQ ID NO: 262258 - DNA, 1517 bp, Cannabis indica
atatgcgagtatcaccgtgatcctcctacaaaaacgtagagatcgattctctatgttacgagctggtcccattgacctaactgtcttgataaaccgatatagactcgcatgtcttagttctatcagcttgttataagatgtccatatatgcgactccgagaaggcgcagacatcctagactcgactagtctcaaacgcatcctaagcctgcgagcttatgcaagaatatgaacagccaactcgcactatagaagccgcatatgttgctataattagtgaattaagttggaaattgttcttcatttattgtgtttacgttttttagtttaattattgtaattcaatgtatgaacgaattgataatgaattcaatccttgtgtaaatgataggacacttgctttgtatataaaggagtgatccgccgtgaaatgaaaaggggacagaaatccttgcaatagtagactaagcagacagtgatctgactgaaccactatactctcctgtgttcattattttttccagtttttgctaagtattttgtgtttctgattcgaatactcgccattctggattgagtactcgcgtatattccctacttattattattaataatattatttatttttagtattgtaaaaattccttcaacaccaattactttggctttggatatgacaagtggattcgggattggtcttgtagctttctaacactatatttcatgattcgtcgatatttaatataaaaatttggagtatagtttgtcatatttttctcttatataattttaataaataggggtgtctactaatttttattaaaagatccttaaatgattattattgataggtatgatttgttacatatttattaagatagaaatctgatattctttgtattatttgatgcttttcaattagtgatttatgggtcatttagttaaaagatgctgtaatttttgtccttgtaaagagtttggttgcattatcttcatcttgtattgtaatttctactctaacccacttgcgcctactattattgttcgaccaattaattaattgactattattattatgtccattcaaaagtcaatatttttatttttatgagtcgtgttgttgggtccaatcatataaattgtaagtttctgcgtgtggcagccgtaaagtatttatttatttcccccatccatgaccgtacaacaacgcctagaagcccatcccaattcatattctttctttcttctttctctgcaaagtctcaactaataattttaatcaaaaactctcagcaacttcttcccaacaccctataaacacgccttcattataacaacaaccacattctatataacatatatataactctaatttctaacaatgttttccacaaaacccaattagtcattactactaataataacattaattaataagatggtgatgagcaaattttatttagagatggaacatgttttccaatattttgatgaaaatggtgatgggaaaatatcagc

SEQ ID NO: 262259 - DNA, 581 bp, Cannabis indica
gtacatactaatacttctaatgttgaaggatgaagcctcgatctatgtggactcacgtgcctaccaccagtgctgaatgtagattctgaagcaacaatgctaacaggcacaacaaatacatccttggcaatcatactcaacaaaggatatttgagacccgtcaccttccaatagttgcatgtattaactaactcttcagtcctaggtactaagttctcctctaaatataaatccagtacatacttcatattctctactcgataggaagctctaacaaatctgtcaaagttagaaagggcatccaatcgccgtgttgaagacgatattgatacattttcagtgtcatattgcttatctccatagattacaagaaaataatattcgaacagcatgaacttgtacctcgggtctaaaacaaccgccacacacataagcccgtgaatctttctccaatatttctggaacttggacatcatttgagttgccatgtccttaataaaaggcgcatctgatgacatccatgattcaatgtttgtcttaattttacatatttatgagaaaaaaatattggcagtagggta

SEQ ID NO: 262260 - DNA, 1003 bp, Cannabis indica
ccaactccccgacgtcgagggccttcttgtcatatgtggcaaaggtcttcgcccgttgaaagaaaagctgagtaggttcagtccttgcataaggagggatcctaacccactccgtgagaagctccggatgttccagagcctggaacccggacgagaagaagaagcagtgacggtactccttcacatgttttggtggttaaaagggccgggccctcattcaaaggatgggcccggaaactgtaaaagtcgtccttaaatttgtcttcctttttagggacggaaacaagttaataaaaatacagaatctctgccggactgggagagccccagccctgggcagagtaaaaaataaataagcctgaaagcaggcggtaagcttgaggaatgagatggtatggcgcaaggccgacaagtacgataaaattaataaaataatcctgaagaggaagcatggcccccgtcatcaagtgcatttggctccaagctccgaagcccccgtagttttgattaggcgtctccgcgtcctgggccggccggtggtaagtcctggaagtcgcaagcttgatacctgccaccactacgatgtgctccagctggtgggggcaagtctgggttgagtgaagctcaaccgcttcccaccccttagcacggggcttgtacccttcttgggccactgcacccttcatgacttcctccagggtggccagacgtttcccttcttttcgtgaagatttggaaccggatgcagacatcttggttctgaaaaaagattgaaaattccagcagtcaggccccaaaccaaaccgtaagtcaaaaaagggaatgagggtcccctaaccgctggaaagaggccccctccggacagttgtcaacaataaagccttagaaggttttccttgaaaaaagtcgggtgcaagaatcccacatatgatgacattacgaataagcaaagaaaaggaaaaaagggtaaaaatcgagaaagacaaattcctctctgagccct

SEQ ID NO: 262261 - DNA, 1231 bp, Cannabis indica
tgacttaggcacaaagttctaatgccaccaatgacttaggcacaaagtcctaatgtcaatggcttaagtacaaagtcgtaataccaatggcttaggcaccttgagaatagtcaatgcctctaggcttggtgcaattctctccaagtcctaatgccaatggtttaggcaccttgagaatagtcaatgcctttgggcttggcacaattctctccaagtcctaatgtcaatggcttatgcaccttgagaatagtcaacacctccgggcttgacgcaattctctcaaagtcctaatcttagcatggcttaggaacctcgaggaaaactaacacctttgagcttggtgcaattctctccaagtcctaatgctgccatggcttaggcgcacctagagaatatgtctaagacctacaggcttggtgcaattctccccacatcctaacgctactaaggtttgggaactttttagagtaaaaccaatgcctccaggcttggtgtgattcacttcaagtgtcaactccgctagcacacttaaagagtcgttcccattcaagactttattttctaattgagattcttccacctcgggaataagagcaatatcttcaggctttgtgtaaaaatctctaacgccctaacgctcgatgggctcgaacactggtgaatgagaccaatgtcctctaggctctatccaattgcttttttttagagtcaccacaacaattaatcacacatccctaatgcaaacaagataagtcttaagtcttcattgaccaaaggccgaataaaaacttctaggctaaatattatcccaattttcgttaaacaaggataaataatgatccacccactaactaacacaactactaataaagttgatgtgatatgtcaaaaagctttccaataaagttgaagagacaagacagtttataatgaaatatatatttttaaaatatttatattagatctaagtcatttttgtatatgtgttctatactatatattataaatggttttagtatggtaatatttgtgtatttgggtggtgatatctaagatttggtttcggtcgtgagatttagatcatatttataattttttttactctgcaactgtccaaaattgagggaaaagtgcttatctcgattgttctcacttttgccgtcgattgtaaacggtcgataacatttattatcgacttttttctatcaatgtctattctactcaattttac

SEQ ID NO: 262262 - DNA, 2388 bp, Cannabis indica
tattattttaatgccaattaaatctaacctaacctaggtagttacctataaatagatagtgatggctcacacttaaagattgatgaaatttcttgtcttcagaaaattgagcctcctattatttctctataggccgaaaccaccattcctctcttttcttcttgaaattttttataccttgaatgatagagtgagtgcccacacacatcaagtggtatctcaatcatagtgtggaagactgtgttagaattcatattaggatgttgatgaaacatacttgttagtaaatctagatcctggtaaaatatttccaacagactcatattaattaggtgcatgggcgccaaataacaagtcgggtatatgtttatgttttatgcttttttttaatgaattttttgactcactaatatatttttatgtgtaggtaaaagcaagattaaagctgaaccacagtgagtttagagcctagtaaagattgtatgtatacggacgattagacctgtagtgttcggatcttcacgacaacatgagctcaatttgatagttttagggactcttctgttatcttatattttgtatgtgtttaaaaataggttttgggatctcggatgttaaatattttgtaactatgatttatgtttggtaaaaaaaaataattattatgaaattttattaaatgctctttacgttcaatctctttttattagtaaaggctagcccaatacttaaacaaatatagtaatatgtctaaactagtaggatgttacataactaataacatcagttttaggagttgagcgacgcagtggcagagccaacccaacattttagtgggggcaaacaaattttttttcaagcactaatgaaaaatataatttttattgaaaaaaaatacaaattttataacattaaaataaatatatgtgagaataaaagtgaaaaatataaattttatggaaataaatataaaattatgtaaggacaaagatgaaaaaattatttttataggatgaaaatataaaatacccaaaaatttatatacaaatttatatgaataaaaaattgaggggggtcaaatgaccccacttgccttctttccctccgccattgaatcgacgtgttgatcgacgctaaaaaaattgtttttcttttgattttttttagtgtatttttaaacattattttgttaaggttattagtagggtgcatatgttaagctatggctgtgcaattcagtcgattccacaattatattaggggtatggcatgtctatctgtcatttagcataatactaagcaaaattatgttcaataagatatatgtctattttttctaagtaccaaagaggttatgaagagactccaaccaggagttaatgaatattacaatagtaactgattatgctagcctatcagtacttgaacaactgactgagtgattgattttttcatgcttcgttactttatgtatatgctatacttttcacctaaccacgtactagtaatactacaaggaaaacatcaccactttaaatgagtattgttattaggtaatagtagtatccagcatttagtataggtgacgccttataattagttagcagtatttctttaaaaacaattcttaattgatatgtattccgatacttaattacactaataggagtatgacatcgaaaagaatactacgcaccaataatatattttagcaattctcctttaattgcaatttaaattgacaaattttctccaatttatctattaaattttgattatcatgtgggaagttatgattagtacttataatcctgtgaaagcatactttttttttaatcataattaaacatataattcgatctatttcttacacttctttacaaatgttattattattgaatataaatatgtgagaattgttaagaggtattataggtgttttagattttatattattattgctataattaagtattcggtcccatataatttaagaaaataattttttaaaaaatatcatcaactaatcataaagcgctaccaataaaaagtattaagcaccattaatactaaataagaatgcaataaatatatatgccttcaagttaatcaagttgatcaacctaatgaatacctctcacatccttccccacaataataccttgaaatagattatgaatttctcaaataaaattcatgcaaataataaaaaccaccactaactgctaccggatgagtacttacacattcggacttcgtggagtggtgactcagggctagtttggcacagctgtgctgtgagaaaaagcagctgtagctgtgctgtgaaaaaaagcagctgtagctgtgctgtgaaaaaaagctcctgagtgtttggtaaatataatt

SEQ ID NO: 262263 - DNA, 1183 bp, Cannabis indica
aactggagctttttatcttgacccaaaaactcatacctcaagtgactaggaagcaccttcaattcaagttctggaggcttttcagtagatggctttagctcttttggaactgctcccaattcctcaaaatatcttctgttcaaaggcccataggaatcaagccacttcacataccccatgacctcttgtccttcttgctccgtcaattcatcttcagttagacttagttcaagaggatcatctagcagctttttctcactcaccatttcatcaatcaagtcaatgaagaaacagttatcacttgcctttgggtacgtcatagcctttagcacattaaagaccacttcttctccttggactctcagctttaattcacccttctgaacatcgatcaaggcttggccagttgccaagaatggtctcccaagaataattgggacattgctatcttcttccatatccaaaacgatgaaatcagctggaaagatgaacttgtcaaccttaactaacacatcctcaatgactcctctaggatgggctagtgatcggtccgccaattggagagttactgttgttggctttgcttcacccaactgcaatcttttaaacaccgatagaggcatcaagttaatgctggctcccaagtcacaaagtgcatttattccctcaattttccctatagtacaaggaatagtgaaactccctggatctctgagtttaggagggagtttcttctgtaggatggcgctgcactcttcagttagagccactgtctcataatcctccatctttctcttctttgacaggatttccttcataaacttcacataacttggcatctgctctaaagcttcagcaaagggaatgttaatgtgaagtcttttgaacacttccaggaatttggtgaactgcttgtctaggcttgactttctaagcctttgagggtagggtattttcacatggtgatcactattaattggtggagactgctgtggttgtgttggactatcagtagccttcgttgaagtgggtgttggggttgacattggttgagcttcattctccttttctccattcactagttgtggcatttcaggaccatcataatttttaccgcttctcagggtaattgctttgcagttttctttggggtttacttcagttgtgctaggcagattccctt

SEQ ID NO: 262264 - DNA, 562 bp, Cannabis indica
agatgaaggaatggcaattatttattaactaggcataaacttaaacaacaatcatcatcctcccttattgggaaatttagttcataataactctaaaaacatccatgattaattcagaaacaaaaacaaacataaagaagaaattaagggtaaaagaaagaaactagaaggtgatatcgctccgggtcttcaagatagcttcctctccacttgcatccactatttaggtctatttctgcttaattctgaccttcagtgtcgtattccttatatagggatgagtagtgtgcctccaattgagagaaaaatcaaaattaggtcaaaaccacgacgtccgtaccaagtcgcgactagcccttaagctggtcgcgactacaggcaaacctcgaaaatcagaggttctgccaaatctcgaagtcgcgaccagagtcgcgacctggaaaaagggtcgcgacctggctctcatgaagtcgcgactactgtagcttctggagccgaattttccaatttttttccagtttatcccagtttttcgccatttgactgaatttgaactttaaca

SEQ ID NO: 262265 - DNA, 4259 bp, Cannabis indica
  modified_base (68)..(68): a, c, t, g, unknown or other
aatatggtgtataactcaacaaattaaagaaagaaaaacatccataatagaaaaaaaaaaaaaaaaanaaaaaaaaaaaagaaagatatccataaattttaatttgtatatattacgtagcacatgacattatgacaatattttattaatttataaaaaattatagaataataaataaataaataaaaaatcagtttaacagaaagaaatgactgggccaattgacataaatcctttttggttaactgtaaaacgacatagtttaagtaacgattatccgtattaagagtccggaccccgcaaaaggaaggatcgatcctggagattgggattcctcactacacaaacaaacaatgtcttggctggcaagatcgatcgctaactcgctcaaactcgacgacaacgacgacgacgaccaccaacccaatgtcaccgcctcaaagtcctctccggcacccaataccgacgcccatcagactctccacctctccgattcaccgactcattctcaatcctcctcttcttcctccactcccacacctaaaggcgtcaaagacgatatctccgagctcacccaaaccctaacgcgccagttttggggcgttgcttccttcctcgccccgcctcccgagtcgtcgccttctcctcctgctgctcagatctccaattcgggtggtccctctgatgaggttgtacccgacgaggatgtgatcgcaggaatccgtagcgactttgcggagatcgggggaagattcaggagcgggatttcgaagttgtctagtaacaaagcggtgtctgagttcactaagatagcttcgaatttgcttcagttgggagaggaggatgagctcgaggctagaggttcagttggggttactgatgaagttctggctttcgccaggaacattgctatgcatccggagacttggcttgattttccttttgctgatgatgaagattttaggggggttttttttttttttttttttcaattttccaaaacatttttgttatcctatgaaatttgatgggatcgacttcggtttgataaatctattctgccctctttgatcagatttctctttaacaatcggaaatgatatacatttacttgttctattttgatatgcaaaattgaattgacattgctctattcagcttttttgggcaagtaatgctaattttgtaatattcatttctaaaaactgaatgtgggttatggagagttggtaacctcctgagttccatttttgcaattttttagcttaagcatatgtatggatacgcctttgtacttcatgttcattagagaaatctcttagcattattagtctattgtaagtgatcttcaactggttaattatatgttgtgagcttgtattatttcagattttgaattatctgatgcccagcaagaacatgcattagctgttgaacgtcttgcaccaaggttagctgctctcaggattgaactttgccctgggcatatgactgagggtcacttttggaaaatctatttcgtgcttttgcatcctagattgaatagatatgatgctgaacttctgtccacacccgaagtaagttgcttgctttgttgcattacttacctgaatcatactttttgttattattttcttgtatgtatgagatgaaaatttcgtttgttgaagaggatgagtttatgtaattaatcacctcgtcctatagcttgatgtaatgtttatgttcgcagatagtggaggctagagcgatattgactcaagagctacaagttcgagccaagggaaagactcaaccacagtcttcttctgggattgttgaattaccaaaagtagaacatctttctgtgccatcagttgctcaagctgaatatgtgcctattgtaacacataaacctgagtctgcaccttctgctagggcagttgatctcgagacagagaaatatccagttcagagtactgagattaaagttattgacaaggctgtaattgaggaaggacctgcaaactcctccaaatatcaaggttcaacctctggctcttcctccaaggtactggatgataaatttgaggatgacggtgatgattggttgaaagatgaggaaaactcagagatagttggtgtcagtggaacctccattcctattgggaatgacgaggatgtgtctttcagtgatcttgaagatgatgatgatgatgcagatgttcctgtcagttataagaaaaccacatctggttctgattcatcaaccaaagactcaagagattgggttcagctgagcagaggctctgctgattcagataaagaggttagctctattgaagtccgacatggtgggtctgagcaagcaccagcaaaggaaggtaatgactggcttgatgttgatgacattgatgtcatgtaattcaatcaataaacacctcttctgaaagtttgtgttttttttattattcttgtcattcatttcctatgttgtgaatagcatgtgaagctttaaaaggttaaatatcaaaaagacttggaaaactcacgattgtacataaagtccgctactggatcatattccgttcaatggatgtatttttaagcatagataaacataatctaataaatattaaaaagtgtctggttctttttatgttttcgtttattgggttctatcaatgtgcaaatcacaatagaaaaatgtacaagcattgatgtttttataataaacttctttttccgtaaattaagtttatatgtacacttatccatgcatatttctggccactggaacctaacattttatggtaaacaaaccttttttagtatgtactctttattgtttttcttcagttgaaaatctgtacaataatagatttcaaaggattaacttgtctgattcattatataaacagatatctgcatagatacaaactaagtttgctccctatttaaggacttcctctacagccttatggcacctccgaaactggaagaaaccctctccagttgagaccaaagcaagcttcccaatgagaaccttggtacattttcaaccctggtatgcgttgcagttcttagacttgtactattactatggctactactactactactagtactacttctactaaggactggagatgaaatcctggaagtggaagttttgtaaattgaaataattgatcctccaatctctctgattgccaaatccaccgtgctaagattcacatcatggcccgaagcgtcagtcacgtaaaacgacccaaatgctctgtcgttctgtgttgccacctccattcttgataaagaaaacccactttcacgaaacaccctagtgatatacgaaagcagtccaaatcgatttcgagaacataggtccagcctcaatccctgcacccccaaaaacaagaaacacttattagaaactcttacaatcatatacatataataatcattacaaaattgagaacaaagcaacacatacatgtgagattctccgctctattgctgctatcaaacacaaggtaagcttattcctctcgtcctcaacattcaaacgacgtccggtggcgtgtcgtatgaagtactcctgttcagccattgtgcctttggaagcaaccacagcatggaaaacgacataacccaagtccgtgagagcacaaaccgtgtcaaaaagaagcttgggccgatctctactcctcacgttgagaatccagtaccctttctcttcacaattctcaatattcacatgtgcgcggtcacacccactgatcttatgggtcccagtcaaagcaccgtcgcaaccgttgcatcgctcgtagtcaccgtcggcgtacatcaactggtggagtctcctctcggtgtgggttctccccactgccggaatcatagtgaacctcacacttgtcttctctcccttcacgtgatgggcctccaccacgctctgtagaaagtctcgtacctgggcctgctgtactgggtcctcgatgggcccaccttcaggcccattttctacgtggacaatacaggccactcttgtgttgtgggtccaagccactgaatcggttacgctgcagccccgttcgagaagagcggtcattatctcggacattaggcccggtctgtcggtgccggtcatttctagagctgtgtccatttgaagtggtctcactactcttccaaggcttgtgatagtggtatatgtagtaggtgtaggagcacccctcctagttgcacatattgcctgtcataataataaatatatatataaa

SEQ ID NO: 262266 - DNA, 770 bp, Cannabis indica
aatatttattaccaaaatgaaaatcctcaaactcatttggtcacttatttgtttactatttattaaccttttgtgtttatttttctactaacgtttttgtccataatcaccttcctgtggaatcgaccgtccgatctgtactacaaacctaccgctagtggaagtcacattttggacgttaatcagcaagattaacatcatccatgacgacatcttgaccagtagggagaggtttttcgacaacagttttccttgtagccaccattgttgcagatgctaggtagtttggatgggggttaagcttggcagacaaaggtgtcaggggagccgtcgaacaaaagggttatatgcaaatgttgtagtggtgcgcgcactaccatggtttgacataagggacaatacctgatcctgagtcagagaggtgaacacgtcagttaggaggagatatcagcctcttatcttgtagtggacatccggtatttaccctggggcacgcattcgactcctggtctatggtaggcttctgagagtcatcttatggtaggcgtctagtagcatctcgtgtggtctttctctaggtgtgcccttatccttgttcgatggtctttgttccttccatttcccaaaaaactggaagactttcaggttttggaagaaagctatgtctcggagacggagctcttaatctttgctgggcttgggcccactccaattttgggttgggctttcataagcgggaagaattaggcccaactttagatggcgactac

SEQ ID NO: 262267 - DNA, 895 bp, Cannabis indica
attttttgttatctgcatgttattttttgttgttgtttttatattatttagatgttattttcatgttacttttatgtagttttcgtattgtttctatggaaaaccgtaaaaatgtaaaataaaatcttttaaaaatgtattttttttttataaaaaaaatcgtgccttatgcaattatcctttcaaagaacgaatatctcaacctacacgaggtttctccaatcatggcggaataatgaggtagcctctttgacgtcatcgatgttccaaaacgggaaacatgtgaaactgtgtcattagtttgtgcgatcaatctgttagggcatggataaaattcaagacccatttaaaataatagttaagttggacaatattcggttaataaaaatagcatgtgttctctagttaaatttccattcttagtttcaattacttcaatataagagcaagtataaatcgatcccacgacaaccatgtttaatttattattcaatgtcgcataattaaaagagagaattgtttttaaagagataactaaaaaatcataaacgaagaaacacaatagaacttatattacaatttaaagaataattaagaataacttgcaaaccttacaatcattcgagataaatactgatgaatattatattgattcccaattaaattattaacgccacaaataaggcttaatggtcaataattaaatctatttattaagcaataagtcactagtacaaaaagtagcattaacgacgattctaaaaatggtttttttcgtagaccgtcgctaataaatttaaatgactagtttaaatcatcaaaattggggtattctcgaaggttttgcactcgtgagggaaattcgcgacgattttaagagtataacacgactttt

SEQ ID NO: 262268 - DNA, 1890 bp, Cannabis indica
tatatcacgggacaaaatcgtataaccctaattcgttatacttgttaaaaattattatatcaaattaaaattagatatttaattaaactaataataaatcgtcccttttgccttttgccatttatattactgccagctgcccctttatttcatctctgtggtccccatttttccacatattattaggataaacctctcacacagccaattatataatctttaatcattgatatttccatatacaaaattaatattattatggacatacttttaatgtttttaatacttttaattatttgtaaataattagaaataatactatttattattagtagtgcatttctaacactatttaattaattttaaataacagattaagatatcatcaataatcatttattgggtttgaactttgaacccctcttttcaagtcaaaaataggcgttgttatacataatgtttataaataactaaatatatcatctataagcgaaactaaaatgtttgattaagtactcaacacatgctctaaaatgacaaaactaactaattcaaagaagaaaagaaaagcacatgaacaatctacgtttcctacgttacattctataacaataaactaattgccgtgtagttttaacatcatttaataaaaatattattgcaaaatttattcaagcatagacatatattatgtaaatgattatattttctcttttctataacaataacgttgaaagctatatttacgattacggttatttgttttattatttcttttattagtcaatcattctatatgataattaataaccattgaaggtaaaaaggaagaaaaaagcaataaaaaacgtatattcctagtacataatttacattcgaaaaatagtaattatggatattcgagtatatccaaacaaaatgtgaagcaccgaattattagtcagagtgacgtggagcttggctgtctgatctacttaaccacacagaaacgtgccacgtaagcaaccaacagatactgatattcgcggcgtctcgtatgtgaccagcttgctcgcgcgtgggtcccaatctttggtacttgtctccaataattctgactataaattcgctccccgaatcgggtcttgctccacattccaaaatcccaatccacgtgctccttccaattctagctcagaccactccaatcatggccggaaacgcatctcttcgccggagatataacgacattattgactttagtgccgtagctccggcgagctctctcagcgacatggtcttcggatttctagaggaacacgctgacgagtcgccggaaagtaggttcagctccagcgacgattgtgactacggtgatgaggaagatggttgcgatgtcgaagagaataaagcgtattgggaagaacaaattaatcttcttcaggtgtgaagagaatttttcaatttcattaattttttttttgttcttttggaaatattgtttgttaaaatcgtattcgtaaatcgtttctacagacaacaatttgtagaaccaattcaatcgaatcgaagatacgtcaagctacgaaagaagcaatgaaagagacgataatctcacagtgtgcgtgcgggagatcgacggtgggaggaggagtttgccggaattgtttgcgaagagaggtctgtaaccggctcataaatctcggatacgattgttcgatttgtaaatctaagtggagaagctcatctagtatccctgcaggtaaaaaaacacaaaattcaaaattcaatttcatcgttataacaacgatttgaatttaattacttcaattggctaattaaacaaaaaatcgatttcttctttaattcaggggaacatacttacttggaagttgtagacagatcgagttc

SEQ ID NO: 262269 - DNA, 785 bp, Cannabis indica
ttgggatcattaagcatgcctaataatctcaaacatggaatttagcacaaatgtagatatattcaaaatcaagaaagaagaaatagcagttatcattaacttaggaaataatgtcaatcaacattcatcatctccccaaataggagtttagttcataatgtccataatcaaatttaaaacagcaattaacatagaaattaagatataagaaagaactagttggtgatcttgccccgggtcgccacaagtgctttctttacctcctttttcagttttaggattcaatttctcagtatttttcttttaaaacacgagacccttaaatagaaattaggttagctatctctgaatgttgaaattccaaaactatccaaaattcccgtgtttagcccatagtagcgactacataaagcctagttgcgaccataggcaaaacttaaaaattgagctttctgcctatgcctcgtagtcgtgaccatagtcgagaccatgaaaaaaggtcgcgaccatggtaaatggtggtcgcaactattgaagcacacttgtcagcttcaatagatttttctccagtttaccccgtcttttcatcaattgatagaatttgaactctaatgcatcgggaatttaaaacaaaggaaatcaagcataaaaccattccaaaagataacattaacaatgaaaacaactgtaaaatcgacccgaaactaaggctaaaaatagcctaacagtaactaacggagcaacttaaatcgcaaccaaaattcgtataacaacccacatagaaa

SEQ ID NO: 262270 - DNA, 688 bp, Cannabis indica
ttaattgatttctttctttgggcgttgccctgtggactaggattgttcgaaagaacactgataccgcgtacaaatctcttgtgtcaagtgattttattttctgcaattatttttaatattttgcttgttctggttagattctgcgaaactgttttctgccgtaacagaattacattctgctgttgtagactattccagtcatatatttattatatttctataattattaatatttgcaaaaatttggtttatcaattggtatcagagcgggacactaaactcttagtgtgatctttttaacggttttgtgtatttttgtgtaaaatgtcattttttgtagagtgaagttcgatttctagaccacattgctcaatgattctaattatccttattggaaagttagaatgagggctttcatcaaatctcaagatgagaaagcttggaggatgattctatcaggatgttcttctcctgttgttcgaaggtaattctaaaataaaatctgaactgaaatggtctattgaagatgataaactttttgcttacaatagcaaagctttacatgctatatttaatggagtaggtgaaggttataataagcttatatcgtcttgcaaatctgctaaggaagcttggtagatctttcaaactcagtttgaaggaacatctgatgttaagcgttctagat

SEQ ID NO: 262271 - DNA, 560 bp, Cannabis indica
aaatttataccgaccataaaagtcttaaatatttttttttacccagaaagatttgaatatgagatagaggcattggttggagttagttaaagattacgactgtgagatcctttgccaccctggaaaggccaatgtagtggttgattccttgagcaggaagggtcccgggcagataactagtatggttcagatttcacctcaattagcagaagacatggtcagatctagcatcaagtttattgtgggcaaacttcacaacttgacgctacaatctgatctgttagaacgaattaaagttgctcagttagctaacccagagctagtaaagatcagagaagaaatatcagctggccaagccaaagactttacagtgtcagacagtgggatgttattgttcaaaaccagggtttgtgttcctaataatgcagaactcagaaatgaaattcttgaagaggctcataccactccatattccctacatcttgcaccaccaagatgtatcaagatcttaaactttacttcaggtggagcggaatgaagaagaatgtggtagaatttgt

SEQ ID NO: 262272 - DNA, 542 bp, Cannabis indica
tgttggtctgtagggccagtcgtcagtccatgaagcagccaaagtggtgtactcgtgtataagagccattattgcgtggctgtaagggcccaatggaagctagaagcagggacattacacttgcagattatttgacctcataggtatcccatgtggtcatgcaatagcatgcatatggtattcaaagcttcagatttatgatttttttgcttgcatgttacaagaaggaagccttcataggcatttatgcaagggcaattgcacctatgcctaatcctgaacactggcctgataaaggcaaaaatccaatccttccaccaccagaaatgtttacctagtaggcccaagaatttagaaaagagaagtggatgaacctccacctggtgcaactaaaatgaggagatttgggcagtccaacaactgctctaattggaaatagcttgcaaatacaaagaaaacttgtaagaaaccaatataagaacaagtatattcatttccttagcattgataatttgaatgcattttctatgtttaagtttgta

SEQ ID NO: 262273 - DNA, 771 bp, Cannabis indica
taaaatacttagctacttgtaaatgatatttcagtgaactaatataattactgaaataagcactctatcatttattgttttaagtcaagcttgaagaaaattatcgtttcacttttaatagttatagaagctatagattccatatctatgattagcgctcccacgcaattgtactaccatgttcccaagatgtaagtgttgggtcgatccaattggtcagctttaatgaacaagtcaaagatcataaataatacatttaagccaaaacctaactatctcaagattaagatctattgacctaagatcaactaagtgatattagaaaaaacataatggtaagtttatgatatcttttctactgcgaatatcggtccagtccgatgtatacccaatacattcgctactagtatactttgctaatgccctggaaaggacattccacatatcattgtgtacgtaaattttatcgctgattatcacatcagtgtaaatccagtgcactgataaattatgggactaaatactttgaagcatataatcatgattattttccactatgtagacaatactataatcatgaataattatatgttcgggatttaatagaatttatatattaaagatataatcataaaaataatcatgtgaatcatgcaacataaaataattttttatcttttattaattagtaaatctgattatattgaaatgggtactatttaggacataaaaactcaacaaactccctcttgcactaatataaaattaaaa

SEQ ID NO: 262274 - DNA, 561 bp, Cannabis indica
aaaagagaatgtagtgtagtgtacaagctcttttcctaattaatatatatttttttttatttttgttttgtaggataagagcaatccatacttaaatgacgagataaattttctacgtgatcagtgaattgaatacgtctgagcacagacggtgcgacaaagactatgacaatattgatcagtttctgtttttgtttatactatacactaacaccaattactttcatataattaacgattaagtaagttagaatacgcagtttgaatatatttcaatttttgttcattttcaatttactttatcctaactaattagtgacaatatataaattagtaaaaattaattaatgcaggagaaaaaaagaagaattttaaaatttttccttttttttttttgtaacaaaatgattggcgaaaatcgtcattgaaaaatacgaaatttataattaaattgaaaactttactataggcgaaggtataaagttgtgcctatactactataggggacagtttaaaactgtggcctatagtataggctacggttttaaactgtggcctata

SEQ ID NO: 262275 - DNA, 570 bp, Cannabis indica
ccacgggcttcctttcccgtcaccgtcgaactttgtcaacgtcctcgtcctgtccccgccggccacaccctgcaaataagaagtgatgagatgagagatctggaaaataagttgcagtgagcgactgagtagatgagaagaggggagaagggtttttttaggtttaggtttattaaatgagaaaagaaaatagagagaaaagagtagataataataataataataaaataaaaataaaaataatgggttgatcaattttgttttttaaaacctcgcgtcgagcagtccatgttggatgaaaattacaccccaaaactaaaaaaaaattatttaattaaattattaagtatataacgtccttttattttttcatgtccacaattattggacatggtataaatttttttgtagtccattaaccttggacataaaatctttcaaaaaatattttatgtccaacattatttttgttggacgtaaaaaaggtattttagagtagtgtatacacataatatatataaaacatatatatattttaggtctctggcctatatataaatatatatatat

SEQ ID NO: 262276 - DNA, 846 bp, Cannabis indica
ggtaatagaattccaggcaaaaagattgaaaaaggtacttctttggaaaaaaaaatttacctgtttcttgaatacttgcatcatcttcgcatcaactttgaataatcacatgtttttggttagaacactttaaatatttgcacatgcatataagtttccacttagaacatgaaaaactatatgaagatctatatgaagatctcatgattttataagaatactttttgtttaaaattataaatacatacacatgtgaggacactcctctcttttctaaattacatgcacaatacgctgaaaagatcttttattttttagatgagcgatctctcagaatgtcagatattcaaatttgaaggggagcttttgcaaatgagccctaaaggagtgacaactttatacccacgtcactgtcagaagacgcggctctagagacagcagtaccgcatacatcattggatgaaatagcgcgcatggttagggagttgaacaacacttcgactttcccactcgctaagaagaagaagcgagtgataaagaggaggttggggtctctgatgaggacacacccctcaatgaccctttttctgcgtggatcttgaattaagggtaaggctgacagatctagtttctttttagaaactaaatataattcaaaccggttgtacaaaaccaatggccaggcagctaccatatatgtcttccttttactaacctcaagatcatcaaaactaatgtcgctatcatctcgattcccataattcactctggggttgcgatcccttttcaccatttcattaaagatattgtaacgttctactttaccctatatactattttttaact

SEQ ID NO: 262277 - DNA, 1230 bp, Cannabis indica
atggtctcttgcatgttgagattttacgagcatatcgtcaacatacacttccatggtatctccaatcaagtctgcgaacatcatatttaccaacctctgatatgtcgcacctgcgtttatcaaaccaaagggcattaccttataacaatacaaacctcgatctgtaatgaacgaggtatgttcctaatctggttcatacatcaggatttgattatatcccgagtttgcatccatgaagctgagaacctcatgacctgcagtggcatcgacaagttggtcaatgctaggaagtgggaagctgtctttgggacaagctttattcaaatcaatgaaatcaacgcatgtgcgccatgagttgttaggcttgggcacgagtacgggatttgctaaccagtttgggtagaatgactcccttatgaagccgcatgccaagaggcggtctacttcttccttcagcgcttggtacctcgcagggtccattttgcggtgcttctgtcggacacctcgcacttcgaggtctatgttcaatcgatgacacatgacctgtggagatattccgaccatatctgaatgtttctaggtgaaaatatctaggttttgtttgagaaaagtgacaagtttttctcgctgctgaaaagttagtttagaaccaattttcaaaaatttattgttatctattggatcaataggtacctcgatagtgtcttccgcggcctgggtagttgtggcatagtcgaggatcctctgatccgaatctggctcgtctttatgcggcacttcttctattttgaagacctcctgacgaggaggtggtgcctctagcaaatagatgacattaactgacttcttttcagggagtttaactgttgtgttatagcattctcgcgagtccgactggactcctcgtacagatcctactgctgcgggagtagggaacttcatcgtgagatgatagatagacatcacgatcttcatgtcctttaaaataggtcgaccaattacagaattgtatgctgagtattggttgattactacgaagtcagccattgatttggctactacgggtgcggttcctaaagtgattgggagcttgatcatcccctttaatgcgatgacatccccagtaaaaccatatatacaggatgtgacaggtcgcagatccttctcatgcaaccccatttgtttgaaggcttggaagttcaagagattcacagaacttccattgtccac

SEQ ID NO: 262278 - DNA, 826 bp, Cannabis indica
tttagcatatagcttatgatctcgtaaccgttgcaaaactgctctgagatgcaactcatcctcttcttctgactcagagtacaccaagatgtcatctataaacacaattacacatctatccaggtagtccttgaacacccaattcattagatccatgaatgccgccgcggcattagtgagtccaaaagacatcacaaggaattcataatgttaataccgagtacgggacgcagtttttgggatatcttcctctcaaattctcaactgatgatagcctgagcgaagatcgatcttggagaagaccgtcttccccttcagttgatcaaatagatcatcaattcgaggtaaaggatatttgttcttgatggtaagcttgttcaactcccagtaatcatacacattcgcagggttccgtatttcttcttcacaaacaataccggagcaccccaaggtgagtagctcggcctaatgaatcccagattcagtagctcttgcaagtgtatcttcaattcttttaattcagctagagccattcggtatggtgctttagatactggatccactcccggaaccaatttaataacaaattcaatctcccgggtaagtggcgatcccagtaagtcttcaggaaagacatcaaggaactcgcataccaatcttgtattctcaggccctgatgttacaggttagctggtatccactgcagtgactattaaggaactcaaatactagtctgctatgttgatgatttagtcttaaaagaaacttaaagtttcagactaatacaataagtcacaactagataactctccaaacaataagaggt

SEQ ID NO: 262279 - DNA, 619 bp, Cannabis indica
ttcatatttaggttgttaaattaacatacttgtgagtagatctgagatcccggtaaaataattccaacatgaagatggcttatgcttactctcgaggcaagtcggtcgctgtcaagaaccttgccacttctaacacgatgcgaagggaggtggacttggccaagaaagacgctaaagatgcatggacccagctcgaggtcgtgaggaagaaacttggagagggaaataagaaactccttgctactgagaccagggttgctgagcgaccaaggagctgcaggatgcgccatcaaccgcccagcttgaggtggacaatctttctttgtctcaggaaattactagtctcaaagctgagagagagggtctccggactcttcttcgtaggttggaggatgaggccaaggatatgaagaccagggaagatgagcttgaggcaaaggttaagagccaaaagtccaaggtggagaagctcgggaggaaaggggataccttagagacacctggtctcgagattttttatgacttctagaaggccaatcccaaaggaaattttgattaccttggcacttccaaagacatgtttcttgattactgcatggctctgttggaaattatttta

SEQ ID NO: 262280 - DNA, 1813 bp, Cannabis indica
ggtaagggcaaggctaaggctaagcagccgtgagagcgggcagatggagattgtacatgtcgggggagttaagcctggagcgtacggtctttgagacatcaaggtttattttgtatagtcgctaggcgacaaatttttgtatatgcatagtgaaacttttgtaaatagaatcttgaatttatataagtatattatttaaacgtttttaattaattaagcaaaattttaattaatcacgattttcaataaactcgttgattaacaacgagttgcacagttagttaagaattacgttattatgcctaagatagatagggtgttacatttatgttacttttataggttttttctctatgtttaggtttatagtacaatgggctttagaaaatgatagtgagcccataaaccaacctttggccgaaaatacaagtgtatcatatgggtttgatttatgtcattttatttcattaaatgaaactatctttttttttctaaaataccatttttcttctctaattatttaaatgctaattttatctacttaataattaaataattattaaacaaaattaccatttaaatctatttattaattagactcttcatagtctcttaattacaaataaactctttctctttattttcttctcaaataagtcattgcttagtgaaatttataaataagacaaagtcatctttagaattctaattgattaaacaaaccaattaattgagtctacaagataatattatctcagatagtgtggagactatgggcttatgtaaccaagctctcaataagtagttctagaatatatcgagtaaattttctatcttattaattcctcttaactccactcactactacaattattagtgttcgcatcagtcctaaaaacaatttttttgggtgaccatcgctaaaaaattaagcaattatttaaaactgtcaggaaaaatggatattcccgactatttataacaatcactataataataggcaacagtttttatttaaaatgacatattaaaatacacctatactcgacggttttaaactgttggggtattctggcacatatattttttttggaaaacataaccccatatactatatagatcaaaacctaacaaagaaaatcgcgcctttccatccactatcgaactagcagccacatcaaagcctcccacaacccacatcaaagccacggtgacgtcgacccaacaaccactacaaaacctacaatgacttcgaagcctctatccctccgtcctcctccccccccccccccagacgacatcgaagctgccccattggaaacccacatcatcaggcctcccacgaacccacatcgtttcgtcctccatcggagccgctcccattgctccgtcctccccaccacggcgacatcggagcaccaccaccccaccggtcttaggtataaaataatatttatttatttattttatttatactctaaatatatatatttatgtatttatttttatatatgtatatatgtatatatttatttttatatatttttataagctgaatatatgtatataaattgttatatctgaaatttggctaccatttcaataaaaaacacgtgtaaaattggaaggagtaggtgtaactgttggaaatattttaccaggatctagatttactaacaagtatgtttcattaacaccctaatatgaattctaaaacaatgaaataaacacacataaagtttaagaaaccttacattgggtgtagcagaatataatgactccttccgttcagatttctagcccttgattcctt

SEQ ID NO: 262281 - DNA, 1017 bp, Cannabis indica
tggggtgtttctcaacccaactaataaattgctcaatcttctcctcgattttcttttcaatttccaaatctccacattggacctataacataagagatgtgtgaagagaagtacataaaatacctatgacttacataaacacgtgagaacttcatttgatagcacatagaaatagcagccatacaagtaaaagtcatctagttgtaagaaaaagatagtaatcatccaaggaatatgtgttgaataagtaagaaattacatatgtgataacttataatcataacatagtaagactactacaacaaaatataagcactatcaatgatgaaaatacaaaattgtatcaaaaagttccaaatcagcatctttgggcctcacaagaccaagagctcgatgaaacaaaattgtatgaagtatgcctgcagtcgatttgaagacaatgtaatgaggtaaaaagaaaacacaaatgaaaaagtattaattcaaaggtagacatcataactttaaagactaagaagacctcaacaacaaagaaaggccactgtgcattgttatatcatctaaacacgatggccaagtttctagaaagtctccgaagtattaattaccttggacagccaatttgaaacatctcttcttttaaaagaactaaagggtgacaattcgaaaaaagatgaagatatcagatcattgcatttgaaattaggagttctacaagagactttgaatgacgaaaacaggaatagaaatctcaaacaattagaaaaccctgaaactgctcattgtttgatctcatcctcactgacgataatccaaaatccttggcagaaaatgaagacatcaaggcaatcataaccgatcaaacgtgtacattgtcagcaaccgaagagaaatttcgaacaaagattgacgaattgctggagcaaaaccttgaattttggctaagattcagcagcttcttccataggagtgccacaaaagggattgaacatcaatatttgatcgttcaatgggatt

SEQ ID NO: 262282 - DNA, 649 bp, Cannabis indica
ttatatattatttatttttaaggttagttattttaatattatagatattttaaattaaagaaatctttatctttttaatttgaaatattatattaaaattaccttatatgataaattaaataattaataaatttaaaattaacctagatattttttatacatattctaaccataatattttcaaattcaaaaatttgttattttgttaaatatttaattgtttataaattataagtaagaaaaataatatttgtgctatttttatatcattttacttattagatatgaattgtattttaaatatttaaataacttagatatttttgtagaaatttgagtaatgcttaatttgaaatattttgatatataattagaataattattgtttatttattattttattcttaaaataataattgcctaaccatatctgttttaaaattggtttactttattattttaattttattaaattataattgattaatgaaaaccaattaaatgagtcttacaagtaatattatctcaactagtgggaggaccatgggtctatataaccgagcttccaataagcagatcaagaatttataacctaaattcactgacttattaattcttcgttgaatacacgcatagaacttagaattgc

SEQ ID NO: 262283 - DNA, 889 bp, Cannabis indica
ttcaattcttactttaatcaaaactgttcttcagctttcctcttagcttttttattaaaaaattgcttaagatagtatatcattggacaagaaagtttataaatcatcgtattccaatgatggtggtgtccgaaacattcccaaacttatatggcacaggatgtccgtcctcgaggaatctctatcccaaagcgtggaaggttttggagcatggaattggtcatatatctcgtgtggagcctgccttcctctcagaacatattttttccaattttatgttaaagttggaattgtgcatttccaactccttctagtctcatacaaacttctttctggatggtttgtattttgccaatcttggggcaaggctacctaaccccagacgagatattgtatttttacgaactgaagtcactgcccatgtgggggcaccctacaaaggttaggttttatcacctctagaagtacaaacgcacatgctatcaaacaagcacctcatcacactgcccatatctgtgagaatactagttctttacagtaggcttccctctgaaatgagtcccagcttgttcattggactttaaaatcctaggtacgatactcatcgttctacaactttttctataagttttaactaaagctctatctttgtccctgacttttcttatttcttatagaatcgtccccaaatctaagctaacagacgaattgaaatagtgaacaaccttctatgaagctttttcagaggaactaaaagtggaggatttggtgaccattgagttgttgcgccaatacagattgatagcaaatttctagagcatccacggtgtttgtcacaccctaactagcataggcgtgttaacgtgctttttaaacgtactgtgcagct

SEQ ID NO: 262284 - DNA, 1034 bp, Cannabis indica
ttggggagctctgcttccaggatgtgtttggcacatggctcccggtcctcacagtctgagtcggagtcgtcgcctttctatctccgggagactcaggcgatttcttttcaaagtatggccagttccgccatgatcccttcgtttaacgttcccgtggagaccgcgggtccgtatttcttttggtcaaggtgatcccagaggtcaccttggttcccgttaatctgattcctcagatcaatgggaggaaatttctgtccccttcttcctctccctccgggctcttggtgcacggaaacgctttctcggtcctctcgatcttgagggccaagactccctttttggagttttccctctgcggacctttccccttcgggaaatctgagcggacctttcgcggatcctgcatctttttctttttcccgggggtagaagtagtgtttttcttttggttcccttcagcgggataccttatagggcttggttctctacatttctacttttgggttcttggtgaggattcctctggttcctttccaagcccaacagagatggctttaggatgcacgtggattcctgctacctccatggctttttgcatggccagcatcacctcttgcatcttttggttttgcaccttttgagctgcgatttcaatttcatgatcgacagccttttgccttaagagtaccaattctgagtagctgccttcgttgtaggcgtactcatcgaggtttccctcgtagtcatcatcagggattccttcttcttcctcataacccatggttgctcttgaggccacatcctcgtcatttaaatcttgagcatcttgaagagggcgtggttgacgtgtgcttcgggtctccaccattattgtgttgctgtaatgcagtgtgtgtttacagaccctttgttctgctctcaatgaaagaaccaaaatgttgaccgaggttttcgacaaccaatataataataataatttagagagctgtaagaaataagagggaggttttttacatggttggggcgttaatgag

SEQ ID NO: 262285 - DNA, 582 bp, Cannabis indica
gggcattccccacagggcgaggaggagcgaagtacgcggtagtagctgttgatttcttcataaaatggacagaggccgaacctctagtttccataacgtgcaaaaaggttctcaaatttgttgtcaagaacatattttgtatatttggaatacccattaaaatagtatctagcaatggaactcaattcgatggtgatttgctcactaagttctgtgaaaggaattaaattattaagagtttctcgtcaatttcaagaccacaagcaaattgaagctgttaataaaaccttaagaagttagacgctgcaaaagagagatgggtagatgaaccaccacaagtactttgggctcacagaatgacatggaaaatagcaacatgacacactccattctcgttggcattcggctcggaagcaatgctgccagtagaagttaatattgcgacccatagatgtgaattctataatcaagaagaaaacaaagaactccttaagttgtcattggatctacttgatcaacaacataatgagtcgcaagttacaaatggagcatatcagcatcgaatcacgagatacttcaaca

SEQ ID NO: 262286 - DNA, 1458 bp, Cannabis indica
ttcttattcctatgtttttattcatactctcttcgtagtagtttctttactatatatcttttaaaatatcatattaaaattctatttttttttttattttatctcacatatttacattatactatatattaattttttttatatttttttctatcatctaaatattatatttttatatattttttattaattaaaacaaaaagacaaaaaaaagtaataaaataattaaaaaatattttttggaaagaaaaaataatatataatatttttaattcactccaattactattcattagctgcatgtaactaatgagttattttaacttactatttactaaattctttaaaattttaactaatatattgagaatgcatttttgtgaatagtattatgggctacacttacttagatgtggtaattgtgttaatatatatatatatatatatatgttgtagtagtgagtgagtgattgaggccgaggctagcatctttagaatgattgagagagagagagtgagagaaagtgggtcccactctctcactcctctgctctgtcaatccacatgcgctctctcaatgccctatgcactcctcacttattttaataccctttattctcattctcacccattgtatcaccaaattctactatactacttatctctttaccaccccttatcaattttatcctaactaaccccttttctttttttattttattttttctttacaattcctgctccctctcttttcttgtttctttccattatatgcctaaaatcttatttttcacaactaactccacgaaattcctaagaccacttttatttttattatttttttaaaaaaattatcaacatttcatactttttcattcaataaataaataaataatacttttattttatttaacattacaacatacaattatttttattcattaaattagcatactaagtcatttacaataacatgaaaaaaaatactctaacaacaactttagttagggatccaataaattatcagcaatcaagcattaaagaagtatgaaatatacaaggcttccaaaccaaataaataaatgacagaacctacttatcagtgactatcaatcagtgatctctcgataaaaattaggacataataatctattatttaaatcataagtaaaagaaataacacgactaaccatgttgtgatgcttaatcatgaaagattggaacacataacaattggccaataaaaatctggagatctcccaaatcagacgattgaggatataaaccaagatatcttcaccgaatcaatttgagattatcaatgaaaccccaataaattaataagagacaacacttgcattttacatcagaccaatatcaatccttactaattagtagggcagtgaaaatataatgctattatataaataaaacaaacaagaaataacaataagtaaa

SEQ ID NO: 262287 - DNA, 1294 bp, Cannabis indica
taaaataaaggatagttgggatcataataatccttattttattcattatttttctctaaattttaattatttgttttgtttatttactttactctaatatttttattaatcaaatagaaatgaagaattaatgaattggtaattgatatcctcgtgggaacgatactctactttatcattatattacttgatttaattgcgtatacttgcgtatcaattttaccgaatagtaactattggctacaagccttgctttataagtttcaaccttccctttcccattttttttctttttgtaatctatttacaccctatagttgtaatgaccgcatgttagaatataaattagtaaagacaattaacattaattgttgacatttttataattatgcatgattttattatgttgtgggtcccattaatagaaatgggcattagagttataatttttcaattcaggagactttatgaaattctaagagtattatttatgttaaatataaattttgcaatttttatgatttttgctcaatgacgacgaaaaaacaatggatagccgttagagtcacatgagtaagtttagaacctatttcttagtggggcaaacataaggaatatttttaatgtcgggtttatgcggggattatggttttgaccattttgcccctaagccaataggaggcttaatgtgtaagcaagcgtattttaggaattttgttattaagtctataggtggctgattagttgtgtgacacctagccactaatttattcagcctagattaattgatttttaaagttaataaattaggaaggaaaataaaaaattagaactagaacctccccattctttctttcttgatcggctcccacataaccagaaaaatcaacccaaccgaccatcaattttctaaaattcacaagggattcaaggtgatttaagtcgaggtatgccctagaagctcttattttatgaattctctaagttctagtaggttatggcatgcaattttgagttttagaggttgttaaggttagaattatttgtggttcaatttctaggttcaatttgagttgaaattgaaatcttgatgctagttttgttgtgaatgaacaagtttgagtttgaaaactcaaacttagtcattaatgacatttttggattgagtgtgtttttcttgctgctgttgcatggaaaatattgtttgaggttattacaggtgttctggaagctttggtatggtttggacacgatttgggcaaggtttggatttgtttggggaaacctggtgcaa

SEQ ID NO: 262288 - DNA, 1245 bp, Cannabis indica
tatatatatagagagagagattacacttataaaaaaggtattgtagttatatttttatatttattatgagttgattgatcagtacaatacaacgtggaaccgtttaatgtttatgatatgtccgaggctggaatctagggtattagcgtattgttgaaaccaacaaaaatagagttcaaacaggcatggcgttcgcttcacgctgctaactcaattacttcttttccttcccttttcttattttagtaaaaacgaatattctgagtagaaaatattctaaaagtcaactgtccaatccttcctaagtacgtagtaaaattataataataacagtttgctctctggtaaataatcattggttataaataactcactctcctcacaggtggaaagtcgccgttgaaagtgacgtcgaggcccaaacgacacgaaactatggaaaatacgtggaaggcgataacggaaggacgttcgatgccgttaagtaggcacatgaagaagtgtgagtcctttcatgaaaatcacggccgtcacgtgggtgagttagaattaccgtcgtcactaccgttattcaagaagtcagagactttcaaggaccgaaccaatcaaccagcgccacctcagcaagaaacgtacacgtcatcacctgtgccaagcaagattaggagggagccgtcgttgggtcaagacgagttgaacaagcgagttgaggcgttcatacagaagtttaacgaggaaatgaggttgcaaaggcaagagtcgttgaatcaatatatggagatgattaatcgtggaagccattaattatatcttcatattattactcaaaaaaaaaagatacaaatatgattaatgggtttttaaatcttgttaataggtcctataccatcaaaatttgatgaagttagctttatgatcataaagtgggaaaaaaaatgggagatgacggtttacggttttgtttttgtcatacaacatataattagaggtttggtatggttttttatatgtgaaaaggaaaaaatgtctataatagtagaatactgaagtggtctttcatttttttaatggttggtttgttcatctgtcaatgaatgattcttaaatcattattattatatgtataattttttttcttgctctatagataattattggaaaatttatgtatacatttttttacatatataattacgttctgttatgtacttcagatcttagatggtgacctaccttgtatatgct

SEQ ID NO: 262289 - DNA, 587 bp, Cannabis indica
acatgtaccaaattatgccccctcaacttttaaggtcgttaagatgccccctgaactcctgagattgttagatttaaggacatttgtctaatttcattcaattttactatttcagtgattgttttgttattttacaattgttttaggttgttttataaaaataatatttttgtaaaaaaaattatgtggcagtaaaattgtaaacttttacccaaaattcattattttttataaaaataccaaaaataaaggtattatttcagaaatacacaaaacaacaaaaaagttacaaaaatacagtttcataattttttaaatatttttacaattttttttattttatttacacaaaatacagtctttttgtgttgcactattgttaatttattgttgattttttattaatactatgttattttttgttgttatttagatattacttttaagtagttttcttattattttggaataattacataaggcaccattttttgtaaaatatttacatttttacgttgaaagaatgtttttttacatttttacggttttctaaaaaataacacgaaaacaacataaaatcaacaaga

SEQ ID NO: 262290 - DNA, 1709 bp, Cannabis indica
ttttgatttcccatatcgtttttgaggcgggaagctgaggcgtctaaggtttctttgagacaattaccccttttcgagacttgcctataaatacccacagcattggcacataaattcatttcataacccttctttgctaagtaagctttagagcgaaaagaaaaactttgtggcttcaaagttgccgaggtgcctttatacaactgctggttggatagacgttgctcgaacccagacactcgaatcttgagtaagtattcgatctcctttatgcttgtctttgcatgtttacattttgaatgcaactttcactgtgctgtagaaaaatgcttagaaaaccctagggttagaaacttctgcgattcttctttaccatgtcttcatgtgggtttacaaccataaagcttgtttctgaactgcattgcgtccgtctattatcttgcttattctaagcttcatgaacatttttgcctaactcaagaaatttttttgacttctttagttttgacttttctttaaatatagccgttctttaatctgttgagtactcctggtcggcatattttcttttttatcgttcgatattccgaccaacactcatctcgtgtgttgtcttttgtagatgaactcaggcgagtcttgggaactcggacatcggatcgaccaggatttgcttcaacttctgcacgaggatcaccctcgtctttgctctagtcctccttctagcgaaggacattcttctgaccttgtacccagccataggatgatggctcgtacaaagaaaaccacacgtctggctgacgcttctgatcctcaagtggctcggcttgccactctgcccagcgccgaacaagattcggccgtccagatggaggaggatcgtgacggggacactaaagtccaggaggttgaggagctggacgatgtgcgtcccggcagtccctccgaggcggagggagaggaagaggttgaactcccaaattatggggggtacaatgaggctgggaagccactcgatgctgacggagacgtcctggtcgagggcgtggactacggcagtgaggagcttgccgcggcggttcctcataaaaggcacggtgccttgggcgccagatgggtaagtcctctgtccaagattacggaggcgcgtcttcaaagtcttgactagggcgggtacctaggtgagttggactgctacattctcgctcacaacaatcgcgccacaaatcctaacaagggcatgtgcgcctggtcgggggcccatggtcagcaagcagcgttgatgcccttgcataagtacttcaaggatgtggctgacttcttcggtctctgcccagcccaaatcactcctaagggcattaagtatttgtctgccctcttcgtcctctacgcttcccaaggatggggtactccttctcctcacgaggttacctggttcttcgatttgaagtccaatcccaaacaaggcaggtcggggtacttctattcctctcagccaggcttcaagtggttgaccagcacggatgacaatgccatcaacaaaatagggcattttgctgatgagtacttcatggtgaaggatctgagcattacccggactcggtttcagttgattccgacatatcaccgtcctcccctcactcttgctcttagggataaagctcaaaaacttgctcagttgtcggggaagactggaatattatccagtt

SEQ ID NO: 262291 - DNA, 1424 bp, Cannabis indica
agttttgtcaaggccattctccaccatgtttagctttccccctagttttgtttccctagttatgagatgcatatcttcagtcaattatcgtatctcaattagcggcaacctttctgagagttttacctctactaggggaatcatgcaagaagactctctccccccatacctcttcctgttagttactggggggctctctgcagccatctgagtcaaggagcaaagtaatgatttctctggtcttaggatatgtagaagtgatcttatgatatctcatttactctttgttaatgatagcattttatttacccctgtcactaagagatctagtactaccattaccaacatttaaaccatttatcacaaggctactgggcaatcggttagtctggctaagtcttccattttgttttctcctaataccagcaaggaggctaaaaactattttagaaactctttaggcgtaggcagtgagggctttgtgagtaaatatcttggtgttccccattgcattggtagaacgaacaatttgattttccattatcttgtccagaatgtagcttccaaaatgaatgtttagaatgttaaattattctctatagcaggtaaagagaccctcattaaggctattgtccaaggtatcccatcccatcctatgtcctgtcttgttttaaactccccaaagccacctgtaaaaccctgcaaagacttatttccaagttttggtggggatcatgcaacaataagaataaaattcactcgaaaaactggtctactatttgtgcttctaaattttatgaagccttagttttcggtccctaaccaatcacaatcaggatttaattgccaagcagacttggagaatttggactaacccttcttccctgcttcactctctcattaaagccagatatttcaggaacaatgattttctcagtgctcctaaaggtcacttctcttcgattacttggaggagcctcctttgggggagggaattactcaagaaaggccttgtttggaaagtgggaaatggtacgtccatctctttgctcaatcctaattggattccaggtttgaagtctcttacttttttgaataactttagccttgatgatcacaatgtctcttttttcattgacaatgatagtaattgggacataattagacttcaacaatttttacctcaatattaggtaaatgtgatatttcaggttcccattgatccttcctcgaaggatagcctcatctgggggcaccatcattctggtatcttcactgtcaattcaacctatcatttagccaattccgattccatgtcaacactaccctcatcttccaaccctcactattttaaacattggtggaaaactgtttagagcaccaaaaataaaacactttacctgaaaaaaaaaaaaaacctttaa

SEQ ID NO: 262292 - DNA, 642 bp, Cannabis indica
ctttattgatatttaaaagataaagactacattgaaatagaattttatttagggcataaaacccaatagtgggtacaccaaaaagtactttattgcctatggcctccgtaggattgggcactacgaattccagctagtgccattcttcagacgccctatccctactttacaaataagggatatcgaaaatcacatcttgtctcttcgactaaacagagaaatataatttggttgaccagtgtggcctatttccagaagtacagcttgtatcctcctgttctcgaagttacaagagccccatctgtagatggggcctgccctagagatggccaaactcttgacttggatgatgaggtacctttatcttgcattgcacagaatttggagaagaaagagaaagctatccgccagcgcctggccagcagtggtccagtggtggtgcatctttccatatcggacctagaggccacacttctgagagacctacctaccccgtgcccgcatctagggcaagggcaaggctattgttgaggactctaatcgttcctcttctgatgatgatggtatttgatagttgataacatcatgcttttgttattgtattgaatgtttatggttactttctgacttttctactttctt

SEQ ID NO: 262293 - DNA, 1176 bp, Cannabis indica
gagtgctgttggtgtggtgaacagggaataatgtgttgtgagtaaattcttcctcattaagggtaacatttctagacacatagatacgaccagaaggatgtagacatctatatccttttgaggagatactatacccaatgaaaagacacttggatgatctaaaggcaactttatgttgttcatatggtcttaaaagaggaaagcaagcacaaccaaacactttgagcatgttataatcaggtgtttggtgaaaaagcttctcataaggggagatgtagttgagaataggtgtgaggagcctattaatgagataggatgcagaagcaaaggcttcccaccaaaaatgtaaaggcatagcagcttgtgcaagtagagttaagcctatttcaactacatgtctatgctttctttcaattcttccttgttgttgatgagtgtgggggcaagaatttctttggacaatccctaaagatcgaaaaagagcatatagaggttcaaattctttgccaagatcagattggatgctttttatttttgttaggaaaaacctgtcaacaaatttattaaactgaagaaataagccatgtacttcagattttgctttcataggaaatatccaaacaaatttagtgaaatcatccatgaaactaacatagtatttgaaaccatcattggaagaatagaaagagggaccccacacatcagttaagatcaactcgaaaggctgagttgttttattggctgttcttttaaaactcaattggtgaagcttgccaatttgacaagcatcacaaaaataaaagtgtttacatctttcattaggtacaacagtagataaaattttgctcaaaataggggaagaggggtgcccaagtcgacagtgccaaatattggcagtcttggatttggtgtagactaggttactggttgttgtatgattaaaagctgctggtttgttgacttcaaaggactgtggggagcttgaaaatttagaggaagagacttggagtttgtagaggccttcattgagatggccctgaagaagaacttgcttggttctcttgtccttaataagacaacaagaatcacaaattcaagaataacattgttatcttttgtaaattgtgatatgctgagcaagtttttggtgatgttaggaacatgaagaatatcttg

SEQ ID NO: 262294 - DNA, 649 bp, Cannabis indica
tacgtttcctaataaagtaaacaagataaatcacaactattccatttctaaaaaaatttagtaaacaatatattacaaatattgattccgattatttttcatttattcagttacatttctccattaatttattctgatcctgattactgtatagtaaacgtgtcataagttacaaaattaagtccctttcaatatgagtgtttaacttttttttttttttttttgtgaatatatgagtgttaaacttgcttcctaatcatactgttgtaatgtggaatggctttcccattctcgtgagaatgtgatttcttgttcatcctcaaactcaacaaaagaacatataaagcaggcaactcaagcgatcaactcggtgaaaacttactatgtatttcatgtgggctagttgattttgattacaccaaattagtattgtaaatacggttcaaattttttgacacgatacgaaatcgacacaagttcagaaggcacgagcacgactagacacaaaaaaatacggatttgagcacgacacgacacgatactacaaataaacacaacatgatacgaaaaatatatccttaagcacaacacgacacgatactacaaattgacacgacatgacacggaaaatatatccttaagcaagata

SEQ ID NO: 262295 - DNA, 805 bp, Cannabis indica
atcatgattatattccactgtgctgacgatactataatcatgaacaaatatatatacatatatttatatatgttctggacttaatagaatttatacaattaaatataatcatgaactaaatcatgtgaaccatgcaacataaaacgatttctgatctttattaattagtaaatctgattatattgaaatgagttttatttcgggcacaaaacccaacagctctagcttaaagatttaatcctttgtacccaactcgtatatggtttctctagccaaagtgttgcacctttaaggcgaatccatctacccctcactgttggacaagcttcagggagcataactgtgatgggacaattcctgataattgatgttccatcagccttcaacgtcatgttaggccaatcgaccctatatgactcgaaagctatcacatcagtttttcatttgtgcgtcaagttcccaacaaagaatggggtagggtgcctcaaatggaatcaaagaatagcacaagaatgctataatcttgccctgactaaggtcaaaaaggaaaatacctccagccagagctcaagcaaggggaaaagtattgcgcaataggaggtcacccaaggtggggacgaggacgtggatcccaacttggggaaccaaatacaaatgtagggccggtggaagagctagaagaggtagaaatcgacctaaatatcccgaccaggaaactcaaaattggcaaaggtttattgctcgaagtaaaattagctttaataaaatttctaggagcaaacctagaaattttttcctggtcaca

SEQ ID NO: 262296 - DNA, 738 bp, Cannabis indica
tattatttatcaaattatttgttatttttttattacaaggatttattaattataaaatttatcacttattcaattattaatgatttaaactaattaaagttatttataattatgtaattatttataattattttttataaatataccaaaaatctttttacttcaattacttaattttaggatttatttcactaattttgttaaataattatccatttaaaatataacttgttaccatttttataagaaactattaacttattataaagtattaaattaacataatttttttattatcccaaaattttaaccatttttttttattatttttattattgattaatattttttttattattaatctaactatttattaatatttttattgtaagaatttattaattattaaactcattacttattcaattattagttatctatttttaactaataaaacttatttattaaatatttaattatttattattttaggatattttatatattttattaataccctcggcctcatctctatatatgtgagcttattcttttttacttcttgtcccacttctcaagaccacaatgggatatatgtaaactatatatgttggggtggaacctcattactaaacatatgctaaacccttttctaattatgtgacaatatcatagctttttatgttcttacacaagtcattcatccattttttttttccttctaaaaaaaaaaaaaaa

SEQ ID NO: 262297 - DNA, 3236 bp, Cannabis indica
acaatatttcctaatgaaatataactatttatttatttatttatgtgttttgtaactttttcttcaaatttggggtatttttgaaaattctccaataatatttcaacaccgttagacacgtttgccttgttactaagtttaagaaggcacaaacccaaagctggcgaaatcaggaacaaaatcaagagaattcgaaagctaatccgaggtatcagccatggcgtcgccaccaccgtcatatcctagtgctgcgagaatctccgactctccttgctttcctcaatatactgcttctcttaaatgtaagtcacttttcctttatgatttgttttctgtcttgtaatttttatcgtttcgtagcccttaatccagagttcaattcctattcgaaacactcacaccaatacttctccttttgattcctttttcttaatgtaatttttcgcttattattagtttgtggacattctattgaatttcgtgtgttttcttaactaaggattgagaaccctaattttgtgctaaatcgagtgtttgagaggtttgtgtttcatatgcttattgatatgtgttattaatgaacttctctaattaattacttttatgatcattatcttatatttttcagtgattttaataagaaaattaattttctaaactttatgaaatataattcttaacgtggaacaaagaatttcggctaatacaaaatgtttttgggacgtatacaaattccaaaggtagaacttttataggactaaatttgtcagtatgcttgattttgtagcttcttgaaaattgtagggttctgtaagaagaacccaattactgaggtataagctttaggaaaagattaaagatcctatctaagctactttagtgctgataatggtactcttagttagggcttaacatttatgtgatggaatgttgaaccatgttgatcttaagcattgtttgaattagattggaagaattgtttaatctttctttgatcttggatactaaggaaagatcatacaaaaccacttacattgctccttaattgtaatgatagtaactcgattggtgcaatatttgcaggtcttgaggaatttagcactgacaaaagcaaatgccaagaacattttgatgtttacaaggagtgcaagaaaaaggaggttggttctttaagccattgtagtttttcactttggtagtgctgttctcgaattgtttcaggtgttccaaactgggtaacgatgtatgtttccgaattttgacagagggaagctcgacttgaacggaacaagactcggtctttgttctcatgaactttcttttgctactcacattccattagttcggactggagatgaaatcaccatttatggagttaaattataccaaaaaataaataaataacaaaacaccttgaagagtagaacacatgggaagagccttcctttgaatttttttgtcctctttttctatctattaatattgtcatttgtcatgccctgttaaacataccagcttcatttaaatactacccatgccaatcaaattatactaaattcaagggaatgtaaatccgttcactactagtaccaataaataaaaaataaaaggtttcaaatttgacatgtttttgctgggatattttattatgctattatttcattatttgatagtgtaggtatactatacatgaatgattatcaaaatccatgaataacggattgcgctaacattgtcattttgaaaattctgatcttgatggtttagtgtaacataactaattgacacaattccttttgaaagtaatagaatataaaatctatactaattgacacaatacatttgggaagtaaaagaatttaggtagtatttggttaggaggaaatgaaaaaattgataaagaatttattattttttttttattatgtattagaatagttttttctttccattttaaagtgaaaattattctactaaaataatatacaactaaacaattaaatggaataaaaagaatactattttgacgtttaagaatataaaaagtttgtttacaaacatatattccttaagatccatttttatggaggcttgctatattagaaaatgatctttgtcaatttgggacagaagaagataaatcaaatccggatgtaaataatactattgttcacaattccacaactcatcataagaacaatccataacattattcatcagatatgacagctttttttattttatcttaataaattgtagatttacacaagtcaaattctccttacttaaacattaaccccatgttctgattcaatgaccaacctgaaagctgcagcatagcggtaggccggtgagactgagaagcaaaacttggacaagagaagcgcgactaccactttcagctctgtcatggccaggtgctggccaatacaaattctagtccctacaccaaagggcatgtaagactgaggaaacttggaagctccaagaactccatgttcaaatcttcctggattgaattggtgggcatcaggaccccacaaattagtgtcttgttgcattatagagattgggatctgaatatttactccttttggaactagaatgtctttatattgaacatcctgcaaggcgttccttaggacataaactatagacgggtaaaggcgcaaagtctcttgaatcaccatagtgagctgaagaaataaaaaacaggattcattgaactgaagatgcaatggtttaatatccgagaatgattaaagcagatatttttagtaacatagaaatgactgactgaacattgtgtgaacttacaactttcatgcttcggagcatattggcatcaggactgccattcttgcaaacttctttcacttcttcacgaactcgagtttgccaagcaacaaggcccaagatgttgtagtaccagtgctctcatggtcagcaaaatatattctcttgcagttatctacaatgaatttgtcctgagtaaggccaagagatgggctatctacaccgccaaaagctttcgccccctcgagtatcatcttcagaaggttcttttcatcagcagcatccgttttttgcttcaccacctttaaaatcatagaatcgatttatttctctagtctccatactcgaattgagaaaattgttgctgcttacataaaactaaacattgacaacattaacttttgaaagagttgtaagcttaccttatgccaggaatccca

SEQ ID NO: 262298 - DNA, 906 bp, Cannabis indica
tttattagttttttatagtttaatgttgttatgtttgatgtgtttttcgattttcattaggtctagttgtttgctgttagtttttaggtttcaaaacgatttcagatctttgctgtttatttttgtatagttgtatctgtttggtagtttgtttttggtttgttgatagttttattgtagttgtcatactgtattattcacgattaataatttattgtggccattttggttatgttgcaggtttgggactacaaatttagtccttctgattactatagatctaagtgtgtttgcactagtcttttttctgtcatagataatattaagaaaactttgtctgttaatttactgtctatgtttcgtgaaactcagtttggccattttctagatatgcctgagtttgtttttcatccgcaagttgtccatagtttattactgagggaagttttccagcccaatcctaaagagttttgggctaaggttgctggccgttgcatacggtttagtgctgaggaatttatttgatttctggaattgattgtttcggtgattgcaacaagttttgttttcacaggaaacaaatcagttggtagaaatctgttttcgtggtgtaaaaaccattgaccacaaagccattgaggatgctttcttgggtagtaggtggggtttggatgagtcccttggtttgaaaatggctgttttgtattttattcagtgttttcttcttagtaatactcctgataaagaagtatctaggtttgatctagatgttgtggatagcggtcggtgggacgagtattgttggggtagggaatcctttgaattgactattgattcattcaaaggtagaattcagcatgggattttaatgaaaaataagaaggcagagaagggaggccagtatga

SEQ ID NO: 262299 - DNA, 416 bp, Cannabis indica
cttccctttttataaaatgggtttaaaaaaggaaagctaaaggcttgttttgtagtaaggaattaatactaatatacatgttatatcacaagaattacatctgtaataataatattaattatttatcttaatatatttaataagtcaaataaaaaattaatatacccactgagttatctcatatattaataaaaagtataacactaaaatatgcagcaaaaaaggatgaaaaaaaaaaagatcattcaagtaataaaaaaaaatggaaagaattctgtaaatacctgaaatgagatgatttattggattgctgtgattacataatgcagctacaaaaatatataacaaactaaaaataattagtttactatcataagatgtattaattaaaagaaagttgcagaaaagagctaaag

SEQ ID NO: 262300 - DNA, 1370 bp, Cannabis indica
gtttttagcttctactttattttgaggaagcactcttgtttttaagtagtctactaatggggtcatctaggtgacctttttgtcggtatcaacttccatcatttcatctcgattgattgttggatgagttaatacgtctacaggaattacatcgagtaactctgcttctcttgtcgaggtcaattaggccagagcatctgcatgagaattgtaagcacgaggcattctagaaacaactatctttttaaacttttgtaataactcacaagtaatataaagatatttggctaaatgacctcctatggcaaggtactctccattgatttgacaaaccacaatgtgtgaatcgctgaagacttgtaaatactcgattttcatctcaacagcgagttttaatcctacgattagagcctcatattcggcctcattgttagatgcaagaaattcaaatctaagggcagcgtgtaccttgaattgattgggacttatgaggattatgccaccccctgatccttcataattggatgccccatccacatacaaagtccatcctttgccgtttggtacgtcagaatcaatttgctcgtccgcgataatggctacttcatcacttggaaatttgagtatgaagttagcaagggcttgtcccttgattgttgatctgggtttgtacctaatgtcgaattggctcaactctactaaccactttagtaatcttcctgaggcttccggttttgccaaaacttgtcgcaagggatagtttgttaaaacctcaatgttgtgtgcttggaagtaaggtcgtaactttcttaacgtaattactaatgcgaacactaatttctccatctgtggataatgggtctcagcatccaggagatgtttgctgacatagtacaccggatactgcctaccttggtcttcgcggattagtaccgaactaattgcatatttggacattgcaaggtagacagataaaacttctctaggcattggcttggaaagtattgggggtttccccaagtgtgttttgagggcccgaaaagcttcttcgcactggagagcgcatttatcagaggaacgtgatatgaagcgatttaaagcagcgactttacctgtaaagctttggacctcttttggtttggctggagagcgcatttccaccaaagctctgatttttgaaggattagcctcgattcctcgttgatttaccataaacccgaggaattttcctgagcccactccaaagacacatttaagggggttaagtcgcattttgtattgccgcagtattttgaacatggccttcaagtgagtgacatggtccttcgcatgttgaaattctacgagcatatcgtcaacatatacttcca

SEQ ID NO: 262301 - DNA, 503 bp, Cannabis indica
tatatgaattttagaaacattaacagtagacgcgttttcaaatattttgttggggtctaaattagccaacaagcacgcgaacatggttttcgatcttttagtttacccatttgcttattcaactgatcagattgttcgattttggtgtctctgattagttccaaccttgtttatctcctctgttctaataaaaaataagcaaaaaagaaatcttgtttttggctcccagtttggttcgtgacaacgtttttataattttattggaaaaaaaaaatatgatcgaaaaatggaaattcaatcgattcaggaatcggatgagtgtgctggctatggtgatgacatacttcttggttcataatttgatcttttgttcgtctatgaatgatgaaggttagtttaagattgtatgattaaatattctcttcttcttaattaattctcttgtttggttagctagaaaggtgtgaaaactgatgggaaaatgttttaacaaccttgttaat

SEQ ID NO: 262302 - DNA, 649 bp, Cannabis indica
ttttatttttataatatttactatttgtttcaattaatttggtatggattgagatttgagggtaacaataacaacagacctagtctaataatctcgtgtgataggtattggctgcaattaagcatgatcatcattgaacaatatattattactttcttcatttaatatatatagatatttttaaaataatataaataacattataatttatcaaaatatatttctgttacttgagggaacatcatatttacgatggggggtatgatttgggcattgatgagcactggaaggagcaattgactctcttaacttctcaagtataattaagaattagatttgataatgcaacttaattatataatttaatatgtttgtttgatatataattaattatgcgattatattatttaattatgtaattggatgtaattgaaaccactacaagaaattgaattttttttttttatttttagggcactagttcaaaatctaacttaatcaaatcaacttaatcaggtacttaatgacataggcattggaataaagtagtctatttttagttgtaacattagtattttttgtagactaaatgtgtacttttagttacaactaaaaacttactgtgactacaactataattttagtatac

SEQ ID NO: 262303 - DNA, 1342 bp, Cannabis indica
cgacggcatagggtacacgtgtaaaataaaggtgtaccctatgtcgtcggttcttatagaggaaccgacgccatagggtaatttcataaaactcaaattattttatttcccaaccgactctaaatggtataatgcaattctatacctacagtttttatgaaaaaactgcctctaaatgtcaatttttaataaccgggaatttttacaccctttagcttcccttttatacaatgggttgaaaaaagggaagctaaaaacccattttgtagtagtgtgagaccttgtggcatgggtcttgttgttaggacttagtaggaattccctcctataagtccctcttggtggtcactcccttgcaacatatactctaagtattgcctattaagtggaacaagtggcattagatagggaccatgagggagagtgagggagaaaaggagcttgaggagagatagagagagaaagagagtagggagaggcaagtggaccggggagctcctttggcgcgcaaggagtgagtggagcggggagctcctttggtgcgcaaggagtgagcggagcggggagctctctttggggcgtgcaaggagtggtgagagtggggagctttcttggtgcgtgtggggaatgatgggagtggggagctccaactccattaagatgcacgcagatggtggagcgacaacggggagcttaactcgagccttaactcctcctcttgttggcttacccatttacgtgggtcaacttctgtttccttgtcaataggcttttaagcgtattttgtgaattttcgtataacaccaatgactctaaacattacacttagtaatttttgggggtccagtaacatatttctaaaaataaataggtgcgacataaatatcttatcttttgagtttcatacacttatgtatcacatttattattttctcaaaggatttatttttttttacggtattaaatacaatatgttatgttttggtaatagcttttaaccttaatttctttaaatcttactacatctaactaaactaacatgtgtcaattgattaattgtaaattttttaaaagaaaaatgagttgaccgctaatatatcgacatgtgacatttttactttaatcaaatcaacacttcataaaatttatagtaatgactccaacaaaaatttaacatatcgtatttaatccgtcaaaaatatatatataatatacatgttgggttttataccctaaataaaactcatttcatataatcagatttactaattaataaaatatcagaaattatttttatgttgctcagtttacataatttatttcatgattttatgtttaatgt

SEQ ID NO: 262304 - DNA, 1488 bp, Cannabis indica
ccttagagcatcaagcaattaccaagacatgtctgcatagagcaagaacagcgtggttagaaaaaaccagcaggaaatacaaagcatgaaagtcaagaagctgaaaaagaagtaaaatgcagagtgactgcccgcctagaagatcagaagtccatcattacctgacatcgcgtttatctcagacatgacagccttcccttttccagcaaagggataagatggccgaacaggtgaaatgggctcccttatgtaaattgcatgttcaataggcttgggcgtggccgggagtttcttcttcctcttcaatggggtcacttgctcagcctcagcctcaacctcggcttcatcttcaggattcaagggttcctaagcgtactgtttggccctggcacctcctttcaacttagcctcctacttaagttgaatgagctcatcctccttatgagctcgttcaggccggccaacatcagacttccccttcttccccgccacggacttaggagaaaagtcctttgggtaaagcccatacttcaccagattatcatcggaggtcaactggatgatattcttgtcttcctccggcaaccgggcaagtttctaagctctatccctaagagcaagggtgaggggaggacggtgatatgtcagaatctactgaaaccgagtccgggtgatgttcggatctttcaccatgaagtactcatcaacaaaacgccctattttcctgatggccttgtagtccgtgccgctcaaccacttgaagcctggctaggagaagtagaaataccctaacctgccttgcttgggggtagacttcaggtcaaaaaaccaggcgacctcgtggggggaaggagcatcccatccttgggaagcgtagaggacaaagagggaggacaggtacttaaagccctttggagtaatttgggccgggcaaaggccaaagaagtctgccacatccttgaagtacttatgtaagggcaacaacgccccttgctgaccatgagctccagaccaggtgcacatcctcttatcaggatttgtggcgcggttgtcgtgggcgggaatatagcagtccaactcccccaggtacccgtcttggtctagagttgggaggcgtgaatccgaaatcttggacgcaggacttacccacctggcgcccaaggcaccctgcctcctatgaggaaccgcctcagttagctcctcactgacgtagtccacgccctcaactaggacgtctccgtcagcatcgactggctgcccagcctcattgtactccccgaagtcagggggtccaacctcttcctctccctccgcagcgggaggactgccaggacgcgcctcgtccagctcctcaacatcctggacttcacgcgtcccccctcacggtcctcctccatcgggactgccaaatcctattcggcgtcgggcagagtggcgagccgagcgacttgaggatcaaaaagcatcgaccagacgcgtggttttctt

SEQ ID NO: 262305 - DNA, 507 bp, Cannabis indica
ttctatttttagaattaattaattataattaactattttttaagtaattaaataaatatttaacaaaggcctattttagcaattaaaatttataaataatttttttatttatatataaatcccttgatttaattattttaacaattaacctatttaattataatatttattatttacactctttttttttaaaaaattttaatttattggaacaggaaagccctgaagccttggtcacctcaatttccatcctcccattatcccatactcttgtttctccccaaccctgactatcccacccagattctaaaatattaactggaggcgcaggggtttgacgggttcgagagcaagattgagggaatgaaagagtaaggaacgttgaacataatgtgaaaagaagtacaatattgatgatgtacaatgttgacatctctatacaataaactgtaatcattttatgttttcaaaaaaaaaaaaactgtaattattttaaattaaaatatt

SEQ ID NO: 262306 - DNA, 818 bp, Cannabis indica
agacttaattaaatataaagatatataactatttattgagctaaagatattttaatattatttttcttaacttttttatatatatatgtgtaatattatatattagaaagaaaataaaaaagttagaatggtgtaatgtgaaagtttgattaaaaaaataaaataaaattttaatgatgtatttaaaaaaatagagtagaaaaacttttaagattgttagaaggaacattattattatacactaatagtactaatactttttataagtggcctcttccaattaattttttcataaaaccaactaccttttagcaagtataagaaaagtaacaaatattctaatattaaactacggtcctatagaagggtccttccaagaaagggccgagatattttaccagttccattaattaaaaaaaatatattattcaaaagtaaggcgcgcgtcactgaggttttatcaacgcgtaaaaaagtacgagtatgaacaaaaaaaaaaaaaaaaaaaaaaaaaccaaaggatttacaaaaatattggattttgggcaaaaatttacgattttactattatacggaatttttacaaaaatattgtctaacaactgtaaaataataaaaaagaacaattaaaacaacagtggaacaactaaaaaataactgtagaaaaacagtaaaaacttaacacagtacactatagtataaaatatacacagtattttttaaaaaaattctgcctcaataaaaaagaaaaatgtaagaaattttagtatgtgtaaaactctccaaaaaaaataataaaaaagactttacaataatat

SEQ ID NO: 262307 - DNA, 540 bp, Cannabis indica
aatgcgcataatctcaattttttgtacctcatgcatgtttggattgattgttgatgattgttttgaattgaatgtctacagggtcaattcatacatgatatatgtatcctctagatatgatgttctgtatgttttatttgattatctttatgtgagataatagacattattatggtggcttgattttattgtccaagtgagagaatgttagaattattataatggactaatacaatcgtagatttaattccatcaaacacaatcattaattatgtgcctaatgttgctaattaccatgatgggatggttaacaacttaattatgtgttagaggcacatgagagcacccttaatactatagttggcccattaaattatagtataccataaaatacccgaaaagccctattagttaataaccccttagggttataagggtaataacatgtgtatatgtatatgtgtgtgttatgtgtagtaaaggggtcattaggttttgtgtggtaaaagaaaaaagagttagctccacaagtgctctcta

SEQ ID NO: 262308 - DNA, 522 bp, Cannabis indica
taaaatctgatgccttttcattgtatttgtctactatttatagtgcaaatttactcttaaaatattgtattttcgtgtaccatttagtggggtaaatggcatgaaaagctgaagaaaatgagaattatgagggagttgcgtcaggttcctagccacgtctgcgttagcgtgttggtggagaagtaacatgggacatgtgttgattgtttgagcttctcgatttacgtgggaacaagattaatggaagtggcctgcttgctatgctgttttcggtcaaaagcacccaaactaatttgggcttaattgatttgtattgaataatcaaataggcccatcaaaagagttaactagacttgaatagttgttttgggccgtaactttggtgagcagaatggagattcattcccatcaaatatatattgctttgcatggtcatgttttatgggattagttggaccaataattgagaccatcttgaaactctctttcaactttctattgggcttcattttacagcatgct

SEQ ID NO: 262309 - DNA, 1658 bp, Cannabis indica
cacaatacggcacaacctattttttaaaaagtacagataaatatgaatttagggctagcacaacacgaacttacacagtgtatgaataagcttaactatcaaagcaagtgtctctcactacaaaaaactgctacttttagtgacaactttttagttacaatataatttttttctgactaaaatgtgacttttagtcacaacaaaatactacttgtgactaaaacatagtatttagttataagttgtcagtaatttagttttagtcacaacaaattgtaatttttgtagactaatacctttagccacggacctcataagaataataatttataattaatcacaatttttttacttttagatcacaaattattttgtagtgactaaaagtatatttttttgtgctgactttattttaataataattgtcaattttacttatatatataaaaaaaatactgaaaaatttgttaggtatatgactaaaaaattaattaaataaagaaaaaaattgtagttgtagattaattaatttcgacaccatcagacagttggaaattaattattgttttttttttgttatcattaattaaagtaatagctgtataacttcatcttcttttctctactataaatatataaaatgtttgaaacaaattcatacaaaataactaaagcaaagaaacttaagattatacacattacttgaagatacttgaagatgatgacgatgatgaagaagatgatattaataatggtaattatggctgtacttgtggggtgctcctacggtgatggacttcgttgtaggacgcccggtgaattttgtcattggacacaagggaagtattgttgtgaaggactgttttgtggaggtcccctaatcggtgagagttctgtatgcgaagctgctccgaattgtcaacctaatgttggtgggaaatgcttttcaggttcttttcaaccaactccatgttgttaccccaataagtgcagtgttgatacatcgggttatggagaagggacatgtctcgcacctaatagtatcgataataataatgttgcagttgaaattagcgatgatgatcgtcatatttcaactgcaacttattaaaatcatttggtttggaatcgaaattgaaatgcatttcttgcatttcaactttctacactagtactgtctttttttaattaataaataaaatattaataagaaatgactaatatttcttattaatttgttttttattttgctttatttctttatataatgtacgtgtttattatgcatgcatgtttgcgtaatgaaattatctaagtacgatcgacgatcaaaggattaatttgtttgtttttattattaattatttctatatatgagatttgtaaaagtattgggcatgcatactaaagatgtttgcataatgatgaaagtggttgatcaaattgaaaaaaaaaaaaaaaaaacttgaaagataatgtcaatgttgggacccaagtgccaaatgacaggtacaaagtggctgatggatttaaagctattcgacctattgcaagtaaagttgaatgggattcaattgtttggaaacagataaaacacacccaagcatagttttatttttgtactatctatgcttaatagaatcaaaacaaaagacata

SEQ ID NO: 262310 - DNA, 952 bp, Cannabis indica
actactggtctgttccaggccccgttactcgaatccctagtcaagatctagatcactatcacgggtctcggtctggttctagttcaggtctgagatcctatttgtgagtttgggttcaggatggagactggggtgtggttctagatgccgacccttgttctgtgtcccaagtctatttccatgttttggtctgacttaaggttcgggttcgggtcctcgttccaggtttgggttgggatccgtgtctggctcccaatttgggtctaggtctgatttggagtccgtgtccttgtccggttacggttctagatctaggtcaaatttcagttatgattccaagtcaaagtcctagttccagtcccaatcgacttccggttttggttccaatttttgatcccagggtacgggttcgggtccagacaccgactatgggtttcgtccgagccctgggaggcgattcggatcccaatctcgggtcccagtctggttcaatttctggtgccgggtaacgagctgggttctaggttctagttctcgtatgggtcgggtactaggtcccggtccaagttcttttttccaggtccctatcttgattcttggtccaagtcccggttattgtgtgggtttgggtcccgatttaggttttggttcgtgtccttgtctcggttcgggtttaggtctctgtttgggtttttatttgggttcgtgtttgggtttaggtctttgtacaggtcctcatcctacttcggctctagttccatttgctattctgagttcgagtttgggtttgagttcgggtcggagttcgagtcctggtctaagtttgggttcgggtccggatttaaatctaggtccagatcaggctccgggtgtgggttcgcctcctggttcttggtctaggttgggtccgagtccgaagtccaataccgaactgagtctggattcagttctg

SEQ ID NO: 262311 - DNA, 504 bp, Cannabis indica
caacacatgtgcaccttggcgaattctacattatttcatcaagaagactgtaatcatttctgatggattcaagttactaagtgtgctcttgactagagtttcaagcacataatctttgtctgcatcattctcactctcaatggctgaacttaaaagctccaaggctactcttttttcaccgctttcagtttctatggtcgtagatttaggcactctgtgctttgctctaatatattaagcaatgtgaggatcaagaagggcttgtaatcttcgagtctattttttacagcccatatctcaccatgacgtgattcatcttagctcaattagcttaactctagctcggttcatctcaatttatcttggtttagttcaaatgaagatgtttctaaacgcttgaaatggaaatgacgcttcaacaaacaaggaaaaatttcttaatttctaattggaaggggaatgctttgtcataatgatattttttcgattccattgaaatcattg

SEQ ID NO: 262312 - DNA, 1243 bp, Cannabis indica
ttaatcacataatcttgattactttccactgtgctgacgacacaacaaacaagaatataaatgtgatatgggtttggatgaatttataaatcaaataaacaagtaaatgataacatgaaccaaatgacacacaaagtgatgaaaaatacttttgtttctttattgatatttaaaggataaagattacattgaaatggagttttatttagggcataaaacccatcataatcatgattatatttcacagtgttgacaacactataatcatgaataaatatatgatttggatttaatagaatttatacactaaacatataatcataaaataaatcatgcgaaccatgcaacataaaatgacttctgatcttttattaattagtaaatctgattatattgaaatgagttttatttagggcacaaaacctaacaaactctcacttgcactaatataaatctaaaattgcatttcaattaatctcaactccttgatatccagatcaagtgttgtatgtagtattctctctgtaataggatctcacatattgcattcaatataacctttctccaccattacatctccttagtcacaaaattgttgatattgtgaaatttctctctacatgtctactcctcttgggatactggattcttcactttttggcaactacatctgtgttggtccagaagcaacactagtagttaattcattattggtacaacgccaaaaattgtacataactttccataagttgaataaatatccttcctacaactttaacattcaatctcactggcagagttagagaatcaagattgggtttttacacttctccaaaaaatactgctccacccctagagtaatcaccatctcattagtagactttctagcattaacgcaagtctagaagcttaatttggtgtagtctaagagtattaaaataccaccctaatcgactaacatatagttcctcttttgatcttaagattcacttgattgtcttccaatgttcctttcctagatgaaactgataccctactcattactcccactcaacaataggtgtctagtctaatgcatatcgaagcatacatgagacctctcactgttgatccttaagggattcctttcatgacttttatgttctctggaacaattgaaactgttccttagataaataaaatccatgtctaggagtcaaagacttcctatagatagccattaaaaaaatgctccagcatctta

SEQ ID NO: 262313 - DNA, 727 bp, Cannabis indica
atccaaacttttttcatgacataatttgatgtaaagggcagaaaagctggagtcaaactattcaagatcaaactcacttgagttgtctgatttataatagctctattattctcagcctcctggaagtaactagtcatttggagcaagtgatcacgcacgttctgatgaggtttcatccgtgcattgataaaaattttggtcgcctcaaaacgagcttgatctaacgccatcccaaatagttcagctaactggttcatgatatctgcagccgtgagagtattgacaaacctagttttcaaggtgtcgaccatgctagacagcataaagtatcgagttttgttgttagcattctgccaacgctcgaacttttccttgactgccttggtcgcattctcacctggctgctcaggagccttttcaggcaacacaaacaggacattttcaccgatgagagcaatattaatgttctcttttcatttgacaaagttagctccagaaatcttgttgtcagtcaacagtgacgccatggggttgttcatagtcatattgggtactacaaatatcaataaatagaaatcaagtaaggtttaatacaaaatcatacacattcaaaaaatgttagcacttagcaagtaggaatgacaagtgaaaatgcaaaaacatacaatcctaaataatttctaaggtttccaaacaaactaatactagtgtctgttgggttttgtgt

SEQ ID NO: 262314 - DNA, 1214 bp, Cannabis indica
tccttctcagctgatctcttttttatttaggagacttcttgtaagagaagcagtgcctttagatctctttctctccttcgagttttgttaccactatcttactcactaagattgagtacttagacttcctatgtgtgggcatggctgtaataccctagaattatgaaatggactagcaaaaccctagttagataattatgaataattatggaattatattattatatagtttaatatatgagaatttatttgattaattatatgttaagaccccgttggtgagccaggggcattttcgtaattatgacccgagaagggtaaaatgacgaaaataatttaagtacgtgcttaatagaactatattattatatagtatgcctgtgtcatcttttcatgtgtgttctgacaggttggcacggtatagtcacaatcgggaatttcgggccgaactgggttcgggcccgaaatgcaatttgaattgaaataattggaatttttatttattggtgataatcttaaatttaatatgcatgaaatgtcatttttgcccttgtatgcttaagtgaaggttatttggccctaagggcattttagtaatttggcctttatgtgttataagttgtgaaattagatttttgaggaaatgaattagaaattttgggttctcttttcctcttggccgactctctctccctctcaaaccctctcttattttctttttcatttggtgagaaatttgttggatttgaagcataatcttggtggatctttgagcttacctttggattgaagttgaggtagctttctatgattttaatcttggttttaattactgaatttattgttgaaaagcatgagtttgttgaagatgatgataggttgcatggtagtgatgttcttttattaatttgagtgagtgttgcttggatgtttggtgtgttggttgtttgatctctagagggaattctagggttttttctcttgccttgaattcaagttattcgttaatggtatgttgcagatgaaaattttttgggatgcatggttttgaagctctagttcaagagctagaactttgccaagtcaaagcattattttgggttagttaggcaatttgaatttttagagttgttgttgatgttgttagctctctattgtgatgatttttatctgtaagaagttaattttggttatggtatgattaaggttcgaat

SEQ ID NO: 262315 - DNA, 846 bp, Cannabis indica
cttagtcaactcagttattttcctctcagtagtgaaaagcttcttgttgacttcacccaactccatttggacagctccaagttccaccatggcgtcatcagcgcctttcctagccaagtccacctccgccctcatggtgttggacatggcagcgttcttggaggcagtagacttagctcaggaataggtgtaggccaacttcaaactagcctacacagagaaaaatattagagtctgatctaagtaaagaatgattaaaggaaactgttaagaaagacttacccttgtaaattccctcaagactcctcccatcagcagctccagggaagattcgttgtcagcgccggccagctgctcacccacttcaggaaccaaccagttcatgtagtgagtaagcatctccttgcctcttttggcttctggatgcattggcaaaggtggggtaggagcccgcatctgctcagatccgctcttggccagctcggatccgccctttggctgtttaggcttatctgaggttcctcctcgagaatcttggcacagtgctttcggagcagaagggtccgcgacgagttagctccttagaaagatcaataacctccctggtccgtgccttttccttggatggggtcccctcgaccacccctaaatttcttggcaggaagagatgagcttgagcttcctccaactctcttcttcagagcatcgagcaacttctgagacatgtctgcacgaaataaaagcaacatgattaaaagaaaaaggcatcagaagtataaaagcatgataatcaagaagtttaaaacaagacggagtatcctgcgcttcatgagaaccgtttgtccg

SEQ ID NO: 262316 - DNA, 891 bp, Cannabis indica
atgagactcattttcatctctttctcaagtgtagctggtttggcttcctgcattggcctaatgacggcatgaagtggcagaattggtgcactaaaactctacacaatttacaggtgtgcttattgaattcgatcacgacaactatcatttattttttttggtttaataggaataaatgtatttttgatgtaacctgttataatgtcaattacatttgtttgagggtcaaagagctgtcaaagctagagttttgggaatgaatttacgtaggcttaagagtgaggaaaagcttattggtaatgtagtcaaagacttttagtgttggtcctgtgctgttgctgtgtttagcttggtccaggagttctgttttgttttgttgatttgaataaatttatatactttttgttcaaaagaaaaaaatacattgttttcttaaaaattcccaaaattattttttaagatgtattttattaaagaaaaagagctgagtttatttttcaacaataccatatttaaaatttttaaaatcacatcattttcttataattaggtccaatcataattttctacccaagaccccaataggcttggcccgatcctgatagtcctcatattcatactatattaatggacttaggctaacattcaagtacaaattatttaggaaaaaaataatttttacaaaaatactggattttagacaaatatttgcaattttattgtcacgtagaaatttttacaaaaatacagtttttttataaaacaactataaaacaaataattaaaaacaacagtagaacaactaaaaaataaccataaaataactgtgaaaaacttaacacattatacaatataaaatttccacgccatataataaatatgaaaaaaaaa

SEQ ID NO: 262317 - DNA, 845 bp, Cannabis indica
gtaagttgcttgcctatgatctttcattatgacatctaatgagcaagtgtggttgttgacatattttctaaccttaagtgtttgtgtttgtttcaactttgaagcgcgcagaaatcagttacaattttcgtcaacacatataaccatgtattcccttggttcggacctcttcgttctgatttggttttcaatatgttcttgttactttattatttgtccttcttcgatctcaagcaccatgtaatctatgatgatctccatttcttcatcccttctcttttttgttgcttcatttgattgctctattataaaatctgcaacttcttcaaccattgcaaacatgtttggagaaattgttatctgactattataatgatttgaatcttgtccttcaatatcaaattgctggttgaatggttcattgtatatttgtagaaccagttcctccactgtcttggtttactcttgtattggttgttcaaaagattaatttttcactgtttgtatagctatctcttttgtagttgtgatgcatagtggagaattaattactcccgcttgtgtttttctttgctcaatgtagaacttgagggaattgtcagtcaattcagtagcttcattggtgttgttcccggtgatatctggtaggatatgtttatgctgcttctgttacaatttatttatgattttatcagctccatcaagtttgctagtgaagaattagaattccagtcattgtgtagtcatcaaaatttgtattttctctccattgactccatatttgatcacacacatgatttgttccatacatgcaattatagaggaaaagtaatattataatctta

SEQ ID NO: 262318 - DNA, 952 bp, Cannabis indica
agaaaatgataatgggtttttttgcacatattttgtaattaattaaaataatgtatacagatttacaattagtcagtaaattcttaaacaaaaaccactagaacttaaaataaaactaatatttacgtggctcgccacgtaactctcgtctagtatcaaatatatgtacagttatttcattaaaaaatatatatgtacagttacaaaaaaaaagttgtgtaatttaggttgagatatattgcaaaaaataaaataaaaaagatacactacgaagaagataaaccaataacatatgaatcaatcacaaaactaatattaatgaaaacggtataaatataagggtaactttcattattttaaaagctatttatgtaattgagatgtattttaagactctaaatgtaaatttccctagatatgttgctaatccaattaatgagaataaaaaaatagctatgaattaatttgagagtatcaccttttttgttaataaaaattaaaaatatttatacaaaatatagaagagttattattcaaaaaaatattaaagaattaaataatgtaatttttttttaacatactaaataatgtaattattggcccttttcctattattatagtcgacgtaaaacctaacttgataattaatatacgaataaaaaataaaattataatcaattatatatatagctagatgtaaaaaataaatatagatggattaaaacaaaataataataataataataataataataataaaatagatcgatttgaagttgctttgtggcatccgatccaatccaaccttttttttctcatccgatccaatccaattagtaattggatttggaaaatcataatccgatccaatccaattagacctcaaaatccaatccaatccaatccaattactaattggattggatcggtttttcaattagatatccaatta

SEQ ID NO: 262319 - DNA, 985 bp, Cannabis indica
gcatagacaggcagttggacaaactttaagtgacggtgcgttctcctaaaaatcccaccagagtaacttgtgtttcttaggcctttagatcttcaatttccattcccttcaaaaccgcaacaagtaggatattagcagagcttcccgtgtctacaagcatttgtttcatatgaacgtggaccacatctaaggtaatcaaggcattatcatgaggatgttctagttcaaaagcctccccttgattgaataatatctgcacatcgggtccttcgttatcaattactgtcattgctttgatggagtggatccgacaagcgtgagccaatgaggctcggattgaatttccacttaggtccgatacttctgagatcacgttcacaatcttcttgatatatggaaggagggattggtcctgattcttatcatgtccttgctgaacatgcagcattgaatccatagatagacaatcttggaagaacccttctttaactagcctgttaacctcgatcttcaattgcctgcattcataggttgcatggccatgctccccatgaaaggcacaatatcagcttctgtctcgtttatcgggatcgatagtcattttggcaagccaccttgttcctttcatccccttagcattaactcagttagcgtgatggtcattcggggtagcttctcatgaaacagaaaaagcatgacaagtatgtctcgttttatttaatatacaccgagttgaatgatactcatgaaaatatatttatcgcaaatgagaacaggattgcattttgcaagtctgagtccatgaggcatgcgagacataagcgagactcaacaaaatatttctgatttcacaaagacatagggcattctaccgaagaatgttgacaactgaaagatgagataaagagtctaatctcgcgtggataggttagacaatatgtaagacatcaaggaagcaagagaaactagcccaacaaccctaata

SEQ ID NO: 262320 - DNA, 506 bp, Cannabis indica
gcaacataaaatgttatttactgatctttattataagtaaatctgattatatgaaatggggtttatttagggacacaaaacccaacagttagaaataattaaggagggtcagacgacagatcaaaagctcagtgaactaaagaaggaaattttgaatagtaacgccaaagattatgaaatattagacacgggattaatttggttcaagggacgaatttatgtgcccgataatgatgagctcaataaggggatattggtagaagctcatactacaccttattcagttcatcccgggaccactaaaatgtaccatgaactgaaagcgttgtattggtggcgtggtatgaaaaaggatgtagttgaatttgtggccaaattcttagcatgtcaaaaagtcaaagcagagcatcaaagaccagcaggattactacagccactgaaactctctgaatggaagtgggaagagatttccatggattttgtgactgggttacctaagactacaa

SEQ ID NO: 262321 - DNA, 4986 bp, Cannabis indica
tttgtgaactacccctagtttttactagttaaacaaaaaataataaatacaataaaataaaataagttaaagaaattagttattataccaatccatataaaacatggaatcttatgcaacccttttttaagaaaaaaaaataatatcaaaagatattttgttggctagttagctctatgtcttattttcatcataaatatctccccctcttttgtttctattactatttaataactaataattgacaacaaatattactccaaaagttaagtaacattaatcaaaatagatgtaacaattaaatccttcaactgagttgctctttttttatttaattattttttgctacatagaagttgaccatgaccatgtcctataaaaaaaattatgtctcctaaactaaattctaaacatggacttacatgaagagaaggtttgttttgtttatatgggtccaaactccaaacataactaaagaaaatcaatatgtttcatccttatcaattagcattttagtcaaaagatttaatgggaaagtgattgagactaaatatgtttagtcatgaatagtgcaatttgtagtgaacctatacattgattgcaacattagatgactcatttttatatataaaggtatttttatatatttgtattgatgaatcttataccctcaccttatcttctcccgacaaataaaatatctccaaaattcaatcataatggatttcttgagaaaaaagggtccatttttttgtaccactagattttagttccttcctacttaatgtgacaatgagagaaaatttgtcaagtgggtattctaatagaatagaatagaatagtattttcattttgattttatggtgagttgtgtatagttgtataatatacaagtttaagttacaaatatttaatgggtccacttaatccttaattaattatctaaattgttcagggtcaagttaatcaatcataccatgttgctcttctgacatattagaaattgtctaataatttttggagtactagtgctttgacattagttggaaaagggttaaaaataagtatcaactggtgttataatataacatcagttttgctattgtcttttctttttttccttgtacttattttcattcaatttttattaacttgtttgaacactcaactaaataattggttatgttgaaattactatttttttatctaaagaaaaatatgaaaagtatagaccttaaggattgataaagagaataatatgtatgattattgtataatccaatattatcttaacataaataaggtaatgtaaagaaaattagttgggtccacactccactccaacaatccaaggtctacctaaattaaatatgagacatagacaatgaaaagaaaattctataatgagtactatagccgatctgcttatataaatatcaagctattaagaagaaacccagatattttatttcttaaatatttattgattcaattttaattatttttataaatggattttacaaattgtttgattcgttattaatctataacatgtctttagacaaatttaatactttttttaaaaaaaattataacacattgaaaccaatttattgtcttaaattacctaagtccgtttgtgaaaactttcttctcataattactatagaatcaatcattttacatgaattaaaattaaaatatatgaatatgctgtcgaaataaatatatgaaaaaaattgtaaatagaaatatttttagttgatccattttattgcaaaatagaaatattgtttttttttccttttgaaaaggaaatatataattaatattcaaatgttaaattcaaattaaatagaagagtggaaggaaaaggagttttatgcaatcatttgatttttattttatttgaaattaattatataaatttttataagtgtctatcctttctgttccctttaccctccattttcgttctacttcactttccctatctttcgtcggatttgatcgccggaactgttatcgtctgatcagttcgccggcattccggcgatcagactctgatgactctctgtgcggactcactcactgtcaaatttcttggcaattcgttctccaattcgaatttgaatacagtacctatcttctacagaacaagatctcggttctcagatctactttcgatttcgattttcagtatctgatactgaaattagcgatgttagctatgtcattcgcactctggagctaacaattactagtttggcttgactctaatttgatctgtagctctcgtaacttcgactcctaggtttttagtgttacgttttagggtttgtgttataaaggaggagaagaaatgttcaggaaaattattaagggagggcatcggaagccatccaagtcagaatccaatgatgcttcaatgtatggatatggaccgccaacgggtccgaatcgcacatctggatcggtcactacgatgaatgtgattgtgaaccactcgtctagggctgggccgacccaaccaggtcctaattcggttggggctgcaggagcagtggtggttgttgcgcctccgggaacggtggagcctcttgccttgttccgggatgttccagtgtctgatcgccatagcttgtttatacgaaagttacaggtatgttgttttcaattcgatttttcggatactctgaaatcggttagagagaaggagatcaagcgtcagagtcttatggatttggttgactttatacaatccgggtcgggtaagatcaccgagagttgtcaagaagagatgattagaatggtctcggtcaacattttccggtgcttgcctccggcatcacacgaaaatacgggtcaagagggtgttgagcccgacgaggatgagccctatttagatccatcatggccacatttgcagctcgtgtacgagttgcttcttagatatgttgtgtcttctgatactgatacaaaggttgccaagaagtatattgaccattcatttgtgctaaagctacttgatttgtttgattctgaggatccaagagagcgtgaatacttgaagatgattcttcatcgaatatatggcaagtttatggttcatcgaccctttattaggaaggctattaataacattttctatcggtttatatacgagacagagaggcacagtggaattgccgagctgttggagattcttggaagtattattaatgggtttgcattgccaatgaaagaggagcataagttgtttctggttcgagctcttataccacttcataagcctaagccgattgctatatatcatcagcagctctcttactgcattacccagttcgtggaaaaggatttcaaacttgcggatactgtcataaggggtctgttgaagtattggccagtgactaattgtcagaaagaagttctttttcttggagaacttgaagaagtgcttgaggctacacaatccgcagaatttcagcgttgtatggttccccttttccgacagattgcccgttgcctaacaagctttcattttcaggtttgagacattcccctcaaaaaaagaaaaaatcaatctcattctatctttgctaagcattgagatttattttcccaaattagaaactatgcatgggatacggttccattttgttaaattagcaaaatttttatgatttcctatgaattggttcacataaccaatttatgagagacaaggggcttttggtagttctttgtgtgtttgcttaattggtttatgtttctttccttgtggcgattttcttggtgtgttgtgtgtttttgtttcttcaattgatgtctttcactggagccctttgtttttgtttcttttcggttttaaagttattctcaccgaccttttacgttactgctaatgcagttctcatgtgggtgatactcagccaaatgggatactgtagtttggtatcaatgggaaagtgggaaacaacaaccttggtttagattttacttaattcttttttcgttttaaaacaggaatagtggaccatatatatgcccataacattataatattcaaattgaaggaaatctctttgtttgatttcattttggttggctttgttggtatgaacttgacatatttctttcaaattgtcagttagcttcttggcgctaattcagtagtgttgacatatgaataagttatttgatagaagctttatgtataaatattctcttggctatgaaaattgttgtgcatcataacaacagctatgtgtacatatatatatctgtctgtggatgctcatgtttgtttattcctgtctgaaaccaatttcggtgcatgcattccaggtggccgaacgagccctgttcttatggaataatgagcatattgtgagcttaattggtcagaatcgacatattatattgccaattattttcgaggcattagagaagaatatccagagtcactggaaccaagctgttcacgggctgactgtgaatgttaagaaaatgtttatggaaatggatatggagctgtttgaagagtgtcaaataaagcatgctgagaaagaagccaaggccagagaaatgcaagagcaaagggagacgacgtggaagaaattagctgacgtggcagaacaaaaaacggaagatgatatgtagttttttacagtttgactccaaatttactttggtgggtatttctttttttttttttttttgtatctcctccactccgaacaattgaaaaattcggagtaagcagccataaaatgtaatttataatgtacgaaaatttgttagaaacaagctgcagattaagaatgattttagtgaaaaataatattttttgttattttccaactactttttggagtccagtggaaaggaaatcaatcttacattttaactaataggtgtatgattagaatgtcttgtttgtcattatgtgtgctatttaaagtttgaaaactgacttgatacgtg

SEQ ID NO: 262322 - DNA, 3607 bp, Cannabis indica
tttttttttacttctttctttttttgctgtcacttctgaaaagattttgaatttttttgaaaaatcgacatgaagggcatctccttcacagttctcaaatgaatagcacttcaaacacctctttaatcaacgactgtctgcaaatttaggcaacaacctaaaaaaggttcagtgttcatgaaaggacatgaaatgtacaagtgaattcctaagatgagatatgtctgccaagcaacaaagtgaaaggtgaaaactgaggttactcgattttgcaagctgccgaagactcttccatgtctgtcctcaactaacataataacaaatttaaggaaagaaaactaaatcctaaacaatagagttgtgtttcactaaatcttataactgccaggttggtgattcatagaaacattagggtgacaaacatcatattatgaacaggaagcaaccttatggattttctttcatcaaagacaccttgaagacctcaacgtggcttaaattgttatcataaaaacctctgtaatccatcaattaatattttacaaaactaggttacccacctaaccttgcaatatttgacaattgctatgtacttactcgcaagggactcaaacatcagagttaaccacattttgtaaccatttgagctaaccctttggggtatcaattaatattttcttaaacctaacaataagagaaaaggttaccaagtagtaaaaaccagaagtttccaaagccacaagtctcatgtttaatgcactatgtgccaacagatcctattatagtgattgactggtcattaaaatggtgcaattattgataaatactcaaattactaaagtgtaaggacagttcttccgggaggggtctaaggtggaattaataaaatgaattaaaatttagaaattagaagtgatgagattagtcattaaagattctatgcattaaatattaagagactcctccacaaagttaggtggtgggctagacaaataaatgttcaactactcatttttttggccaaatgtttttccagatttagctattcatgattttgttacagcaattgcaataaaacagaaatagagaaggatgggttcccagaaactattcgttaccgaaatatatattaaagttctagcaatttatcctgacaaaagaaaaaaagttctagcaatttatagaaagaaatatatagatactaagaaaaatgtaaaatggacattagttataaatagtaagtatctcacacacatggccctacgcagccatacttttatgaacgtaaactagtagtaacacaaaacaatgatatataatcctatatcaaagataaaggaacgaaaaggaaacattataataaggaaatgctccgttcaaataaaacaactgatcaaatcttatgtttacgagcatgattataattcatcaatcatttttcacttctcttttatctcattctcgtacggattagcactatgaagttcaagatccataaatgactttagccaaaaaaaccaagctaacccatgacttaaaagtatcatattaaacagaaaagcagcacactttcaactttcaaccagggcaatgaagaaaagaaagcaatgaactaatgacatcctgatcaagaatacaataaaataataaaataaagctaaatagtatctcagacagtatttaatactaaaactaaacaaaaggaatttcacagtccaaacctaccaattaattatgactaaaaaaacattaaaaaaattgatgtagagaaaaaaatggatatgttacagcaataaataaaacaagaagagtgactgacctccctcatatccaccaccaaacaagaccaaacaatcagaaacaaagttgagtgaatgagaggctcttgggtctggaaactctattttggcatctgtgtcagacaatttataacaagaaaccgaatctagctgagaaaattgcttgtagagcctcatccatggcatctgattttgataatgatttgaagacttgagggcatcaaccgaagtgggtccccaatcccttctgcaaatcgattcccatagtgcatcagaagtagccaaaaccctgaacttcttacaactcattgcaaaggccacaattgaatctataggtagaagaagaaggatggtaaaaagatggtcttgggcaatcttagttatgggcgatccattactaaaactagttctagaatcggccatggaagaagaagttgtactgtctcttttgggagctttgtggttttatggtatggtgggattgatgggtctggttattgattatgggggcatgtgacctgtgaggtttggtatctgggcagaggacagagacctccaaattcagtgtcaaaaaggaaagtggggatggaaatggaagtggtaaaaaaaaattaataaataaaaccaacaacaataaaaattggtttgtttgttgctttggtttggattgttcggagaaaaggaaagggaaatggtaaaaatgtaaactttttttttcggtgatgggaaaagagaaggattagattgggtgagaaggtgtgtgtgccccaatgatttttgtccttttgtttttgcgtttgaaaagctaatgatttttgtcttgtatttatgaaattatgaaaaatgtcagtcagttctgtaaatcacagttgtttttccaattctctattgttcctttgacatgtcacttcgaagtttggacttcaaatcatttttccttcggagaggagaagttaaagagtattcttctttttttttatatattaattaaatttatctctaataaaatttaatttctctcattttttatatttacacatatttaatatttttttcctcaacaggtaacatttaatatttataagatatgacacattttagaatattcctaaattaccaatatttacattacccctcccctctctcttcttctctctttgttcttcactgtcgagctccccactaaatgaacaaaaaaaaaatttcttcactcattctctactcattatcttcaattcactacactataatctactacactacaagttatactacctattttctttcaattttggacggagcatcatacacagagcaacatatgcaagtaatgggttaatttttttttgtttgtgtaatcttgtttgttgttgttataattagtttataatgttgttttgatgcttgatctgtggatttttgctgttattttgctgtttttattttgtgtgttaaaatgcttgctacctgtgaatattgcaattttcctagtttctgtaattttttcgtctggcccaatgggatctgatgcatgcccgattggggtccgatgctatgtaaaaaatagctgacaggggtgaaagcccaatgggggcccgattgggtccgatgggtaccaaaaaaattagttttttgtttattttgtggggtcgggcctgattgtgtccgatgggtccaatgggggtccgattatagtccgaaaaatagttttggggattttttaggcccgattggatgggtgtctgattggtgtccgattgggtctgattagggtttgatggggcccctaaaaattggtttttttgttt

SEQ ID NO: 262323 - DNA, 670 bp, Cannabis indica
ttccaatcccgatctgagtctggattcagttctgggtcaaagtccgtgattctgatcctggtctgggttcgagtttgggtccgggtccgggtccgtgtcttgctttgggtctgattctaggtgtgggtttgagttcggatccgagtttgcgttcgggtttgtgtcaaggtgtggaccccgatctgggtctaggttcgggtccaggtcaaagttcgggtcccgagtgcgggtccaagtttgggtctgggtcaggatcttggtccagatctaggtccggcatttcgatcccagtctggatcttggttttagtccaggttcgtatccggatccctgtctaggtccaagtctgtgtttgagatcaggtcccagatttcggtcctggtgtgggtcttagttcgggtctgtgttcagttctaggtctgggtctggttcctggtcccagtcctagtcttgttctagggacctggttcggcgattctttttcatgttgtaattttttgtcctaggtctaggtctgggttcgggcttggttcttcgtctgggttcttatcctagtctcagtcccagatctagacaccgactactggtctgttcacggccccgttacccgaatcccgagtcaagatctggatcattgtcacgggtcttagtgtggttctggttcaggtcc

SEQ ID NO: 262324 - DNA, 533 bp, Cannabis indica
gaattcttgtatagtctattcgagtgacttaggcgaaaattcctaattctcatgaaatgttttatggtatctctattgattactttaatctcaagcaagtatttaacactcaagttaaaatactagattgctatgttgatgacttagtctaaaaggaacttactgtttaagactaaaaataatatgtcacaactagatatgcctcaaaacaatagtaagaggttaaatgtacttctatgtatgaatttaaccagactcctactgttgagtgggagctatcagagatgtaatcaaacaaggaacattaagggacaatcaagaaatatttatgaaagtgacctatatgttagatataatagagatgtatatattataaatccttatatctacaccaactcataaagaatccgagatgatggttactcttggggtggatgagttattctaaaagagtgttaaaactcatttataataattcaagctccatgagtgaagatatataactttgtaaattcgaaattaccagaaagtta

SEQ ID NO: 262325 - DNA, 484 bp, Cannabis indica
aaataatttccaacaaaaattacctaaacatgctcactaaagcagcagaaaacaaacacaagctcatgcaacaatcacagcaacaatttcgaaaattcctctttgaaaacttaagcttttgcatagaaaatccataactctaatcaatctaactatcatgcaccacaagtagcttaattaacctcaaataaacatgcttaaatctctgaaaataacaacaaaatcacagcagcaaccacaacctaaactaagcatgcaacatcatctttttcatcaaaattaaagaaattaaaagaacaaggtacaaaagtcttaccaagcacttgaagcacacttagattgaaaagaaaagagcttgaaaatcaaaggaaaatggcaagaatccttgctgcacaaggaggccgaaagagagaggaaaagagagagagttttccaatttttctaactttttactttgaatgaaaatgagaaaataaaccatcca

SEQ ID NO: 262326 - DNA, 521 bp, Cannabis indica
ggtaacatatcttaatactagtaactttactagtgttaggttcaataggtaagaacaaacaatgtgtgaacaaatgttataagtactatatgtcccatcctataaagtagtgaagtacttagacttttaaaagtctttatagtctgggaagtattcatcgttggatcttcgtttgtctcacccaaggggatgacattcgggggttgctgcccaacagtttggtaggctttttgtatcagcatagtagcttgccgactacgattgtcaatctctgcatgatgagcccttaacgcttccatctctttgtctctccactcttcaaacatgcgtctttgttcctcgaacacgagatttaccgcagcgcggagttcttcctgatcatgatgtagagtgttggtatgaccctacataagtccaagagcagaacaaagattttccatctcagtatcatctccaatggtcgttcaagtgttggtagcaggcgaaacggctgtgttatgaatgccctggctgggtgctga

SEQ ID NO: 262327 - DNA, 1010 bp, Cannabis indica
gttcgggttgattgggcgagttgatattattttcaaccagcccaatataaagattgggcacattatatttttgttgaataatttttcgatttttatttttcatcaggttatttcaatttagtttgggtgggttgttcgggttggatggtttacaaaaatttatttacaaatatatactaacaaactaattaaacaaataagaaagagaagctaattaactaaccaacgatgaccaatggtcagtaacaaactaactaactaacaattaaacactaaattcttaatacccttccctcatggaggatcgtatatatcatagatacacatattgccaatatgaaaagttagaacatgtggtaaaagaagcttggtaaaggtatcggccagttgtagagtgctagagatagaaatcaaacgaatggaagaacttttgatgttagccttgatgaaatggcaatctagctcgatatatttttgtgcatttatgaaatgttgagttgttggcggtgtgcatagtaaattaattgtcgcagtagatgaaaacagaagcatgttgaggtatatgaagatttgtaagaagtatggttgttcaactgattcagtctgtactattatggccaaacaatatccaattcgcgctatgtgcagatttcgttttagatcttatctaatcttacaattaacttgacaacatgtaccaaaaaaactaaactgaaataattatgttttattattctttaccacacactaaagagttttattattctttcatcttttaatttattaaaacttgttgagaaaaacatacttatacataacataatatctcatatcatatgtatatatattgttgtaagcttgtagtagtaagttgtattttattctaagtacgacatatataaattttaaaatttaaatgataaaggacttcactatttacataacctacttatatattttatatgtatacttggatatgttggttagtcatttttatcaatataatttta

SEQ ID NO: 262328 - DNA, 1284 bp, Cannabis indica
agtgaatcctaaagaaaactgcaaggcaatcaccctgaggagtggtaagaaatatgatgggcctgagatgatacaaccagtgaatgaagagattaaagatcaaccggcaccaactctaacatcaacagaaaagaaggctactgatagtcctgcaccacaacaacaatctccaccagtcagtatcgatcatcatgtgaagataccttatcctcagagactccgaaagaccaatctagacaagcagttctcaaaatttctagagttctttaaaaggctacacatcaacattcctttcgctgaagctttggaacagatgcccagttatgtgaagttcatgaaggaaaaatccaataaaaagtgtaaaattatattaaaaaaattaaactgaaaaatattttagttacctaaacaagcttagattttggagagactcaaacttgtttcttaaaaaaattgtatttttaatctatttttttcgcatcaaaattttaaacaaaaatcagttactttttaaaattgcttaaatagttttgaaattttactatatatatattagatttcttaattcaaatgaaattttaaattctttttaagatttgaattaagtttttaagaattataactaaaaaaaatcatttttttagaaagtatgatatgatagttgtccaagttagatggtaaaatgctaatttacagttacatgtgaatatttaaagtacaaaacgaaattaactttttataaattaaaaagttcactgaaaatttttagcaagcctatatttgaaagggcataatatgagtgtcataagttgatttacgaaaaataataattattgtttaattattagtgagaaagtattatgataattttgattgttgactaatgagaaagaaggggagacagaagaagagtgataggaatggcagccttatcatacccacgtgcggctcctaatccgaaaccccaccactcactcactcactcactcactcactctcttcatactcataaccacatcagattctcttccagtcacactcacacctggctcccacacttgacttgtcccttcttcttgcccccaccttacttaattttcaaaataataataccattcccatctccacctcaccaaaccaacatacataaacataactcttaattaatcctttcttttttatttattttttaataaaatcatatatctattaatataaatcgttcaaataacagaacgcaccccagaaaaaaagtcctccaactgaagcacatgacctgtagag

SEQ ID NO: 262329 - DNA, 984 bp, Cannabis indica
ctcatcatcatcatcacaaactttctctctctttctcgcttgaatattaaaaaaaaccctaaacttttttaagatcagttctctctcattctcgcctctttccctcctctctttttctttctctcgattggagctgctgctcctctaatccggtgaccagcgacacgcctctctcttttttttttctccgacatagctactactcctcttctccgacgaccagcatcaccctctctctctccctcctcagtccttgaagccacaaaatctctcctctcagttcgaagttttgctgcccaggccaaatgctaacttcagtgaccaatataacgagatccccaggtgctttgagatttgagatgtattttgttctttgatatgccaaattcccaagtatagattggagatttattttgttctttgatttttcaggtgttttgagtatattttaacatatatatatattttgatttgttaaaggttaatgtacaaaaaaacataaattttctctatcttaataaaataccggactctataaggattggtcatacttagatttcaaggttaagggctttaaagtttgtgatggctgagtttgaaaaattctttttctatttttttattgtttttctcttggtctcttttacttgtatattattctctctctaattcattctttctattttctctgcaagtaacacaggtcgtagatggttttggcgttctaagcagcggtggaagaattgggtttggctaaagagttgtatatatctttttatttcatttactgggtttttgctttgatattgttgttgttgtagaaagaaatttcaatgtgtataattgtgtgtttacaaaatctgagatataacgttcatgtatttttgtttgttagaaccattaatgaaaaaagattatttgtttatggatcttaatttatttcttataaagttatttgaattaaaaaattgaatatattttttt

SEQ ID NO: 262330 - DNA, 1704 bp, Cannabis indica
tgcacatttcaaaacatatttgcatgacaagttcaagttaaaagatattggctccattcgtttcttccttggcctagaaatttgtcgaaccaacaacgacatctctgtttcacaaggcccttcccaatacaacttctaaaagaaacaagttacatgtgagctaagcctacttctacccccatggaaaccaatctcaagcttagtaaagacaaaggtaatcccttaacagaccctacgacatttcgtagcctaattggcaagttaatttacttgaccataacaattactagacatatcctatgtcgtgaatcacttgagccaatttttgtcttgtcctcgcatcccccatctacatgatgcacatcgcattctgcagtatctcaaataaactcctagacaaggcctttttttttccctccaacacttccccaactatcacagcctatgcagagacaagcttgtcaccttcaaatgttcagatatccttcttctctgatgctgactgggaaagttgccaagatacgcgtaggtcaatatttggctattgcctcttccttggcaaatctcttgtatcatgaaaataaaaaaacaacaaactgtgtcttctgctgaagcaaagtatcgagtcatggccaatgccacaactgagcttacttggatcattgctcttctcaaagactttggaatcactcactctcctccagccttactctactgatacaatactgtagcaatgcacattagtgagaatccagtctaccacgaacgcacaaaacatgtcgatcgaaatcgactgccatttcgttcgagagaaggtccaacaatgctccatcaaacttcttcatgtttcttcccaaaacaacttagctaacatcttcaccaaagcactcctgcctagtaatgtttctaatattgtatccaaaataggtttaatcaatatttacactccatcttgagaggggctcttagaatcgggttgttagttaaaattagttgggtctgttttattatttctgttacagttagttactctataactaacagctttgttgataccgagtattatataaactcgggtctttgatgtatttcattaaggagagcaataataaagaattcactctgttattctctctcttaatttctcatatatttgttaattagtacattttatataatgaatattcttactgattgtacttgttttatatttaataattgtgtgattcgtaataattaaatcagtagttaaacacatgttaatttagaccccattacccaacgtaatatattttatgctcggctgggttcaatccatttccacactactcggcttcacccatttccacacttcacttctagtttggctaccaattctttttcattatggatacatacaggtggcgttcagtattcaatattatttatttttgtatatcaaaatcagtaataattcttagtgaaaaaccgtgtttttgcaaatgtcagttgtatataagaaaatataaaaactgtaagtgtttgcagcagcagaaagtaattctgctacagcaaaactgaacaggcagaatataaaatatttgcagaaaaataaataacttgacacaagagatttgtacgtggtatcagtgttctcccgaacactcctagtccacggggccacgcccagagaatgaaatcaattaataaagtatcaaaattaca

SEQ ID NO: 262331 - DNA, 441 bp, Cannabis indica
ccaggaaagatcgactacaataacgatggatagtcgactctggctgctcaaatcatatgacaggagatgaagagaagctgcaagatatgacagaatataaaggtggtcgcgttgtggtgacagccaacaactcaagattaccgatcgcgcacatcggtaaaacaacaatcatcccgagattcagcccaaaagaagtttcactccaggatgtctaccatgtacctgggatgaagaaaaacttgctatcagtggcgcaacttacggcgacaggtcaccatgtcatattcggtcctcaagatgtcaagatctaccaagatcttgaaatctctggaacaccgatgatgagaggacgacgcttagagtctgtttatcatatttgtggcatgcaaggctaggacatgtcagttatcataaactcaaggtgatgatgaagaagtctat

SEQ ID NO: 262332 - DNA, 502 bp, Cannabis indica
aagaagagccgaaagctgaggtaaaactggtacctgctccactgttcgttatcacccaagctgatgctgcagccagtccttctattgtgataggtcagcttcccgtcaacaactccttgtatgctgtattatttgattctggagctacacgttcatatgtagctacaagaataattgatcttttcggaaggccttgtgatgttttagaaagagggcttagaactatgccgattaagatcgaggatagggagttgagtgctgaccttatagaactggaattaactgagtttgatattatacttgggatggattttctgtccaagtattcgcccagtatagattgtaagcggaaaatggtgactttttcagcaagatggtgaagatccatttgcttatgttggaacaattcaggggtctcagatcccgattatttcagtattgagagctagagatctcctacacagtggatgtgtaggatttttagcagtggtaattgactcca

SEQ ID NO: 262333 - DNA, 829 bp, Cannabis indica
ttaaagatcttgtgaacagataggggtggagaaacattttgtagatatacatttcaaagatcattaagttaattttttgaattatatccaaacttacctccccagaaattcgatttgcatattgatgatagtataagtcaatgattagttactagccgtagcctaagtccttctaaggaaataccctagtgatataaaaatttcagaatgatggaatggttgtgtacttagtataaaccattactagattcatggatgacctaatcgtgatcttaagaaaagctagaactgttaaccaagatttgcatgtttgatggctattctaagtgattaggggtggaccaacccatagttattagataagaaagtgtttgttttaacaaatactacttttctaagaaaatgactatgtctgaaaacaaagtagcaaaatagaggagatattattttccttgattccaaaagtgttctatcatcttattctgtgtaagatggtcccactgcctctgttgtcttgacacaactgaagaggataattcgacttatgttcctagacagaaagtcacggtaccttgtcgtagtgggagaatttcaaggaactctccctgttatgacatggaagacatttgtgatgaaaatccattgttagtttaaacaggtaatggattgtcacaatgaggaactaagaagtaaagccaagagaactaaggttaaaaccattcatatggagttaccaaaggttttctattactaggacaagaaaggaaatttcattagtaagtttattcaattgacttaacaaaacctcctgttcctagtattatgttgg

SEQ ID NO: 262334 - DNA, 682 bp, Cannabis indica
cggacctggggcttttttttttcattcggtttgagagagacgaaaagagagggggggttcgatggtcggactatggggtccgatgggtccaattggtcggaccccatggtccgaccatcggaccactgtaattttttttttgtttcggtttgacagagacgaagagagataggctgggcccgatggtcggaccatggggtccgatggggtccgaccaatcggaccccatggtccgaccactgtaattttttttctttttttttttcgtatttgagagaaacgaagagagagagggggttgtgcacggagagaggctatgggggccgctgcaccgtgcgccgtcaccgtcggttgaggcttcggggttgaggcttcaggttctcggggttgaggcttcgcgactgagagagggggctgggtgggttgatgcttcgggtccgagagagacgaagagagagtgggggctatgggggtcggttggaatggtgctgtggggtgggccgacgttgggtcggtgttctttgcgatggggtatcgcacagtagagagagaaaaggggaaggagagaggaaagggggaggtgattatgagagggatattatggggataaagcaaaagtagtcatatattgcctatggtattgttgggtttatgtcctagataaaactcatttcaatataat

SEQ ID NO: 262335 - DNA, 555 bp, Cannabis indica
atgatgaagtgcaaaaaatggattaagtctgtagagagtgaagaaaaaaagaaggctaaaattaagataccgtagaaaaggaagaggcaagggacaagaacgtcaggcatttgagatcattttaccatagttaaaaaaaatggtaaaatgagcaaatggtaaggaagaagagagggagagagcacaatgtaattattgtgaagctgattatgcagctgattccaagaattgtggaactagtactctgtggagtcacattgaacacaagtgtaagcagtgtccgtttagcacatatgttcataagcatacaaagcaaggaatgataactgattattttaccaagacaattcaagattctgaagttaattcaagtaagactcgaacctcaatgtttagtcaagctacggtgagagaattgattggaaagtacttcattattgacaagcttccttttaggcatatcgaaggtaaagggttctgcttacttcctagtcatttttttcctacaattgagttaccttcgagggttactattgctcgagatatctaccgatt

SEQ ID NO: 262336 - DNA, 602 bp, Cannabis indica
aatcgccgaaccaggaccctagaacaagactaggaccgtgaccagtaccaggacccagagttagaaccgaacacaaacctagcctcagacccaaacttagactggaacactggcccagacacggtcgtgtagccataccggaactgagacccagacctggacctaaatcggtgacccaatcccaaacacagacttggacctagatagggatctagataagaacctggagtcggacaaagaccccgactgggatcgaaatggtggaccttgatctggaccgggatcttgacccagacccaaacttggacccgcactcgggacccaaacttggacttagacatgaacttagacttaaatctggtaccagacttggacacaaacccgacacagactcacacctgaactcaaacacccacacctagaatcagacccaaagctagacccggacacggacccaaactcgaacacagaccaggatcagaagcaaggacttagacccaaaactgaatccagactcagatctaggttgggtcctagttcagcgattcttgttcaagttataattttgggtcctaggtctaggtttgggttcgggtttggtt

SEQ ID NO: 262337 - DNA, 6417 bp, Cannabis indica
tctcccatgacacgctatcatgcgaagcatgcgtgtccttgtgcactaagctaagaaatccaactgctaggagaaagggaattcaaatgagaatggcccttaggtgacccgggttcgaagcccagtctatacagctggtacaatctgacacccatcaaggccacatgggaaatatgccacctaccgatccaacggtgggattttatccctacgaagatccatcctagacaacccatgcaatatggttagcctataaatacctcacaaaaagcataagggaggggattctcttctttggacattcacctagagattgaagactcactcttcatcaagaaaacacattaactcaagaatattcctactaaccttcctcttcttcaagaggaacacggtggaaaggaataaaagtccattgtatctgtatttatgtaaacaatgatcgaccaatgagtctaataaaatggactcgtggactaaggatagttaacgcctcaaccacgtaaaaatctcttatttattatttcgtgattgtttgggggaaaaaatggaaaaggacataaaggctcaattaggtataagaaaagatacccccaacgttaaagcccaatagttaggtaaaaaacaaagcagcccactactagataaaatattaaaaagcctgagaagtcgcaagaagaaaaaataaagcctaaatgacaaaacatgaaaggataaaataggggtccattgctcgggataataactaaaggcagaattaaacccaaccagaagaaagaagtaatgacagtgaattcaaagacaagccaaagagttgaggtctaaaataaaagtcagaactgacagatgaaagccataggacagacatggtcaagcacggtccaggaaaatcttccatccaactcgccgttggataaatcaaccctccagggaagccagattttgtagagcgagtacattcaaagcaagataaaataaacaatactcccgtcggagaaatatacccaagcataagttaatgctataatctttccatttcctcatccaaaagtaaggtgttccgttggaaggaaatcatgccccaaaggcgcaaaataatcagtagaggctaggtaagaagccgatggatccaataggtacagacgaaaatagcccccatcatactatagtaagacacatggcaggcagggttcagcaaaacaagaggacacgcgtcaaggatacgttaaaaaaaggacaggtcactcatgtactaaaaggacgtacaatataaataagaaagggactacgcaaagaaagggtgatgaattatgaactgaaaaaagaggaacccacactaaacaaattttttgactgttttcggtcgaaaccgtttggtgcctttgggggaacccaatttcttttacaaaagacttttttcgtcacaagatcatactagcccacaagaaaccaccccccccccccaacctgtaaaaaaaaatacatagatatggcaaatgaacaagaaaatctgaccccacttgacaatcacggcaatacccgagagacccaggtaaacactactaatgaaacggttctctaagacccaccatggcgtgagattctagaaaggttaaagcatcaagaggacaaaatgacaacacagggaactgaaattgctctccaaaaggaacacgtccagagactagaaaatgaaaacaggatgaaggtagttcttgaaggataccaatgccccccacatgcagaagaaataaacaaccaatagacgggtaaaaccgctgagaagggaaacaactacagtaacaatcacactggcaaccgcactcattgcatgcatgaaggatccgtgaggaaagaaaaccaaatggcacaaggatctacagagcacccataggaacaaccaagaagagccagggaagaagtggaggaaataacagaggcagaagcactttgcacagtgcctaggaagcgaatcaccgaacttacaactgtagaaaacccgtcaatgataaataaggaagtaaacaagctgcaataaatgatgtggaataagctgttggctttggaagcaaaaagttaggtgggaatacaaagcgaatgggtgaggatggagggatccactcattgaacctttggaaaccacattttgcgcgtagaagccacggaacgttacgtagcctcaaagttactagaatataacagaactggagacccatcggagtacgtgtgtcagttcaaacagaagatgttaacctgtcagtccctctagaggatttagaagcaataaaataaaagacttcatgtaagggttaaggggccctgctcttcaatggttccacaaccttgcatcgggcacaagaaactcagaccaagacttgattctaagggtccaaacaaactttgaaataagtgcaggacgacaaaagtggacacagatttgatgttaatacaccaaggaccagaggagcctttggagaaattcatcaacaggttcagggaggaatatgtggacaaacttcgcaataaactcataccaagacttgattctgaggttccaaacaaacttcgcaataagtgcaggactacaaaagtggacacgaatttgatgttaatacactaaggaccagatgagcctttggagaaattcaccaacaggttcatcgaggaatatgtgagtatcccaaattgcactgattcggttgcaacaaaagcactcatgcaaggattactgcacgactcagaattaaagaaagcgataatagtagaaccaggtctttccttaaccagagctttgaccatggcacgaggatatgtgacacaagaagtcaaagaaagtcaacatgcagaggaggtgtggaggtaaacttcgatgctagtaaattattttctttttaaagaaaaggattgagtgtcgttagcatgatcacatcacagatcaaggcctggtaggtcaacaacaaaaacaaaagaggagtcataatgacacacatggctcagacaaggcaacgtgggaactagcggagcgaagaggagccaccttggatgaccatcacgctgaccgagctgatgaggcgactaaggggaatgaaagaaacaaggtggcccgcaaaaatgactaccgacccagagaagagggataaaagtcgatactgtgccttccacggggaacacagccatgcaacttatgaatgcaggcagttaaagattgaggtaaatatgttagttaaggagggatttttttgagattatttggccttggattcagcactgcatgtccaacaagggcatgacaagagtgaagatcaatccccttcactgtacatcaaaaaaactataaatgtgatttctggaaggtcagacctaagcagaacttccagctgagctttagtggctcattcccgccagatgcactctgttagggcaatgacggtgatagacaacgagggacctgatgtacaaataatgtttaaccaaggggaggcctagcaattggaacacccacatgacgatggcttgattatcaccctagacgtggcccacgttcgtatgaagcgaatgctccttgaaggaaaaggaaattgaggatttaaagacccaagaaacgcaagtcactttggtaagattctcaggggaaagcaccgttgcccgaagttttgtctaattactcgtttatgccaataggatgaaaaagtcgatgaaatttctgattgtagactacccgtcagcctacaatgctatcttgggttgtccatggatccatgctatgaaggaggttgcatcctcttatcatcaggtaattaagtttccatgcaaaggcgaagtaagtgaaatctggggggaccacttgggtgcccgggagtgttacacctcatcactgagttgtaagaacaagttatagaaattaattagctcctcatccctcgccaaaaagtagcccccaacagtcgaggagttataagaagtgtccatccacccgacagatccatccaagactacctacatttgcatgggactcacaagacaacgaaaggatcaaattgtgaagctactgagagattattttcaagtttttgcatgggaacatttggccatgccgagagtagatcctagagtaataactcgcaagctgaatatgaacccaaactatattccagtcaaacaagagaggaggaagatgggagtagatcggaataaagctgtaaacgacaaggtcgagaaaatgctaaaaaaatgatactgttatggaggtacaataccctacttggcttgccaacccagtggtggtcccaaaaaagaatggaaaatggagagtttgcatagaatttattgacgtgaaaaaagactgcccaaaggatagcttcccgctaccccacattgatttaataatcgacgccaccgccagacatgagctgatgagcttcatcgatgctttctcagggtataacaagataatgatgcaccctcccgacacggaaaagacatccttcatcattgagagaggaacgtactgttacaaggtaatacccttcgggcttaagaatgctggggcgacctatcagcgaattgtgaacaaaatgttctctcagcagctgggtctaaccatgaaggcctacatcaacgacatgttagtaaaatacaaggatgggtcggaccacatcgaccatctgcgagaatgtttccaaatcctccttgtccattcaatgagactcaatctggacaagtgcgctttcgccattagctcagggaagttcttgggccacctagtaactcaacgaggagtgtaagtaaacccagaacaaatagaagcttttcaagcaacagtacaaccctgaactgcaaaagatatccagaagttgattgggaaaatcatcgcgcttagtcactttatctcaaaacttttagacaagagtctactgttctaccacttgctcaaaggaaactacaagttcaactaggatgataagtgccagcaagccctagaagcactgaaaaaatatctagctactccactgatattgtcaaagcctaagctagaggaaacgttacttctttacttatccctgtcacgacacgccgtcagctccgtgctagttctagagcaaggaaaggcacaactaccaatatattgtacaagcaaaacattctctagggtagaaggaaggtatccgatgatcaaaaaattggcttgggccctattcatctcagcaaggaagctctgaccttacttccaatgtcatacaattgtagtaatgacgtcattcccattaaagagagtactgcataaaccaaagatatcgggaggctaatgaaatgggcagtagaactgagtgaattcgacatgttatatctcccgcaaatggcggtcaaggggcagccattggcagacttcctggtcgagataactccagaacacatacctcgtaaaggaaaccttgaaaaaagaaactgactattgaaggtggatgggtcatcaaacatccgaggaagcggggtcggaatagtcctcctatcaccaaaacgagagatgctggaccagtcactaaagctaggattctgagcaaccaacaaggatgcagaatatgaagctttaattcgtggaatgaaattagtcaaagaaattggggccaacaaagtattagttcaatctgattctcaattaatagttcaacaggtcaagggagattttgaggctaaggaacacaaaatggttagctacttggcccaagtaaggaagttggcatcaaccttcgactatttccagattagccaggttccctgagaagcaaatatgcatgccgacactctggcaggactaagatcttcctcccccctccagttaaccagggcgatactatttgactttatcccagagcctagtatcacattggaagaagaagcccagtgcgcagagatagtagcagacccattacaagactgaagatggccaatcatcgaatacctaaaggacgataagctactgcaggacccgaaagaagctaaaagatagcatcatgagcctcaaggtacacactgctaatatgttttaatagaaatattttaatattgttatacaagtattatattagtggaattgaagaaatttataaataaacaattattttcttcacaaattaataatggttagtattgtattaatatttggtatcccaaattttgcactttgacgtggcatcacaagaatggtgacacgtggagtccgcttggagcatctgctcgggaagataggccgagaaggatgcctcgctggcatgttcagagcgagaaattcagcgatccacacagaacaatcaacacttagcgaattcaactttcgcatcatgagtcatcagctcaattcctataacttagggatcaatttacgtggatacagcatacacacgataccactatcagtgt

SEQ ID NO: 262338 - DNA, 3658 bp, Cannabis indica
attattaaataaatagttttagaatttataggattgaattggaaaatatggtattattgaaagaagaatatgtggttgaaaaaaagtggcaaaattataactagagattggtcctttatggccggcccttagagtgattttttgcccaatattttattctcttttaatccatataattcagccctaagccctagttgaaacactataaaaggaacatgatgctcttatctcatccacttgacaacttgattttcaacctaccaaaaatctagttttctctgtcagacaaaacccgaaggagtgccatgcccacacatagaaagtcaagtactcaatcatagtgagaaagacagtggtaaccaaacccaaaagagagaaagagatctaggctcagatcttgataatactatgcaaaagaaaggaacaacagttagagatctgagcggaatgagtcattatattccactgcaatcaatgtaagattttctaaactcttatgtgtttaatttcattattttagagatattcatatttaggatgttaattcaacatacttgtttgtatatttagatcctggtaaaatatttccaacaggatcccatgtttaaacttttacaatctttatcaaaatacttttacaaacttgtcgcacaatgactaaaaaatagagcctaagtcgtcctgagattgaacactttaggtcgcgccgtctcaacttgtacactcatcccccgatctcgaaactcactcttgttcagcctttgcctttcttttacctacacatagaaataatatctgtgagtcgacagagtcagtaagaaatgcacaaagcatataatataatactgactttcatctaggcgcccatacacctattcacaaggcttatcatataagtaagaacgttctttagtaaggtacagccactataccacatgcactacgtaccgcgactgtacgagtgttggtagggtttgccccgtacctcgagtacccctaagtgttataccacatacacttcgtacctatccatactatagtatttgtaacaccgtactgcattctttaaacattgtacattataccagtgcactcatactgctaccgtacaagtgttggtagtgtatgaatcacagatagcatgcatataacacacatacacataatcacatatataacatgttctatgctttcgtacctcgtttccgaattcaagtgagtgggccgacttgaatgaaaaatctcatgctagatggataccctaagtcacatttacgtaaacgagtaaataacacaccaaaacctaatttgggaacttaaactcacaactaagggttttgttatcaataattattataacaatatcctaattattgaggaaataactaactaaggctctaaaaataatacgaattaacaaatcacacttttcgggaatcctgcctgtgatccaattaaccggttctacaatacctgtagaaccgattaaccaattcataccaggttctataaacaagtttgaaactcccttaaatcaagcctaaacttcaacaaactttccagaatacatgtaccaacatccaataacagaatccaaccaaaatgcacaacaactcaatatgccattgttgagccaagtttgagttcttagaactcaaacttgctcaacccaagaattaagcaccaaaaccacctcaaaccagctctaaacaacctaacataaccctagaaaacaaaacccaactactatagattcgaacagagccaaacttaacatttcacatacaacaactcaactagtaacttcaaatcttcaaacaacaagaatttctacggttacctttgattagctccacttgattttagataactcctcctccaaaacacactaacaagctgaaattcttactagttcttgctaggtttgaatagagagagagagagagacttggtttttgtttgtctaaatgaatcttgtcttttcttaattgattaagtgaaataataccaaggattttaggctgaaataaaaaagattaaccaactgtaaattccaaattcaaccacataatccaatggaaaaaattcccaaaatgccctttttcttccattgtaagtaacctttaggcttaggggtaaaatggtcaaaaactataaccccgcctagacccgacattctaaatatctcttatatttgtcccactatgaaataggttctaaacttacccatataactctattgaccatccatcacatttttcattgttaccaagcaaaaattataaaaattgcataattcatattagacataaataatactcttagagtttaataaaatctgaagaattgagaaattataactctaatgcccatttctaaaaatattgattttcctctagctctaactgataccatttcgccattactaactttaagtttcaactctccggattttaaataatcccagtttttaagaaatttcaatgaacaacagacatggttagtagatccagaatcaacaatcgagatggatttatcattctctaaaacacatgattcaaaaactaaagcattattattgttcttcgtgttaagaagtccgggataatttgatttgaaatgtcccttttgttcacaatcaaaacattgaatgatatgtctgcttaactgttcttggattgttcttattactggttcaatctgttgtgaaagataatctgaggaagtggaatcactttctctatttttctcaaatgagcctgaagtagtaggattgtcagaggaatcattctcaatatcttcagctttcatttttcccttatctgcattactggagaaggatttccatgcaagtgacaatgtctgttcataagcatgcaattcagcgtccagtttttctatgttggacgagttccaattgttaatcacaattggttaaactcaggtgataagctgttgagaacaaaatgaactctttgctctctagataaaacaattcccaacatagctgctttctggaatttcatgttcatcatgagcaagtgtgaagtgatactctgactagaagtcatcttcacactttggagttcattcctaaagccatactctagatgaggattggggtgtgggttgtacattttgacactacaaatatcaataaacagaaataaatgattgtttcagttaaattcatacacaagttcagaaaattacaagtaaagcaaatatgtttgcaaaaataccaaaataaaacatattaattattttctaagattttcaacataatgagttactgtgtcccgataggtaagagtcaaagataacattaattgaatagagtaggcaactcatctaaaatggacactattttagcaaccttttattcgatcaaaataagaatccaacgctgtcccagtaggcaagattcttggttattctcattttatgagcttcctgtaggattattgttttaccaggatctggatttactaccatgtatgttgtttaacatcctaaatatgaatttctaaaataatgtaatttaaacacatataaagtttaagaaaccttacattggttgcagcagaattaaatgactcattccgcccagatctctaactcttgtatcctttctatagcagagtatcatcaagatctg

SEQ ID NO: 262339 - DNA, 791 bp, Cannabis indica
gtttttaaaaaatactactttaccttttaaaaacagaaaaactgattaaatattttataaatatgtttaacaaaaatattactttcattaagaaaaactacttcagcaaaaccaaacttattgatccaggattggttggtcattattctatcaatcttggaaaatattctatcctccccgggttgcttatttgtcaaagtgaaaaatttccacttgctttgacatcttctaattggcagtagttgacacagttcaagaagtcggtatctggataaaactttaccctttgcccgatcctttcatctttagctaatatatcattaaagtctcccataagaaactagttttcagtagtagcaatttcgaacaagttcttccataatagtctcctttcaactcgattattggaagcataaactatagttcgaaagttattaaaaccttctattgttgatacttttaaatgcattaattggctcgttcatctaatgatatcaatagtaaacctccaagggttccaagcaataacaatcttccccctgcataccatgctatgtgagaagaaaaacaccaactcgcaaacacattagagtacaagattctaagctttggagccttgaccctagtctcgagaagtccaacaaaatcaaccttttgaaaattaataaattgctttattaattgttgtttatgttacctattagctcctcggacattccaccataacaatttatccattttaaagagaggcttctcccccctctcctttcttgttcccttcatctagcaca

SEQ ID NO: 262340 - DNA, 1450 bp, Cannabis indica
tatgagttcaagaactcaaacttggctcaactatggtggattgtgtaatttgagtgatacttggttttaccacatagaatgtatttatatggataattacaggtattctagaaataacctattcgtttttactggtagtaaaacccaaaaaaatggccttgccatttttttagaaaatagtcctatcgttttttgggtagtatcctcgtttcttagttttttcttgtgtttcctcgatatttagggcttttccatgctatttatcgatagtggaacttttagttttgagtttagaacctcgtgtttcctccgttcaatgcgtgattttccattcatgtcaaccgacacacttaatttaaaaaataaggtaagactagcatagaatgtatttgtatatgaatatgcgtatgtgtaatatatggatgctatctgtgattcgcatgctaccaatactagtatagtagttgtactgagtgcattgatatagtatatgatgttcaaaagttacgatctggtgttaccaacactagtacgattaagtacgtagtgcatgtggtacaacactcagtagtactcaaagtacagttcagccctaccagcactagtacgagtaaagtacttagtgcatgtggtatagaggtcgtaattctgttaagaacgttcttaatcatctgttaagccttgtggataggtgtatgggcgcctaaatacaagtcggttatatatattgtatgttatatacttttcttactgagtctgttggctcacatatatttctttcatgtgtaggtaaagggaagaccaaaactaaaagtagtgagttcagagctcgaggatgattgtacatgtcaagagagttcgacctggagagttcggtctcgggacgacttgggtttcattttgtagttgctgtgtgacatgtttgtaaaacttattttgaatataagttttaaaataacgggatcccaattttgtatatatatgtatatatttataaaattttaaagttaaatcaaaattttaatttatcacaatttttgagaaaactctttgattagaaaatgtttgcactgtaattaaaaagtcatcgtagcgtgcctaagcattagggtgttgcagacttcgatcatcttctcttcttgtagcacactcgcactttgatgttaactttattgcctttctcttagtgaattgtaaatttatggtaatgaaagatatagtatcttttcttccacagtcttctcttcttggattgctctcagctgcagttgcttctcatttatggtaatggaagatatagtatccctgttattagatttctgcacatttttgtcggtatcgtggatataattaatcaattcaaaattataatatttacaataaaactctattaatttataaaatttaaactttcaccccttctaaaatatatttttgaattattaatcac

SEQ ID NO: 262341 - DNA, 1610 bp, Cannabis indica
tttcaataatacaataattagtgcggttaggttgggccttcgcatattggacctaaataaatataaaaattggtatttttataatatgcggtgcggtgcagtttgaaccgcatattaacaattcaaaactgtaaaccgcactgcaccgcgcggtttaggaaaaattcaaaccgcgaccgtaccacaaagaatttcaaaccgcattttttttgcggtgtggtgcagtgtgggcgggaacacccctacttgtatctagtttggttagccaattcagtgttggtttcgaagccaaatggaaccttgaggatgtgcatcgacttcacggacttaaataaggcttccccaaaagattgcttcccacttctccagatcgatcaagatggtgggcgccacgtttgaatacgaacttttgagtttatgaatgcatgctcgagcaacaattagatcaaaatgcatatggtggatcaagagaacgctagtttccggacaggcaaggagtgtattgttacattgtgattctatttaggctcaacaatgtcgaagccacatatcaatgtctggtgaacaaaatatttaaatatgttttggggaagaacatagaagtctacataaaagacatgttggtaaaatctaaaacttccaaggagcatagtgatgatctggaagaagccttttttatcatctagaaatatggaaagacgctgaatcctaaaaaatgtacctttggagtttcctcaggaaaattcttggattttattatcagcttctgaggaatagaagccaattcggggaagattcaagcccttctaagtataccttccttttgaaaacataaagacgttcaaagtctaaccgaaaggatcgtagccctgagtatatttgtttctaaaccaatagataagtgtgtttcgttctttaatgttatacgcggaagcaactaagtttgaatggagtgccaaatgtaaagaagccttccaaaaaataaaagaacgtttagccaaagctccaattatgtccaaaccggttgagggagaaccgttgtacctatatttggtcgtgtctgatcatgtgtcaagaaagagaaataagccttgctcttgtcttatattttgcaaaataattcaatactgaattatttataataattgtgacataaaataatttattgtcaccccaaataaataaattgtaataatttacacaacttccaaaattcccttatactttatattttaatatttttcccgtcatgtttgcataattttttcccaacttaatcacttaatcaaaatttattttcctgtcaataaattttccatagttaacaatctcatcaaactatttcaactttaacaatatctagttttattcaaatatttacccgtttagggttaaaaatccaagctcaaaccaagttcctaatcataaattttctattccaataacttgttttaccatttcacaaaaaacttgttttacaagtttcctcgttagcttgttggttacagatggtggtgctttatttacattatcaacatttattaaggctaattaagatattttttttcccccaaactttgacatgtaccaaatcatgcctcctgaatttt

SEQ ID NO: 262342 - DNA, 893 bp, Cannabis indica
ttaatgatagtttaattatattaggatgatttacaaaaaaaaaaaattgtgatagtttaaactgcataattcgcaccgcaccgcatcatttttggcggtgcgacttttacggatttttagtatcgcggtatgagtgcagtttaaaaaattgaaaaaactgcatgtgcgaattaatttaaaaaaatagttaaaaatcgcaccacccgcaccgcgaacacccatttagtacttagtagtactactttcctttcataattgacatatggaagagtctacatgttttcagtttataaacccccaacgttcgaaaaaccctccaaaacttccaacctcttcctccttaaggctctcaatccattccatttgaactcgccggtaggcaactcgctccagcaactccactttcccatggtgagcactcttttcccctctcactcttttcgtcgtttgccctctttcattctttcaaacgtcgtcgttcccctgcttcccaggaaccgcagcaagaagaacagccatctccgacacttgaagattgcttgaagttactgagaggcgacagggacgagcagcgcctcgctggtctacttctcgtcaccaaattttgcaaaggggatgacctttcttctctccgtaggatttacgatgccgtcggtgttcgattccttgatcgccttcttagaactggtatcgttttctctcatatgggttttgtttcattttaggatgtatataattgagatttttgtttgcttacctcgcccgataggtttgttcattaattctaagtttctaatggaatttttgagtttggtgcaattttaagcttcatagtccgcatttagggtttataaatttcttaatagctgtctgaaacttagtgagaaggctgt

SEQ ID NO: 262343 - DNA, 825 bp, Cannabis indica
ctagttctagtaatgctattgctagtacgacaaagcttgtggcaaacattgcctctactttgaaacccacaaagaaaaagaagaagaatagcaagaagcatcttaaagttgttaacacaactaataagggtaagaaggatgcaaatccaaaagcaaaagataaaggaaaattcttctattgcaacaaaaatggtcattggaaaccccagtgtcctaaggtatttctaactttcttataaactcatgtgttttagagaattattatcccctttgattattaattatagatctactaaccatgtttacttttttcttatttcagctctagctgcttaaacttggattgctatcctagcgagttgagtcagatggctggatagaaggttggagattttcccagttgaagatgaagctcgttatcttcattaatttttgaattaactgtttagttattgaacaatttagtttcatttattagtgtgagaattttattccctatttcatattattccagaaaattcattatgatattttcttagataattaataacattttctctttaacaggttttcatttaacaggttttcattatgatttgcttttatgaaatttagcttcatatttttttaatttttatgccaataccatattatatgtatatgtttatcatattttttatatgtgttttgtattaattattgttacaaaatctatggtatattaatatctgcaaagtatttaatactacataaacacttagatttaaaaacttaatgtttatgaataatttccaattcttaaaaaattattaagattttgtttaa

SEQ ID NO: 262344 - DNA, 912 bp, Cannabis indica
tttgctcaaatttcccagagagaaaaattctcagacccagaaaaacacctttaagcactttgcagttttctccagttctccttcgtttgttactgttagtccttcttgtcttcattcgattcacagcaggacccccagtctcaacacttcattgtaagttctttgcaccctttgcttcattattaaatggcatgctgttacttatctgtttgttcttttctgggtttgcattcgaagtttctgggaatgcaagtgtttaaatccttcatataatcggtttgagtttactgctctagtgataggattactgttgtcacacatttgttgttattttttgtagaagaccatacgttcttcgtataatggttgcttagggcataggatagactgttttctttctatttcctgccttttctttttctttagtgtgcaatgccgtcttctgtgaatttattgcacccgactctcgtccagggaatcctcctagggtttcctatatgacaggtgtccggaaggggcctctttccagcggttaggggacccccattccctttttcttggtttagggtttggtgtggggcctaactgctggaatcttaactctttttatagaatcgaaaaatgtctgcttccggctcaaaatcatcgaagaagagcggtaatcgcctggctaccctcgaggaggtctccctgggtcctgttgcccaggaggggtacaagtctcgagtgaccggatgggaggcggccgagcttcactccactctaacctgtccccatcagttggagaacatcgtggaggtagctggaatcaagccttccacatcagggacctaccatcggccacctcgcgacgcggaggcgcccaatcataactacgacggctttggggcctggagccagacgcatttgatg

SEQ ID NO: 262345 - DNA, 701 bp, Cannabis indica
tataaaaacacagtatttttaaaaagattttcgtgttttttgtaaaaattaacctaaattccagtatttttgtaaattttccttttttttcttagcttttggttggacttgggtataaaagtgatagttttgaaatagtgttatttctttctttctttaattcttttataactgggatttacacctaaccaataaaaacaaaaaaccaaattcaatttttgaaatgtattcaaacaaattattaattttagtattaaactgagttttctatgaacatttatgaatttaattgataaaatggattttgatttaattttctttaatatatatatatatatattatatttacagactgatctacttttatatgtgttttttctgattatattcttcatgaaaataatatataaacaaagtataacattattgccaaaatgatgtaaaaaacaacattccaaagaaaatttccaattcttaaaaaacttgaagaagtaatgcagatatgtatttttgtaatatttctcattttgggtatttattaaaaaattctttaatttcattcattttaaagttgtagtttaaatatattttaacaattaaaatattatttttaaaaacttttatttgttttcttaattagctgatttatgaaatatgagtgtatttttatcacctccaaccatatttcatatttcattttt

SEQ ID NO: 262346 - DNA, 519 bp, Cannabis indica
ttggttcttcctttttaacttcaatgagagaaatattttcagcaacattaaccttcgatttctcttaacaggtcgttgatcacttttttggataggtatagcaaagtctgaattatcatcttcaacaacaggccattttcctttagatatgttagcaagagatttaacactcatttttgaaggtttttttagcaacagtgataggaaagatgaagaccaagtaatagttatttatagaagagaaaaataattttcttttttaaaagtaaaaaaatacggtcagatggtggaggaaggtagttgagaaagatagataaaattagttttgatcatgtgagaagttttcaaacagaaaactacaaagaaaaatgaaatgaagctgaaaaaataaaaagaaaaaagataatagattaggagaaaaaataaatagtgtgtgaaagtagtataatgacaatatgtatgtataagaggtattagttaaaataggaaaaaaaaaaacaaaaaaataaaaataagtag

SEQ ID NO: 262347 - DNA, 999 bp, Cannabis indica
accgcccctcccagtcccttgtctagacaagtcttagtaaaagcgcagctaaccattatataaaaacttgtctcatcctcccgattacacatcgaacacaatctgctcacgtggacccttttagaccggagagacacaagagtagggagacaattagtaagaccccaccaaagaaaattcttcaccttaggaggcaatttcaagttccaaaacatcctccaaaaacccgaattgtcttgcgtattccacctaccattgcttacttgtaaggcgcgataagcacttttgacagaataatccccatgagtctccaacatccaaaaccaagcatcctcaatcgaagacggagacaacgaaatacaacggatcaaatcaatatccctttgaacaaataaatcgtgaagaacttcctcatcccactcaagagagtccacttttaataaattattgaccttacagtcatggagagccacatgagaagaggtaacatacggatgttccttacaaggaagccatggttgattaagaaccgatatagaaaaatcgactcccacacgccatctcgcacccgtcttaaccacaaattttgcctctagaacactctgccgcacgtagcttggattagcacctaattcagcatcaagaaacaaggaatgggggtaatacctggctttaaaaacctgagccactaaggaactattattcgtcaaaagcctccaaccttgcttacctaacatggctaaattaaaatctctaagatttcgaaaacccaaccccccttggtgcttatgcaagcacagcttatcccaactcctccaataaataccttggccctgtgaagacttcgtatgccaccaatatctacccataagctgatccacatctttacaaatctccaacaggatcaagaaaacactcatagcataagtcggtaaagattgaataaccgatttcataagcacttccttccccgctttagacaagagcttactatcccac

SEQ ID NO: 262348 - DNA, 562 bp, Cannabis indica
ggataattcatgttggcacataaccactcttatagacgacacctttaatttgccaaaagaagtagagattggtagatttttccatcaaaatttgaggttggaagcttaattgcaagtgaattgagagttcagggggtttaactgtaaattactctatatatacttgagagtagtgaagaccccgagaaaaacaagtgcttcctactcctttattagtctaaggaaatatccaagcgagttcgcgaactttgcttgactccccaggggccttgtgctcctagtgacactaactagaatttgtttgtggatagtgggagactcccaatatttaactagaccagagtgtactttgatgcatcttttgtttatagtttaggggctagtgttgttgtcatccttgatgatcagggtagggtgtgctcgaccaaaatagaggtgtttggggctgctttagtgctaaaggctgagacttgggctggaattcttgtagtgtcttggatcattcaacttgggatagggaaccagtgctcttttcaaattgcaagaagttttgttgggctac

SEQ ID NO: 262349 - DNA, 743 bp, Cannabis indica
acggaaagctccccttagttttttttccccataattctgaccctttcggtgggtcagggagacaagtatcagaaacagctgatcataatttatattacaactaactaaataaatcataacaccataacaaaacggttgcgtctttgcaaataaaaccaaataaaaataaattttatcccaaataaaatgatttaatacatcctatactattatcctatttgctcaatctattgacttggccccacaccaatgtggggcatattacaatgccagcttactaatacttacttctatagctaccaccaccgacgatccttccattgcatcattacccaagtaaaaaaaaaaagaaaaaatagtcataattatcttacaaaatagtacaccattttgaaagagtacacctctcttttttattcacatcacatgttttactaaataaaaccttcatgaaatgataatggtaatgaaaattcatgaaatggtattcttgtgtctatgaaaatgactacccaaagttggtcattgggttgtgtgttataaatatttgtgtttgaagtccttttctggcagagaattgatatttctaaattggaatgtataaaagaacaaatctgttgtgggcgaatagttttcaccaatacgtgtctatttccactttttatcgttggtgaaattattttcattttgataaattagacaaccaatttgcaaaccacctactcatatggtccatatatata

SEQ ID NO: 262350 - DNA, 780 bp, Cannabis indica
tatcaagatctgaacctggatttataatttatatttataattttcgtaaaaattttattttagcggtacattaatgttgtaattattttattaaaatatgggttgatgaatagttttttttattattattattattttagcacatagagttagtgatctataattaatagactgatctagttaaagtagaagtgtgagattttttagttaatgaagccttgatgatgaggaggtccaatccaactagaattttgttgttaggtcccctccctaattttataataaatattgtcttattacaattgtatacttttgtgatcaattgatctgctttagtcttagagacctaaggaggaaaatcatctagcttgttagcattgcactatcaaatctttgttattgttatgaactagtcaagtaagttttgtatattattgaatttatcattgtgtctaaattatatacaatttcttatcctggcattttatgattttctaacatttgtcacttgaattcttgaattgtaccagattagtctgagatcactcactacaccaaaagggcttttggcgttagtcaacgatattcaccaacacaattgtctaggatcggatgtaggcattagttaatatcctaacacaagataaatgtgttaggtatacagtatctcttaggggtgttcgcggtgtgggtggtgcagtttctgaccatttttttaaaccaatctgcacatgtggtttttccaatttttcaaaatacacccgtgttgggttttatgcc

SEQ ID NO: 262351 - DNA, 541 bp, Cannabis indica
cttctgaaacttgaggcaagctttcccttagcttggaccgatactaattcgccatttccaactttgagctttaactcccctggatttaaataatcccaagtttcaagcagctggaatgaagaacaaacatgattagtaccagaatcaacaatccaaaggatttgtcattctctaaaacacatgattcaaaaacaaaagcgttaccttcattcgaattgtttagaagtctcggacatctttcttcctgatgtcccttctcatcacaatttgaacattgaagagtactaatatcaattgtttcattatttgaacttgataagcagcactgttagagcatcatacttaattattttcctcttacttaagtttggaaagctggagggtggcctccttgcaggcaaactccgttcgtaagcacgcaattctacttccagcttatctacgtcggatgagttaaaattgttgaccatgtaagatacaaaaaatccattatactcaagagaaagactattaagaatgaattgaacccattgttctcttg

SEQ ID NO: 262352 - DNA, 3609 bp, Cannabis indica
taagacaacataggtctaggttatatttttcttaagagctcccatttcatcaaacatagcattattccattcttcttgctgtaaagccatttttcacacttgttggttcctgaagaaccagataagcctttggcttgtagataccagacttagcccttgttttcatttgatgcttgtttgtggtgacactggatgactgagccgggacactgggatgtgactgagtttgagattgactggtattaggaataaaagtggtgcttggaactgttgtggacacagttcgcaactgattagtggggaatggatgataaacaagagtttctagtgtgttaataggttcaaattgtggcacggacagtgtgttaggttcagtagaggatgattcattgctgtcaggaatgagaatcgaatcactggactgaggtaggtcatttggaaacaggaactcaacactatatgtatgggaagagggaagagattcagagggagcagtagcaagatcagatgttgattgtgagacctttaatgcatagggaaattttgtttcattaaagataatatccctagaaatatacaacctaccagatgagtctaagcatttgtagcctttatgatatacccaataaatgtacaaggggaagacctaaactgaagtttatgcttgttgtagggccttatgttagggtaacaaagacatccaaagattctaaggttactgtattcaggttttatgtgaaatggcatgtcaatgggagagttttggttcaagacaggtgtgggtaacctgttatgtatgtagatagcacacctaaaggcttcatcccaaaatttcagtggcatggaagcttgagcaagcaagcttagaccatgttccacaatttgcctatgcttcctttcaactaacccattttgttcaagggttgtggggcatggatgcctatgaatgataccaacttgttttaaaggctcagtaaaggacctatattcacccgcaatctgtttgaaccactttgatctttttccctatttgaagctcagtttcagctttaaaattcagaaaagttttaagagcttcggacttagttttaagtagataaatccatgtaaatgtactgcaggcatcaacaaatgatatgtaatacttgtagccattatgagagactgtatgggagggaccttataagtctgagacaagtagtaagggttcacagtattcagtgcaggatgctttgggaaaaggcatcttatgaattttaccaagacaacatgcttgacaaacagacttaggtcttttattgctttcaacagagatgttacaagattttaatacagaatgaacaactttatcttaaggatgacctagtctattatgcttaagttcaaaaacagaaacaagagagttattacaatgactacaagtgctgacattagattcaagggaacttgttccagaagtgacaacacaggcatgtttctggtgtggaagactggaaacagactgagatgaaacaggtggagttgagacagctcgaaattgatctgaatcaaaagtatataggccattgtgcgagtgtcctagtcagtataacaactttggtcacctggtccttgacataacaaacaagagggtgaaactcaaagaaaacatcattgtcaagggcaaatttagaaacactaagaagattctttgtaatatctggcatatgtaaagatttttgagaattaaagtcttatctgacagtttagacttaaaacaagcaaagccagtatgttgaatctcaaaacctgaaccatttcccacaaagagtttctcctgtccattatattcaaagctactcatcagattttttttgtcagtagtgcagtgatttgttactcctgaattttggataccaatttgcatcagtatttggagatgtttgagcaacatgggcctgcattgatgtagctccatctgagggtggtaaggctcttgtgaagcttttgtcgaatctgtaaaagcattcaagggccatatgtccaattttgtgacatagttgacattgaggcttattcatgtgctgcaggaaaccttccaccactttgattattgaaattgcctctcccatggttgtatgaaggaaatccacctcgagacatattgctcgaattagttcatctgttattatatggataggaagaactaacatatggatagggaggagtgtgaaactgccctttattgaagttttgtcctctgaaattacgattgtagtgagcaagaaaggcttcatatgacaattggctttcaagatcaggattcatgtcagcaacaacaagattagcacttagatcgatttctttatcagtcttttctattcttgattcagaagcaagaaggagagcctcgatctcagctacagaatactcctcaactctggtgttagaagatacgataaaggtatcatactcactttgcaatcctttaaagattccagcaacatgatctcgaggagaaagaacttctcctacagaggcaatcaaatcaacatggtgttttaacttgagaaggtaatcattgagagaagaagtttcctttttaagattctatagtttggtgcgaaattcaagtatctttgatgagacttgaagtgtgaaatacttttctagggcactccagatctgtcgagctgtatgacatccaaccattctagtgagtaagctctcaatcatggaagaaagaagccatgacacaagcagttgatcttgcacctcccattcgacaaaggctggattctgaacagaagcagcacgatatgcattagtcaagaattgaggtggaggagcaatgtcttgggtgaacctagagacgactccctctaatcgcagcttgaacttgctgtttccattggagaaagttgtgatcgtttagcttgatcgacaatgtatgattgaaatagattggactttggccagtttcacgagatcgattctttcctggaacttgggagaaacctaggggagctgtaggactgccatttccttgactgttgtttcctatgttcgccatattcgccaccagaggaggataatgctctgataccatattagaactcttgttccatgccattgttgcagaaagaaaagcagagaaccaaaaacagaagaagaagaagaaggaaagagagaaaagacagtgaaagatagaaagaattaactgaaagaatctcttacattgatcaactggaaaagcacattatatacagctcaagattacaacaataaagcccaacaatactaacaaactcctaaccgaaaaccaactgctagcagacaagagcaactaacttagagacagttagaatctttaactgtcttgacaagtatgtatgaatgggcattaaattgacaaaaaaaaataattgtgcattatttggtttatttttcgcacaaactaattggatcaattgtacaatatattgatctgtatttgtcgcatatataaatatatatatatatatatatatgtcgtattatcaattacacacttagctagtttagttatctagttagctttttctccatgagagtcatgtgtaaatacaaattaaatgatatatatatata

SEQ ID NO: 262353 - DNA, 693 bp, Cannabis indica
aaaattattaattgaactttatgttttgttgaatgagaaaatgaattctatatttttttaaaatagtacaaataaaattttgagctcaaattttcgatttttttcaaacataactaacttaaagacaatttctagcacgaacagatatagaaaacgtaatcagttttgtcataacacctctatattaagttttattttacaaaaaaatcagttcaaagtaccatttagtactgttttagaaaatacatggtctaatttgtcatttaacaaaagagatggtccagttagttatttttacaaaacacaaggtccaaaataatatttacccattatgaaatattactagatatttacaaatatattagcccaaaatatagggtgaattgaaaatttaaactaatttcaaaaattcaaaaactttaaagacaatttatgcaaatattcatatttaatgcattaacatagataaacacaagtataaacaaatatcaaacttgaaatgtaaagaatttaggtatagaaattgtaaactcaatttttacaatgtttagtagaactaagctacctacgttcttgtcttcaaagttatagacctagctttgagctcaactgaagagccaagttaaaagatttgactaacctttacaatcgagaaatttctcaccaaggatttttccaaacctctcacaatag

SEQ ID NO: 262354 - DNA, 797 bp, Cannabis indica
cttgaacctaggacccagctcgtgacccggcaccagaaatagaaccaaattgggacccaagatagggatccggatctggacccaaggcttggacaaaacccgtatttgttgtctaggacccatcctggacctgaaccatgacaaggactcgaaccaacacctgaaccataactgaaattggagctagatccagaaccgtaacaggaccaggacccagactccaaattagacctagacctgaattgggagccgaacccggatcccaacctaaacctagactcgagacccaaacccaaacctacactcagaccaaaacattgatgttatagtgagatttctctcacctagaaactcgagaccagactcttatttaaaggacacgtgtattcagatttccaatgaaagctgaaatgtccatgagagacttctcgaagttttagacctcgcccaggataaaaccagcgagatactgcgagtgcgacctaagtcgcaccgcataaccgtaattctcattatgcagggtagatccaactcgcgtgtgtcagaacatgtgcgagtgtcccctctatatttccgcgaaaacatagagaccaactctctatgatacaatttggtcccaacgacccaatagccctgacaaaccgatataaattcgcatgtccaagttctaccagctcaaacatgcgatgtctacgaggggcgattacctaagggcgcagacgttccaaacgtactggcgaccctgcgagctcaacaaacggaacatgaacagtcaactcgcagatgcggaagacgca

SEQ ID NO: 262355 - DNA, 2892 bp, Cannabis indica
tttttttattaaaaaatattaatgttgagtacatggaaaaggaaaaaattagaaaatcctccatcttaaactagttcatgagtgcatgcaaaattaagttatgcagctttattaacatatttttgcatgtgtttaataaatttccgtaaaaaaagttatggacttgaaaattttcgattaggcattaaataagtaccatgcagataaaaaactccgcaagactctattctcaattgccatcgaaatataaaaaaataaataaataaataaacaccacggcactgcaagtactcataccacacgcgctatgttgcgcgtggtaattctctccattctctttttttgtcatcattgtctaaaatttctatgatatcactgtggatttttgtcgttgtgaagatgcggacactacgtaaagctgacgtcactttcctcattcctcatcactgcacgcaaccccaaaaaagtatacaaataaaaaataacaccgtttagaccaatcatattacgcccgttcataactgaaagcgaattaaaagacgccacgtaataaaaatactcttggcccagtacaaaactgacaggcttgtgttgttaacagagtctcctcaactacgaacttggaaaagaaagagaagggcaaaacggtcattttcccagaaagggatggagggagaattacttactatatatatgtggctcaaagtcgggccgggggccgagcggggcagtttgggaaaggcaacgagagtgcgacacgtgtccaatcattttagccgacagcgacaagctcggagatatatccgcatttaaagaaaaaggcggttgcggagatagtcggggctctccatcgattggctactttcttgactttgatgacacgtgggccccttcaattcgtggaattacatgcccaaaaagaaaaaggagggtatggtgtgtttgattgctcgggcgcgtgggccccaacttcggagggtgcgaatcttcgttaaaggtagatacaaaataaaatttaaaattcaagaaaaaaaaaacacaaagcaagtagggataggttgctgtgcatttgacgcgtgtacagtgtgcggtggtgggccatatatacatacacaacactgggggaccgcttttaagcctcgctaaagtccaaaacctctacccctaaaagattactaaaattgtttttttttctccctgaaaaataaaaattaaaaaagacagctaaattcatattaaaataaaataaagaaggataataaacaattatggagagagaagtttttgccaacagccttactcacactgttaatatggcacgtgtaggaacgcgctgggtcccgcttttggcatattgctttgcctaactcttttttatttgctttcgagtgctcttagtgacgtgccctcttcgtagcccttcggggtaaatgttgtgactatataaatattaattaataatgaatcataaatatatatttttttaattaaatttcttaatgttgttgaaattaaaatatttgcttctggctttttcttttggacaaacaggtgtggaaacacaattagtaagcacgggtgttatcgatttttgccagttcttcagtgtatttatactaaaaagttaataattatgagatctatacattaattattatgaagtagagatgtaatcaatcaatcttatcattgattgtcagattaacaagaaaatggttaattgtgtctcactacgcagtaatttattaataaatatatgtttttgttacataaaatctttgtagtgcaaaatctagagatctcatctcatccattatcaatatttgatgactttttgttacaagtgttcactcattatggctagtgctcgattgatttgaggtgatgatacaagtaaagtatatagcctaggcttctcagaatgtatagctagctctaggttgcatcacacattaattgcaaatttcataggtacataatgtgacgtgtattcacataaaatgcaacttaatgatgattaattagactgattgataactaggttttggaatttaattgcatgtctaaaatgcaccagcaaaaaatatgagtgaaaaaatgggtttttatagctagaattacttctaatttattacagaaatgttaaatagcaaggcacttgtggtgtagtgtctataagagccctcacaattgaattggtaaattgagcattgttattgggcactagtggtgcctagcacgtctagacatgtcactttgcgatttgctaataatactccctaaaaattattatattaaactatatgagatctgatacttaattggatcaatagcgataattacacataagaggatactaggcaccactgataccttttagcatttctcgtggtaaaatagctattagttacaaaaaaaaaaaaaaagagttaaaaaaaaaataagtgaaaaatgatactccattaaatgatttatgtattagagcatctttaataaagtgtccaaaaagtggttttaacacatttaagaaaaattattgctccaacgctgttctaaaaaaagtgtactaactttgacacatgctaaaaaattgtaccaattaatttagtacaagatataatattatgccaaatttatcttacaatatatgctattttttatttactatcatactaataattattatgatttattaacttttattaaaatttaccttctttatttaccatattaccattatataaataataaaatgataaaaataataatttttgcatattctcaataaaatgttaaatgatcatcaatataatcgattatttctttccttattttacatcttgttaagggtgttcacggattgcttttatttactttttcattttttttttt

SEQ ID NO: 262356 - DNA, 929 bp, Cannabis indica
agtcgcattcgtatagttcgcacgaagtaggaccgaagatcgcttcaaaagttatgtatactaagatatatgtgaggactataaagatcttcctgcgaggttgtaaagatcgattctttactctccgagttggtccggatgacccaacagcctcgacaacctgataaggactcgcatgtcttaagttatcaacttattgcaggatatccgtatatgcgactcagacaggacgcagacatctcagactcgactggtcttgcacgcatcttaagcctgcgagaatatgaacagacaactcgtactatagaagttgcatacgttgttgtatttagtgaattaggccgaaattgttcttcatttattgtatttacgttttttattgatttaaatgctatattcaatgtacaaacagattgataatgacttcaatctctgtgtaatcaaaggacacttgctttgtatataaaggagtgatccaacatgaaatggacaagacagaaaaaccattgcaacagtggactaagcagaccgtgatctgactgaaccactatacttcttttgttgctctttatatttctagtacgtctgtgtatccatagttcgaatactcgccattctaggttgagtactcacacatctctgtttgtattcttaatttattatttattttggtgttgtctaaattcctccagcaacaattatataacaatataattattcaatcatagttaattcattctaattaaggttgctaatccattttactaatctcgggatattacaattatcccctccttatagaaattttgtcccgaaatttacttgtacaactcgggatatctctgcctcatgtcagactctaattcccaagtcacctattcgaccttactgttcttccgtaatacttttactaacaccagtgttttgtt

SEQ ID NO: 262357 - DNA, 760 bp, Cannabis indica
gagaacttcgatatatccaactgggagaaaatcccactttaattgctcaaagaaagaaggaaataaatataaatatatacacacagtgatcattcaagatctgacatacacaggtctcaattcttgaatttttccaatgccaaccttatcatatattctttagatttcttaattaaaatattatcttaaggtccactccttaattgggtgtcgttaaatcaccattcaaaacacttcgcctataccaatatgaatatcatcttttttgttttcaattcatcacagtaaatacattaataaatataaattaaaatgagtaaaaaaatacctgatattcaaatggagagtacaacacaaataatctaaaccgacaataaatggcaggaacctacaagaaaaacgacattgtaaataaaaaatgataatgaccatacaaacgctctacatccaattccattcaaaatgtatatttatttaatacaaaaaataaattccaattcaaattgcatagacttctcaaacaccaaagaaataaaaaagccaataggacttaggaaatagtaaaacatctaaagaacatcattgattgcattaagaaaaaatagaaaatagtaatgtagtacacagtaataaaatagaaaataataatttgaaatgttggtatagacacacaaggatatataccaagttttgatcttcaaataagagctttgctgaggaagaaggatggccaagtgtgtaacaataataatatcaatgc

SEQ ID NO: 262358 - DNA, 632 bp, Cannabis indica
cttgggtctggctggttattactaacaattagtgtttgcttttaaaatttggcggcattatctctacagacagaaatgtgaaatttatactgaccataagagcctcaaattattctttactcagaaagatttgaatatgagacagtggcgtttgttagagttgggtaaggattatgactgtgaaatcctttaccatcctggaaaagccaatgtagtggttgatggcctgagcaggaagggtctcgggcaagtaactagtatgattaagatttcacctcagttagctggagaaatggtcagatcaagcatcgagtttgttgtaggcaaacttcataacttaacgctgcaatctaatctcttagaaagaattaaagctgctcagttagttgatccagagttagtgaagatctgagaagaggttttgtctggtaaagccaaagattttatggtgtgagataaatggatgttgttgtttaaaacaaaggtttgtgttccaagtagtgcggaacttagatatgagattcttgaggaggcccataacagtccatattcatttcatcctgacactaccaagatgtaccaagaccttaaaccctacttttggtggagcggaatgaagaataatgtggtag

SEQ ID NO: 262359 - DNA, 1313 bp, Cannabis indica
aatgatgcttttgcgttctaactggagaagatttcagaagcctttcatttgattcatgactcgttttctaacttgagaaagtttgtatgagcttttccatccatttttctccctaaagagtgaataatataatccaagtacttcatggtcttgtacattcttggttgatcctgcatcattgattccacaggaccaagttcaattccttcgtgtggaattacaaatgttgctattgacattcttgctttgttctcattagttacggctctgtgctcaatgcttttgtacatcccattgctccaagcctgaaaatcaactgtttcagtttttttttatccctaaatgttgatcccaattaggaaagataagacaaaatgtccaagttagactgtacagaaaagacattaatcactcaatattcgtaaaccttattttactgtctgttatgtattatcatatagcatatacattcaactagtgtatctcaatattagtagctattcccatttagtatttaacctatctctaaggattacctcaacaacatcaccgatgttgaccaccagtgcgtttgggattggctttacaggaagccatgttcccttatatctgatttgaagaccggtgatgtcgtcgtcctggagaagtagggttatggatccaccgtcggaatgtggactaacaccgagaacaaggtcaggcttggagcagggtggatagtagttcattctcattgattgtttcctcactacatgaagcctcttcaacccattcttatccattcccatcaacaaagacatgctggccatgatttcctcacttactctctctatttctcttgagtattcttcaactgcttccctgttcatagtttaaacacaacaagaacatgggaaatcttataacctttaaatagttggaatagactgaaaaacacaactatttatgtaggcatatacagttgcaattttctgtagactttactagtacgtacttgaaacctgataaggttgttggccagtacttcatgtttcgagcttcaagtggggatgtcattaagtatatcaagtcaccccaatccagtttttggtcttctgaaactacgtatgcctggccatatccttgaaggtcattctctgccattgcatacttctttttctcttccaatgggagattgaaaaaatctgcgacaacagccttcatttcacctaaaacctcctctggaaccccgtggtttattatctagacagataaaatgttcccatattgaatatgataagcatagaaactatgtaatacaaaaaaaaaaaaaa

SEQ ID NO: 262360 - DNA, 735 bp, Cannabis indica
acaaccagctgagaatcaaaggaaaaagatgaagaacaccaaccctaactgtcctaggattttcgagagagagagggtgaaagagagagagtttctagttttcaactcacctttccttattttataaaaatgaattaataccttagttagtcgaaggtaatatcagcttatacataactaaaaatctgatttaaataagcttaataaaactcataaaaggatgtgattctaatagccaaacaccgtgttctaatgttgtcgggcacaaagcatgcaaaattataaaatttctataaaagacataaaaatggattctgaattcaaataaatcatcatgaataattaatttaatactaataaataatcaggtgagcccatatatcacatgcataataacatcacattatcaatactcaaccaatcaatcttttcattatataacaatattaactatatcccaatattaatcaattcataacaatactaattatattacatacaacgtactatgcagtacaatatacttttcttaccttaaatccaggttcatacgtttcagctaacccaagtggagaactatacccgatgatctcggccctatgtcacaacaacggtaaaccaataatgtttatcccaaaacactacttaatattcacataagacaatctagggttttctaccaaaccccgcggtataaatacactaaaataaaacttatattttggctctaaaata

SEQ ID NO: 262361 - DNA, 598 bp, Cannabis indica
acaacacaccaacttcaccaacttcttgaaagaaatatctacatacacaaaatttatttaaaaacaatatacgcaataatatcaatgtaatttttgttgaaatcattattttaaaataagtttagtggtttctatttgataagtaaaaatagttttctattttagacaaaatgggttctatcttacaaatgagatgatatttttcattttaataatagtaattttcataatagctcaaatttgcaaccttgatcacaaaaatatcaatttttttatttcattgtgtagtaacaatgactcctaagagatttaaaaaaacatatataaaaataaagtactgacttttttttttttaaaagaaaagatataaagtatagacgtgtgtgcaaatatatcagagtgcatgagagagaaaggttgtgtggattagtaagaaacactaaaaagaaaaatgttgaaaccgtgaatgtgttaaaatgttttattaaaatgaaaacataaatataaaaacgtaaaattgaaaaagtacaagaagttacgtatacatgataatttccccatattttatttaattaattaattaattaatatttattaa

SEQ ID NO: 262362 - DNA, 767 bp, Cannabis indica
ttttagggtttttctttgttttttgtataattgatatttttgattttgaaaatattttttataatcagattatatattatataaatgtaaaaaattattttttattattttttttttagaataacgtaataagtcacattagttttaaatcaaattaaattttttattttaatagttaatattaggtggcaattttataatatgatgtggcattattttaaatgatgtggcatgccacctgttgtccagtgtgcaagataacagcaaggtacctacagaatgtctgaaagtgtaacggaaggtatttatgccgccaaaattttaacttaggtattaaattgcaaccgaatgataaacttaggtatttatgccgcaaattactctaaaaaaatttatataacatagttaattttatgatgtttaactttaagttattattattttgagataaaacaactctataataacataaatatattgaatttcatttaaatttatagtttggttacttatttattaacaaattataaaataaattaagaggttgttttattttgttatattttctttttaataacaataaatgaaatatatgttttctatatattgaaatgattaatttgaaaaatagattgtaataatataattttttaaattgaaatgatcaaaaattgtgatagcaaaagatttttcaaataatagacaagagagagaaagagagagaaaaataattaaaaaaaattaaaataaaaacgcttgtacatggt

SEQ ID NO: 262363 - DNA, 876 bp, Cannabis indica
tagatgggtatgtgaaaaatatacatatatattaaggatgaaaagtgtgtgttaagtggagatggttagacataagtgggtttgctccacaattgcctcttgattactcttcactctctagcatattgttttgtgtgttttggacttggatattgatcaatggctcaatatgatgggatgagcaatatgggaggtatgttttcttaaccattaatgctctaaataaatgcttgaatcttggatagttgtaagagcatcattggatcaacatatttaattatagtgattataatgctcttgtttgaatattcctttaacattaatagccaataatttatggcaacaattttttttttttgaaatggatgaataattcattagattaatcattcaacttagaggtgaacaaaatatgggtcaaaccattcaatccggccaacccaacctatttttttatagtaaagggttatgttaagagtatgccatgactcgggctaaaaagtgataggccacataattatgggttggttatgggttgagcacactataaatataacccaacccaatccatttcttaaaagacattctaaatttgagacaattttcatatataaaatatattttacattcacaaaatttataaaaatatatattttacattttaataaataaattatattattacgataaccttagaaagtaaattaaccaaaacatattactaatacgtagttcaaagttatcctactactattacaaacaagtttaatatgagaatcaattactattatcaactttgttacccacacaatgataccaccaccacttcagatttttttatagcactatatttacatacacacctatatatttaca

SEQ ID NO: 262364 - DNA, 833 bp, Cannabis indica
cactcttttcaatattgtttgtttgttttttttattctttatagaatttcaatattgtttgttgggataacaaaatcatataaaacagaaaaaacagaaagtggcgtagatgttttacctaactttatataagtatatataaaaaaaatttcttgtgtattgaattcgctcactttgatttgcaaaccgtgcccaaaacacaccccataaatgaaaaataagtgatagtgaaagacaaattttattagttatatagtatatattataataaaaatttgatcacgtcattagaaagtggtgtgtgggatattatgattacatatatggccaacaaagagtatctacacacaaaaatataaatatgatggtagccatggtttgatatgtgacaccaacccaatgacccattatacaattttgtcctaattttactgttgtcggtgctacatatctaaacattcaatcaataataaaccccactttctttctttcatttttttccttccctattaatttgttgtacccgaattgctaccttgtactgcttccgtgatgctattaatgttgtcgttacataagagaaagagagggtacattttcatttattatataaaacaactgattttgatcgtcacttcctttgttatgggtggctcttattgtacaccaacatcatcaatactatacaataatgtttccactactcttttcctgatcaatttatattatattatttatgtagttacagtaaacaatacgcttcactgcacaaactaatctacctctaatcttattgcttaaatattagcaataccaccatatctcattttaca

SEQ ID NO: 262365 - DNA, 2719 bp, Cannabis indica
tcgttttggtggtatgtataatacattcatgaattaatattatgtctagctacctatttttgtgtacgtttataattaattaatatataatatgtatttgtttgtttaataataatactgatcaataaattaatggctctagatgaatttaatttgttcaataaattcaattaatacatatttatttgcttgttttgcaggtagttaataaaaacatgagctgggtgaagttttttgtggcattccttatttcaatcatgatacctcttagggtggtgtcgttagattcatcatcagaaaacgtacttaatgatgtaatgataagtggtcatgaatatcatactagatgggcagtgctcattgctggttctgcatattatttgaattataggcatcaggtaattaattaattatatttgcaaattttttaataccaaatgtacatatatacatacatttcaattgcagaattattagatacatatgtaaatatataatatgtttatatatatatatatgtacaggctgacgtgtgccatgcgtatcaaatactgaagaaaggtggattaaaagatgaaaacattattgttttcatgtatgatgacattgcatttaacccaaacaaccctaggcctggggttattatcaacaaaccatatggtcctaacgtttatccaggagttcccaaggttaattaattttacatttttttaatcttctaattaaatattaatagacttaatcaataattatatatatgcaggattatacaggaaaacatgttacatctgaaaatctttatgctgtgattcttggtaataaaagtgctgtgactggaggcagtggtaaggtccttgacagtggtccaaatgaccatattttcatttactatgccgatcatggggctcctggaatgctcggtcagtatatagtactactacttctacttattaattataatgttattaattattgatataacaataacattataattttatcaaaagcttattatatttgtttttattaatattcaggtatgccaggtgaactagatgtcgtttatgcaaatgatctcgtacatgtactgaaaaagaagcatgagaataaagcctacagaaaaatggtacaaacttatattaattattacttaaaattaaataagagtttatataaaaatcattgctaatttaattttggggggtaataaggtaatttacattgaagcgtgtgagtctgggagcatttttgatggacttctccctaagaatataaatatatatgcaacaacagcatcaaattcaagagagagcagttatgctacgtattgccccgatgatgatttcagttctccactttctgaatatgacacctgcttaggggacttgtacagtatttcttggatggaacattggtatgtaatacactagttacataattgttttagtactcttataatcacaaatagtttaattaagattttaattaattgttaattattttcatcattagcgacaaagccaatttgcgtgaagaaactttgcaacaccaatataaagtggtaagatcatcgagttttctattttttaataatcatttataaaagaaattagttattactaatgataaatatatatattctttttcaggttagaagaagaacaattaatagcaattttggagagggtagttctcatgtgatggaatatggaaatatgcatcaaaggaatgatgtaattgagtgttacatgggctcaaatcctataaacgacaacttctcttatgacattaatcatgtcgttcctccttctcctcgttctcagtacactaccactactctctcttcaacaactcatcatcctctcatcaacgctcatcatgaccaacgtgatactattatccatcatttttcgcacaaggttatatatatatatatacatatacttattaattattaaaattattattacgactttattaatttattataaatttgtatatgtatagttgcgtaaggctccaagtggatctcgtgaaaagagggaattacaaaagcaacttgatgaagaaattaatggaaggaaagtgacagattatagaatatatgagattggaagacttttgtttggaacacaaaagaatagctcattaattttgaaccatgttcgatcaccaggccaacctcttgtggacgattgggactgctttaagttgcatgtgagtaattatatacattaatattaagaaattgataaataatatataataggtagccattttgaatactaaattattattaattttttttatatatatattttaggtgaaaacgtacgagaagcattgtggaagattgaccatttacggaaggaaatacacacgagcttttgctaacatgtgtaacgctgggattagtacggaccagtttgttgcagctttgatcccaacttgctccactaaaatttaattttactttttaaaatatgcatgtttgatgtataatctataaactcatgataccatatcattatatatatatagaataaaaaccacgaatatcatattatctatatacaatattatgttgtttattattgacaaaaaatataaattatgtgttttttttttttttggttttaagagatggaagtgacgaaaaggagagagagagatagttaatgaagagatcaattcattaagaaatttaactgaaagaaaa

SEQ ID NO: 262366 - DNA, 791 bp, Cannabis indica
cttaataatatttatttgacactatttgaaatcatacatattcccattcaaaaaaaaaaaaaaatcatacatattcagtacaaaattttcaaatttaattggtaaaacttgatcataataatgatcaaagtgtctcatttatgagttataaattaaatgattattattacatataactcaaaataaattgatcaaatttgaaattgaatttattggataccactacaaatgtaaacctaattactttattgataaaaaagcaccaagacttaaatatttcaactttatcaatacacaccaccaagcattcacttttttatttactagacaatactcacacttacacactatttagaaaacttataattttagactaagtttatgggatagtcttattggggcttagttttacacacacttatttgatgctccttaagagaccaaaggtctcatatatatactagatcattctagcaattgtttttgggctttagtctaaggtccgagtcctaaaaaatacgggtgtgcataaagttaaccgatccaatcctaaccgatccactagaatcggatatccaatcataattggatcggatcggatcagatgcaaattttaaaaatccaattggatcggctcggatgttggatgagacatccgatccaatggataaccgaaccgatccaatctaatatcatccaatgtccatccaatcatatttagtatttataattttatatacttaattattttatttaatattttatatcttattttattatctatgttggat

SEQ ID NO: 262367 - DNA, 564 bp, Cannabis indica
tactttctcgatcattagcttgtggagtactttcttctcttcgatttgatcgactatgggttctggatttcctcaaagtcacacttacttcttcgcgctctgttctttcctcccgagagcggtttgtcatgtttctcccatcagggtatgtacgagtcctcgctctatgggtttgggaagaacatttgttatttctagcaggtgatctctgttctcccggttgagtcccaagatcctgctcattttcatgagggatttctcattcatcaatttctggttgtcacccatcaggttgttcatcttgattttcagggggtgtctcattttccccggattgttcttcctggacctcttcctgtctcctggttcatgagccatgaggtctgtctcgtggtcttctcactccaggttcaggttgattttgagcgttcgtcccatgtgttgccctggtcgagactgcctcacgttctaactcagcgttcttacgctacgcctcttctagacggtgtctcaggcaacgactttccgtttcataagttctttctctcacagattgggcacctc

SEQ ID NO: 262368 - DNA, 774 bp, Cannabis indica
tatcatggaatttgaagttctaaaatataatgagtgaaaaaaatctatgtttcggatgcttaacacgctctgtttgtcatcaaaaattaattatgaagcttcaagctaattctttactatgatacattgattttcaggacaaatgttatgaataaaaattctagatctctcttttagctttctaaaacatctttaatcgtctaatttggagaaatatatcaaacgaattatggccaaaatgttattggtcgttgcactagaagcttcctgcccaaaaaaccaagttcttgggtcgtgggactaaaagggccatttaatgttgcagcatgcctattttagaggccgagtaggatatatttaaaccctaatttacaaggagaaagggggcttttgatgggaacttttacgatgacaaaaatagagagaggaagcgaccttggaggctacaactattgatcttcaaagagttctttcttctatctttaatttcatgtttccaattagtctttatcaactcacaattacaatgagtagttaaacttttaattagggttgttaatggatattaattgaaacttttgtattgttttagtataatttcttccccaattttttatgtgcatctatttcattcatgtttaatgctttgaattgcttgatcaccaattaattgttgatgattttaatgcacaattggagaagtgagtattgattatgctatagtaaaatagacgcagatttttggacgaacgtacctatatggtctgtgtagca

SEQ ID NO: 262369 - DNA, 991 bp, Cannabis indica
aaggaaggttatggtctcattatccaactaatgcctcttaagctaaaaacctagttttctctctaggttgatgagacctcttccttcttcttcttcttcttctattcgaaaaactatagcctctcttcacaaaataatttcaagattgtgaagaatccaaacaaaaggaaggagtttcgggctcagatcttggtgatacggaaggagtcatttaaattcgctgcaaccattgtaaggtttctcatacctttaatgtgtttattttatatcgttttagaagttcatgtttaggatgttaaaaacatacttgttagtaaatctagatcttggtaaaatatattccaacagtcttatgtgaacattaagcagtgtttttggataaacacttattggtttaccgttattgtgacataggactgagttcatcgggaaggtttctctatttgggttggccgacgtgcatgaatctagattaaaggtaagaaaagtatattgtactgcatagcatgttatgttgcaatgcaattaatattattgagaattgattgatattgagattaagatatggttatttttgttatacaatgaaaatattgtctaattaggtgatgtgatatatggataccgagagaggtcttcaggttatgcctgtgaagcaactgttataaagtcatgactatagactaaaactgttattaggtttcttcctctcggtaatgcctgattaggcacgggcaacattaatatgtgagtgttagcctatggcacagattgaaactgttgttacgtttcttcctgtcaccaatgcccgattaggcacgagcggcagttacatgtgagtggcaggctatggcacgggctcatctaattaggcaatgcgatatattggtgccaggttttagcccgggctcacctgagtatgtgatacgattatgcaatatatgggtgccaggctatggcacaagctaacttgattaggcaatgcaataca

SEQ ID NO: 262370 - DNA, 807 bp, Cannabis indica
gaattcatattaggttgttaatcgaacatacttgttagtaaatctagatcccggtaaaataattttcaacaggaagaccttgtcaaagttaagtagcgacaaggggaacctttgaaggattacattctgaaatttatggtcaaggctaccaaagtaaaatgccttactgaagaaggctgatatacgaccatactgggcagcataatcccactaagtgacttctagaaagatattcggaggatatccaccaacaacatgaaggagttccttgatagagatgatggctttatcaaacttgaagaagccatacaacaagcctaggtggggcatgtcaacaacaggcagtcacgaggcacccaacaaccttataacgcatcaggcgcacaaacagacaataacaactctgcccagacttctagttgataaacactagaaacaagcatgaaaccacaactctgggaggaaaaatggaaaaagggaagtttaactctctccacgcacagaagataatgtcgagaagacacttgcttcaccctcttaatagagaagctgaggccatcttcatggccactaagggaacaataccatccaaaagccctttccattagaagggagatgggcaagagggacatgaaaagtttttgcagatatcacaacgacttctgccacgacactaatgagtgtcaaaatttgaagtagggagattgagtacctaataaggcatacaatcccactacatcggtatgtccaagcgaccaggcccaagtgcaaggaggacagaatggagatctgatgccacacctgtgg

SEQ ID NO: 262371 - DNA, 1007 bp, Cannabis indica
aaactaatataactgtctcaacaattcttgaaattgtgtcaattgtggcctacaataaattttaccttctttatttattataatgccactataattattatgattcattaacttttatataactttatcttctttatttactatattatcattatttaaacaataaaaaaataatgatttttatatattttcaatatatacaatataatggtattattcaagagttattgttagatattgtcataatttataaatatttgagtaacttgttgcataaatacttaattaagtttaactttcgttacaaataaatacctaaatataatttttgatgataataatacctaaattataattttaaaatttctataggtacgcaaaatgctatcaatctctaattgctccagttatgaatttttattttttttttaaaaaaaaataatttaaatatatactaataaaaaaataatgactatatttaaccgtgagatacctacagaattctaaaaatataacttaaatgctaaaaattaaacttgagtatttatttacgagttaaacttaagtatgtaaaccacaaattactttaaatatttcaaaaaaaagtcagtaattaatttctcttatatttatatttggaaacaaaattagtaagtaatgttttagacatgaaattcttcagggagtatttcataaatatacaaaaatactaacaaattataaaaatacagttatataaaattttaaatatttttataatttttatatttacagaaaatatagttctttgatattattttcctgttatatatatattgtattatttttatagaacaccgtaaaaatatataaaaaaattaaaaataaaaataatattttatgaaaaataatattttatgaaactatttcaaaataatacatattctttaatttggccctatatatacgataaaaacaaaatttcaaattgatcatcatattgagaaagtgtgatcaattaaaattaa

SEQ ID NO: 262372 - DNA, 738 bp, Cannabis indica
tttataaaaataatttttttaatcaagcaatttaaaatactacacataatataaaaattttgaacttcttaataaataattccaaataattattaataaagttatacatttagtttataataaataaaattattaataataatatgaaataagattatatatgtataattttattatgtattaaaattatatttttaaataattatttattataatattacaaatgattatattaacagcgcgaagagctgctatattgtttagtttctaataacgtttgaaaccagttggtacaataagttttgtttaaattatttagttgctctttgaatattctaaaaaaaaatcttttgggttaattaaatacaaaagaaattaaaatgatatttttatttatttattttaataataaaaaaatatcatcataaagagtaggttgagataggttttttatttttttagtgaaaaataattagattttattttaaaaaaagtattaagagtgagaaagaataatttatttatttatttattttttaaaaaaaaaaggctagtcgaaaaaaaaaattaaaaatcaaacaaaaaaagtgcacggacgtgtaacgtttttaacgttagtatttgtggggtttacgtgtaaaaatattagagaaattatagtaaatggccccaaataataggactttgttagtttatgtcctcatttcaaaaaaaatatagcaaataaccctaaatcat

SEQ ID NO: 262373 - DNA, 764 bp, Cannabis indica
tgtgagggacatatttgtttcccgtgattaggaccttattttttccattcagctcagtgattcagacgctaatgatggttggagttggcgacttgagacttgtgggaattattcggttaaaagtgcatataagttcttgctagaatctaagggtgcttggtgccgggaggccaatactaatttttggaagcggctttggtccttaaaaattccttctaagatcagtaattttttatggtgagctgcttagggtgtgcttccaacgtgttttcaactccaaaagcgttatgttcctgtcaatgctgactaccctttgtgcaactctagtactgaaactattccacatgcgttggtggaatgctcggttgcaaaggctgcttggcatcgtagcatagtggacgtcggggctggggctacaacgttcagcagctggttgttgggaattttcaccagggggcacgaagttgaaatggaggaagcagcgatggtgagttgggctatttggcgtgtgcggaatgactttgtttgcaaaagaagagttggcttgcttcaaatattgtaacatcagctagaatcttgcttgattaatacaaatttgctcaggaaaggaaagggctttcattgtctcctttgaatgatggggggcagaactgtgagcgttggattgcacctaggggtgtacatcaaaccgctcaaaccgcccgcaccgcaccgcaccgctaaaaaaatgcggtttgaaattcttcgcggtgcggttgcggttt

SEQ ID NO: 262374 - DNA, 429 bp, Cannabis indica
tttgaaaaaatttccgtatgacagtatttttgtaaaagttaatccaaatttcagtatttttgtaagtttcccaaaattaaatttgaagggtcatatatcttctcagaaatgcctatttttaacactctttaccacttttgtttttaagaaattacataaaatatgattattttttcttcagttagtttagtaaatatgaaattcttaactttgcgtatttttttatgattttttctgtttatttttttttcacatttttattggatttttctttatcgtttttagaaattgatagtggtaattgactactaccaaatcaattttcataataatcggttaccatgatgatgttgtggtaactgatttaagatagctaattcaatactaatactaatactagttatggtaaaaaattaacaaaaaaaaaaa

SEQ ID NO: 262375 - DNA, 872 bp, Cannabis indica
taagtttttcatatttgtaaagattataaatctaaacttttaattttcttgatttgagattttgaattgttctgatttatttgtttatgaatttattgaaatacttgaatatttatttgttctgattttgaattgttcttttttattcatacttgaatatttatattgatatttgaatatttatattgatgattgttaatttgagaatttattataatgaatcataatcataaaataagtttgagaatttattatattcaatgttggaatgaaaatgacagcatgtcatataagtgtcctcaaagcatacaggtacatgggttttagattgaaaaaaagttgaataaagtgaattgtggataaaataccaatagtccaatatttttccccataagcatttgccatgatggctctggtaagaggtgcaaggtagcaagttcctccccaagtggtaccatttcttgctgccgagacatttctttcgtgcagctttttcataagataagtaacaagattagtcgaaatcacatagtaagccaaacgttcacagccctaagcacaaatatagagtaaaaatgcttatagttagagcaatataatacctagattgaagggacaagcttttcaagttccaatattatgcttcaacacactgtttcttttaagccaacagagtcatcattgatgtagtctactttcttcaatctaaaatgaaatactcaaaaaattatgtctaatgactcttatccaagaatctatatcaaaaaaacaccattgtgactaatacaaaaacaaatcttataaaactaaaagatgtgattcttctcttactccctctataatacaaacaatattaattagtgggttataca

SEQ ID NO: 262376 - DNA, 966 bp, Cannabis indica
gagatagccaaaattcgcatttcttgaatttggcgtgcaacttatgttctcgaagacgttgcagaaccattcggagatgttgctcaagctcctcttctgattgagaatacacaaggatgtcgtcgataaacacaataacacaaatatcaaggaaatccctgaataccctattcatcagatccataaaagctgcaagagcattggtcagtccaaaagacataaccagaaattcataatgtccatacctagtgcgaaaagctgtttttgggatatcctcctctcggattctcaactgatgatagcccgatcggagatcaatctttgaaaagaccgccttcccctgaagttgatcaaaaagatcatcgatcttaggtaaaggatatttattcttgattgttagcttgttcaattcccggtagtcaatgcacattcgtagagacccatcttttttcttgacaaacagtactggagctccccagggtgacacactaggccgagaaaaccctatgtcaagcaacccctggagttgaattttcaattctttaagttctgctggagccattctataaggggccttagaaaccggttctgctccaagtgccaaatcaatgacaaaatcaatttctctctgaggtggtaaacccgtaagttcatcaggaaaaacatctagaaattcccgaaccaccttgatgtcttttggccgaacaaagtcaggccgagtggtatccaataccacgaccagaaaccctagacatccctcacgtaagaattctttagctgctaatactgaaattactgggatccgagatcctagaaccgatccgacaaaaacaaaaggttcttcaccttctggttggaagattaccatcttcctcttataacatcaaaatctgctaaactcatttctattaagtcagcactcaactccctatcctcaattctgatccgcatagacctaatccatct

SEQ ID NO: 262377 - DNA, 1022 bp, Cannabis indica
gaatgatcttgtcaaaaccactatgaacaagatgcaaatgccatagatatattaaactgtggttgtggtcttttaatggaaaaggcttagttacaataaagagttcatacaatagtcaaagtggatcctggtaacagaatactaaactcatattccatacataaacataaagttttgatccattgacaaaaaatggatattaaaacttgtgaaagtggaactgtattgtattttggaaactgaaataaaaatttatatttggaatttaaaatttaaattcaaagacttaaatttatactatatatacatgagtaattattctagcttggaccaccactactaatctaactctaagtttaaattgcctaaagtaagcatatacaagtaggagattctaagaacgaggatttatatcatttcgagatagaatgtcgggaatataatcatatgtgacatttgatttcataagagaaattaaagtgacatcatagcagatgatttataaaccatttatctaatgatatattatttaaataaattcgaaatgaataagctaagggaaaacattaaaggataattttaaataagataagaaccaaacgatgtcccagtaggcgagagtcaaagttactcttattttatgaatctcttcattgtttcatattgtaaacactaatctaagttgtcatctgtggatgtacaactagatgttacatttacaaatacttatctatcgagatctaaacactactcgaaaaatgagttttagtgacacacattgagtaactctaaaattatttagtgacacttcaacgggcgtcactaatgagggtgactagaaagataatttttaatgaaacttcacacgtgtcactgaacccttttacattaactttttgcgcgtcactataggcgtatagagtcaagttttgttagactgaaaatgtaacaaccacacacatgaagtgtcactatatcttttttttaattattaatatatttattaattcaaattttatata

SEQ ID NO: 262378 - DNA, 465 bp, Cannabis indica
tagaattatttgacatcaaaatattgaaaaaaaataaatggtaaattagcccttaagtggccggcaatggatatgggccccactttgcaattttgacattttttcaactatttatcttattttcttaaaaaatactagttttccaattcaaccacttaaatgccaaaactaattatttaataattaaaaattaattattaaataatatttccatttaatacatttattaattagacttaataaagtctcttaattaacaaataaactctagaatctctttcttcacaattaagccctagcttagtgaaaattcatactaaacatagtctgattttttagaattataattaattaattaaaatcaattgactgagtcttacaaaaagtattgtctcaactagtatggggaccataggcctatataaccgaacttctaataagcacatctagaatttaccaagtaaa

SEQ ID NO: 262379 - DNA, 830 bp, Cannabis indica
gaaagtactattagaaatgctttgaggtaggtaaattaacgataaaaatcatgcactaaaaaaaactctttagtgatgattacttctaaaagattttttacatattaaaaatgatttattattaaaaagtaatatttagatataaattattactaatttaattttaattgtcatttaatatttttactaaaaatatatttcgatcacaataaattacggtaaataatactgttttagtaacaatttatttattttctagtaatcatatttaggaaaattttatggtacaccctctgaaataagtatactgatatactctttcgtattttcaattaccagatagttttagtcctaattacttcatatgatagtatatagcatagttattaaagacattttataaaattttgtaaaattcataatatcatttaacatgttaattaaaaataagattcaaataacttgttgcacacatgtctctttttttcttatgcgtgtataaaatagactagctatttgaactatatactgtctatattgtaaattattttaaaattttcaaattctataatatcttaactaattataatatccacatcatatcaaaaaaaaatgatatagttataactatttagatataaaaaatatgagttttttgcggttaaactcttaactatcattaattcacttgtacttaaccctctaaactcaaactttgatggtaaatctctcaaaattactgaacgattaacaaatttaaggtgtcatctatatttcacaattaaccgataacatagattgtttatgtgcactcttgtacacgtgacata

SEQ ID NO: 262380 - DNA, 1023 bp, Cannabis indica
agtgtattttgtagtagtgaacgatgacggttatcacccccctcaagttaggtcctggggggtcacacaacgataacggttgttacccccctcaagttgggtctagagggggtcacccttcgatgacggttgtcacccccctcaagttgggtcttgggggggtcatccaacgatgacagttgtcactcccctcaagttgggtctcgggggtgttgcccccaagtatgggttcatccccgaaggtgattgacgaccatgtcacacctataagagacccacgtcgttagtaactttttcaaatgttcaaatcccacgaaaggctcaaacacagttgtcaacccacgaaaatagcgagatattatcataaaaattagacttcaactaccttcgaaaatcaaggaagttgaggtagctttgcgttggtcgtgtctcctaaagcgaggagcactgacactctcccctatatatggggtcatccatgacctgggagggagatccgcaattttgagcacttagaaaaataaacatttttcattctttgcaatcaagagttgttcttgacttttgcaactcagattaataaaatacaaggcgagtaggctattaccgacatccgaggccgaacctctttaaatttcggtgtcttttctttacatttattgcaaaatttagtgttattaattgtatttattactacgattttagtttaaatctcatttattacgactccgcgttagttgactaaaaattcagtcaacagacatataacaaaaccataaacataattaattaatattgatagtgtaaaatagaattccatgaagattgatacaatgtgaaagcaaatgtgaaattgaatgaatacttatcaacaacaagataaaagcaaatgtgaacgagtaattaaaagaccatcaaagctgaaaagaacgtaaggaatatgttcagtcagttaaaggaataaagctaataaagaatcttatatattttgataagaaaggatattatatacatagctcacta

SEQ ID NO: 262381 - DNA, 713 bp, Cannabis indica
tagcccataaaatattttactagtaagaaaatagaaataaaaactaattactacaattatttgctataataattgaaaggagaacataaacatagttatgtactagatatattaaaaataaaacttctcttgtactatttttggtttattattttctgatattttaagtttcctattcagggtgcagattcatttcctaacacttaattagctttgacaattataagaattatgtgttaagggtcttataccacatcttactttaattaggtcattagtatgcatatatatcatgatggttcccattctattaaggcccgctccaatactagctacttagtggttgtatttaattattttttaattagaatattaataaactaatcaaattagaaaaaaaaaaaaagtgagctgtgttcaacaacagttatgcaccttatatttaaaggttgaaaaattaatatattttttttgacatttaatctcattttctgacaactacctctcattagcaactgcattggagttgcactaaagatgacactccacaacaagctagctttcgaaaggaccaagcataattctctcacaataaatattgtgatgaaatttaaatccttacccaaacaaaaagggtgctagtaaaaattttctaccactgtaccacacagtgaattagaaagtttggaatttggatgggtttcctctatttt

SEQ ID NO: 262382 - DNA, 1449 bp, Cannabis indica
tcggccaaacgtcgcgttcactgtacgcataaaatatgaaaaatataaattttcatatataacataaataacaaacctagaattcaaatatatctccataaattcataaatcataattaaaagtctaattccaaattaaaccctaattatcggctaattctcaaactaaaattaagcggtcattattatctccttgttaaaaggatttcgtcctagaaatctaacttgaacaactctggatattgagctctcatgacaaattccaactcccagatggcatcctccacctcactgttcctctagagtacgttgaccaaagttatggtcttatttcaaaggaccttatcttttctgtacagaatctgcactggttgctccttataagataaatccggctggagttctaggttttcatagcttagtacatgagtgagatctaaaacgtatttctgtaacatagaaatatgaaatacgttatgggttgttgaaagtgctgaaggcaagactagacggtaagctaccaacctaacctttttaagaatctcgaaaggccctataaacctagggcataacttgccctttttcctaaaaagtttaatccccctcatcggagatactcgtaggactacatgatcccctacctaaaattccacatttccacgtttcaaatttgcataactcttttgcctactctgagaggcaagcattctggccttgatcttttctatagacccgttggtccgttgtactgatttcaaacctaaatatttcctttctctagtttcatcccagtgaattggagatctgcacttcttgccatacaatatctcatagggatccatccctatagtactgtgataacttttgtggtttgaaaaattttattagtggcaataactttctccaggaaccctcaaaatctatcacgcaggctcgcaacatatccttaagtatctgaattatctcctcgaactgtccatcagtctgagaatggaaagatgtactgaacttcagcttcgtacccatggcttgctgaagactttgccaaaattttgaggcaaactttggatctctatccgatataatgggctttggagcctcatgtgacctcactatttctttaacatataattttgcctactaatccactgtaaaggttattttcattggcagaaaatgtgcgaacttagtaaatcgatccaccataacccaaatagaatcaaacatcctaggtaacccaaccaccaaatccacgaatacatcgtcacatttccacttaagaagaggcaaaaggtttaacaatcctgtaggtctctggagttcaggcttaattagttgacaagtcaagcactgggatacaaattctaccacatcttttttcatctcgcaccactagttaaagggttttaaatcctgatatattttagtagtgccagaatgcaatgaata

SEQ ID NO: 262383 - DNA, 1694 bp, Cannabis indica
agtaaattctgaaatatgctattttgcttcatcaccacaaaggatatatgcgaagaaggtttatatcaaataattgtactcactaattagaaaacaataattagcaagaacatggatatagagtttaattaatccattattaacaaacaataaaatcaaaatggtccttattcagaccatgattggccatagtaaatatggaagtcatctaagactatcataaaaatctgataggcattcacttccactgttattcccaagagcaagataagagacttagtgggtgatattacataccaccccagttcttgttgtctttcaacacagtttcacgaaaatgctggaactcttttttgaattcttcgtcattgtccattactttttgacggcagagaggggtacagaacgcagcaaagtttctgcatcaattcaatatcaacacacaatttagatatataattacacatgataaattgaaagcttaggtccacaaaaaaatgtgatggggttaatattatagtagttggacatatatattttatattgaacttattaaaaactaaatctacctcgattagggcaagaaattccatgtaatgtaagtaagtcaacaccatatatattatcattgggggtgtccttttggccttatgagacaacagtcaaccataattttctgaccaattgaaaagttgtttgccttatgtagtgctgtgggtcagacaaacacttattttgcaacaaaaggtacttaaccgtaacaaactctatattaacatgactatcactttcgttgagctaaaagacaagaatataccacactcaattaactttatcatcaccagttttatgagcaaagatctatacaatatattcaaagatttgttattaagggattttacgactcatatcagcttatcgatcagaattagatcacaaattttcaccctacttacttcatcaacccctatattttatactaatgcaacataatcaggggacaaattaaaaatgtgtaaccgatataatttcatattttctctaatgttcaaacattttctttgaagccaaacagacacaatcattcacaatctagatctaagagaaaataaaaattactgggtcaatatccgtaacaaacaaaaaaaacgttacctatacatgaaagtatggtcacgcttgtccaattcctttttgcagtagctacatttatcaagaaaataatcacccttctccttatagccggcgccatccctggtcaccacctccagcggctctatcatcataatcggcctcgactccgatgatggcggcggctgaggctgcgagggctgggacaagctgctggtggcagaatcagatgtcaccacatgagctgatgagtgcttggaagtgttttcatcggccaaattggaatcgactccttcgatggatgagtgcacatcatcatcagtagtaggcatgaaaagccctctcttcctggctgtctcctcatcatcatcatcgccgaagaaggtggcggagcgcagttttctagctcgtttggctctgagtgacaccattgttgttgaaggcggagagagaagagaatgttaggtcttaattaatatgattggaagagtgagagtgagagtgtacagcctactaagtagggagtagctggattgtttccacagttatatatatatatatat

SEQ ID NO: 262384 - DNA, 840 bp, Cannabis indica
accatagtcgcgacagaataaaagggtcgcgactaggctataggctggttgtgactactgattcccattgagcagctttggccgacttttcactagtttgtcttgtatttttgtcaattgattgaatttaaactctaacgcaaccgcgaacctgaaataaggaaaatcaagcgtaaaaccgttccaaaaaacaacaataatcgagaaagtgcttatctataagactcaaaactttggctaaaaatagcctaagattgattagtaacgagctgcacagtacgtttaaatcacgctaacacgcctatgctagttagggtgttacaatttggtatcaaaatcgccaggttgtctttcaaagatcgtcacgacatgtacaatcatcatcagcagtcagctcgtttcacggttcagtaagcttttattgctttagtagtttatttttataatatgatttaagaaaagcctgttaggaagcatattagaagcctgatagtagaataggcgcatgttttaatttctaaataagcggcattagtaagttttctttgatcatggtctgaccaaactagctcttggttacggaggctgttctaaattagtatggacgccaggcaaaatacgaggagcccgggtaattcattttgatccagtggtggtcagggagctcagatttcccttaagatctgtggccaaggtagaggtcccaagggcagggcacgtggccggggtgatgttaacctgccagaagctgctcaagctaccaaagctactcaggatgcccaaagttgggaaaataggtttgcagcgatgcaagcccgaattaatgaacaagatgatgag

SEQ ID NO: 262385 - DNA, 648 bp, Cannabis indica
gaagagagagggggctgggtccgatagggagagaggggggctgggctaggttgtgcgtggtcggacggtggtcggagactgctatcggtggtggtgggtggtcgtcggtggccgggcgtggtagggcggcgtggtgttgcgtggtcaccgagagggagagagagaatttttttatttttgattttgtttttcaaatgggagggatattatgggaaaaatcaaatggagtcatatatgggcaattttaataggtatagatttagggaaataattttagagatttttatggatagtttttcaaatttccctttagtgatagtccaaactgtgaaaactaaccgcaccgcaccgcaccgtactattttttgcagtacaatttttgcggttttctagtttcacggtgcgggtgaaatttaggaaattgaaaatatcgcatgtgcgggttggtttaaaaatataataaaaaaattgcaccacccgtaccgcaaacacccctacacaaaatagctaaactaatcaaattcacaaagtaaggatattcacatttgtctagattgaattagattggaaaatttaaaaatttgtacttgtacggattagatattggttaacatgtaaaagtaagtgatccaatccaatccacacata

SEQ ID NO: 262386 - DNA, 2717 bp, Cannabis indica
cttgaaccaccagtactgccaccaccgccgccgcccccacgccttatgtacgccttaagcttatgatgatcatgatcatagttgggatttaacgatgatatattttgtgttacgtgatgatgatcatgctcatttgtatccaaaacatcttggtgagctgaaattggaagagagtaatgaaatagtaacaatactgagacaactacaataatcataggaaaacaaacagaggctttcatatttcagatgataatatatatagtaaagaagatatgtttaattggaattatattgtatatgtcagatctagctaatatgtaataagaaatatttaggagtaattgtgtttaattggaattatattgtatatatatactctttatgatggatgaacacttttgtttttcagttcttgtatttataaataatggtaagaatgttagatacgaaagtggaaagaaacaggcatgatagattagatagaaagatatttatatattgtacggatctattctccgagtagcgttcccttggtcaaatttgttctttttataaatatatcaatcaaacggttttcgtgaacattacacggtattaattataagataaggtatgataatattattataaaactttgattttgtttaattggtcaactagtgtttgaatatttgcattatattcatcttgcataaggttgtaacattttacaagttaaacaaaatttggattatagatacagaacaaataggcgtaaaatttagagaaatcaagaaaagcgtacgtttgaccacagaactcttcaatcgatatttgattgaatatttctctgtttgaatttcaaacatacatgtataaatatacgtgtattaattcattattagctctatacagacgaaacaatagcaattagtattgggtctacgtactaattggcaaggaaaacaggagggttcttctgagtagaaccgcgggatcgtggactgaatatttttttcttatattatgttagtcacgtaatgaaacataagattattacgtttcatttaaacacttgttaagaacaatacaaataatacaatatatttatataaatgtatatagttatatagagacttaagatcgttgccactacagtatgatcgagtaatatatagttatattgcagaacacaacccagatatgctgaaaattaagtgcaaactagaagaaaacgacaccaaggaatagagtgaaacaaaataagatatgaagaaaggttggtctttttcctttggctgaggatctcctgctcctactactcccgcgactactgcctttgacaatgagtccgaccagaccaccgatgagaccttttcttcgtacgtaaactcgaggctttcgagctaattccattgacgtaaaaacatctttgggttttggtgacatttgttttccatggtaaaaattataatggtggtcatcatcatgcattacaacttgatgatgagctgaacttggaagtgataatacagataatagtattattaaaattacagtaagaacagacgaaaaccacacaaatttcatgtttttgattgacttattactatgtcgaatgagaaagtatatgatgagttcaatttatattaagattggatatggaatatatggtgtcttaatcataggaacgattgttatattgggagtaaaggaactgagttgaaaacaatataaaatagcttgaaaagtggaaacaaacgtgggtttttttagtgtaaaggtaggcacgtaacacttactaatcatttattaaatccatcatcggcatgcattagtcaaaattaatcgtatggagaacttgatcctaatattatatatcaaacaacctaggtatgacttctgattataatatgataataaaagtatgaagattgaatataacaaaaatgcattgacctaacaatcttattctaagaacatactctacattacatatataatgtcatattgtattgtgattgttatagtttggcaagtaaataataaatataacatcaaatttaaatatttcgttgtaattgttcctaaagtaaactcagaaggataacatcaaatttatttaacagaatctatgagggaaataaaagagaaaagtgaagaaaacattttcattaaattttataacaagttttgtttttatatgtatcttattaaatgcccaagttattctctatgtgacaatcttttgaattcaaataaaattttttagtgaataaattcataatgattgcaacaaagtttatagcaccagacaaattagtcattctctcaaaagttaaaaagaaaataatagtaccagacaaattagtatttctcattaaacaaaacagagattgtctcctaattattccgtgacgaggaccagaaaaaagtcgtggaatcaaaaaagaaaaaggtcagagcacaagaaaactaatacaaattatgataaatgaatataatataattaagtttcaactttcaagccgtccactagctagctggaccttaaaaaattcaagctttctttcttttatgtaaagaaaatatagacatgagtattgagtacacgtacccaatgaaaaaagattaaccatacatttctaagtattcttcaaaagcttggtgattttgtgcaaattgattaaggaagaacaatacatatgtatggtataccaataatttcgatcatttta

SEQ ID NO: 262387 - DNA, 630 bp, Cannabis indica
ttttgccttgaactaagagaaaaacaaagaaaataaaagaggatgcaaacacaatttattattttctttttggctgagttatatgcttaagcagtccaattttatatgtccaaatgttttctaaaacaatttggagtggattgtatcaataggtttaaggggatattagaatgatattggtagagatttttaagtctaaaagggcaaagcaaaagaattgttgatcaaaatgccatggaggattaggtttaagaagctttgttcaatataatccagcattgatacaaaatagaagcgacacattctagtgaatcccttgtttcattatgcaagtactaaggccaaatccaatggacattcaaaaatattaaatttattgagatttgacactgaattcattttaaccttactctaaaattatcttatataaaatattgtctatagtgttccaccttataatattaaggaaaaactttattgtaacacacacatgtatatcttagttacattagtgctgtaactttttaatttatatattttttttatgttcacattgttttattaccgtctgttgactgagattttcagcaacttcttaatcttgttttaagaaaattaattatgagtaga

SEQ ID NO: 262388 - DNA, 844 bp, Cannabis indica
actaaaagtactaaattacttagaatttattgtcatagctttattaatataattaattgaatatatcaagtctcatataatttaaaaaataatttataaataatattactaattaattgaaatgctatagcaatgctaatatatattacatgatctctctatatatatatagtctagtcaatagggacaaaagagttataataaatatcttataatataatatgtcctatatatctacattaatatacacacagctacttaagtaattatcaaataaataaatcaataaaaatcataccatcatcatcatcatcatcataaaaactagaccttgttatataaattcatgagtagtagctagatcatttcatcgttatatataaaatatgaaagagaaagtaatatgtataatattgacttacaagatcatggggagagattcctaaatggatgagagcataagagagttgaagagatgttcgatgagtttgagaccatgaaaatgagatattatgatcataatcaattattgaagtttcatctccaaaaacatctcctgctctttctaagaagcttattggtgttaaacctatgtaattttctgatgatgatgaccactccataccctttattatatatacctttatatatatatatatatatatatgatgctcttctctcctttctcttgatcgaataatgatctctctggtactaatataccacaatttgtaagtcttggttctttctttttccctaatatataagcatataatgttagataaattaataataaatccaacagctatataacatagaacacaataataatatataataatta

SEQ ID NO: 262389 - DNA, 908 bp, Cannabis indica
gttatccaattcagaagcaaactcacaaagttggtcaccattaagtttttcttgcttgctaccattaccaagaacaataccctttgacttttctttactttgacataatttctcaatctccttgttgactttgttgattctttcctttaagaaatcagtcaagttttggagtctttttgaagatggtttttgagtagttttggcaattttgtaatcattgattagagaccttactttgtgaggatccttaggccatgtggctataggattatttgaaggttggttggttgaatctttgattattaagcaaactttaacatcacaaagtgtgcttaactcataagctttcttgattagactactctttctctttgaaaatgttactcttcttgctttctcatttggtatcaatttcaatggtaatgtcatctttacttattttcctataatgccaaaaaaaaaaactcaataaacattttgataaatataaatataatatggtaaaaagatgatctccaatgtaggaaaatgaaaaatgagtattttaaaacaaatttaagaatgtagaaagatatataaatatatctttatataaaaataattatatatattttaaattaattttaattacatttattaatggaaaattttaatttatttcaaaacaatcaatgaaattttattggaatccaccaataaatgtaattaaattataaaatgaatttaaataaaccttaaaccataggaagagaaataaaagaaaatattaattaatgaataacagaaaaagaaatagaaataatttgaatattgattattggtatttctaaatatttaagtccaagagtactggtttttctttttgcatacttctttccttttttgttttttattttctttaattaccc

SEQ ID NO: 262390 - DNA, 945 bp, Cannabis indica
tctcttacagtttcttgggataaaaatatggataattgtgggtgtttatttggtatgtttagtttatggtataatgtagcataaatgacttttcatataccattctacctaagccgtggcatttcaactgaaaaagaccttttgatttcgagcaagggttgttgacattactggagagaggaatgtcatgcaagcatattgaacattggttggcagaatgttggtaagagtagattgattgtgatatgtgtttttttttccaaagaagtgttttgtatctatatgtaataattgcttctaacttgtgcatccaagttaattcctagagtgattgaattgaaattctagttagtcaattgattgaagttgcacaggtggtagtggtagttcaattatttggaggctcagttatctgttgcgtcgttgtttctttgttttagttttagttttactcgagggcgagtaaagattcaatttggggaaatttgttaggctatttttagcctatatttcgagtcacaaatagagtcgtttttcgatgttttaggacagaattacgcttgttttttatatttttaggtttcccgtagctgtggacgttcaaggtttcaaaagtacaataaaagacaagttgagccaagaaaaatgcaaaaatcaggatttggttcacttctggcagcggcagatttatttacggctgcggccaagatttggcagagaggtgtatccgagacgggttcagtagccgcggcgagctactctactgccgcagccaaatcagcagtcgtcgcggcgtgggaacctatgtccgtggcaaggttctgtaagaggtgaggccaatattgtcttttgaaacatgggacaaaaaataaaaagaaaactgcgagaaagagagaagggaagcaaattttagacctagattgcagtcaagagcggctagaggag

SEQ ID NO: 262391 - DNA, 635 bp, Cannabis indica
tttcgattatgaaatttggcaaatggatgtcaagacaactttccttaacgaaatttttgacgagataatctatatggagcaatcagaaggttataaacttccaggataagaagagaaagtttgcaagctaaatagattgatttatggacttaagcagggttctcgctcttggaacaaaatatttgatgaaataatcaaaacctacggctttcaccaaaatgaagatgaacattttgtttaccaactcaatgataatcaagtggtagtattcctggtcctttatgttgatgacattttgatcattggtaacaatatcaagaaaatgactgacataaaggaatggctaaacatccaattcaaaatgaaagacttgggcgaagctaattatgttcttagaattcaaattattagaaactggaagaacagatcacttgctctctcgcaagcagcttacattgataaggtgtttgagcgtttctcaatgagcaatactaaaagggttgttctgccttctagacatggtttgcaactatctaagaaacaatgtcacactaatcccaagagatagaagatatgagaaaatttccttatgcttcagagtttgaagttaggggtattcatcaaaccgctcaaac

SEQ ID NO: 262392 - DNA, 1193 bp, Cannabis indica
gtaaaattcatgcaaacataaatcacttcaaatttcttatattgataactaatcagattgtaaagggttttatttagggcacaaaaaaccaacagttaaaatatagtcgttacaatatagttgttaaaatatagtcgttacaatatagttgttaaaatatagtcgttaacagtcaaaatgtggttgttgaaatgaaatagtttaaataaaggataatgcatttgataaaaatatagtcgttacaattagataagaacaatacataggaattataattttaaaataatacataacaattagataaaaatacggaattacaaatttaaaatattagtcttaatatgagctaccaaatttttatgatcttttttttgctcaggagtcatatttgatgtgcccaagaatagataatccatgtattttgccattaattttttttcttgtaccgccactaatttctccaacacatttgctttctgttgattaatgtcataaaatgtagcaagttgctcatcttgctttccctttccctttctctttgttgccttttggccaatagggcgctcttcacgaactttatgatcactgatgtctacattggatgatgaagtatatgcccctgatcttgacaccttcgctcgcttaacaccttctgattggtacattacattccatttcggctcatcttttaataatctccaacagtctacaagctgaaattttaaattgttattttcagacttgtacatctcatgtgcattcttaataatttggtcatcaaaccaaccgatgtgatgtgcttgttgtactcgcttgtaacacccattgaaacgtgtcaccttttgattcatcttgttgcaatggtctttgcattgctttccagttcttcgttgatcatctttgtagtgggtgttaaagtaatttgcgatccgacccaaaaaatttacaaaaatttggtcagttcccacgacaccatccttagatgtatcaacattgctttccagttcttcgttgatcatctttgtagtgggttttgaagtaatttgcgatccgaccccaaaaatttacagaaatttggtcagttcccacgacaccatccttagatgtatttagccatgcacttattagaagtatatttgcttccttgctccatttaagtttatttttattgcttggttcctcttcactatgta

SEQ ID NO: 262393 - DNA, 608 bp, Cannabis indica
aggtgtctcatcaatatttatatttgtatataaatatatgcaatatcaccaaaaagaaaacctgtctgtgaagtggtgatcatgatatataattgatcttggctgtgtgtttgttatcatatttggccagcatgacacttgcataagcatatattttacctcttaacgtcactggttgcttgtagcggaaaactcacccattcaaaactatcacggccgtccattgcattacacatggacggctctgattcaaattgtctatctgtttgtatttgttttattttaattttgtaattgtttgtccttaactatcgcattataaataatagatggtggccccaaattttataagtcaaataggggtccacttgtgggaaggctagctagaagtattataattctatggttaattattgtatatatgtattaattaatgtaattgttaaatatatatagggatatgattttgtcccgttatgtattttcacggaatgtatttcgtgttacattagatgggcctcagggtacattaaatgagtgtcagggtactttttaaccctaattacccccagatcaatctcagccgttagatgaaataacttcctcat

SEQ ID NO: 262394 - DNA, 1493 bp, Cannabis indica
aatttgttttgagaaaataaaatttaataacttgaatcaatgtaagtacagaaattttaaaattataaaactgaaagttaaacatgccataaattaattttattttgatatatttaaaataattttttattttaataattttatgtatacatattttaagaattagagaaagaaagaatttattttattttgttaaagaaaaaaagtaagattgaacgtaaatttctagaatagaactgatagatttccaataatgtccctgccatattttctccaagagattgtgaatgtgaaacgaggacctctccttttctaccttcatcatcatttcctcaatgtctcccaaaaaggaagtatattaaaacttggaagctttgagccacctgttttcgtttctttggtcctccaatccaatcaaatccaaaactaaaaccaaacccaatacagcttgctctgcctctgtattctcctatttgacccagattatcaattccttcccttcccaattctgatcatctggtcaactaccgtctggtctcctataaatatggcgcttcactcagccactcattcctcaaattcattctcgttcttcttattctcttctgttgtcgttgtcgtacgcttttcttctctgctctcactttgatcgctttcccttaacgaaagcctcgccgtaccgtacgtgttctccgggtcgggttttgtcgggtccggatggggtctaattcagttattgatcagaagcacaaggttgtggttggtgaaggaggttatgtacttgaagatgtgcctcatttttctgattatatccccgatcttcctgtacgccactttctatcttaaactttttttttcattttatttaaagctgggttaatacaaaagctcttcttgtgtttaactaaaagattaaaaagtcaacttttttgttatttaagcaaattagtattctttctttgattttttttaattaaataataacaatatgacaatatttgatgtgtgacagacccattcaaatcaattgcaagacaatccggcatactctgttgtgaagtattttctaattttcctttctctgaattttcatatttttttttatttatttgcaattatatgtagagatttcgtttgacactgacaattggtggaatgggctttgattttccaggcaatactttgtgaatgaagatgatactgttactcaaaaggtcagctttttcttcatcatcttcttattcttcttttatgttttggcttgtgagtttgacttaattgtgctttgtgttttttgccacaatagattgttgtgcacaaaaagagtccaaaaggaatacatttccggcgagcgggaccccgtcaaaaggtatgtgattaacgtttgttggaagaagaaattaagagtttaattaatgaaacaacattcagttaaaagagtgattatttggtgttgtttgttgtttaaggtttggtttgaatcggatgaggtt

SEQ ID NO: 262395 - DNA, 3140 bp, Cannabis indica
tttttatatgtgtaattatatcaattttaagttttttccggggcctccaaaattatggggcctggggccgaggccccggctgccccaccctctggccggccctgactctagacatattgacactaaagagtacagctaattgaaagagaaccaataaataaagggcaacaaaaagaggaaacatataatatataaatatatataaaacacttcaaaaggacaatctttttcttagaaaccttaaatatatatgtagaagaactaataacctagctatatatataatactctaacgaagatgattcaacataccatcataatgaagtcactaatcacaacactactgatcgaacccattttatactaataatgaaaggaaaaattattattagttcaatatataaaaattaaactaatgggttcgatgtagatggtccataattgttcatgacgccggaccaagaccctaacccattgaggtacccaaacgagtctttcccagcattagaacaaccctgctggtcttgccattcaagggacaagagcttaggatttggcttcacatccattccattttgatgatcatcttcatgattattattgttgttattcccttcgtatggtaacattatcctttgacacgtgtccataaaagtcccattagttgtcccatcaagggacatcccaaatggaggactacataagccattattactaaaattgggttcaagtaccattccatgatgatgtggatgatgatgatgatgatgatgtgtaccaccaccaccacctatgataccaagtcccatcccagccatacccaaatctccaatattattccccataaaatcataactccctgatgagtttcccacaagggcctcaaacttagtgtccataaaatcaatgggccttgggctttcaaagaagctatttgggcctgacccgaggtgacaatactgaagttggtcatgagtaaaggatgaggaggagaggtggaggtcggtgggcccattattattgctagtcaaaacgacatctaaattgttgtcgttggacttattcttagaggaggaggaagaggaggaagagactttcttgttcttacgacaacctcctccgacagggatgttgcggagggtgccacctttggtccaatacctacgacaagtcttgcaaaagtaccttggctgagagagactgtagttgttgtagtagcaaaactttgtgtgggttgactcgcatctagggcatttcagggcttggtcgtgtgggggtcttagccttcgttccattaatggccttgaacacgtcagcatgtcgtttgatggagaagaagaatccaatgagtcctcctcaactatattggtaccctgaaattaatacaaaattatcattattatatatattatggaatcccagtgatcttgtttttgtttttattttacgtacgtatataagaacaaaaactatttaattatgtgaacataattaattaataagactatttaattaatttgcttctaaacctctgatcgataaaccatgatgaccttcttcaaattactagctagtactaataattaaaagtgcatggatcgatgtttttagaagttttgcacatttccttaattttctttcgtacaaatttgaacaaacaattacattgctctcactaaaaactacgtaagatcatatgatctagcattgtcctagggtactgaagtgtagaacgacaattatataatgagttcgtatatgtatattcagctggtctagaaatttaaaatgaattattatatattaactccatatatatataaggaattatatatatatatagtatgctatcctttatttaaggagagagggatatttattcaaggcattgtcatggtggtgctatgagactactatatgtaagtctagatacttatatatattatatttaaataaatattaattgaagttagcttaattaattaagataatatatatatgtaatgaacatacctgtagccaatctgatgaatccatgcaaacttgaagagaagaagtaaaactcataaaaaagactagtaattaatcaacaaaagtatagtactagtgtaaacactagagatgatcagcaaagctctttctttttctttagtatactctcttattactagctagctacttcattttccaatctctaaaaaagcgaaagacagtagctaggaatagaggaattctgagtagtgagaaattgatgattagtttgatcagtttggctgtggattgggttggtgtgggaactataagaaaggaagaaaaaggcaataaatgggcccaaaatcctatcctagtagtagtagtactgtcagtgtcagtgtcacaccagaaacagggcatacatagatatctatatagccttacttatatattgattgaattgtatatatactatgatatgatacacacacacacaacaatattgttaagagtgagtgagtgagtgagttagtgaagtagggatagtgagtgagtgacatgacagaagcttgagaatatttgggtcttttgagaaagaaagaatacccagagaacactccaacttgtggggtcttcttattgtgggaccccatttgttctcctcctacaagcaaagcatagattcttcttctaaaatctttattatttaagggtcctctccaaacccaaagtggtggtggggtcttctttcttgccaattgcattaccatatatacatattgtttttcttttagtttaatttattactttgctgctctatgacatatttttgttttttgtctcatgtactagattgaaagatattagatatctaaaaacattaatcagcacaaaagacccttctagatcagtttttttctcgtttctttttctcttttcaacaatttataataacttcttctaccaagagagatgccctattatatacatattatacatatgatatatcttaaatatatataggtgtcggtgacaacaaaagtaaagaaatcatgaattgaagtccacatgttttgtgctctttattttacagtttcactgccaattacgaaagcaaattattatatggaatctaatacaatccatgacactttctaatcttatta

SEQ ID NO: 262396 - DNA, 822 bp, Cannabis indica
aggtagaatttgttttcttgataaacaaagaattgtcggacaaggattgagtaaagccatcctctagcaatgttgaacttagtttggcataccattgacgtgatgcttgttttaagccataaatgcttttatttaatttacaaactgtattgggtggggcattataaccaggaggaattttcatgtaaacttcctcatggagatccccatgtagaaatgcattattgacatcaacttgatggattacccaattgttgatggcggctaaggccaaaaaaacttttagagtgttgaattttgcaaccgaggcataggtttgtgagtaatcaacacctggtttttgactatagcctttagagacaagtcgagctttgaaccttaatacttcaccagcttgattgtatttgtgtttatacacccatttgcaaccaatcagtttgtgtccaggaggtagttcggtaatgatccaagttttatttttatctaaagcttaagtttcattgttcattgcttcaagccaacgtttaaattgggaagcctcagcataattttgaggctcgatttgtgtgtaggctgcaagaacaccagcccgaaatgttggatgaagcttaatgtaggacaagaattggtcaatagggtgattagtggaagccacatgacaaacataatttttcagatgagcgggtttcacaataggtctacccattttggtggtttgtatgccatggggggaagaagtgccaggtatggttattgttgaatcaacagcagtttgctgatcctggatgatttggctgctggtgtagctgatgcaggtgcagc

SEQ ID NO: 262397 - DNA, 2023 bp, Cannabis indica
acactatagtttctttttcttttgcagatctaaagctaacgtgggatttaagctcaaagaatcaataactggaggcattttgactttttatcatagtccatatatgttcgattaattttgcattttatacatgatcatatatgcttcatattatacacataaatttctaacagttagtatcagagcggattatatatcatgtcttgataatttcttcagtttgatgtatatatatacatgtgtatatatatattctcgttagtggataattctttggatttttccttttgaattattttgttgttgttattttctttttgcatagtgagacacatggtgtgaaaggaagaaactcacgtctggaataaagagatgcatgaggggtcgcgtgcgttgttagatacttcccaaaagcgagatgagaagtatctttcttagatccgaaagggtgtgagggagagactcttatggttaacctcaggatacacacctaaagagcctaaagtggatgttgatcttcactaggtgtcgcggatgtcgacttttttccatgcgccaagtcatcaagtgacaattgtgctttcctaacagaataagatcttgcccctacagttgaacatgatagtgcgtgcatcgccaccatctatttatcaggcgaacaattcagacttctatccacaaaggaacgagctttgggtggcacgtgtcctttgattttaaaggttaaatctttgcatgacacgtgtctaggtagcactaagtgatccccattaattggttgctacacgcacgggcataaggatgcccacgagatcaaccaatcagtcaattctacattgcatatgtattttaccctaatagtggaattcgagcggagactctaggtgggtcatggagagatccataccaattgccaaagctataaatatcctttttattttcatgcaaatgggacaagccaaccaaatagatagaaaaaaactctgctaaaaatcatccttgatcctcctcttctcaagaaataaattaaggaaaaagagttaggattttctgcacaacattgtaaattcatcaatatcgaccaatgaggctaatagactgactcgtggattagggtttgttcacacccaaatcacgtaaaagaaaaccctctcttactttttgccatttattatttcttagctctttaatattttagtttccaaaaatctcggtaaatattttggtactttcattgagagcaaaagaaagacaaaaaccactaatactatcatggtatccgcacaaaaaatagtgaacaaaaggaatcctcagggtggcctcgagacggtcatggacgaagtaaactccctctcattggagcacacccagccgagtgacgcgggaggcggggatacgtccaacgtgaatgttcacgagggggacctaaacaaccagcatgaccatgtcgacaatagcaaagatgctaagaactacgaagaggaagagtacggtaaagacgattatgtcaaggacgggttctataaagatggctaccattatgagcacgaccttgaaatgacaagagtttcaaaggagttattcaaaaccgagcgaaatctggctcgtcaggagaagttttctcaaaataatggaaaaagcattagaccgcctttgaagcaaatttggggacctagatgaaggagattataatgaagatcctttagtgggatatgtcggaggaaatgctagggagaaccctactaacgctgaaaccgccactcctgcacaacacaaggggaaggcgaaaatgggtgaccctaaaaactctcgtgcccctgaacctcctcagaaaaacatgaattaggtgaacatgccttttccagcgcagaagatgcccaacgcctctaaacttggaggtccttcagcccaaaaggccctttgatgccaaaaggagctggtatgaaagtaccaagcccaaggggaggaaagatcatcctaatgattcagtgaaccaggatgtgctggaatttattttaccagg

SEQ ID NO: 262398 - DNA, 874 bp, Cannabis indica
ttggacttatgccttcgagaagaaaaatctactgatcttactaatatcagcgttgttgcctaaaaaaatcttcatgcacaatggaaaatttcaaatcatcttagtcttattgctatgaaaagatccattcctgaacttcttttgagtggtttgtcagacacaacaaatgtcaaagagttttttaatgttgtagaaaaattatttgacactagtgaaaacgccgcagctggacatctcatggatgaaatgacaaccattcagtatgataaatcaaaggagtgtgaggttttattttgaaaattattaatgttcagtccgagttgaaagatcataatattcatcttcccgactcttacaccattcttcaagttcttcatgaacttcctacctcttttagctttatcaaaacagcataaatacttataataaagcatggagttttagtgacctaatttctcagtgtgtagctgaaacaagcaagctaacaaaatgagaagaatggatcttctcactttatttctcaacttaagcccaacaaaggataaataaaatatgaaaagaagcaatcacaaccaggggctaagggatctcaagaagacaagggagagggagtcaaagcttaaagtggtcacttatattggagttgacgttatcttattggaacatttattcttgaattacagtgtagtgttcagattgttttgaacaatactttcttgattcctaatttaaagagtaatttagttttgcttccgcttttagtttagtaataattttcttttccatttgccaatcataatgttgacattatgtttgacttcgaataattggaaactgttttactctggtgatcctttcaaattatcattgactt

SEQ ID NO: 262399 - DNA, 837 bp, Cannabis indica
agatcctggtaaaataatatccaacaaggctctgcacgtctttatgcttcttgggggatggcatgctcaggagagcttggattttttctgggtttgcctcaatccccctctggctgacgatgaagcccaggaactttcctgatttgaccccaaaggtgcatttctttgggttgagcttcattccgtatctccggactacttcaaaacactcttctaagtcgtctgcatggctattgcatgctttagacttgacgagcatatcgtccacgtacacctccatgtttcgccccaagaggcctttgaacatccggttgaccattctttggtaggtcgcaccagcgttcttcagtccgaaaggcatgaccaggtagcagtatacccccttatcggtcctgaagctagtgcactcttggtccgccgtgtgcatctttatttggttgtacccggcgtaggcgtccatgaaggacagtagtttgaatccggaagtggcatctaccatctggtcgatcctgggtagcgggaagcagtccttcggacaagctttgtttagatcagtgaaatctatacaaactcgccaagtcccgttcggctttggcaccaggaccggattggctagccattccgggtagtacacgtcgcggatcatgctgtttgtcaaaagcttgtccacctctttctctagggcctcggcctttactgaatcgagggggcgtcgcttttgtttggcggcatgtccgggttgacgttgaggacgtgggtgatgacgtggggactaatgccagtcatgtcctcttggcgccatgcaaaaatgtcgatggcgcccttcagtgtttttat

SEQ ID NO: 262400 - DNA, 434 bp, Cannabis indica
aataagataaaaaattaagcaaaaagctagatttttacctattttaaagttcaaattacactaatatcttaaattaattttaaaaaatccaattaatttatttcttataatttgatttgcaatatgaaaagtaaaaatcaaaatacaaaactacacaaaaaatcggaagttaatttcatgaaacagcatgaaaaatcgaagaaaaacgaaaaaaatgtaagttgtacggatggtaggcaggtgccaggaaggtttctgcatgatttccacgtgtgcaagagagggatcatgttggaattaattttaccaggatcttagatctactcacaagtatgttgatttaacaatctaaatatgaacttctaaaacgataaacaaaacacataaaagttaagaataacttacagtgatggcagcggaattaagtgtctcct

SEQ ID NO: 262401 - DNA, 685 bp, Cannabis indica
tttttttttttttgtaataagaatcgatttattaaacaaccacactaggcttatctgccattaaaaaggcagcagcacaagagggcaaagaatttgtccaaatacaagaagaatgagtctttcgactccaacaagctaatgcatttgctacatcattacaaactctaggggtatatgaaaactgtacagaaataaaatgatgttgaagagataaaatctctttaatcagcaaaccccaatccgaagcagtagaggaagtagaattcagaccattgataactcccaaacaatctgaagctactataatcttcggaatagacttgttataagctagagaaattcccatcctaatggcagcagcctccgcaagatggactgacataatactaggaaggaatgaagtttcagcaacaatcaaatctcctttatggtctctaatcaccgcacttaacccacagcccatagaattttgtattaaggatgcatcagtattaatgatcacaaagctaggaggaggagcaagccatttctgtataactattgaagccgagacctgtggaggtttcaacacctcttcaaaatattcttccagctggtttaccgcccaaatcgcccaaccgtgctcttcttgaactttattctgaaaaataaatttatttctacgctgccaaatgagccaagacat

SEQ ID NO: 262402 - DNA, 441 bp, Cannabis indica
gtaaaataaatatccaacagttcgggtatctcgttggtgataatgatgtggaactctccgacactatgcatatgtctcaactcacctatcaacatgctattctcatgaggtttgttctatccaattggtttccttgctccaatccggtaaatgtttcaaatgaacttgccttctttttgtataaagtttcaattggcgctaaaattgatttggctaacatgatttgggagcaaattgtttctcttataaatttcaagaaacctaggctcaatcttatctttcctcatttaatctataagattttatctgatcaagaggaattgattcttgagaatgaatccattgagatgcctgttgttggaactactttcaaagttccagagaaatctcatcaaggaaaatatgctaagaaaaaggctcggtctgcttcccctggtgtta

SEQ ID NO: 262403 - DNA, 628 bp, Cannabis indica
aagccttttgtcataggattggcaatcatcaataatttagtgctaatgtgttgaatgaccactttattttctttaacacgttctctaatagctaagtacttgtcgatgtgtctgctttgacttccacttttgttgttcttagccatgaaaataatagttgaatcataacaaaatatttttaatggccttgctatgtaattaacaactctaaggcctgaaatgaaactctttacccatacaccatattaggtagccttaaaaaaatagacgaactcggcctccatagtagaagtagcagtcaaagtttatttattactcctcaaggacacaactccaccagcaaacataaatatgtaaccagatgttgatttatgtgaatcagtacaaccaactaaatctgaatctgagtagccaactacatctagattgtcagtttgtttaaacatcagtttgtaacccttagtaccctgaagttacctcattaccttccttgcaactttccagtggtctatccctgggttactctaaaatcttcctaacactccgacagaataagtaatgtcgggtcttgtacacacctgagcattcattaggcttccaaaagtagaagcataaggaacgttcttca

SEQ ID NO: 262404 - DNA, 643 bp, Cannabis indica
aggcgtactagtaatggaccctccgtaatcatctagaccacagggcgagcaagtagagactggggctgcccaaaccaatccaccggcaccgcctccacctccgcagaatccgggggataatgtgggggtgggtaatgctaatcctcctgctgactggcagtagatgtttcaagaaatgcaaagtgtcgtacttcgtcaagaagaagagttgtgacgactaaggcaaccgactgcccctgttgatcaagtgttaccaccagcatcggtgtcagtggtgggtaaccaggggtttgttatgccgcatagagactcggtatttgagcggttcgtgaagctgcagcctccgaattttctgggaggtattgatataataaaggtcgagtagtggatgagcactattacccgtatcctcgataatatgggggtgacgggaactgaaagagtgaactgtgcagccttcatgttacaagatcatgcccacgtctggtaggatatagttgtttgaagaaaagttttacaacgtcgctgtgagaacttcacacatggaggattttgtgaagtttacttaggggaaagatgtcaggggcccaatacacaatggagtttgatcggctgtctacgtttgctggtgatctggtgccca

SEQ ID NO: 262405 - DNA, 857 bp, Cannabis indica
aaacacctcactgtaaacaactaaacaactggtaaaagttaaataaaactctcttaagactactcctttggtaaacaaactgaataggaggcttatcagcttagaattagttaaccactaatggtctgatctttatacttgatacaatttctttgttttttgtataccatttataatactttcaaatcttcctcttgttgttttattgatctaaacatgtgtatttatatttaaaagccactttgtgaaaaggtatattttggatgatataataatttgtcttttatttgtagcacttgcagcttcctctgatggcaaaagaactgagagtaaagaagatgggctttctattgacattaaattacctattaaacatgttctgtcaagggaacttcaggtatatttgtatttgttttatgtgttttctcttgattttttcaattcatgactaatatgtcaaataatgttctcggttgtctatgcagctttacttcgataaagtcacggagcttacagcgaacaggcctggctttaccatttttagagaagtgttgatcagcttggcaacagattccggacttcaccctttagttccttattttatttacttcattgctgataaggtatgcatggcaaatggatgttgtattttcaacaaagttaattataacatatttttgatgctgttttaattgctcatttctgatgctgttttaagataatcttctttaggttacacaaaatatgaataattttcctctcctatttgctttgatgcgtcttgccagaagtcttcttcaaaatccaagtatacatatagaaccttatgtaagcagctttttctttttttttttttt

SEQ ID NO: 262406 - DNA, 754 bp, Cannabis indica
gcgagctggagcttttcccctatttttctgaggttgatgatttacgcctctttgcttctttgctcgaaggcataacacttcattttgataattgcaactcttaataacaaagagtactttagcagtcatcattcgaatgtcagcttctgctcgacagaactgattcttcaagactacagaccttgtctgaagttaattggtgaaagtaccaggaacatgccttcctatagcgagataagcacctcgctattacttgtttgggttcgcctgactgctatacttagtttgtatattacaggctaagtgttttcactgtcattatgcatcgtttacgtctacccagtcgtgacgaggttgacgtgtcgccttgtgcgtgccgtatggtttctcgttaacacatgagacaacagtttgtatatctttatctcgcaaagaccttatagtcagcaagttgtaaatatactctgtcacttctgtatttagtgagttactccattaaatgtaattaccgttacacgcatcgatccatattctccttgacttaacgcgtgtcctccattaaaactggtagccaaatttcgggtataacaaatagtctcattaattattcaatacattaagatgatattgaatatgaattttaataagtgagaaactttaatcttatgaaattaatattgattgtggtaatcaagctggttatgagtagttagtataaatatctattaattgaaggatgacttggtcattgact

SEQ ID NO: 262407 - DNA, 658 bp, Cannabis indica
tgatttttttttttagaataaaacatgtctcagtaaaattgtcatatctctttaaatactcatccgattttcataatcttggtgcctatagaaagcttattgaattttccataattcttatgaagaaatattttactgaatcgaaatttatctatgtcaaaaattagtatttctacgctgtttgttgtaaatcgttttttcatattttttatataagttgtctcagtaaaatccaaatatctctctgaataaggatccgattctagagatcttggtagcgttgaaaagataatttgattttctaaatcttttatgaagaaatcattaacaaattattgattattctaagtcaaaattattgtttaattgttgtagttcgaaatccatttgtttcagaatttctaaaaaaaactgtttcggtataatatatatctcgtacgttataactatgattttgaagattttagtgtcattagaaagggaattcaattttctaaaacttttatgaagatattattctctgatttggaatattttagtatcaaaactttgtatttccgatgtctcctgtgattcgttactccatattccttcttagaaatagtttcagtaaaactatcataactccctcagttttaatccatttttaatgatcttt

SEQ ID NO: 262408 - DNA, 686 bp, Cannabis indica
gtttttttggttctaaacatgttatgatttgtttagatttgcattaactcttgaatttatttgtttttttggttaaaattaatgtcatgtacattttgatatgaagtataatgttaatgtaaagtataatgtgtgtattttataattttatttagtagttgaaatactctgttaattgctctttaaaaaataatatattattaatttattatataaaatttatatattattaatcatataaaattagaattacatataaaaaataatatattattaatttattaataatataaaattaaattaaaatagaataaaattaaataatatatatgtatattggtttattaataattttataacttaaattaaaatatattaatttataattgataaatatataattaattaaattgtattattaatataattattttttataaatttataatatataatctgaattttaaacaaataatattaatttttttatttataaaagcatattaacattaataaaaaaataaaaaaaaaaaaaaaaaaaggaatatagtgacacttcatgtgtgtggctattacatttttagttctgacaaaatttgaactctatacgcctatagtgacgcgcaaaaagtgaatgtaaaaaggttcagtaacacgtgtgaagtgtcactaaaaactgtctttcc

SEQ ID NO: 262409 - DNA, 820 bp, Cannabis indica
tgtcacttttgtcacatcacacatccaatcaacttttctaaataaaacaaaaactttaaattttgatgtgggaaaatcttataaagatacgggtaagtaaaaaaaataaaaaacatttgtacagaaaagtctatactgctagtataaaaaaaaaacatacacagtaaaaaagataaaaatgccgcctgacagtataaatgtaataaattggaaaaagttagtaatttatgtaaatttcccttatagttttactaggatctagattaactaccatgtatgttgtttaaaatcttaactatgaatttctaaaacaatgtaatttaaacacatataaagttttgagaaaccttacattagttacagcggaattaattgacaccttccgctcagatctctaacccttgtatcctttttatagcagagtatcacaaagatcttagcccgattctcatttacttgaattggattcttcacagtcttacatactatgattgtgtaccaacttgttatgtgtgggcatgtactctatcactatagggttcgaaagttgaagagagaaagagagagagagaaggattcgaatgagagagagataaaaggctcaaaatttgactgaaaggcttgaatggatcatctttcaatttgaggccatcactatctatttataggaatccaactaggtttaggtttggaattatttggcattgaaaattgataaaataagtagtaaaataaaccacaagtggccgaccatggatgtgggccctaccactttgtaattttgtcatttttcaactatttatcttattttctaaaaaat

SEQ ID NO: 262410 - DNA, 560 bp, Cannabis indica
attttagtaattttgacccgagaaaggtaaaactgtgaatttaatttaatacgtgcttatggactatattattatatagtatgtctgttttatccttttttaggtgtgttttgacaagtcggcgcggtatagtcacaaccgggtatttcaggtttagggccgaaatacaattttgagattatttattggcattttaataaagtgtgattaatctgaaattttattgggtatatttatgttggaaatgactatgctatccttggaatgcttttatgtgttatttggccctaggaggcattttggtaaattggccttttggattaattgcaacaaaaaggaattattttgcattttagaaagaaaattatgggttgttttctcagctcttggctaaccctattctccctttcccttcaatcttttcacttcaaatcttcctctcttgtgtgttgttgaacttgttggagcttgggggattttggtgtgctttgattgtgagaactttgaggtatttttcggctcttatttttgaattttattgctttgattctgaaatgaaa

SEQ ID NO: 262411 - DNA, 676 bp, Cannabis indica
tccttgtaaaatattctcaacattttacactctgtttcttctagaataaaaagcagcatcatgtatcttgatactgcatctgaaatgtggaccatattgaatattcgatccaattaaggaaatggtccaagaatttttgaattgaatgaatccttgacataccttcatccaggtgattcaatgaatcagtgagtgcctattttgcaaaactcaatgctatgtgagatgaaactaatcaattaaggcctagaatcccttgtactggtgctgcagcaatacaaacacaagatcatcataattgtgatcaggttcttcaatttctcaatggcctaaattaatcctaccatgccatttgtgaccaaattctcctttttgatccatgtccttcaataaataaagttctttttatggtcatacatcaagaaagacaaagaacattaggtaacaaaacaattccaccagttgctactacaaccaatacatccaccatgccatctgaagttgtccaagctgctaatgcgcatgcagcttcaagaaacaaaaggcctcgtcctcatttaaccaattgccaaaaactaggtgattataaagacaaatgctattttctaataggttttccacctagttatggcaatcaaaaaccaactgatcctgctgccactcgcaaatctgatct

SEQ ID NO: 262412 - DNA, 585 bp, Cannabis indica
aaaacctgtttaaatatgtatagtagtatagtaggtgttaaaagtatatacataaaactaaacaagacgggaacatataatatagttgtattgggtaagttgcaattgtatcgtacgtggtgagccaaaagtttggtgtatcatcattaattacatatatgtgtcaatggtatagagtagtgaagatgtttgcggcaagtatgggctgaggaggaccaaaattataatgtgttgtcaaaaatcagaatgcttaaattattatattaatactatatacaacgaaaacttggctgtctttatttggaccgtctttctcaagggtcaacacccagacggcgtagatgcattttactagacttgcttagagttagccaactcaaaaagaatgtacgaataaaccaaattaaatctgagtaaaattatgagttgctagctacaagtagaataaaaaattatgagttgctaaattataagtaaaaattgtcctacaagtagaaattaaaaaaaaaaaaaaagtaagattcaatctatttgttatatatataataatatattaatatgtgtagcagtcacattttgtatgac

SEQ ID NO: 262413 - DNA, 447 bp, Cannabis indica
tcttgattatatagaacgctctatatgttccaaatatagatacattattaattatctattattttaatctaaataagcaatgatcctctatagaagatccatatcgagtaggaacgattttaccgttctactatttaatgtattttattcttaaaatacttaactccttttaaataatataataatattactgaaataagtactccaccatttaatctcgtttaacaaagctcgaacgaaatcatcatttcacttctatgtatttatagaagttatagattccgcatctatgattagcgctcccactcaattgtacaaccatgttctcaagatgtaagtatgtgtaagatccaattggtcaactttgacgaacaagtcaaagaacacaaataatataattgaatcagattctaaccatctcagaattgagatcattgatctaagatc

SEQ ID NO: 262414 - DNA, 520 bp, Cannabis indica
taatttttcttccaaatttaatagtatcttttatataagttcagtcatgcttttcttatgtaagttaggctattaattattttggtatatttattatattgtatgtcgtttactgcattctgccaacagtggtattttgtcgatttatgatatataatatgatatgctgttaagttagaggtgagattcaatttattcaagattatttaatttgtgcgcataacatatatatcttccggttgtaattaatggtgtagaattgcaactgcgttctgaattaatatcggttttagaataggatttacataactacatctctaccttactaagctctttatctgatcatccccttttcactcaccatttcattatttttaattcattcacatttctatcattttctatttatactaatctttagtggtaatttgcctccctgtggatacgacatatagcccgtttactaccgcgaccgcagtgtaactaattgggcgacatcaacccttcaatatattttatc

SEQ ID NO: 262415 - DNA, 537 bp, Cannabis indica
aataacaacaaaacacaattcaaaacaatattaaataatcataacaacatttagcaatataaaagtttaccaccgatccgactacagcacatgtattcacaaaacctacttcactacggatgaatatttaagatattcaaactcatctaacatgcatattattccacccatcgatccgacatagtacaatatattgtagaacctacttcactacagatgaatatttaaaatattcaaactctactaagcattcataattaatttataataaaagttagtaaatgtatacctcgagctacctagaaaccgatcaacaccaaataagtcggatccttgcaaattgacctcacaacctacaacataaagaaatactacaaaattaccaatttttttatttagctacttactagttatataatttatgagtaactagttactaactagttaatttattactaactagtttctaatgagtaactagttagtaataaaaatacatgaatatgaatgaaaattagtaacttgttaagtagttgt

SEQ ID NO: 262416 - DNA, 696 bp, Cannabis indica
gaagaagcattatacattatgtttattaaattaatatataaggcaaatctataacatgtgattgcattgaatgatgatgaaattgaaccatgtatttgtgtcaccataaccacaccaaggccactcacccccccattcttctcatctatgccaccatgtgatataatgggaccaaaaaaatcatcaattatgaaaaaaaaatatatatatttatttttttgactattttttttaagttattttggataatgacattaaaagaattacaaatttatggatttttatattttttttgtttaaaaatataatttttttttttaaaaaaaaaagttattttacaaaaaattgaaaaaaaaaaagaaaaaaataatgggaaatcagataagaataagtaaccagagaagtagagtaaccaagtacctcatccattttttttcatatcttttaacttttaactaaaattttctcataaaataatctttttgagaaaaaaaaattatatttttgcaaacttatactttaaaaattataaaaaaaaaataaaagtttaatgaaaaatttctcattttgcaaggtgatatttatataaaatgttgagaaattactgtaaatctatgcttagattatgaaagaataaaataaagtaaatgtgattatatttagatgtgactatgcacgggtttggcatatcattat

SEQ ID NO: 262417 - DNA, 903 bp, Cannabis indica
ataaatttagagtgacacgtcatcgttttatacttctcgcttcttaatataaatttatttttaataataaatcattttatttttaatataaataaaaagtcacccatgaatttctcataaaccaagaattcggttatatatgcacactttatatagaatagatatgcgggttaggcctagggccaaatttttttttccccttttaaaattatatagtttttttactgaatttgaaaaataccataatttttctaacataagggccaaaaaataaatttttgaggaaactacactcaataccctttttatattgtcctctttcatttttaccctcttttttaaagtctatcatttttacctcttttttttttaaacattgtatcacattttgcccttgtcacttcaagatactctccatgtgactctcttatgtcagggtattttaggtacaatacatataaaaagaggtatgtttcaattaaatataaaattagaggtaaatttgattaattgattaataaaagtggtattttccaacttacccctaaatttttttcttgtgacccactttgtttcagaaccggccctgcatattttgaaatgcgccccagaactattggaattacaattgtgggaaactttagcaattgtagaagtcctaaattcatgtttttgctacccttttttaaacttaggctccttgccttatatcctgcaatattatttgggaccagaaaattatatacaatgtagataactcagattatctaagagcacattgcatacaatttgaggagaggggtagcccctttcaatgttttgaatttaaggtagcgtttggttgggaagaatggaaacataggaataagaatgggaatggaaataagaataggaatagaatgg

SEQ ID NO: 262418 - DNA, 988 bp, Cannabis indica
aaaagttcaaattggtgggactatcaaaccaatgatggcagctggtattagagacaagtactaataaagcttaaagaaaaacataaaaatctctctcacttgtagccaatcatggtaagaagttatagtatccaccaagtttacaagctgctaaatgttgatcaaaatagagtttcatggcataggaaagtttggaatagatataacatgcctaaacatagctttataatgtggctggctgttcaaaagaggctccttaccacgagccgattgctgaaatttaatgtctgtcaagaaggcagttgccttttatgcggcattgagcttgaaacaatagatcatttattttttgaatgctatttcagtaacaggtgtttgcaagagatcaaaacatgattgaattggaaaatattagatcgtcctctagcagccatgatcaagtggacttctcgggttaaaacattcaagttcagaaggaaagtttattcagcagtggtggctactttgatttatcaaatctagagcaaccgaaatgattgtttatggaatggtaaaatgcaaactgtgcacgggtgtgttcaccaaatgaaagagaatgtgaagcatagaatcaatggcttattagatacaaaaaataccatagaagaaagagattggttcaattctttatacatgtaactagagtattattcaggcatttatatggtgctgattaagttgtaaaaagtctagttatatacaatacaaagtatctgattcagcaaaaaaaaaattactattgtaactccgttacttattgtagttaccaaaaatatatttttttataattatttaaaaaaatttaaatgtatgatatttttaagaataaaaggtgatacttaatttttacgtatttctcttcatatttttaagttaatattaaaatttaattaggtgtatatgttggaatttattttaccaggatcttagatctactcacaagtatgtt

SEQ ID NO: 262419 - DNA, 783 bp, Cannabis indica
atatatggaacattagaatattggagtaaatcatgtcaaaaccgattgtacaaaatctgtggaaataagacacaaaccctattcactaaaatggttgtaaataattaaaaaatccaaatctaaaatatgcaccttactgcttcttctgcagagtatgactcggccaatacatcatcaaccacttctagtcctctgctttcattccacagttgccatgcctaccaaacaaacatgtctaaccaatcaagaagaacatttgaaaaatgaactgataaaatagtaaattaggagttgcgactataaactcacataatcaacaaggcttagctccttctcataatagtagaagctagagttcttcttcccactgattatctctaatagcagcatcccatagctaatatttatttcagtatttcaatgagacagcaatgacattgcaagtccacttaagttggtcatatttaacttccatccatcctgagaataatctttataaatcctatatgattggaataaggcctgtaatagttccacaatttcatgaacacttctttaaacttaaatttccaaagacaaagatgataagaatcaaagcttacccaaatactggtagaatctattcagtgtacaattactttgtaataaataaaataaaaatgaagatggctctaatttcatttaatcatctcacttgtaaagcaacaaaaaaacttctctggacatcaccttccatccaccttcaaagcaatgcttaacaaaattatcaataccaatgtctag

SEQ ID NO: 262420 - DNA, 615 bp, Cannabis indica
ttgtcttttcaggtgtgttctgacaggttggcgcggtatagtcacaaccgagtatttcgagccgaacggggttcggacccgaaatgtaatttgggattaaatgttggcattttatttatataggagaaatctgaaaaattatttaaataggtgttttgtgttggatatgacttaaatgcccttgaatgttattttgcatgttatatggccctaggggcattgtggtcattttgacccttgatttatctacaacaaaaggatgatttttaattaaatggaaaaaccattttttggtttctagccctccaacccgacccctccctctccctccaaccctattttaaactttgtgatatggtgagaaattgcttgagggtaagcttggattttggtatgcttgtgcttgtgcttgattcttgcttgaggcttgaggtagtttctttgtctttgacttctaattgttagtagctgaaattgatgttgttttgatgattttcaattttggaggaagattgatttgcatgttaatgagttgtgggttgttcttgatgttgtaattatggtgatgttgtgattagtagacggtgtgttatgtatgctttggattgtaaaatt

SEQ ID NO: 262421 - DNA, 1345 bp, Cannabis indica
gtggatgattttcaaagcgtagacttccgaggtttccttgtagcggactttgtagactgttccgccattgccgcttccgagaacttgaatcttatcgagatcagcgggtgagataggggcggaggaagatgagcagttgcattcggtgggggcagcggtggaagtgggaggtagtagtgggagagagatgggaggtggagcgttggagagtttggttaagggaaggtggagattgagatgagaacgttgtgatcggaggacagccatgttagctagggtttgtttggaattttttgaattggggtttggtgagtgagtgagtgagtgagtgaatggggtttatataagtgatggaataaaatgatcgcagcaacagctgggcatgggatatttgaaatcagaggtatgatagagacagctactttgagcgggaatcaactaattaattttactttcctttttacgtttagcaagtaatttttaaaaacttaaaaattgtgggacctatatttttcgtattgaggtttttttaaatgtgggtcccattcgaaattaaatacgttgttataatgtcttctctgtttttttatctccacgtttttttttttgtcttatcttatttattagtatcttatatagggaaggaatgagaagaagaagttgtatttattatttcagtaaagagtataaattaatattgaaatattccataattaatgatattgaaatacaagttagagtaaggtttagttgtactgagtgtgcttaaattatgttgattttagtaagttagtcttttaatttttttttttttttaatttttttttaataattttaactacatatttttatgatttattcacacttctataattaatgcatttttaagttttggggttgtaagaaattaggttggtggcatatgctaatggcatttgattttgagatcatgcaacacataaaaaaaataccgattttaccaactccagacttatggtgaattcttgtttgactttgtaagtatattattttatcagttcaagtacttattctttattttatagtttgattgaaagtacctattacttttgatttctttaatttacaccttttattttacaatttgttataaattacatggttaattagttatcctctctttttaattgcagcaaatagatgttattatgtattatcaaagaaaaaaatcatgcccagtggtattatcaatatattggttacgactactgattcaattttttataaaattgttagaactacttatgagaattacttggctgacggcagcaatgtgattaactaggaaagcattattgcaaaatac

SEQ ID NO: 262422 - DNA, 595 bp, Cannabis indica
tggatgactccaacctttccaaggtcatctgcccgaacgtaagggctctggccgcgaagaaggtactccgggaggaaatgatcaccacggcggaagataagtaccaaaagtacctcttccaaaaggcccaggagcaggcttacgctaaggcccaggcggtgccgggaggccccttcgtattgggagcccggtggagaggagggcccccagaccaaggcctacggtccaggtgccgaatactggggctcctgatgccagcacttccgattctggtaagtcccctttaacgatacattacgtccctcccgttcgtgaatacgctaaagccttaggcctatagggttcgatgaacgtctccttaggtttaggatgccctctactcagtggggggatcatgcaaaggagtattacttctccaacttaggtgattatttaggccggtcccggatgggttcgggacctctagtgcccgttcccttggatccttcggcctatctgtctactagctagttccgtccctcggatagctatctcggggatgatgcagctgttgggtttatgccttaaataaactctttacaaactgattagttat

SEQ ID NO: 262423 - DNA, 744 bp, Cannabis indica
cagtgactcccttttgacaaacagatattttttttcacttaaaagaatgtaaaatcaattttatatatgcactcttaatgagtattacccatgaaggggtaatattaaaatattttgagtttttatgattaatttttccatttaattaaaaatatttcttatttttacattatatggactgggattggtctatcagcagaaaaaaaaataattttaaaaaaaaaaattagcaaaaaagtgataaaaaaaattgaatttgacttaaatattttttttcttcatataaacatattttaatatagtgtaaaaagagatatatttttatattttctttaattaagtagctaaattaagcataggaatttctcttttattattcgctatcggattaaaatctgatagtttaatatttttaaaattaatatttatagttaattttatttattactcattaatgggtaatacccattaagaagtattacatcatatatatgtgtcacatgttagagaagaagggacggacccaacccatttatatatacattaattatatcttttccatctcgtacctactaactaattaacctatcataaaaattgaaatgtggttgatgatcacatgatcaaaataaaattacagtgacaaagttatccatgttctttctgggtggtgggaagtggatcaggaccggccctaggcataggcgggctaggcccgtgcctagggcccacattttccggggg

SEQ ID NO: 262424 - DNA, 668 bp, Cannabis indica
ctattcagtccatagtgatagagtgtcatgcccacacatagaaagtgaagtactcaatcatagtgcggaagacagtggtaaccaacccgaaggagagaaagagatccatgctcagatgttgataatactatgcgacaaaaggaacaagggttagagatctgagcaaaaggagtcattttattttgctacaatcaatgtaattattttagagatattaacatttaggatgtaaattcaacatacttgttagtaaatctagatcctagtataatattcccaacacaatctagcttcgcttggtgagatcaaaggaggtactcttggtcatccgtccatcttaagaattcccgtctctaatgagtgaatacatcacaatctgtagtgtgtggttcttcagttaggggcgcttggctgacagtctctctaggtctggctaacttaggatcttatcccaagtctacatgtggtttggaaatagcaggcttgccaattcttggtcctatctctccatcattgtactggagacgagatctagttgttgttcctgggggcttttcccaaagggtccttcttttagtggaaggcgttagtggagggtcctcccttggagccagtggccgattgttcaaattaactagaatgttcgtgccttcctagccagctgtagt

SEQ ID NO: 262425 - DNA, 549 bp, Cannabis indica
gttcatttgttgttaattttttgttatctacatgttattttttgttgttattctactgttatttttatgttacttttatgtaattttcttgttgattttatgttgttttcatgttatgttttggaaaaccgtaaaaatgtaaaaaaaaaattccttgaacaatgtaaatattttacaaaaaattgtgccttatgtaattattcctttaaaattgaatttacaaaaatgttgcaaaggaaatacaatctatccctttaaatttggataaatgccatattagggtggaaaagttagaaaagccatatttatcaaatcttttttgtagaattccatatttggtataattccccaaataaaaatgtcacttttcatattttttatttaggtccaattagtattatgcttattcaatgaataacaattgtttaattaatgttaaatttctctcctttgggccttgtgtgagagctagggggccattagtagtgggtatgacatattgaatccaaccctccctcacatgaacaaccccaattgtgaaggtctatt

SEQ ID NO: 262426 - DNA, 668 bp, Cannabis indica
caagtgtccatctatcggtggaggcatcagatcctggttgttttgaccttggttggccttgacatacttctataggtgcgggttgttcttcttgatcagaagttctatttcccgcttcaggttgtagcattcgttggtgtcgtggccgtaatctccatggaactgaaaaaattttgtcatttcccttttgttggtatctttcttcatgggcccgggcttcttgtacggaattagcgactgaattgctatacacacactttctatatcctcagttaggatagtgaatgcagtgtgtttagcgcgatcacggggagtctttctgggtttttcggtgaactttcccttcttcccgttcccttgcttgtggttgttgcctgaacgcttgccacttgagttactggaatattggggaagctgggcggacgttccagtagaaggagccttcgttttgttcggcttttgctcaccttctgctcgttgaatggcttcttcgagcttgatgaaacctttggcccggttgaggaaatcactaattgagtcgaccggtccgttcttccttatgtccttccataatttgccaaggacttcaatgcccccagtatcgcggataactttccaccctcggttagccataataccttggttgcttccgtcatgaatctgctgat

SEQ ID NO: 262427 - DNA, 729 bp, Cannabis indica
tccccttatcttttcattctttgtgccgagggcctttctgctgttaagagccaaacaagatattggtatgcttaagggagttgctatttctagaactgccccatctctttcccatctattttttgctgatgatagtctcattttttgtactgctaatagagcttcctgttcagcccttcaagaggtttttgatgtttattctaaggcttcgggacaagttattaattttgctaagtcttctattttgttttctcctaatactctgtctgatattcgtgctactttctttaatgcgtttaatcttgaggatcgacccttcatatgtaaatatttaggacttccgcagtgcttatctagatctaagtatcattcttttgcttttttgaaggataaggttaattctgtgctgagagggtggtcggttaaatgtttttctagggctggtaaagaggttcttctgaaggctgtcattcaagctattccagcttatgccatggcttgtttccgtctacctgttaaattatgtaagggtatcgaagctgtgatggccagattctggtggggttcagttggaaattctcataagatacattggaagtcttggaaatcgttgtgtaagtcaaagtttttggggggattaggttttagatctcttgttcattttaatcaagccatgcttgctaagcaagcttggcgtatttttaaaaatccttcttctctccttgctca

SEQ ID NO: 262428 - DNA, 646 bp, Cannabis indica
ccctgtaaaatactgaaaataaagaaatcaattaaagataggaccaatagtcaaagaattcactaaccttgataaatcgggtcgtgaaagagcgtttcctccacttcaggtggtgttaattctaaaaatggtatcaaactttgaccattgactttgaatacattaccagatttagaatttttcaatttcaacagctccgtgagaaaaaacagtacgaatagtaaaagggccagtccatttagaacgtaacttacctggatcaaaaggaatgtcccaatcaggaggtcgaaataacttttgtggtccagggagtgattgtgattttctaggaattttcacaactcgatcagctaactgaagtgtcatagatattggtttcgattcccctagaccaagttgcttataaacagaataaggcaacaaattcacactagctcctaaatcaagtaaagctttgttaatcacatgatcaccaataatacatggaattgtgggacaccctggatctttgtgattaacaacacttttatattgaattatagagctggcttgttccgttaaaaatgcctttttcgaaacattggtgtttcttttttgcagtacacagatcttttaaaaaatttgagtaggcaggtatttgcttaat

SEQ ID NO: 262429 - DNA, 673 bp, Cannabis indica
cttcctagaaatttgatatgcatattgaggatagtataaggtctatgatttgttactagcagttgcctagattcatggatgtcctgatcgtgaacttaagaaagctagaattgttaactaaggtttgcatgtttgatactattctaagtgattaggggtggaccatcctatggtcattaagataagaaagtatttgtttcatcaaatactacttttctatgaaaattactaagtctgaaacaaagtagcaaagtagaggagatatttttttttattccaaaagttttctatcatcttattcgaaataagatagccccactgcctttgttgtctggacacaaccgatgaggacaataccacttatgttcttagatagaaagtaaaagtaccttgtcgtagtgggagggttttaaggaactcaccctgttatgacttggaagacacttgtgataaaatccattgttattttaaacaagtagtggattttcagaataaggaactaagaagaaaagccaagagaactatggttaaaaccattcatatggaacaaccaaaggttttctattacaaggacaagaaaggaaattttgcaaataagtttattcaatgtacttaacaaaacttcctgatcctagtattaaaggtttgagtttatctaaacctatggcttgtg

SEQ ID NO: 262430 - DNA, 4714 bp, Cannabis indica
ttttaaatcaccaagcattatgctcaaaaatgctacaaccagaaagaaatcgtgagtgcctagcaatagcatgagcgacacgatttgctgatcgtctaacaaaacataaattcacagattgtaaagaagacaataaaagttggcaatcctgaataagtaagccaaaatttgaagaaatgtatatataatctcttaattaggttaattaggttagtttgggttggtattattttcaattcactcgatataaaaattgggtgagttatatttttgtcgaatttttcgatttaatttgaccaagttattgattagacgctttaaaaaaaattatatacaaccctaatattaactctcttggtagtatacaatatggtgtgtgtagataaatactttcaatagttttcatgctcttgttaataaaacaagaaatttgacaaaaatttacttgtttgcataagaagaatcatataaacttgacaaaatataaatgagaagagaagttaaaagacttactactcaaatgtccctatattaaaatattattatgtaaatgattgcactaagagagatggtaaggcatctttggccaagtcaaagaaaacttaatttaattgctaaactccatatggctttggttgacatgaagctcaaattaaaaacaacaaagaaataagaacaagtactaagaccatttcaaaggttcactttcatttaaagggatcttcatataaatatacactcaaacacaaccaacacaaccacaacacctaaatctccaacaacatcttcaaacataaattaaagttacaaataaataaacaaacaaaaacactaaaagaaaagagatatgggaaggaagagaaaagcaactacaagtgaaggagtggaagacaaaagctctagtgaggaaactatggcttgggatgagatggtgaaggaagctgctgcactaggaggaggagctgctagaagagctcgaaagcgctttgttggtgttcgacaaagaccatcagggagatgggtggctgagattaaggacaccatacaaaagataagggtgtggttaggcacatttgatactgctgaggaagctgcaagagcctatgatgaggctgcttgcttgcttcgcggggccaatactcgaacaaacttctggccttgttcttcctcatcttcttcatctccagctcttccttctaagatcacaaaccttcttctccaaagactcaaagcaagaaacaacatcaccaacaacaacactaacaacaataacaacagcagcaacaatagcaacaataacactttagtctcttcttcttgttttgtgcctataatcaacaacaactatcaacaacaaaatcaacagcaaattgatgatcatcatgaggaaccaatggatttctcagatacccaattcactgattttctcaatgacactgaagaatattacatcacaaccaataataacaataacattagctcagccaccattgactacatgacatcaagttttgagtcatgtttaactgatcaccaaagggaaaattgcattgaaagagagcatgatgagacaggacagacttcgagtggcgaagaagaagaagaagaagaagaagatggagaggaacatggaacttgttaccatgaacttagtgccttggatttccaatttatgaatgataaagcttgtaactattctccttttgagattgctgaggtgatagaggagccaatggatcaagaagctgcagagactttttcggatgagccttcaatgctcagagaggccatgaagagaatgaaatatgagaggaaattctctgcttctctctatgcctttaatggaataccagagtgtttaaagttaaagattggaacaatgtctgattctgatcaactaaggagccttaaaaatgcttgtaacaaaaacaaagaagagattattatgagcaaggatgaagaagaacatgtacaagtaatgatggagaagaaagaagatcatgatcatgaagaactagagagctcaaatattattattgactctgattttagtgatgatggtgagctcatgtcactttggacctcacttgatcttccacctatctgttttgtcaactagtaatcattcaatttcacctttgacatcttcattccattattccattcaaattaaggctttacaatacaattcaagattatttctgcaacatgatctttcttatatatgctaagcaaataagaaaaatgtacactttttttcttttagaaactttatttacaatacagcttaatgaaattacttgttctttttagcttatgtttggtacaaaagaaaaagaggaaggaaagaaagttaaaactttcattcatatgctgctaattagaatttttatcctcgaaactttgatatacactcagggtcgtccttgagttgaaatggcctataggtaaaaaaaaaaaaaacttttagacccttttttaatttaggcccttgagttgaaatgacaattttttaatttaggccctaaaatgagtggatcctaaccgcgggcctagcccgcctatgcccagggccggctctgcatacactaaatcatgcgccaaattttttaagttgttaaaaattctctctaactgttgagaatgttggatttaaaaactcttatcttattttgctattggatgcctaaagtggataaaagtttaatgagtacgatgtggtatatgtcaaagttcagtggtacaaaatgacacatatcaaagtttgtgagcgcaatttaatacatggacaacgtcaacgttaataaaattgaacataatttgatagaaatccttaaattcaaaaatctcaaaagttgaaggtaaatttttaacgagctaaaaaatttatggcgtacaattcatgtcaaagtttaaaaaataaaaacctaattagccttaatatattacatacataaccattagccttaatattgcctcagcttgttagaagttaattcaaaccccaaacttctttcacttgccaaaattcattgattttgtaaaaaagaaagaacccaaattacaaaaatagtattaataagctcataagcaattttgtagtacactcttaaacaggccatttagaacattccttatatccctaacttcttatgccagaaattgaaaaatgaacaaaatacaatccaagaaaagttacagttgcaatagttggttatagtgcaaaaagaactttaccaaacaaataaagtatcaaaaatattttttaccaggaatgtaataatatcaattcaagctcatttattctccagtcctagtaaacataaatcaaaagacacttgagaatgaaaaataataaaccctaattatggaacattataagactctaattaatatccagatatttcttttatggaaaaagctaatcaactgaacaaaatacatcatgatacagtcaaagagagcaataaaaattgaaactaaggttggttatcataacaacataaaataatctcaaaggctgtcaatttctgtataaaggaaattcatttccacaaacaccagaaaagcaccaaagatgtgtgtaaaacccagaccgaccgaccgaccaagcgagagagaaagtgatttaaccaagtgctagcgtcgaaagtcagttcgacaactattaccatataaaatcaggtaataatattggaaaaaaccctgacaccaaaggatggataaatatttacatagcaatttttttcatttttttttatttctacaaagagtgagagtaatttccactaactaagaaatgagcagtagtctgggcattgctacttccctattattatcataggacacgcagttgggcaaggaatgcagcacaaagatctaagaagagaaactgtggtccctgaacccgctgcaaatcgagaagatacttctcctcccgagttttgtagagctgttaataccccacccaaaaaagcagtgacagtgttagctcatttcgaaataactttttagaatagctaaataaactgtagcagaaacaactttacctgcacttcaaacttgaccacattgggtgtcttcattacaccatcagtttcgataatagtggattcatcaccaaagtaattattattaagcacagcattgttgctcatgccctcgtggtgtccagaaattccaggaatccacctacatttcatgttatagtgcccaatctttttccagcacactcgcagttcttgcagggcttttaggacttctgtcattatttcacgaggatgggctcgagactgcagaaatgaaggccaaaaaacatgagcaatatttcgtaccttaatggattcaacactaagtaatttatggataaaagcaataaagaaccaatcctgtataaggtaccgacttggagcatagcgaagcatataggcatctaaaaataaggaaaacctaagattacagaagttgacctgaagtccaagagcccattttctttcaacggggaactgtggtctcagacctgccccctgataatccatatatcctgtaagccgatgcccaacaggagaagaagcaggctcgccctgatgcattcggtaaccactatcctgttcaaataaaaagaacactacttaatatcactcccaactatgaacatatggacttgatacaatacttatggtcaataccaaacatttaaaataataataaaaaa

SEQ ID NO: 262431 - DNA, 1366 bp, Cannabis indica
tttacggtttgggttgcttcggtagtttctctagtggtatgtatgtagattttagttgcgatttatgttgttccgttagttgctatagatttctatgttgaattacgtaaaatatgaaaaaaaacttttttgaagtgtaaaaatgaaaaacccttattattattattattattattaatttttgattgtatataattatagggagcttctgaggcatcactttattgtacaggtattttcttttataatttaaaaattatattttatttttctttatttgatgttatatattgtagttgtaatggatgttttgtctgtttttaaaaaaaatttaaatactttacgatatcaaaagtaaagtttaaaatagtctgttacacacgtttaaaataaaacagacatgcgtgcagcaaaattcatatacaactaaatgtttaaattctattttcagcactctaaattatttcaaattttttaaaaatatatatgcctacaatatcacatacaaaaattaatttatattttctctatatatagaaatagataatgtccctacaataaaaataaaaatggcactttcacaaaagaatttcttaaaattttaatcacaacaaaaaattgttgccaaaaattccttctgccaaagtgagtattagagttagtctcgcattgctaatgtgttgaaataaattgtgatatataagatgaatgagctactcttcccattaccaattggttttgagatggaacctcatccatcttatcccaaaaatcctaacatagtatcaaaaccacttgtgatccacaaatttgtacaattacaaatttcctaatattttttattgtcaattaattttgagatagatctctattcatcttattccaaaaattttatgagggttagggtagaagacattgcaagttggaggtgaaaaacgatcgtctatgatgagtaaagatatcatggtcatatgatctcatcactcatgttcatccatgtgctcactcttctctcaatctccaattccttatttgcaacttttttttttatatatataattctcgttgtgcccccacaatctatgccaacgttgggtgaacctcttgggtaaaatggtcaatttgaagttactcttattgcatgttgcaaggggattagttgtggttagtttaattacatgcgggaagagaggtgggtgagagtttagttacaagtattatacaatgctgtaaaaagagagagcattgtgtagtggtttggatggaatttgtcaaaaagtacgatgcatattgcatcacttgtctcagcatcgatcatgcgccttatgaaacccttcaatcggatatatatatttatagggatatg

SEQ ID NO: 262432 - DNA, 611 bp, Cannabis indica
tctgttacagttttagaagttccataggtaccttgccgttttctgccacgttgagtgacagatggtaagacacgtcatttaaaataatgacacatcatcaatattaaatttccacatcaattaaatccaaaataactaaaaaaaaaagttaacaaatactgcaaccagtagataaatttaggtatttacgccgcaaattactcttcattttattaatgtacattggtattatttcgtttttgtaaattttttttgggattttttttattttattaatattatattgtgtgttataggtagccggatttttgtcgtaatttgtcgccagattgtgtttataagaagaatattttttaacttgatatataatatatatgtatatattttatgttttattattgaatatgtgtttatatatattgtgtgtatatactatttgtgtattttgtgtattttgtgtaattgtattgtatatatatttgttgtgaatgagaaggaggtagtaagaatttaattagtttagaaataatgtttttaaaattatgttagtgtgatatataattgattatatatgtatatgttattttttaaaaaaattaactatagaattt

SEQ ID NO: 262433 - DNA, 544 bp, Cannabis indica
tgtctatgactcatttcaactcacgacaggtcctaaatataaagttgactaagtatttttaggtagaccaaaaatttaaaattgagcaatttttgataaaaaaataaaataaaataaaactgtgtgcccaattttttttttggaaatttatattagacacccattatattatttagtttacaattttaacgttattttttgaccgtttgtgttaatttgtcaaagatttataagtttttttattggaataacatcctccaattttatacttttatctcttttcttttttaatcttctcttaaagtttaaaaataaattttggtcatatcgttactcaattgagcataaaaaaatattattgagatctactttttaatgtgaatatttcaaaatgtggaaaacatatatatatatatgggtatgctcttaatgggtattacccatgtatgggtattttattcttgaccattggatcaaatatctaatggttgatatttataatcattaattaaatattaaaaaattaatatttcctattttgtta

SEQ ID NO: 262434 - DNA, 2616 bp, Cannabis indica
tgacttgggtataggggcgaaagactaatcgaactaaatgtgacttttagtcacaacaaaatgttacttgtgactaaagcatagtattgagatacaagttgtcactaatttagttttagtcacaacaagtattgttactaaaactacaattagtcacaacaaattgtaatttttgtgactaatacttttagctacggaccttttagtcaaaacatgataggaatgatgatttataattagtcacaacctttttacttttagtcacaagttttgttataactaaaagtaagattttttgtagtgtgatctatacgttagacacatgttagtaaaattagatgaaagttcttaaatttaacaatttcaatagtttggaaaaaaaaaatttccagcctcaaagttcaaaggtacgattagtacatgttaaaatttgtgggacaaaaattctaactaggcaaaagattacaaccaactgatttttatgatgatgtttcttttttatcactgatctatgctttgtcactattgcaagaaaagaatatttatttttcctacacatttctatgtccttatgcaaagaatttttctttctttttactgacttatatgcaaagaattatatcaataggcaaaggaaggaattgtctattaactgtcctaagataaaaatataaaataaaaatatgctctaactttaattttctgttttaaacacaatactctactttaacttcttcttcatttttcttctcataaaaaaacttcttctttatttttcttttccttttttctgtaaaataataagttagacaaataaataataacggctaatgctactatacaataaataaccacatttacttttttttttttgaattccttacaagttgtaaaattgaataattattatttgttgtgataatgtgaataaataaaaaagaagttcaaatatattgtatatatttttggtttgggaagacaagaggttttgtttttttttttaagaataaaaaaacctaatagggataacttcattttaatattattagtgtttttttttttatttaaaaacctatattgcaagaaaaaaatatttttttatatgttatttatgaaatatttactttcttagttttttttttttcttcaaataactattaacatgtaatgtatgaaaagaaataaacaaatatctcttatataatctttaaaaaaagttttctttattaatactaaaaaaatgaaactaatttttaatttgattgaaactaattaatattaatacatatctatcattcattttaagttatactaaagtcacaaaaaaattattatagaagacaaatttcttagaaatcataaattattgtagcaaggaaagaatttatttactttattctatttgtctcacctataaaagataatacaaatacaagaaaaattaaaagcaaaattagtgtactctcttctctatacaaattaaaattaagctctttggagtgatttatttatttttttgatttcaagttgggtgctaaagttctgaatatagtaagcttttagttttttattcagttcctcgcatgtaatttatataaaattattacttgcttctaatttatatatatatattatagttgagttattaatgtattttttttattattgtttcaattaaatagatcaaaaatggagactcaacgcttctgtcccagtaatcatattatgctcctaaaagatgataagaagagcagtaataatgtttgtgaaatatgtgtggtgtcttttagtgaagctgatgatccttattattatgtttgtgattcgtgtgactattacgtccacaaatcatgtgaaaagctaccaaagcaaatcaattaccattttcatcctcagcaccccctctttcttaaaccacgtttcaaatcattctgccattcatgtggccagttgcccaaaaagtatctcatgtttagttgtgatgaatgtgatttttatatggatgttgagtgcacccaaatctcaacaaattccatatcaacatgtcctaatgaaggccaacattgcattcaacattctacccatcctcacttgctactgctttttgacacatcaacaaatgatatgaatgttagttgctttgcatgtcaatcatcagatgatattggagtttattatgggtgcattgtgtgtaagtatttccttcataaacagtgcattgaccaattacctcaacaaatccaattctcccaccatccaaataatcacactcatctctccctacatatgaaatggcacaatagtaaatgcaatgtttgtggatactccaaaccagccttatattatgattgtcctcacaattgtaattttcaattgtgttctaaatgtggtttgagaagacaaagaaccattagttatgaatatcatccacacattctttgctttctagataaaatacacactacatatgatcaatgcaatgtctatgacaattgtttgaagcaattagtcacgaagtctgattccaatgaattccataaaactgattcctcaatatttggttgtttggactgtgattttaaactccatttactatgtggtccattgccttcagtc

SEQ ID NO: 262435 - DNA, 592 bp, Cannabis indica
cacatggtggaacaaaccctggatcatttgtcgatctgaaaacggcagaagacaacagcttgctctttgttttcatggcgttggatgcatccataaaagggtggggagcatgcagaccgatagttgttgtggacggaacgttcctcaaagcagcttatgggggaactttgttgtgcgcatgcacacaagatgcagcaggtcatatttttccactagcgtttgtgttgcagattctgagaatgaccaatcttggaaatggttcttcaaaaaatttaaagaagcgtatggggtcaacaccaatgcctaatttcagacaggaatgaaagcctcatcaaagcagcaagagaaatctatccagaaattgcacacagttactgcggttaccacattttgagcaaccttaaaacaagcttcaaacaacatgctgccaaatacaatctgccattctttggagcagtcaaagcctacacagaaaagcaattcgagttccacatggctgaattggatgtgttgaccgaggttttcggcaactaataaaatatgaatataataatgagctgtaagaaagcgagatgaagactttttacgtggt

SEQ ID NO: 262436 - DNA, 518 bp, Cannabis indica
aatcccttagcattatttatttatgccataaaaatataaactcttataatttttccctataaagtgtaacttctactatttataaatctaatatccaaactcatatttgatgtttttattttctaacccaattgattttatctttttctttagtttattttacatttgcatttgcattttaagattcttatttctctctgttttccttcaattctaatatttttagtgggttttgtatttgattggggtattatttgattagtagagtataatattaacctacctctatttttgttgttttttttaaatacaatttctctccctcctatgtttttattctattttttttttgttattcttttatggtttgtaatgcgtttttatctctctttaatttctttgttttgttttctctctggttttagtttctggttctctttgttattttcgctccatattgtatgttcgagaatgaagttaaccaaaatagagaatgaagttagaagtttgattattag

SEQ ID NO: 262437 - DNA, 589 bp, Cannabis indica
gaaagctcggttcacggttcagtaagcccgtacttgtttagtattttttaaatgattattaaagcatgctaggaagcatattagaatataattatttattttaagtgtcttgcctttaagtccataagagcagtattaagtttttgatcgccgtctaacctgcctggcttatgggttcgcaggctaattcctataaaatggacgcctcgcgaaatacaagaagtcagggtaacagggttgagaccggaggtggtcagggaaattagaatccctagaatccctgtggtcacggccgtggccgtggcagagctcagggtggttgccctataaatccatcacaagctcccccggattgggagcagaggtttgcggaaatgcaagatcgaatccgctagcaggatgaagaaattcagaggttgaggaagcagggtcctcctaccgtgcctcctcaacaagttgctcaggccgttgcagttccagcggtgctagcagaacaacctgttgctggcaaacgtatgggaccgttgtacgaaaggttccgtaagcaagcacctccagtgtttctggtcttgggttttatgccctaaat

SEQ ID NO: 262438 - DNA, 1263 bp, Cannabis indica
tcacagttctgcttccatgtgtaggtaaaggaaaggcgaaggctgaacacgagtgaacccgagctcggatgggatttacatgtcaaagcagcgcgacctggagtgttcggtcttgggacatctagggattttattttggtagtcgttgtgcgacctgtaatatgtgtattttggaatattaacttttaaaagtttgaaaacgggatcccggcacttgtaaatattttattatattataaagtttattaattaatataaaaattttaatttaacatgtttttcaagaaaattctttgattagcaaagattgcactataatttaaaaagcactgtagcgtgccttagtattagggcgttacatatcttgaaagagggattcctattcagtcgagaaatctagttcggcaactggggaaatcttcttcgatgtagatttggttcttgccttggaggatctggaaagccatcgttgaagtaaaaaaaattgagatagcaaaagatgtttggaacaaaaaaggagcaaaaagcaaaggaaaaaaaaatcaaatttgtgatttgggagaaaacatggaacttattagaaattcctttatcattccttataaaaacacatctatattttggaattagaaaaggcgacgatagtttccaaaaaaatagaaatagttactcattaaatcaactagcatatattaatgacacatgaaaatatttatagtaaccagttccatggcatgaaagcttaaactaaaatgttaagagttcaaataccatagaactgaggggcaattgtaagagataaaaataattttgagggtaaataactaattttaaaaaatatataagaagaaagagatgatcttatagtatcgacggcttacagaatcgtttcacttaaaagaagcagagcaaaatcaaagattgaagtgcagagctcaatgaaagaagaaatacggagcgaagctcgaaaaagaagagaatgaaggatgaacaacagaagagaattagcgcacatgggaaatcaaaaaataaaagaagaaacaatcaagcattccttcccgcctacaaatagaagattccatcctttaaaaatgggagacaaattcttgaccacgcctgatgcaaatttctacttggattcaaagaacaaataacacatagttgatccattgaattgagaagaaagctgtgtaaaacgattaatcatataactcgactagattgaaaaaaaaataggaatggaatgaaataaaatttgaaatg

SEQ ID NO: 262439 - DNA, 242 bp, Cannabis indica
aactctcagtatatagaacgctctatatgttccaccatatagatacgtcattagttatctttcagctaagtgaaatgagtgctcatcatttatttttatttggtcaagctcgaaggaaaccatcctttactatttatttttcatatagaagttatagattccattacggtaaatttaatatatctaatcaaagttcaattccggccccttccgatgtatactccatacatccaatactggta

SEQ ID NO: 262440 - DNA, 520 bp, Cannabis indica
caaccctaacacctcaaattaaccccaaactctcccaaaatctccagagtacctgtatataccttaataaaccaaaatcaatcaataaacctcatcattaaacacagaaactcaatccaccattagagggaaagatttgagttcttaaactcaaaccttgctcaaacataactataaccaacaaaaccaactcaatacaacataaacaacctcaattaaacttcagtacacaaaattaaacactacttgacaacacaaccaactagtactcaaattcaaccattaaaactcatcttaagctaaaggaaatcaaagaaagaaaggctaaaagggatttaccttgcactataacactaaaaacctacaataatctctcaattgaagctgagaaaatccaaccctagctgattccttagggaattcgagagagagaaagaaagagaaagtgggtgtagtaacatcaatgtgtttctagctttttccctaagttataaaacaatacacacttaattaatttaca

SEQ ID NO: 262441 - DNA, 653 bp, Cannabis indica
acaaagtgtcatgataattttttttaccttagagaaggagaataagatattgatcattttctggatcctttcacttatagtgaagcacgtaatagtccacaatcttcaaaatggttagcagctatggatgatgagattgactccatgaagaaaagtggtgtatgggagctagttttattacctaatggttttaaatgaataggttgtaagtggatattaaaaactaaaagggataaaaagggacatattgaaaggtttaaagcacgtttagtggcaaaaagctttactcaaagagaaggtattaattacactgaaacttttttgcttgtttctactaaagattcattcagaataattatgaccttagttgtgcattttgatttagagttgtatcaaatagatgtcaaaactacttttctgaatggtgaattgaatgaggaagtctatatgtctcaacttgaaggctacaaggagaataaaaaaaattagtttgcaagttaaaacgatccatttatggtcttaaacaggcatctcgccagtggtacttaaagtttgataaggttgtgacatcatttggtttcttcgagaataagtttgaccagtgtatttatatgaaaattagtgggagtcgttatatttttcttgttctttat

SEQ ID NO: 262442 - DNA, 5470 bp, Cannabis indica
taaaagttcaaggagcataattttgtacgtgaaagtaaaaatcttaattagcctttttaatttttatatattatgatggcagtaatatttttatttatttatttattttttaaaattaaaataataatttggaccaataatatttcgacacgtggcaattttaaaaaagtaaacagttaaaattatgactaacggataaataaaaaacatgactttgaggactattaccgctatttttcgaagtccgctatttttcgaagttgaagacttatctgtatcaaattaaattttttaaaaacttttgccgcaaatttcccgtaaaataaaaatcttctttacaagctgcgggtaggaatggcaagtttaaagctgcatatatgtcaacgtggagcttatgtttagttggctgagttttttagcttggtctctaaactattttagtggtaaaagtggataagtgaaactcattcatgtcaaaggactacaattgtaaatgctttacagtttgattgtattttgttggttgattaatgaaaatctcttttcttgattaaaaaaaaagttttggtaatatattttaattaagattagagtagagatgcttaaatggtcaaagtagtaattaccattatataatttagtgaaaaaaaattcaagatttttataagcaaagttcacaatagaaagattttagatgatgaccctttttgctatttttttatcttttggggtcactaactatgaagtgtgaataaatgtttataaatcaaagtaaatgttccaaattgataataaaaagttgcaaagataatccaaaaccaaaaaacaataagaattaaatacaaagcaaaactagctaagaatagatcatataaaagaagttatatttgaatttgatgatgtgatttggtttgtgaaattttctttatttgacaataatagcagaataatcaatcaatgtatgtatgtatctatatgtatgtatgttatgtaatatcctaagcctgtagtgtagtgtagtccatttctggtgcaacatgtttaaagctcaacctggtcctgagggagttgaaactcaaactcatgtcattatctgtcgtcatcaaactcttccacatttgtcatcaaagttggcttgctcagtttctgattttatacattaaaaatagcagtcagaaaatacataagtaaataaaatcatgtcaatttaatcacatttgtgagaatgaaataatgagtacttcagaatctgtctttaaaatcaaataagtattaccaagacaatccagttttgataattgaataaatgctatatgtgcgattgaaatctatgaaaaggaaacttgtgtatgtatgcgtgttttgtcccatattgatcatgtgtaagtgattcgtgagatttatatgacactcgtagctaccaaatcataacccatgatagaatttcgataattagatgaaaaagtagccaatgcaaaaatatagagcttgttatatgtgtctcatcttctataaagaacattatataaaggtatgtttcttcctaatcttttgaatgtaagttaccaaaatgtgaaatagcatggtttcggttatcacggttcattcattcttgacgctaccgacatgtatggtgagaaaggacacaatcaaaacgagactttttctgtcgttttacaaactcagctatttcgttaaaatcttttatcatcaatatcagatcagtgtgataatgaaaaattaagtttcaaaatactcgaaacactcatcattttcttcccgaactaaaaacttgagttgtttaggcaaattccaaagtacttgtctaacttgaggttggttagtacctatcagaagtaatataaagatagtttagtgaagctaagaacaatctttacctcatttaataaggagtcgctttcttgttcgagttcacgtatgtgttgcattgtcatgccataacattcatcaatccaggcaaaactattccggttactctctagaaaaagagctctttcaccctgaaaatggtatcaatgaacaccattagatcttaagacatttccactacaaggttttcaaatgacattctctataactatatgttttacatctaaacaacaaagaaacaaattcgtaatatatagttcgataactaaaacacaacacaaaaatctgagtgacatttcgataagataataagtaaataatgttgaaatgtaagaaataaattactgctagaagagcttgctcgagtcgatagccaaaaccccaatatgggacatctacggtgaccaacttgtatgccgtcataactggattgcatttattctgaagaaaagagtaaactacaagattagtaaatacacatacaatctatgatcaaaaccatatggcaatcgaaaaccaaaagaaaaataatgatgcaaggcaatgaaggcatgtagatacataaatggatgcaaaagctatgatcaaactagtgttggggaagattcaaacctgccatccctctaaaagtggaccacggcctgttctcgctgacttaaatttagaaagatccacgccactacctcctccgaccatgtaactccagtaatctgttgacaaggtagctatatcaatatgttcaacctgcctggctgctagctgttctttgcttagaccatgaacctaaattgacatgcccataattaatagctagcacagaaacaacacatgtactaaatcacgtcccctgaactttcccggccgttaaaactctaccccctcccctctcaaactattgaaattgttggattcaaggacttccattcattgccgttcaattttactaatggacgcctaacgtgacgattgtctatgcaccaaatcgggtcccccaaacttcctaatgtcaggtgtctgtaagtgaaattgaacagacatccttgaatccaataattttaatagttaaggaaaaagttttaagggtctaaaaagtttgggaagcacgatttggtacatgtcaaagtttgggaggacaaatcttaattagcctgcaatttaatagtctaaaataatttgaacactaatcgatggacctgttccgatgaaaacactgaaacagaagcaaacttacattttctgagagcccattgtcagccttatgaacagtttcaatagtgagccgaaactttgtaaagtatggacactgtggaaatgcaaagaaagtgagtatgctcccactgtaagcaaaaaggaaaacaaaaatccatagaagagaaaattagggatggattgaaaaaaagtcacctggattactggatgacaatgtgcccatagcagataaaaaaaacaaaaaagtatgttaatatcagttcgaaatcgaaaaatatatgcaagagaagtgaatcactgtaagattttccaacctgttttgcatcttgggtatgcattccaagcctcctctttcatgataagagcatcagctggtgcgaaagtagtaagccaagtcggaaccttactggaaagagagtacaaacataagagacttaaattactaacatgaacaaaagggcagataatctatggagatacagtgtcaacagtggaatcaatatggactaactttatcatgtagtactgtgctgatgatgtaatgagctaaaattaattgcaagcttagaaagacaaagaaaagagagagtaaaccaaaaaaaaatcacttttatagcaagcaaagcatcttggtcatataaaaaaatcaccacatagcaaaagctcataaagcaccagaatcaaccataaattttcctaactcaagaatggattatattgagtacgtggtacatgaatttcaaatggcaattagccaatatcaaatctttcaacatgtaatgtgtaatgcccttaaacttacctttgtaaatggtatactttagaagtatactgacccttcccaaatacatcatcctcaaatgacttgttctctaaaacttccactccttctctaccacttgtgttctgttgttgcatcttcatcaccatgtacatctgggcaatctgatactgcattttcaacaagtacttagaattattggatatgcatttctgaatttagaactacactgtgcttaaaattgttataagatgtaaaggcataaactttttaacttgatttacctcttctactgacaaaggcatcacaatccgacttcaagaattcccccccattaagtttaaggaaaaatcaatataagatcagtgtgatgatgagaaattaagtttcaattattggaatcacctaatttgatatttgaagagctaatttctatagtttatccaaaagaatataacaaagcttgcactaaattttattatttttcttcaaaatgggaaacaagaagaaaatatatagatgatcacagccttctaagctaagaatttcaattcagaagaaaaaaatttaaacaccaaatttacaacattcctgccaaatttgtatttataaacaccaaaaataaaaaacccagatagcaaaatcaaaactttcataagaaggataacaattgagtatatttatatacatatatatatatatatatacatataaggatttcaggaaaaaataaataaaagtgagaaatgaaaggatacaactccttaacttgaaccatgttttctattccaactatcttcaatgctaatatagctttgaacactgaaaaatgaaaaagagaaactcaaacaaacccagttggtgtgagaatcaatggcttcttgggctgctggtgatttttttgatgatatttttgttctcactttgatgagatgattattagtgtaaatgacgtccacgttgatatttgcccattttgttacatgtgatcttcttctttctttctcttccatttgatgttttgactttgacttttcatggttcttaacggattgtattatacggttgagtttgactgctccttcggacgacgtcgtttgaaacagtacataacagaaagagatagcttaaaacgcgttattggagaatgttctttgtaacggtgacggtaacggtaacgccgtaatggtgatggtgtgagtgtttgttttgtagttttgcaactgtggatagtatactccgtccctaatgatggacggtgctgattggctgacattttgtccataaggtgggtgggtgggcattgcattgaatgttcctgagatttttttttttgaaaattgagatttttttatttaaatgataaagatattattattaggctaattaggatttttgccccttgaactttacatgtaccaaatcatgctccctgaacttttaaggtcattaaaaatgcccccaaactattgagattgttgaatttaaggacttttttctaattttagtaaaaaagtctaacatagatgaaagttcagggggcataatttagtgcatgtcaaagttcgaagggcatgatttagtagatat

SEQ ID NO: 262443 - DNA, 1958 bp, Cannabis indica
ggtttttctccatctcttaatttatcatccacgacaatgaaccagtatccataatcatcatgcccgagatgaccctctcttgcacaattttctgttggtgaccaaccattgaagtcgccaatcagcgcacagtaacgagctcctgcgttaaacattctctatttacacatgtgatctgttgagtaggcatttcacatataaaggtgtattctacgaaagcaaaagaaaatgacaaatgaccatttgaaacatgctctgaacaagtccttataatggtcctgaaagttgttgatacttaatgtgaaaaatgtaccacaatttcaagaaatttcgaattagttaagaaacttttcagcataattcgatgtgaggatactaacatacttataagatcatggttactctactcattgccaattaagtttgagtttatgattctatacaaagtaaccttattactctatcctctattcaaacttctgttcctcagttttctcaaccgatctcatagtattaaaagtgtgaaaattcaagttcccaacttaattacattgtactccaacaagctcaattatctcaaaatcatattttaccagcaaaagagtaaaacaaggagtaatgtcaaacctggagcccaatccatataatcaactcgacgctccgggtggcgatgaatacccaatatttcaaacctgaagaagataagaactcagaaaaattcatttaaagaagaggataaactacagcaaacatctctaactataaaatctcagaaactattcaacaccatgaactaataccaactgaattgcatttacaagaattagcatttctaagtaagtactactaacccagaaaacatatctctgaaattaacatgacgtttcaagatttcatctttaagatctttcaaagctttatgtctgcataaaaagaaaaaaaacaagacatataagcaaacacttgaaagacaaaaacaaaaactaacccagtaagtaaagcaccaacctttctcgaaggaattgagaaaactgtttatgggaaatactgtgtttagtgagaaacccaactgggtcaattcctttatcagcatcagaatcagttttcttcttcttcttcctcgttgtacgttgttgtggtctctcttcttgttgctctgaggttgagcaacacacaagcttcatttttcgggggaaaacgattctactgggtcctccatttgagcatggaaagatgaaaggagtggtttttggatagagagaaagtttaggagtgaatgaaagagaagccattgatcaattcaagactcaaaatttttaaggagaagaagaacaatggcaatggtagttaactgaatcattaacacttgtactatatgtacgtatggagattgtgagtgttgagtttgagaagaaggctttgcagggtttaaggattttgtctttgtttttgtttgaagataaggtggagaggtttttgagttgactcgggctaaaacagagccaactcggtgtgactctccaaaatgtataatactatgcagatgtttaaaatgtattttatctaaatacaaatttataacactaaattatttttaagaaataggattttcatctcccaattatgattctagtaaagttttgctctcaattttttttttttttctaaacagttcccacgaattatagaaataatgacaattttgttcttttatttctattttgttcatttttgtaaacagtgtcttaatgaaatattgatcttcactaattagatatatgttttaaataaatcagccaatctatcaaaccaaatcaagaagtaatctcattgatcaccaatctagagggaaatttgattaattatgaatgtattggtcaaaattatatttctaaacctaagttattcaatattggtagaatatgttaaaaaaatttaaaatctcattctacccctcc

SEQ ID NO: 262444 - DNA, 3294 bp, Cannabis indica
taatataaattatgtgctagacttaagtgggtgataaaggtatattggacaactcactcataaaaatagataatatttaatgaaatttaatatgagagtattttttattaatagatataaaatatatatatatatatattccttaatttattctgattcaatatatgttggccattaatggttggagaattggatcaaggtcatatccttaatagttagttggtcctgtgactcatgtccaacaatcatggagacttgcgaatccaacttctttctgagtcaatcaaaggtttagatcaacccactacacctttttgacaagcaatgatagcagcaataatttatgatatttcaaccaactaaggataaatcgataaattattaagctattattgcatgtcctgattcactaattattaatactttacaacagatagttagagatggcagtggcatgtacctatctcagtctaaatgtatatatgatctcttggttaagttgcatcttgatggagctaaaccaagtctaaatgtatatatgatctcttggttaagttgcatcttgatggagctaaaccaagtccatcacccactagtgcttctcataaaatgtcattaaattgtggagaaccatttaaggatcatagtctttaccaagcacatttggggcgcttcaatacttgacattaacaaggccagatgtagcctttatcatcaatagattaagtcaatttattcacgttcctacaacaattcattgggaaccttgcaagagactttttcggtatctaaaaggaactgtaaatgaggggcttcatatcagaccagcagccagactatatatgtttacaagcttattctaatgcggaatgggctagctgccctgatgagaggcgttctacgggaggctatgcaatttactttggaggcaatttgatctcgtggtccaccaaaaagtaacaagttgttgcccgctcaagcactgaaagtgaattcagagtgcttgccaacactgcctctgagatcaaatggttgtgctttgtactgaaataacttaatatttacttaccctcttcaccaataatttgggtagataaccaagatgctgcctcccttgctgcaaacccaatttttcacgcccgctctaaacatattgagatagacctccatttcattcgggaccagattttggcaaagcaacttgaagtgcgctatgttccttcaattgatcaagttgctgacatcttgaccaagccattgtcgactgacaggttcaattatctcaagaacaagcttcaagtgtgtgtaccaccctttcgcttgaggggggatgatagtgtaactaattctgctacttagcctgtgtagtgagttgtagttttcagttgtaataacggttcttgttttttttttatttttctattatttcaattgtattctctattacttcttcggggtttttttccctataaataaaggctcatatcaaagactctgtagcttttacaagtctgtttttcactctcatagattgattactggtaggactttgtatagatgagctcattcactgtaccaattgaattttatcataataatgatgatgatgataacaatgatgaaacctcaaacgtccaaatgtacagtacaatagactcgggcttaatccagtttagccgaacagttccaagaatgtattcgggcaactcttcctcttcttttgcctgcaccacatcatgaaatatcatcttgctatttaaaactaccaacttaaatgtattatagacaaactgatgcttatggttaaccaaccaaatgtttagagatgctccttcctaagcaaatagttgcaaaagatgcatacatacagtaatctttttttccttttttttacctaagctaacaattataagtaactcgaacatcagatctagtaggagcaccatttgaattatccctattgaaagaataaaaaagagaaacatatctcagaactccactgccttgacttgtcaccaagcttcctctctataacatatttctatcctaattgtccactacagagtactatgatagttaaaatagtagatggtggactgaaatggaataattaatagaagaccacaagaaatacagaagtgcaagttgagaaacggaaaacattagtattaaggcaaaacctctatcaaaattgtcaggtcaaccacaccaagcttgtgacatatccaaagacaaggccaatgacatatcccaaggaggcatgaaagtcattttacttcagcagcaacagggccaaagtaaatgtttctataaacttaacacttctctagtttatgtaaaaataatcaagaaataaataacacttcacataatatacctccataaaattctcttgtttaaaatatttgcaagtgactgctttccctagtaagtaagcttttgcttcctacagcacgctagcttgaccatccaatatcccttactgttaggagtattagttagttatatctgttactaagaattagttaattctgttagtggttaaatgtttgctctaactaattttgtaatctctaactaactctcctttgtataatcattggctatatagtgccaatactcattcattgaatgataagattgctctttgattcaatctctctctttctctgtctttctcttcgtgctctgtttctcttttcttttggttctttcatggtgaagagatttaacatggtatcagagctctttcctccattgtcagctaacatggcaaacgttggagccaacacaaatgtcacacataacaattcaaacaccaacatacctatcaatcaactaaatggagcttcaaatcctaatctatcaagaaacaactcagatgagttcaatccagtttatttcaatcataacatatctattaggctaaatgatcacaattttcttttgtggaaacaacaggtctttgctgcaattcgaggaaacaggttgcaagggttcatccaagatcgagctcctccacctcaattcttgaatgatgttgatcaagcatcgaacaccttcaacccagattttctcgattgggaggttcaagataaactcttagtctcctggttactatcttcgatgacagaaagcattctcacacgcatggttgaatacaatacaataagaaaaatgtggaatgccattgaaatgcactttactcttcaagtttcctccaagatctaaagtttcgaaccaaattgcaaaaaattcgaaaaggctccatgtcactgaatgaatacctattga

SEQ ID NO: 262445 - DNA, 6285 bp, Cannabis indica
tttattatttttttttttaagaataacgtaataagtcacattagttttaaatcaaattaaattttttattttaatagttaatattaggtggcaattttataatatgatgtggcattattttaaatgatgtggcatgccacctgttgtccagtgtgcaagataacagcaaggtacctacagaatgtctgaaagtgtaacggaaggtatttatgccgccaaaattttaacttaggtattaaattgcaaccgaatgataaacttaggtatttatgccgcaaattactcttaatcaaaaatgagagaaagaaagacaaagttttatccacacatagaattatttcacaaatacacaaaaataataaaaaaaattacaaaaatacagttttacagaattttaaatatttttacgattttttgattttatttacagaaaatacgatctttttatgttgtactcttgttaatttgttattgattttttattatctgtatgttattttttattgttattttgatgttatttagatattattttttatgtaattttcttattattttagtgttgtttttatagaaaatagtaaaaatgtataaaaaattctttaaatataaaattatttttttttataaaaatgatgccttaattattcctataataataaaatgagagaggttgttaggctagattctatccaatgttagtactttggtaaattatgttttgatttatttattattttattgaaaaaatagagcccatgaaggcccatttagacccctaagaaaaggctcatttagaccaaaccggcccgtccatacttcatacaacagcaatattcactgtaatgtaaagtaactaataatattgtgtccttccttgtgctgtgtttgtcttcttcattttcgcttctatccttttatcttcttcttcgttaaaccctatataatccttttcccttagccccagctgggagggaccttcattcaattcaactccatccagattccaaccctctcaaacgacgtcgtcttcttcttcttccctcccttcttctcaggggagccatgaatatctcttccctcctcactcctccttccactcattcccctccttctcttctccgctctcccttccttaaccccatccctattcgaacaactacctcccgcgacactacccattcacgaagacgccgttttaaggtatccgttccccggagtgcggcaaccccttcttcctccgaccaatcaaccgtcgccacctcgccacctcccaatgttttcggaggctcaaaggagctaacagggattcaacccttggttgagaagttgtcgccgccggttagactagctacttcggcaattttagtagctggtgctgttgcggctgggtacgggttggggttccggttcggtcagtctcgaaatgcggctttgggcggggccgtggccctcggggctgcgggtggagctgctgcttatgctcttaacgcgtgtgttcctgaggttgctgccgttgaattgcacaattatgtggccgggagcgacgaccccaaagctgtgaaaaaggaggagattgaggcgattgccaagaagtaagttttcatatgcgttgcgttttttttttatttattttaattgtgactagttttttctaatttcagtgaagtcaataataatgatggaattgtttgttacgtgatagttctatgaatgttagtgttgtgtagaatttggataacgatcattgatggggttggttgagggctttatatgcttgagttggtcattgtttagactgttgatgtgggaaattcctatgattgtgacaagcacgcaatgttatgtattgttgtagtagctaactatgattcctgtgtttttatagtctcattttctgttcaattttttgttgtcagatacggtgtcagcaagcagaacgaagcttttaatgcagagctttctgacctatactgccagtgagttaaacacagtctctaacttgtgcattttgggtttgtcaaattgaaaaaaattctttcctaaattttctgttccgtttccagatttgtttcgtctgttcttccgaaaggaagccaagagcttagtggaaatgaagttgacacgatcataagtttcaagaatgccttgggcattgatgatcctgaggcagctgcaatgcatatggaggtactcactaattgctacgtgtgatgtagttggcttcattgactttaagtttgctcaaggccatgattgagtttgtgtgtgtttctttcaattgctttaaatttctcatccctgaaactgggttagtccttgttggtttccagattggtcgaagactttttaggcaaaggcttgagactggtgatcgggatggagacttagaagaacgtcgggtaggtctttcagctgtttcacttattgagttttatgggttattctatgggatattagataatactggatgaagatacagagcttgagcattattagtgattctccagtgcaggcatttcagaagctgatttatgtttcgactcttgtttttggagatgcatcatctttccttttaccttggaaacgagtatttaaagtcactgattcccaggtaccttcaattgcttttccctgacgtgttagtaaatgtaacatttttgtcaagttcttttgtccaagaaattggttttgttcatttggatttatcaaaaccttacatgtacacaatgtatgtattcttatatctttttggtagtatatattttcattttccatttgcccatgtaaactgtatttatatctttttctctcaggttgagattgctattcgtgataatgctcagcggctatatgccactaaactgaaatcaatcagcacaggtaatattgtaacgcattttgcacttcagctgtattaaaaaaaattacagtgatgattttttaattaattttttatattcaggaaatgttttgatacttcccttgttattattccttctggaaaattatactgactcgttgattcatgtcaaaactacatgacataattgtgtcaactgtctacatctacaaaaatgtttaaaaatcagtgggaacttggcattttggttatggtagtccttcactatatataatatttattttaatacaaagataggaaaacgtaaataaaatgatttgaatgttaaaaaaaagtatttgaatgttaaatttgtctaaatttagtcaaatttggctaatagaagatggctttgtatttatatatttctatgtatatatattggttttttacggatttttggtttaatgtcaattataattttaaatgagctatgattgtcagtgcattgtttctttatattttggatttatttggttgaagtaatgatttgatcaattgttttttacattcttagccttaagttattggagtgattggtagtgagctttatcagtatcttccaaaagtattttaaaacaaaaaataagtagtaatcccacagtttgttaaagacccgtgtgattagttggtttataccacacccacatgcttaaatttgaagttttcttttacttttccttaagttataatatttactatgattttctcagatatcagtgtagagcagctatttagcctcagggaagcacaactcttgtataagctttctgatgaggtaccttttcagtatacaattgatagtctttctgcagctggtcaataggtgtttattttgatgtttctgcttcatgcagcatgctggggacttgttcagggagcatacaacgaaactgattgagaaacacatctcttctgctcttactttactgaagtctagaacaagagccacgtatactctctacttcacacataattgcttttacattaatgtttgtgtcatcaaacatgatcaatgatttgctaaaagccttataatatgatatttcttagagtttttgtattttggcatgtatcatttgcattatcttataaattttggatttccagtcagggagttacacaggttgtggaggagcttgataaagtacttgctttcaataatttacttatttccttaaagagccatccagattcaactcgctttgctcctggggttggtccagtatttttattaggtaaggatccctacaaagttattgcatatacgaagacgtggtattcaaattaactacttgcatatttgtagtggtgtaatgtttaaagtgaagaatgcttatgtttttggtgaatttgtgctttgatggtatgtagatggcgagtacggtgataaaagatggatgagttaaagcttctttttagagcctatgcaacagatgcattatctggtggtcgcttggaagaacataaggtaccaaacagtgattttctttgaagcctagatatttatttaaatgaaatttacagtttttttttgggtatgatcaatgattatttatcttttaattcatttttattttccataatgcttggggtgtctatgaccttttttctgggatgacaggaataattactggattctcagttaacctttggtccttgcctgtgatttctaacacaggctgtgaatagtttagtaaaatctatagttagctgataatattatgcactagtaatttgttatttcttttccttaatgcaccttatggtcgtcaagaatatatatattagtttttgctgatttgcttatggtggattaagcaaatgcgggctaatttgcaagactagtttaatttatgtgaaaacttgtgttgagatgttagtacttgctattagttaaaaggtcaatagaagtgaggatttagttttcaacattgagaaattgctacatttatagggaagttcccacatataatatcatactgcgtctttatgtttgtcaactgctgcatttgaagagtcaaatattcccttttgttagacatgtttctctcttttttttttcttttctaaattaatttaatgctttattaccatgttcttgtttgctctaataattttattttggtttatgtagctgtcctctctgaatcaattaaggaatatatttggcttaggaaaacgagaagcagaagttgttgtgcttgatgttacttcaaaagcctatcgcaaacgtctttcacagtctgttactgggggtgaattagaagcagcagatagcaaagcagccttccttcaaaaactctgtgatgagctccactttgacccacaaaaggccagtgagattcatgaaggtaattttgctaattgtttctcatatagattatcggtaaacattaaagttcaaatattctatctgtgttgcttaataccaaaattaggtatatttcactttatgcttttccattattagcgtctgactttcttttttcctttaaagaaatttatcggcaaaagcttcagcaatgtgtggctgatggagagctaagcgaggcagatgttgctgccttgctgaggcttcgtgtcatgctttgtgtacctcagcagacagttgaagcagcccactcagatatttgtggcactttgtttgagaaggtaacaataaaattaacttctctatctgttttttgctttcatgaactggtttacatggaatgccttattcttaacaatttttttcatattatgttgcttctggaagctttctttttttttattatatgacagttttatttgtggtcagcttggggaaaacttaagggagcaaaaattatatttgtatcatatttgtattcatattactgacttaatagttcagttctgaaactagcgccgtctaatatttatatgaaaaacaattccaggttgtgaaggaagcaattgcagctggagtggacggttatgatgcagatttaaagcaagctgttagaaaggcagcacatggtttgagattgagtagagagtctgccatgtcaattgccagtaaggcggtaagtactgctatcatttctctttaaatacatccaatgtgtcttctctctttttctaatcacctttacgatttatgtaggttcgaaagatttttatcaactatgtaaaacgagctcgggctgctggaaatcgtactgaatcagcaaaagaacttaaaaagctcattgcctttaacacgttggttgtgacagagttggtaaaagacatcaaaggggaatcgtctgatactgatattccctcggaagagcctacaacaaaggaagaggagaaatacgtcgaagaagatgaggaatgggagtctctccaaactctccggaaaataaagcctaaca

SEQ ID NO: 262446 - DNA, 123 bp, Cannabis indica
gtccgtacagcttgcaatttttttgtttttcttcgtttttttatttatcctttttaatttttattgaatatttaatttataaaataacaataatttttaaaagtagttagcaaattttgaaat

SEQ ID NO: 262447 - DNA, 541 bp, Cannabis indica
gttagggtttatgtactttgataaacgttaggagtgtgttgctacgtttttttaggagtatttcaacttaaataaaataaaataaataaaataaaaaaataatagaagtagtattttttagttttaaaaaataaaatatattttatgtattatttttaatttttaaaaataaagtgtgttttgtaattatttttatttttaattaaaaatatatataaattttgatttttttttaaataaaaaaatatgaatattatttatttttattttcaaataaatgtataaaaattataaaaaaaatcaaataaaaatacttattaacatcttaaaaaaatttaagtaatttgaaattacaaaactcattatctataacacaaaactgacaaaatcataataaaataagaactaataattatccaatcttaaagaaaaatatttaaaaagttctaattgtcaataaatttcactcattaacttcatcgtcaattggctctctaaatatgattattaattttctcacgaacattagccattttacgaa

SEQ ID NO: 262448 - DNA, 508 bp, Cannabis indica
tcttagatctctctctaaagcaaatctttcgatccctttgatagtgaggctagatcactattataggactaaatgcatgagggaaggtttcccttttgcttgtaatatctataattggtaagaagatacattacatatttagaatacatgaaatgggggattgagacaacttgccaaatacctctgattcaatcccatgattgtagggattacctttgtgcttgggcttcacgatatcaactctgaagtagtcaagtcttgatacacaactcgaagaactaacttcactctttgctcggattacctgtccttcactctactcggacaagcagactttgtacatgcagatatgttacttgaagtctgttaagaacattttgttggaaatattttaccatgatctagatttactactatgtatgttttattagcatcctaatatgaattctaaaacagtgaaataaacacatataaagtttaggaaaccttacattgggtgcatcggaat

SEQ ID NO: 262449 - DNA, 2324 bp, Cannabis indica
attatttctggctacagtcaattaattatttctgtagtagcataatcacgagttacaaaataattcaccatacacagcactgaatccaaattgatttgggtcattgaattaaatcatcattgaaattaaaagaacaacataatttgatggcctatgaaggaaaatgatccatgaaagaaaacaaaaaactatccacaaagtaaaacctttgctacaacttttatttgagcaagagcttgcagcaaaaaaacccttttatatatagacaaaagtaaacaaacaaacgaaaagcaactagttcttttgttcaacccagaaacgtctgattaatcctaactattgaacagagaaacaaaatgtattaacagtccatgaggagacgaaactcaaagcgaactagcttagcccaagaatcctcccaaattgcaattcggcgaaaagttcctcctcctggtgggaactccacctgatctcccaaaaaaaggacgatgagggccgggaggccaaactagagccgggaaacggtcataatctccaccaacgaacgggtaagggttaggatctctcctcctaaccaaaagggaagacactctcctcctctcttctttcttccgtctctcatgggcaaaagcactcttccaatcaaaggcttctctctcatttccaaactcctccttaaacttaatcttccacaaatcattgttgcttgacaagtactgcagttccttgcttacacaacccattttggcgatttgggcagccggaagcaattccaaaattttcatttgaagttcagacgggagacgcatgaaacatggtggtgagggcaaccctgcctttgcgcaaagatcaatcaacagaggtgatacaagcttgtccttaacaattttccaaaattcgtaaacttttctttcagaatcaccatcgggggatagtgcaccaatactcggcacaaatttgtgttcatccaaacataaccggtacgttcctgaccctgaaccgccactagataatgatccaaatacaattacaaaacggcccataatctgaaactttaaaccaactctttcaatcacttgtgaagtagagtcttcattttttcccagaatctcaggcagggtatagtgaaactgaggtgaaaatgccatggaaggtttccaattttcaagaccagaaaatttataaacaggcgtcccagaaaccaagtcgaacccaacaaaaccagattctaaaagaactgaatgaaccgccactaccattagcttgtggtcatgaccatcttcccccaacccttggttcaaaactctcttcatcctccttacgaaacatgactctgggaacttactccccacgctaccgtcagactcgtcctcaatttccatatcctcagccccgaaactgtcttctcctccatccaactgcaaattcgaaccctcttcatttaccttatcagtttcatcagcaagagtatcgatatcactcacctgggtctcctgattcaggggagtcggagctcctagggtaccgtcgtgaccaacatcgagatcgcttcgggtctccattgtcacaggagactccgaattaggcagtggtgtttcagagacaatagaatagaaaattaggtcaccagatgcgatacctagggaatggagcgaatcgtgaggagaagaagcgaagagctcatcgttcctgttgagggaaaggcggagagacgaagaagaggttgttgaggaaatcgattgagcaatggcgtccttgagttggagaagagaagaggcattagggagctcgattctgatggtctgtttggattcaatggatctcactctaagtttcatggttgatgtctgttttcttgcttagcaccgcaaatgttcctcgcttctttctatctctttcctcttattatgtgtttggtaaaaataaaataaatctattatgagtaatataaaattaaaataaagaagaagatgaagtgataatttgagagaagtgctaaggagattgctagtagttttaaattggttcatttatctattctagggacgttctttatttatttatttatttatttatttgaaagaaagagataactcattaagataaatctactattacaaaaatatttaaaaatcgtaaataagtatttgtccaaacacacttttttagtacagtaacagaggttgttagtgtgtgggtaacaccattcgtcgattgcggaatggtgctgcaagaactaccaacaacaactaataaaaaaaatatctaataaaattgacttacaaactaaaattcaaatgaagtttattaatccaaccaattgc

SEQ ID NO: 262450 - DNA, 1095 bp, Cannabis indica
ttgttgcccctgatttttgccccccctgattttgcccaatatacgtggaccaaccggacagggacacgtggaccaaaagatcttaacacttaaattaattgctaaagtcttgatgaagaaaggggtcttccaggacctgcctcccggagaaggcatccggagtcctctatactcctggaggcctaagtaacattaaagcctctccgcgaggtgtcaggtttcccctgaacagtcacctcgcatttaatgtcgcatgggaggaaacgtgttgggactgccacacgcaataaagtctgacgacacaacccccaatctgcacctacgaagctatgatcacttaagtctattgacggctacactgcgaagagtcacgtcagtcaaaaggcaataaggacattccacataaaagccctacagcacctagggatttgaccatgcattacccatggtatattcattgggaatacccaactttatggatatttacagaaatacatgtactataatcctgggaatcaccccaccaaaaacactataaataccccctcaaagctcattaaatggggtcgagaattttgggttgcataagtgcaagaagagtaaatactcaccaagaacattctctgtatttaatacactcataaatacacagactcgtggactaaggctcattaacgccccaaccacgtaaaaatccttctcttaatttcttacagctctttaatcttctattattttattggttgccgaaaacctcggtcaacattttggtgctttcattgagagctgaagaaagcttctgtaaacacactttacattacaacaatggtggaaactagaagcactcgtcaacctcgccctctagaagatgctcaagacccgaatgaggaagacgtagcctcaagagcagctgagggctccgaggaagaagaaggaattcctgatgatgattacgagggaaacctcgatgagtacgcctacgatgaaggtagttactcagagctggtgcttctaagacaaaaggctgtcgatcatgaagctgagatcgcagcccaaaaagcacaaaaccaaaaatgcaagaggtaatgctggcca

SEQ ID NO: 262451 - DNA, 1069 bp, Cannabis indica
ctctttgtgcatctgccactactatgtcggctactggttcaataattccttcagagacaacttgtcaatactttacatctcagaaaatttccatcaatatgctccaataatcaaagtgaccatcaaaacagagaatatcaatatgctccaatgatcaaagttgtcagccatatttttactgcaaaacagaaaagaaagttaaataaaaataaatataattactgctataaatattaaatatatcatctcacaatcactccctcctattttttatctcacaatcactctctcacatgcagttttttatttattggctcggatacggctattaacttttgaaaaggaaaatatttgataaacttgaaacaatttttattgtttttactcaccacaattcgcttacagcccaaactctttatataaagttattatccaacatataaaatattgggtaattctacaatagacatcctaaaattgggcctatcggtagacaccctaaatattaaagggtaattggttgtaatatgtatgtccactatattattgtgtgcctcattacattgaatctctaatcttattttacttaaaaaaattaaatttaaatagggttaacaaagtgagagaggagattgagtaatttgattcgatctctttcatctagaggcttttgtttgttatctcttatctgcaagtttttctttttatctagttcgtaaacataatgttgttttgatattttttgcattcatgtggatttggatttacaaaacttccataatcaatcaatatatattataaataattaagctacacaaggagaaacaaatttcattatttatttatttatttatttattttgtatgatttctctaatattaaggtcactatgaaataacaaaatgaagaagtacatgaagaaaaagaaaagaaaaaaaaaaactgctttgtacgatgccatcaattctattcagtttcttttttcttagaaaaaaaaaatgatttctattcttagtttttttttttctaaaatgaattaatttttttttctcttttgtatttatctagg

SEQ ID NO: 262452 - DNA, 4426 bp, Cannabis indica
atgtcattttctatgtatgatgggtattgagagttaggggtctagtggacgctgtgatatgtatttgacgcttgattttgtgactatttgtggtctctctactttgtttatacattttgataatggtgatgagatattttatttttaaaagctaaccatgcagtaattttattaaacctagggtcatttgatattagttgttttcctactgggctttataagctcacctcctattttctcccattctaggaactgatcaatttgatgctagtggatgaggatggtaccactgaagaagaaagtcgttattagtttagttttattctacttattaaactttcaatgaaactaattttatatttaagctggaatggatggtttggataacttaaattagctaagtgttattagaaatgaggaatgataaatgctagatattattttggtattttattgacctattaaatttatctaattggtgatttcataactgtgaaaatattattgtttttttatattaatgagaggtccaggttttattactaatattttcttatccatataggagttaatttattatttttaaataagtattttgtgatattaattaaaggatcaattataagtgtgatctttctagaagggtcaaagtgtgacctttgatcactcaaattatagatattacatatctgccacggcctaaggcttggctcatgacacccgtcgtcgcccctacactatcagaccgagcccaatagccccagatacttctctcactctcatctctttctgtttctagatctcacacgctctctctctctctctctcatcgttctcttcctcggttttggtggtctcggatctctctctcaagtggtctcggctccacaaacctttattttttattattattgtacaaggaaatgttaggggttgttcgacttgaaactctggtggtgattcagggatggaaggggtgcggtggttttggtgctcttttaatttatgatgttgtgcgaatggaggaatacatatttgatctggtattattttttagttagcgtcgattcaaaactgttgcatttgagtgaaatttgagttttacattttgttgccttagttttgtaccaacagtacattttcatagcgttggttgggaacctacgtaacaatttactttttgcatctgcggtatatatgtatgtcgactttaccaactgacgctattaattgatatgtcagtacaaaatcaacgaaaattgtatgttttgtagtagtgatttctatttctatattttcattgcttcctatcaacataatcttcaggtatttcttgttcttattttatttatgttttattttgttacagacagtcataccatccgtttatatatgccatatatatatatttccaaacagaaaacaaatagcaggaacaagaaatgataaaaaaataaaagcattggttcacaattatacattcacatgatatgtgattgatatgttaaaatctgatgagattgagagacaacaagcaacatatgacatagtaaaacttaaagtaagtcaagaacaatacaatggggaactgaattagagctacaatacagatgaaccatatcattcatgaacctcttccgcttcttctccttccgcctcttcctcctcatagttttcatactcctcctcatcaatagttgcatcctgatactgctgatactcagccacaagatcattcatgttgctctcagcctcagtgaactccatctcatccattccttcaccagtgtaccaatgcaaaaacgccttgcgcctgaacatagccgtgaactgctcactcactctcctaaacatctcctgaatcgatgtagagtttccaacgaaagtagatgacatcctcaaaccctttggtgggatatcacaaacacttgacttgacattgtttggtatccattcaacgaagtatgaagagttcttgttctggatattgatcatctgctcatccacttcctttgtgctcatcttcccacgaaacatggcggaagcggttaggtaccgaccgtggcgaggatcagcagcgcacatcatgttcttggcatcccacatttgctgagttaactcgggtacagagagggcactatattgctgggatcctctggctgttagtggtgcgaatccgaccataaagaagtgtagccgagggaaaggaatgaggttaaccgcaagctttcgaaggtccgagttaagctgtccgggaaaccttagacaacatgtgacgccactcatggtgccagagattagatggttgagatcaccaactatacattgacaaagatcagaattaacatgcgtcagatgaaattaatatttaaggtttgagatatacttacaagtgggagtggcaagcttgagtgttcggaagcaaatgtcatagagagcttcattgtctaaaaccatacactcatcggcgttttcaacaagctgatgcactgaaagagtggcgttatatggttcaacaactgtatcagatactttaggagaaggaaaaacagagaatgtcaacatcatccgatctgggtactcttctctgatctttgagataagaagagttcccattcctgaccccgttccaccccccaacgaatgacatacttggaatcctgcaattcatccaaaaaaaatcgtatatatatataattataaatacaaataaaaataaaaagtgaaacaaaatacccaactttcatattaagaaaataaaattaaagcgtcaaatgacagcaattcccaacaaagtcattagttacccccacctagaattataaaccaaataaatgaaattaaaaatttgatccaaagaaccactacaacggagaacaaaaacactttaatttcaattaatatgtacatataggacactagtagattttaatccataaatattatatctgtataggtatgttttggtgcataacaatataattatattaattgaaaataagaatcgcaaattaaatgtcaataagagttttttttttggctgaatattcgaataagaagttaaagtactaaaaaatgttaactcttcagttaaactaaaaagaacaaaacttaaaccaagaattgttttagataagaacttttaatatataaagatagagaaatgctaagggacaccaccctcctatatgtcaatatcgctattggtccaaataagtatcgggtcccatataatttaatataataacttttagggagtatcgctagccaatcacaacgcgacatgtcgagaatgtgctaggcaccactggtgtcttatagcaatgctcatatgaaaaggtatatatttttttataatttttgagtatttatgaacaaatccctattgttttttatttggaaggaactaatccctattataaatggccattaaaaaaataaatataacagcattcaatgactttcatgtagttatatatataatatatatatatatataccttgtaagcagtcgcaattctcagcctccttgcgaacaacatcaagaacagaatcaataagctcagcaccctctgtgtagtgacccttggcccagttgtttccagccccagactgaccaaacacgaaattatcaggcctgaaaatctcaccatagggacctgatctaatggagtccatggttccaggctccaaatccatgagaacagcacgtgggacgtacctcccgccactcgcctcattgtaatagatattgatcctatctaactggagttccgatgaatccccgccatactttccggtggtgtcaattccatgctcgttgcagataacctcccagaacttggctcctatttggttcccgcattgtccaccttggatatgaagaatttctctcatttctatatatctctatatcttttctttctgtatattttctctgtttgtttcacgggaaaacaccagaaagttaagatattagctgctatggttttgttgagataatgtgtttaatttaaatggagggtttggagaaaatgagggtaaaataatggagggctactttcttctttatatatatatctatagaagacgttgtactattaattaatagattctatatttgggtatatttggaattttacaactatatacagatttgggtaattggttgttacttgctacgtgcatggaattttaattgttgtcttaaaccttttaaggtccgcagaaacaatctccctattttggtccatgagctgtacttgtagtatttatttttttttgaaaaaacttgcaaggatatttaagctatatccaaattgatttttatttttaatggggtggttataaaaagtatataagtgatcttctaaggtgcattttcttttttgcttcacatttctgtgtgcattgatatgtttttttt

SEQ ID NO: 262453 - DNA, 607 bp, Cannabis indica
tggtaaaataatttccaataggcttgtcatttcatcatcccttctaagtactcagacccctcgttggttgaagtgttgagtagatggcttagtcttcttattggagagttgtattctcacgtgtcatggatgttggccatgtggacatgccacgtcaggtgggaaaaaattgggataacaccaaccattgatgataaaggcgatccaagcttattcttctacgtagaactaaaactgaaagaacctaactttataaggtatccattgtgtgtgagcgtggttagcaacacaacaacaaccaaccatccattcttctttgaaatgagcaacacattagttaaacaaagatatacaacaaaaaactgattggaaatgcaccaccaatagaagaatcaacaacacacaaacaaaacatggaagggacttttgggattttatgccctatataaaacccagttcaatataatttattttctatcaatagaagattagaaatcatttaagtttacatgtagttttcatgttatttgtttaatatacaatttctgttaaatccataacatatagttatttacaatcacagtgatgtcatcacagtgaaaagtaa

SEQ ID NO: 262454 - DNA, 1066 bp, Cannabis indica
attaaaggtgaatgtggactggccagtgaacacccgtggcttgaagatccctgccttgccatgagtgatcattggatgagtggaaacagcagggccttgtgaagccaaaggcgagtctggtgcaatgggagatgcacgaggctgatctggtgtattcgagggagctgcaacactctcagaagagacactggtagtactaatatcatgaggcataactgaaacatgggagcagcatcaaagtgagaagatgatgtctgatcagatgttgcaggagcttggggagatggttctgcaacagactcagatgcaacaaagggcaggttgagccatgagtgtggaatggtaagagtgacctgtgtttctggtgaataattgttgaagaaactgtgatgacagagaaactcatttttgttcaaaactacatgtttggatatataaattcgaccatgagagcttagacacttatttcctttgtgaaattcactatagcctaagttgatgcacttgactgagtgaaatcgaaacttgtgggtttgatatgttctaagacacggaaagcagctactccaaatattttgaggaagttttaatcaggtattttgttaaaaagaactgtgtatggtgcctggtggtctaggatagccgtaggaagtcaattgataaggtagacagctgtgataaaggcatctgtccagtacttcggtggcatggcagattgtgcaagaagagtgagacccatttcgactatgtgtcgatgtttgcgctcagctcttccgttatgccccgaagtatgaggacatgagtgatcaaatattatgccactactgcgaacaagatcagaaaatgattgaaattctccttcccaatcgattctaagtctcttaattttcctatcaaattgtgtctcaaccattgcttttgtgtgaatgcttctaatgcatcatttttgtttttcaatggatacaaccatgtatacctactgtagtcatctaagaagtgaatgtaatatgtaaagttggtgtgtgatgcaatgggagcagtgttaggttttgtgccctaaataaaa

SEQ ID NO: 262455 - DNA, 1929 bp, Cannabis indica
tgatttgatagatatcaaagtcttgggagcatggtttagtacataaacaatcactgaaacagtaaaattgaatgaaattagacaaaagtccttaaatttaacaatcttaatagttcagaagaaatttttaacggctaaaaaagttcagggagcatgatttggtatgtgttaaagttcggggaggaaaaattgctaattagccataaatatatgtatatatttataaaaatttaaaatgaaatcaaaattttaatttatcacaatttttgagaaaatcatttgatttgcaaaagtgtgtactgtaattagaaagtcgctgtagcgtgcctaagcattagggcgttacactttttttggcgaaagtaatgggaattaaagaagttattagttggttgaaatttcaaaattattctagagtgaaggttgaatcaatatagccttgttactattcaagctattcgtagttcttttagaatattttctggttttggtttagtgtttgaagattgtaaaaatttattgtgatctttaaataatattgtttaatgtttttgttaaatgatttgataatcaatctgcacaatttcttgcacgacaatctcaatgttatgttggtcatatgttttagggaggggatgtccctctaaactttctgctatctttttgaggaattagttctagattaatgaagatgagtttcataaaaaaaaaaataattatcattattatagtttatttttttgttagtttaaggtggtgtgttgcatattcctgccaaaataattcatagttatatatatatatatatataaaaaatattaatataataggcctaccattttaatgtttttgtagtttagtggagaaaaaataaaattctcttcatttcttctagtacagatttataattttgattcattcttttacttactgttttttaatgaaaaactttataaacgaaaccaaatcagttacaaatggtattaaagtgtatactttggtccgaaccatgccatcaaacattttcatccatttctctctccaaaattaacaacactttttttgtaatgaatgagcgaaacaattttaactattatatatatcatgtaattttaaaatataagtcacgtaattaaatagtaaaaaggaaaagaattgaacgaattgttaagtaatgtgggactaattgaatgaattgatatgcttcaccattcgcggtttattggttgttgaaggtgctaaaagaattttatttacaaacggcatcgtttatctaattttgttaattatgctctttgagcgatttcaagccctcttggtagaattctctcattaaggatatgatggggtttaatttgttggaaccaaattaagttggattgaagcaaattatattttgtttggtattatatagggttatacaacaaatgtaaaacaaatatacaattaaaagattcaaattttaatagtatattaaaatttgtaaaaggattcttctatggggatttaaaaaaatacctatttatagggatttaaaaaatagaatgattccattgcattttgtagatataaagaagagttaatggccattaaaatgtggtgtattgtaggagattggaattgacttttaacatgagtctcactcatttaatgttatgtttgattgatgtaaaaaaacacttatttttcttttttaaaaaattacacaataaattaaaatattcatttttttgttaaaaaaatttaaaattgattaaaaaattcttttgacattctattatacttatatcattttaactaaacacttcactattttcttagttgctaaaactaaattagtcataaataattatatatttatttttaaaatgtcacaattcaatttttaagtcacattacagttttaaatttttttataattatattttt

SEQ ID NO: 262456 - DNA, 1497 bp, Cannabis indica
cgaacaacacaagaaagttcctatcgtatggtcataccgctagaaaattggggggaaaatgtttatccaaaaatttttagacgatgacgtgtcaagagtagcaccacgtggtacaaaaataccgggactaaattaatgaagaaggtgtaaagtcatgactgttgagatgaccgtcaactatgaggtatgtgaaacatcgacattgtaccatagttattgacaacgaacgaggggttaccctccccctcaacttgggtcttgggggggtccaccccccctccaacttcggtcgttggggggccaacttgggtggttgtcacacccccaacttgggtggttgtcacccctcccccccaaccttgggtcgttgggggggagggtcacccaactatggtggttcgtccccccccccccgtcctctcaagttgggtcttggggggtcacctaactaggatggttgtcatcccccctcaacgagggtcccgggggtgttacccctaagtatgggcttaatcctcaaaggtggttgacgaccatctcacacccataagggaccctcgtcaacagtagctccttcaaatgttcaaatcccacgaaaggctcaaagatagttgtcaacccacgaaaatagcgggacattatcctaaaaagcagactccaactgcctccgaaaatcaaggagacggttgagatagctccgcgttggtggcgtctcctgaagcgagaagcaccgaccccctcccctatataaggggtcacccatgacctgggagggggattcgcgatctgaaacccttagaaaaataaacacttcttattctttgcaatcaagagcctgttcttgactcttgcaactcagatcaataaaactcaaggggagtaggctattaccgacatccgtggccaaacctctttaaattcaagtatcttttatttacatttattgcaaatttcggtgttattaactgcatttattattgtgattttggtttaatctcatttattacgactccgcgtcagttggctaaaaatccagtcaatattttggtgctttccttgagagcttttgcctaaatctccaagtttttcaccggaaaaaatggtgttaacccgaagatctcaagagcgacctgacgaagagatggaaagtgcccaccaagttccatcagcaagcaatctagctgggaacaatggagaacgaaccccgcatcccggtaacggcggcacggccaccactggtcaaactgcagccgctagacagacaactacttggtgtaccaccaacgccactatcgcaggaggcggcgctattgatggcgctaccgaaagaggtaatactggaaattttgtcccacctactgacagtgcgggccaagctcagactggccacggccctggcgtctttatgacgcggaatgaaccccatgttgacatcgagggaattgaccccgagatggatcagctgcgagacgcgataggccagatgcaaggccagtt

SEQ ID NO: 262457 - DNA, 920 bp, Cannabis indica
ctacgtggcgtaggcctatgtgttgcgctcacacatctatttatatctacgtggcgtagacctacgtgttgctctcacacgtctaattacaataaggccttagaatagttcatctcggttctggttaccgagtccaacttgattatgccttgacgcataacccttaatctcaatatgtaacacataattattggtgccactgcaatatttgtctatttgctatagacctgcatgttacgctcacatgcctatttatgtctacgtggcgtagacctacgtgttgcactcacacgtctatatacaataaggcctcagtagggtttacctcggttctggttaccgagcctaacctggttatgccttgctcgcataaccctattcatgaatatacgtaatccatgtattacgttctttcggtggtttatcctggtgatatataccaggtctaacccagttatgtcttatacacataattcttaacatacatgcgtgtattcaatatttactacaacatatataatcttagggtaataaccctaacttgcatactatgtaatcactcatatgatacatttctatatactcagataacatttactaagagtgtcaaccctaactcatgctttcactggattcataatattctagggtaataaccctagaccgcattaaaattaaactcaaggtactagcttaccgagtctagtttaattatgccttaagcgcataattcataatctcaatatatacatatatccgacatggcatagtatttacacaacatatatcactagagtaataaccctaggctattaaaccgctcatattagggtaataaccctaatccggttacaattactcacatatatcatattcaacataagcgccactgcgcatactctacgtgcaaactactgtct

SEQ ID NO: 262458 - DNA, 528 bp, Cannabis indica
tccacataactacatatttaataaaatatggccaaataaatatcaataaaattttcgggatattacagttcttcttgatgtccctttccattacaattcgcacatagaacatgatgtctgataattgtatttgaagaagcagctttgttagagccttcatgcttaatcctcttcctctgattaaagtttgcaataccaggaggtcccattgcaatcaaattccgttcatgggctcgtaattcagcttcgagtttgtccatgtcggaggagttagaattgttgatcatgtaagatacaacaaaactattatactccggaggaagactattaagaatgagttgtacccattgttcctttgataattcaattccaagtagatttgccttttggaacttcagattcatcaacaataggtgcgagttaatgcaactaccaggatgcattttcacactattgagtcatttgctaagatattaactaggagtggatcggggtgagggttattcatattggcactacaacatatca

SEQ ID NO: 262459 - DNA, 689 bp, Cannabis indica
ttttcaacaaaccaaatttctcaacagcctgactaaatttaccaaaccaagcacgagggctttgtttcaatccatataaagatttgcgaagatgacaaactcgccctaactccccctgagcaacaaacccaggaggttgctccatatatacttcttcctcaagatctccatgaagaaaagcatttttaatatcaagctgatgcaaaggccaatgatgagtagctgccatggaaatgaacagtcgaacagatgtgagtttagcaacaggagaaaaagtatcacaatagtccactccataggtttgagcataacccttggcaacaagacgggcctttaagcgagcaattgtgccatctggattgaatttaaccgtaaacacccatttgcacccgatggcctgttttccggaaggtaaatcaaccaagacccaagtaccatttgcaactaaagcattcatctcttctatcattgcagcaagccaaccaggatgagacattgcttcacgaacagttttaggaatagtgatagaatcaagagaagcaataaaagagcaagaagaagaggagagatgattataagacacaaaagaagaaataggaaaagtacattggcgtttacctttacgtagtgcaatgggaagatcatctgtgatttccggatctgatgacgaagatgcaggtgcaggacat

SEQ ID NO: 262460 - DNA, 799 bp, Cannabis indica
aaaatacattctgttacagttttggaagttccgtaggtaccttgccgttttctgacacgctgagtgacaaatggcaagacgcgtcatttaaaataatgccacatcattttactaactatccacgtgtgaacaattttattcaaaaataaatttaagttaaactaacaaatatatttgaaaacaaaagaaatgaatacaattaatataaatttatatacctaaaatctgaattgtaaaatcaatacattaattgaaacaaaagctaaaattaaattaaatttaaaatataaattgtaaaacctagaaacaaaaactcaaaaacaaaaactaaataaacttatcatttctttccaacaaatactcaaaaacatgattgaaaaaaaaatctcaggaacacaatggagaggggcaaattctttggggagaagactagcaattccatcttctccagagaagaccatcgttcaagattctctatctcagacctcggcatcgattgattgcatcttcttcaacgtcttcaagtgaggagcaaacttagatttcgggtgagattttttgagttttgatatttttttgggggtttgctgttggttttggagatttttctagttttgcacaaccctattcaaaagattacaaaatcaaacccaaacccaaaaatcaaattaaaagctagggaagcaattttttttacccagaataaaaactcatatttatatatatatatatattaataggaaagagggattaataactgaaaaaacgtgtttttgcaaatgtcagttgtatataagaa

SEQ ID NO: 262461 - DNA, 687 bp, Cannabis indica
tcagaaattctcattcactttctttttctcttttcatcttcttcttctttcttctcatctactttatattgttttatattattttataacattcacttttttatggcatatctttttaatgtagtggggttatggattttttgttccttttacatttttatgccatagttttgtaattaagttttaaaataccatattttatagtttctcaattttgaaccactgttgcctctgtgtctctcgttctcttccttcctcgcctcgcctgagacccaaaccacgaattctacctcagccaccttccactaatcttcgctgagattcgtggaagaccagacctccggtcagggatcgacgacggagttcgtctaatctacggcatgattagttttctaagtttaatgtttaaaaggggtttatgttttttttctacattagcttgttggtggtgattatggctttcttcaatgatcggcctaagaagaagaagcagctcccaccagtaattggtatcacaaaaaagtcatctgagagattattggttcatggaaccagtagtcttgcttcattgtttcttgttagtactctctctctctctctctcttgtttttaacttttttctttgtttattgtttcttttgggtgctagtatcgtatttgctaaatttttccaagaatatcatagac

SEQ ID NO: 262462 - DNA, 642 bp, Cannabis indica
atattgtactcttttcctttaataacataattagcgggtggagcaataccttcagccagattagcaaaaagatgggatgcctctaacacattaatgtcattattagatcctggtaagccaaaatatgcatgccatatccagagatcatagtcagctactgcttcaagaataatagtcggggacccactacgaccggcatattgtcctccccaagcagttggacaatttttccatttccaatgcatacaatccaaacttcccaacattcctggaaaacctcgacgttcaccaatgtggagtagtcttgcaacatcatgagcgttgggtgatcggagatagtgggctccaaacacctcaacaacagcacgacaaaatcgcttcaagctttctaaagttgtagattctcctattttgatgtattcatcggtagcatctgccggcataccatatgctagcatacgaaatacagctgtaactttttgcaagcctgataacccgagttttcccattctatcccttcgctggagaaagtaattgtcatgtctttgtatagcatccaaaatacgaaggaataaaggatgtgttagactttttatttgggcttatattaacttttattggtttttattaaaacttgggttg

SEQ ID NO: 262463 - DNA, 1733 bp, Cannabis indica
tctctccagcctcatcccagtggataggcagtggataggcgatcgacatttcctaccatacaacatctcgtaaggtgccataccaatggtactctgataactgttattatatgaaaactcaatcaaggataagaacttgctccaagatccttcaaaatctattacacatactcgcaacttgtcttctaatatctgaatggttctttcagactgaccatctgtctgagggtgaaaagctgtactgaatctcaaggtttcagattgaaaatcaaagaaaatagatataggaagagaaagttttatcgaaagaaaatgaacgagagtttcattcgttctttttctgcttcagacttatataatataagttataacttatatataatatatatatacttcacgcgatcaacttttcaattttaagaaaaatattataataatcatataataatataataataataatattaataaaaattttattatttataattatctttgtcatttcttagctaataagaaacttctacttctagggagctacctaaaatctcatatactcttaattatcctaatacttacattatcaacttatcacaatattcccattaattctatcaattaagcctattatgacatttttggtccccgatcgagtctccaaagtcgccaaaactgaaaatatttttattacaccagtaactcatattacatccacatatgccatataaatctccataatttataaattatgcttatttatccacttatagcaaatttaaaatttatgttcaactagattagtaggatcataatcccacttattacctgattaacccgtaatataattataaaccctaattattaactattaggctcattgggatattacatatagcgttctgtataattgagagtgcaattcaaaatctatagtggtgcaagtagagaatttaattggtaaattctagatctgcttattagaagctaagttatatagacccatggtccccatactagttgagacaaactacttgtaagtctcagttaattgattgtaattaattaattaaaattctaaaattagactatgtcttgtttatgaatttgcactaagttatggcttgattgtgaaaaaaataggattttacggtttatttgttaattaagagactttgtggagtttaattaataaataatataaatgacaattttatttgataattaattttaattatcaaataaatagttttggcatttataggattgaaattgcaaaatatggtatttgttaaaaatagataaatgttaaaaaatggcaaaaatctaaactagtgataggccctctcatggcttcattgtaattaattttaattatttggaatgaaacgaactactttcagtggatataggcatattaactttttttctattattttatcattttttattccaaataattcaatcctaaccgtaagtgaattagtataaaagtaaagaatggtctcataattcaactaatgactcttgacctagttttcttcttgtcaaataactagagagtttgagacttcttcttcttcttttcgctcctctaatttgaatcgtatagtgttctttaccattgaatttcaagctttagtgattgagtgcatgcccacccatatcaagttagtccttaatcatagtttgtaaggctgtgaagaatccaaacaactgaaggagtttcgggctca

SEQ ID NO: 262464 - DNA, 1622 bp, Cannabis indica
aaacttcactataataagaccatagcaatgaaaatgatgacatcgctaaaatttgttttggggatcccctattacaaaagttttacaaaaagggatatatacaaaagtaagtcaaaatacacattaggtacaactctaaatagctcctgacaacttgaccacacaagcaggataagtcgatatgtacatttaccgaagaagattgtcatctcatagttgtcctagttttcccttgcctttacctgtaccacaaagtacctgtgagaaacaaagactcagcaagaaaaacaataacaacaatcatataattcatcacacgaatatcagcaagtaaactcacattaccaggatcaaacaattatacattactcatgtattcaaatctaggtctgcatggctactcaagcataatgaataccaatataagaatatacagttatacacaattaccagtctaacaataataactataactgttacttcataaagtaaccattcagaccattttctttatgaaacaactctgcacctaacttagcatactaatgtctttgtcattatttaataaaacaaccctgatactcaaaactggtatccaaatatcacaattatcattgagctaggcaacatgaacacccaatccctggtatccaaatgttaccgtcgttgtcaaactagacacccgaataccactcgccaatatcatgtcaccgccgctacctaatcaggatcatcgacaagtaaaaaacttaacaacaatttcagtttagtcattacatttcccgattgtcccatgtggatcaacccaaataacactaccagtattcatgtcattgtcgttatcgctttctcactttcataacggtaataatcgtcaccttgcttttataacagtaatgaccgtcaccttgctctcattatggtaattattgtaaccttactatcatagcggtagtgactatcaccttgctctcataacggtaatgactgttaccttgctttcataacggtaatgactgtcaccttgctctcataatagtaatgatcatcaccttgctttcataatggtaatgatcgtcaccttgctttcataatagtaataattgtcaccttgctctcataacagtaatgactgtcaccttactttcataacagtaatgaccatgaccttgttctcattatcaactaactcataaacaatcttaatcgtatctggcatgctatgtggtatagattatttttttttttaatccagattcatgcatgccgactaatccaagttgagaaaaaaatgcccaatgatctcgaccctatttctcaacaatagtaaatcgatacgtgtctattccaaaaacatagcctaaatactcgcataaaaaacaaatctaaggtttataggaaatccttctagggtaaggttttgaattatatgaaattaaaaaatagataaataaatggctaaatttctccttaagtggctgaccatgagatgtgggtcccactagttacaattttaccattttattcaacaatttatcttttctttcactaatgccatattttccaatttaatcctttaaatgtcaaaaatatttatttaataattaaaaataattatcaaa

SEQ ID NO: 262465 - DNA, 572 bp, Cannabis indica
tagtttgttttcaattttttttatagttttattatagtttggctacttgcatatgttatttgtttatatttgccatgtgtactaaattgcaggcctgggataacaaattcagtcattctgatttctacagatcaaaatgtgtttgtacaagtaatttctctattcttgataatattaagaatactttgtctgtcaatttgttgtctatgttccgtgacacccaatttggtcattttttttttggatatacttgattttgttttccaccatcaaattgtccatagcctacttttgaggaaattatactagcccaatccaaaagaattttcggctaaggttgctagccgttgtatgcggttcagtgccgaggagttttacttgatcactggtattgattgctttggtgattgcaacaaactgttgttttcccaggaatcaaactagttaattgaggtttgtttccgtggcgtaaaaatcatagatcataaagctataaaggatgctttcttcggaagtaggtggggtcaggatgagtcccttggtttgaaactatctgtgttgtatttcatcca

SEQ ID NO: 262466 - DNA, 1042 bp, Cannabis indica
ttttgagtgagaaatgcaagatatagttttgagttgtggttgattgttggttgtgattattgagtatttttctaggttaaaatctttgtgaaattgattgagtttgctgctggaattatgaacttgattaggttgagcttcttgtgtttgagctttaactttgttaagttaaggcatgaattttatatgtttgaagtaatctgatttaggggtttatagctgggaaattgatgcatggattatgggtttttgaccctttaataattgcttgtaacttgatgttatgatttatgagtttgggtgttaattgaggtgatttaggtgaagtttggttgctaaattcgtgatgttcttgctggtttcctgggttttcaacccaggtgccgcgacatgggttgagcatgctgcggcccaccccttgttggtggaacctgggatttgtcccaggtgccgcggcatggcttgggcatgccacggcccgccctcgattttgagggcagtttgagtgcaaactttaaaaattaataacttttgattccgaactccaatttgggagttctttatatcgttggaaatctcgtttcgagctctatgtaattatctgaattttaaatgccatgattaaattttatgagtatggaatcaggggttaaccctatttgtgaaatcctagattgtataactaggattactggcacctgatcaggagcacccggggattcggaatctctgctattgtgggacaacaggtaagacaatggttagcacgtagagtatgcgtagtgccgcttatattgaaagtgatatgtataattatttagtaaccgggattagggttattaccctaatacaaacggtttagtagcctagggttattaccctagtgatatatgtgtgtaaatgccatgccatgttaaatgtaatgagattcaaggattatgcgcttaaggcgtaatcaggttggactcgataaccataaccgagatgagccatctaaggtcttattgtaattagacgtgtgagagcaacacgtaggtctacg

SEQ ID NO: 262467 - DNA, 1188 bp, Cannabis indica
aaaaaaacaaaggaaaaagcatggtatgagacgtcatcaatctctcttcttattcattattaataataattatagtactaaggtggaataattaaggtctttcttattttattttgctttcttaataattggattttgggatctactttgattgcatcaatcatattctttgagttgacgtaaataaaaagatgggcatattgctttcccactttatatgcaacttcaattataacttcgagcctcccattattttctcatcttaaatgcaaatgctataatttctacatattataatatgcagcagtagcttattattatagtatatgatacgataacccttttccattacttatattatacacatgataatgtatcattgtattccaatattggacttacaaaaatgggttgggcttcataatctgaaatgctagtatcataaataatttgattggatggtttgggttggtccaaaataaacatcatcaaaactttgatctattctattgggggcccttcctaggctactaatagcctttttttttttttccttaaagaaggaaattaatatattatagatgaagcaagtcaggccataaggccattgcaatttgcaaataagaaaaattacaccccataaaagagtgcacaaggctcttacaatgagcaaatataattttcaattttccatcttcttgacaactttaataattatgtcgaaattactctccacatgattgcaagtttttcttcgcagcaagttctaactccaatagacaagatgcaacctccccactaggagcaatagaaaacacaattaccgacccagagcaccttccctagatcatatttatcaagccaccactgttaacatcattgccccttctctaacggccacatcgcaattaagtttaatccagtccacgagcggaggagtctactcggagacagtaggaaaaggttgtgaaacaaacaaaagagagtgaccatactctatataataatgagcaatagaatcaatataataatgtatgttatatataaatagttattacgtaccttgtcatttctcgatctcgagatagtgtcaactacgataaatatatataaaaacacatcgttaacattcacgtttctcaactacaaactctaaatgaatttgactcaatcctataatctagtccc

SEQ ID NO: 262468 - DNA, 806 bp, Cannabis indica
ttagttatattaaaaaataaaaatgttaaaaattgagtttaggatcctatttttataccattttggaaaatatagggtccattttgtcatttaacaaaatagagggtctaattgataacttttacaaagtagagggtccaaaatagtatttatcctataatttatagttaataagaaaatattttttaaaattttaaattaaatatgtggccctgacaataacacatcaactacattgacatgttttagcagaaaaaatttcaaggggtacgatacgatcattgtaatagtttaaggttataaattttttaaatagcctaattttattaatattttttaaaaagaaataggtaaaaatacaattcgcttgaccttcctatttggcccctcctcgggtttttgtctggttccgccactgtcctttatttatttatttttcatgtctattagtgttaaacatactaaaaaaatatgtctaaaactgaaaacttttttatttcccagagtaatttaatttgctgcacataaaaagaagatattaaatgagttttagtggaaacagaatcatatagaataataagaagaaaagccctaacatttgcataaattatataagtggattaaattaattttgtagacttcattaattgatcaattaaaagaggatattaattaattgagtgatgtgataaatgatataatatatgcatgcagtactctgtctataagtacgtccagactactgacccatgaaagttctgtctattctttcctatatatatttacagtacatgccattattaatt

SEQ ID NO: 262469 - DNA, 678 bp, Cannabis indica
aagaagcatctccatggtaacgaacccaagcaattctacaaaagagagacgtccacttaccaacaactctagtgaccaaaagcccacttagagaagaaaggtagtgacaatagaagaaggccgaatagttcggaagggtatgtatatatggaagacgatactaaagtcagaatagagttttttgggattgttagactatagttaaatacagaaaatttttggaattgcaagatgttgcttacttgccctctattcgaaggaacttgttttctgtatctattttggatagactaggttatagtcgtttttttggaactgaaaatctgactttgtatcgtgactctatgttggttaataatggaagtttatgtggaactttatatataagcttgatttatatgatgttatttctgctacttctccctcttgcctttcttcttattctcttaatgttgcagttggttccaaacgtgcaagattagaattgaaatcttccatgcttttgcataaacgtttgggccatatttctagagatagaatggagagattggtgaaagatggtgtacttcaagatctcgatttctctgaattcactgcctgtgttgattgtataaaaaggaaagttaactgctaaggttagaaagagtaagtcagataagtgcacagatgtattggagc

SEQ ID NO: 262470 - DNA, 343 bp, Cannabis indica
tacatgtttagcatacatgtttttaatgcttgttagattacattaatagcagtaatacttagagctgtactgattacttataaatgtatgtcagctaaaatactgatcgatgttatcacatcaatatggctagactatgacaagcgtcttgagtataggctgacattatggttgatagtattatcgtatgaacgttctagactcagtaccgtgttggacacgaggatagggttacgatcgggtgtatgaacgcctggttatcacctgggatgttattatgttttatgttatgcttttcttgctgagtctgtcgactcacagtgctatttccatgtgtaggtaa

SEQ ID NO: 262471 - DNA, 620 bp, Cannabis indica
tttggaggtttaaaatttatgatttttcgtgttgttgctgcccagacaaccggacttccggttggactgtatcgaggaaaatgctaaattttgttttggccatagcttttgactcgggactccgttttgggagttctttatatcgttggaaagctcgttctgagctctatgtgatttttttaattttaaatgccatgtaaatattttatgaatgtgaaatcaggggttaaccctatttgtgaaaatctcagattgtgtgactaggattaccgacacctggtcaggagcacccagggatttggaatctctgcttttgcgggacaacaggtaagacagtagtatgcacgtagagttaagcataatggcgctcatattgaatattgtgattgtgatcaattaagaactgggattagggttattaccctaaaatgagcggttgtttggtctagggttattaccctagtagttaaaagatgttgaatgttataccatgataaatatgttggaataaagaattatgcgtctaaggcatgattaagctagactcggtaaactagtaccttgagttaattttaatgtggtctaggattattaccctagaatattataaaagtaaggaa

SEQ ID NO: 262472 - DNA, 381 bp, Cannabis indica
aaatgatttttaaaaattaaacaagtgattaaaatgagaagtgatcagaaaatagttatggaagacagaagcttcgtacatacaattatattttcctaataaaattgattctttaaactcaacaacaattctacaccattaattatagttggaaaatgtgtataattaagctcactataaaaatatgttctctaattaaattaacactacttctaaaactactatcatattatataattaaaatcgataaaataccaccggtagaatgcagtaaaaatctgttgggttatatgccctaaataaaactcaatttcaatgtaatctctattattcaatatcaataaagaaacaaaagtatttttcattcatttgtgtattatt

SEQ ID NO: 262473 - DNA, 665 bp, Cannabis indica
  modified_base (86)..(86): a, c, t, g, unknown or other
tggactttttgatgttacaatttctaaccaaaaatttacaaataaatttaaaaataaaattacatcaaaacctataccataaatanaggtgtaaaattgtaaaattcctatctcaatttaccatacaattaacgattcactttcttgcataaaaaaattaattccatccattcacaatatatcaacatatatgtataaatgcataatcacctaacacaatatttaatatatcattatgaagattactctggtactaattgttagttttaatagtccatattagagttataaaagaggaagaaaatttttgataaaataatttttatctaatatgaactataagcctaaggatctcaaaataataaaaacagattaaatctaactactgaaagaactttaattaccttttgaaacctattagggtatctttgattcttttcatataacaatcaaacatctaatccaagaacttgattgaagaatccacaccttaatcttctatgccaacttcaacactcaggaatagagtgggctattaaatcttatagcatgaacaaatttaggtattacagtgtgtactcaactcataagatactataatgagattaggattttgatctcacacccaccttgagaggtgtaggcgtgtgagagagagagagaga

SEQ ID NO: 262474 - DNA, 1159 bp, Cannabis indica
gaaaagccaaaattattaacaagataaaagtagaatgcaaccttcaccttaatagatagattcgtagccctcaattaaatgagatatttgtgccaataaaatctgatgtgcttcaatttctttgtcaatatttcttaaaggacgacgagcaaggcgaccatccgtttgtttagcttcgatggccaaatcattaagttctaaatattcaaaagtaatgacgatattatttccaaaactatcataatatgtaggaaaggacatatggaaagagagaatatataatctgaaaaataccttgaggagagcaacaacatatgacacgagcaaatgctcgaagtgattgtggaagacctctcccgtttttactacttgcccttacttccctaaataattgggaagcgtatgataaattctttctaaaataaatgcaaatacatgctagatacatgaaaatttaagagcctgattctttttcaaagaaatttttcaagccctgttatatttctacctatatgaactaatgtcttattttatgttttttacagtctaatctcatgagtagtaagcctaagaaatgaaataaagcatggttaatcataaatatcatctagcatcagtcttagatgtgttttgaaactcttagaaaaaatatctctaatttagagtcattaccattttgcaaataattttagtctagcttgatttatatctcaactcactatcacaaagctcaatttttgcatatatcaattagtagataaatagacatcatcactaacttgatagtgaatgaatccatggaaggagaagaagcattaacatccttttttaccacaacatggtgcctttgcattatttccagcttcattcttcgaagaggatcatgatgaggtatttcaaactggatatgaatctgaaaatatgagatcaaaatatagagtaacaatcagtttcgggctaagaattttattccaattggcataattatcaaaaataaagaatgctctaattaaattaaataaacaaaaagcacctcattaaaatcacccataaaaaggatcaaggactagtaggacaagatactactctttcaataagtaatcatgaacagtgtctattaaattggaccgaatatccataaaacccaccagaattaagt

SEQ ID NO: 262475 - DNA, 1310 bp, Cannabis indica
tatgttgaccattcttattcctaaagaaaaatcaccgggtatggacatagatgtatttttaagacccttggtggatgagttgaaggagttgtgggttaacggagtagatacgagagatagtcgaacaaacactgtgttcaagctgcgcgcaactcttctgtgggcagtttgtgattttttagctcgtagttatttatctggttggagtggtcagggatacaaagcttatcccacttgtaatgaagatacctcttcaatttgagtaattggtaagacatcttatgtaggtcatagaagatttttgccaaataaccatcgaatgagaaaggatactcagttcgacgaaaaaattaagagaagatctcctccgagacgtttcacttgtgagaaagtattagaacaagtaaacaaacccccaccccaactcttgggaaatcatgagctatttggtggtgtgaagcgtaggcgagttgcaaaaaatcaaaattggaggaaaaaaacatcttctacgagcttgactattggtattcaaacattttaaaacacaaatagatgtcatgcatgttgagaagaatgtttgtgatagtttattgggcacaatcttggacaataataaatctaaggacactaccaatgcaagacacgatttgaagaagttaggagtccgagaatggttgtggatttatgaagatgagagggggaagttgttgaaaccacatgctccttacattcttaaacctgatgataggctccaattttgtaaatttattagagatgtgaaatttccaaatggcttttgttcgaatttgtaaaaaaaataaacaaaaacttaacaaatgttatcgggttaaagtcacacgactaccatgtaataatgcaacgattgctttttgttggtgttcgcaagtttctcccaaaatctatatcaaccactatttcctccaacattttttgacataatgattcatttgcccgaaaaagcaattttgggtggatttatttttatgaggtggatgtatccatttgaaaggtacatgaaaaaattgaagaactacgtaggaaataaagcacgtcctgaagggtcaatagcggaaagttacgttgtagatgaggctttcacatgctgttcaatgtatttcaagggggttgaaacaagatttaaccgtcttgatcacaatgaagatgaggttgtcccacgaaaaatttctgtgtttcaatctcaatgtcgacccattacaaaaaccaatattcggcctcttgatcgtgcaactcgtgaacaagcaaagcggtatatatttaacaattcacct

SEQ ID NO: 262476 - DNA, 666 bp, Cannabis indica
ttatttatccttaagtaccgttaattcactagcaaaagtataatcaagatccaatttaaatttttacacaacttttcagttccataattaacacttaaatagaatcaacatttgatccgttaggaaagtgagaattccataattgtagatcatgttccgagctatccatattattagattctcaaaacaactgttgtaagaatcatcttctcttaaaaactttaacgagtgaattaaaaaaactaataacatgaacatgagttcatgattactcagaatttaggccgatctattattgatcatccttatgatatgaattaggctattatagtaaatgtcatgtttgataacgacaatttaattacatatcagtgcatgtcatatataatctctaatatatacaacacattcacttagatgtcatactacaacaacaatccgaatcgagattgcttgcacccaataacaagcatcagtgaactgcactagcaattgttgattaaagatttcataactttaatatgtttatgaattttttattcataactaagtgatcttaattctccgtataatacaagtcgcaatctcacgtatgaataaaattttttttttttgtatatttatatataaatcattcaatatgaaataataataatttaacattca

SEQ ID NO: 262477 - DNA, 582 bp, Cannabis indica
cttaccagggaaattatttcatgttcattaaagagtgactgacttggtagtgtaatcagtgaaatctaagacaacgattaatggacattgaagtcatgcttgtgttggcttttaaagttgatagctatagtcttaaatgatctagtgggcagaaacttgttgtcatttcaaaatatgtatagtttcattatatgcatgtttatttggtctcaagccgttgatacttaattgtcttgcgagcgcactcctcatttcatagaaatcatcatgctttggtattatctctttccctcatactgacttgcatggttttctcaaaccacttctttgttgctgtcaggtttagtccagaagctctaaattggttgttcgtaaaggggttgcttggctggtttctacaagtggcgctgcttaaaataacgctgctctcactggggagcggtgaggcacccttgctagacattgtggcatatggagggtactgcttcactgggttgtgcttggcagtcatagggcgaattctgtggagttactcgtattactttttgatgccttggacctgcttatgcatggggattttct

SEQ ID NO: 262478 - DNA, 617 bp, Cannabis indica
gtgcttaagtccagaacagctacaactcattacactgcccctaatcatttgatatgtgtccaaggtggataattgttaaagtaattgtccaaatatcaaatgacatcattacccttaccgaacttaactaacttaaccaactgttagttatgacagttggtgttcgggtaacttggaacactgatgcaagatcaatatttaaggggccatcctttcacactgcacagattgatcttggagaagaattgtacagttagaaagagagagttttaaaggtgattgagagttgtcttgagtgctgagaaattggagtgaaattgtactatgatcactgccattagagaagaaaattactgaagcattgcttcttagagtgtgtaatttgtatctgttgtaatccttcacattgaagctcaatcaaataaaattctcaaagccataattgtggctgtttctggccgaggatgtaggcaagttatcttgctcgaacctcgtaaattctttgtgttctttatgttttaatgctcatgttttctggtttaaacattactgcatagttgtgattattgtcattgattggttctattgatctttcttgttctatatttgttcttgct

SEQ ID NO: 262479 - DNA, 550 bp, Cannabis indica
tctttattataatcatattttgatagttgtcgaaaatctcggtcaacacttatttttataaaactattttaataagtttgtaaaataatttataaataacttaaataatatctgaaacatcatatgagttacattaagaaaaaaaaaaagaaataaaaagtaaccttaaagtatcttaagcaataaaataacataatagcctaaaaatataagaaaaagaaacaaaaaagtttcttttaatattactggtccttttttggacatagaaaaatatatgtttctcacatattaaaatagttattttattatttatatatgtgtaaaattctgaaataatttttaatggaaaagtaaccaattgatatcttattcacattaaaagcaactaaatggttgcttttttcaaaactcctaaaagcgaaaatttatagaaacgagatttttctattttttttcattttcggtaattattttgaatttcggtatgtatgctgacttggcttaacggtatttgtacaaataatttcttaaaggtatttttgtaaataaa

SEQ ID NO: 262480 - DNA, 680 bp, Cannabis indica
tcacatcaaacccgtcagaacccgaaacccaaaaactttgccttacaatttcttcaatgttcactacctgtatggttaataatttggtattagccatattttaccgtgaaaattacacaatttataagatttaacaatttgtgcaaactatgactttataaaaaatatatattatggaaaaaattcagaaaaaaattaaaaaaatatataggaaaataatataagctaattggttacctactggttaccctaaactctgtttttttcttccatttttttgatttttttttttaaatttcccacaaaataatatatatttttttgtttaaaaaagtttaatttgtgttaacttttcccaaaaaaaacaataaaaatgataattctcctattttacaagaatattatgaagtcctttttaagagatttaaaaaatttatttaaagggtttgatacacaattcttctttgaacttttattatgaatattcaaaaagaagtaaagtgtgcaaatagtctccttaatgttgagagacttccactggaaagacaacatattttagaggtgtttacaaagagtcttaacactttccacatttgcaatttcgttgaattagttattttggattaaactttccaaatttgaaagggaattttacaaaaatactgtttttggaccaaaac

SEQ ID NO: 262481 - DNA, 1309 bp, Cannabis indica
aataataataataataataactactgtaactatatattatatgtataataataatataaaaaattttaagttgttataaaatcatataatatgtatatgtatgtttgtattcttttaagtttattatttttataattatttaaaaaataaataaatagagtgagaagagtacttttatggtgtgagatatttgatatttaattttagtttctattattatcaataataaatttgagggactataatttatctatgctgattgtgatgtagtggatttggagttggttggtcatcagttcacttgggagaagggtagggattcagaaaattttattgaggtttggttggatagagctcttgccaattcggattggattgctttatttccaagttctcagttacttaatctcatgttcaccacttctgatcattgtcctttgcttcttgacccttcttttcggtttcaaactagttctactaaagctttccgctttgagaatgcttggctccgtgaagagacttgtttttccattattcaggaacaatggggaggctgcacttctaacaacattgttgacaggattgtggcggttcaaaaacctcttacatcttggggaaataatttgacgggtaactttaaagagaggattcaaagctgcaaaagaagaattggtgcatctcaagaattgttctgatagtgcctcagtttctgaataccgtggtgcctcaagaattgttctgatagtgcctcagcttgctgagatttatcatcaaaaagaaattttttagcgtcaacgatctaagcagtttggttaaaagaaggggacagaaacacgaagtactttcccgctgctgctagttctcgtcgcaaaaacaatttcattcatcagctgaagaatgaggtaggagattgggttaagtgggagactaattaacctcaggtaatggttaattattttactgatattttcaattccttagggactcatgggaatgatatcctggataagattcagccttcgataagtgatgatgataatgcttctttgcttcaaccggttttggaagaagaagttcgtttagcggtgtttcaaatacatccagataagtctccgggtcctgatgggatgacacctgcgttctatcaaaagttctggcatattgtgggtcatgatgtcgttcgacttgtttagaatttttttcagaataaggtgatgcctaaagatcttaatgctactaatcttgtgcttattccaaaaaagaaaatgtctgtagtcatgggagatttgagacctattgctctgtgtaa

SEQ ID NO: 262482 - DNA, 610 bp, Cannabis indica
aataacatgaaatttgaaaagttattatcatttttttaaatagatatttaggttagttaaaccttaatttttcaaatttataggtttaattttaaaattaatttttttaaaaattttattccgaatttttttttatttaattattcatttttttcgaaattaataaattaattaattaatttaaaattaaataaatcttatatccaactatccaatgtgttacatgtgtgtgttttatattgtttattattaaaacaagttttataaaacctattattgtttgatctaaattgccatggttaacttgttgacagatccaatgatctaattttaaccaatggttcaattgtcaataggtcaaataaataatttgtaacaggtaaattttgcaatcttctttcatctgtgtataaacctagtaacatgataggatccatccaaatcagtgtgcctgtgtgagcctatatgtttgctttgggcttagatgcatataggtagcccatttaatttttgtaattaaaatggactaggttgctaaataaaattgtcacatcttgatagattttatttaggcccaattagtatttgtgcctattcaattaataacagt

SEQ ID NO: 262483 - DNA, 754 bp, Cannabis indica
atgtatatatgtttgtttgtaatttagagtttgttttatgaaaccgattttttgtggtatgtaattttttttatctggttattgtgtttgtttgtgatttattaatttgttctattttatttttgtatattttttaggatgataaataagaagttaaagttgatgatccagattttattactgagaaacatcatagtaagaaggtgagcaagaaggcttctaatgtccatcaagcagatgatgatgatgatttcaaactgagaaggttatctcggaagttgtttcgaccaaaaaaaggaagtccgttagtgatgatgctagtgtatcaaaaaagagtagaactaaggcccctgttaaggattctaatttggtatgtctttttgttcttttatatttttggttgatatgtgtgttgtcttgttttattaaattttgttctttttgtataaatttaaaactctatgtttgttttcatagttttttattgaattttgttcattaattgaattgtattttttattgttaggaaaaagtgtgccaatcaaaatttgataatgatgagaaactggttaatgtcattaacaaagataaaaaaaaaaacctgttttcaaatcacttggcaagaaaaagagtgagactcctgttgatgcgtctgtgccttttgctccctttgtaatttttcttatcaaatgaaactggtttctttatttatgatttttcttgttttaggttttttgtttatagtattattttt

SEQ ID NO: 262484 - DNA, 1841 bp, Cannabis indica
aaaaaaaattgttttataagaaaaacaacaataatgtattccagggccggtcctaggcataggcagactaggcccgcgcctagggcctactcatttttggggcctactcatttttggggcctaaataaaaaaaataactcaggggcggtccttacccaaattttttttttttttttgcctatggtccattttaactcaggggcggtcctgatgtattcatatttgagtgatttgtcagagatttgtattatatctatatctatcaaattttaattttattataggtttttgataattaattaatgctatgtgtaactgaaatttaaaaacaaaaactataagggacaatattacacttatggctagggttgaacattaggcaggtttgccaagtttcgggttcgataattttgggctgaaaaaatagaacacgggtgaaatgagcaagttgggcgggttcatgggtggtcgggtcacgagtttccagttccaccggtagtggcagagggagaaaaaaaaattggagagggggacaaagtgtatgagaattattttagggggggcgggaaattaaaataatgatataatttttttacataattaatatatactaaaatacacgtaaaaataaaattttgggagggctacatgttggctttatggtactaaggtatgtagcaggtgagttattttttattatcattgtaccatatgtccaagatcattatgtgtatagatattaaactgaaagtaaatagatgaaatgaatatttatctcttgatatctacccgggtatctttgattctttcacaagttgtatccttgaaatggtaatgacaaaacccacaccttgatcttccagactttccaccatacacaaagactaatgtgggctagtaggataatagtgtatataaagatcttgtataaatctcaacacatgaccaagaactgtttcttttgtgatagagagaaaaagatttactgataaaaatctttttagtcttaagaaaaagttatgtgaaaaaaattctatatcaaaaaatgtatagaactttgttatacaatatatttaaataaattcaataaaaagtattatttaattaattatttaaatttaaatttatttattaaatcatatttaataatttgaataaataatataactgaatttgattatagatatttacatcttataaccaaatgagagaatctctcaaccatttaagagaatatctcagctactttttaaattcaaatatttatttatttaattaacttagaaatataaaatcaatagggacaccctacataggtggggcacatgcactatgtctggacctcagtgcatgtggtgcctccctctgtctaaaaatagacaatggagatgtcttttatcctgacaactcttatctttttcctatttaattaatttgaaaaataaattatttattaataattattactattttgataattcaaaatatatttttctgaacttccatatacaacttttatcccaccccttgataatgtttcaaggtgacgatccaaggaccatgtacctataatttcaatctccaataaactagatttatttattgaatctcatcaatcaaataatcttgtttattaattctataattactctactataaatatggaattgaactcttagtaattataaaataatatttactgagtttattaagtgtccattattgattataatcaattccagtgattagttcttcctgtgtcagttcgtaattagttttggtcaaattactattttacatttaattatttatttattcattaacacataaagagaaccaac

SEQ ID NO: 262485 - DNA, 768 bp, Cannabis indica
gcataaaacccaacagatattggatggatgaggaaggtggagttgatggtgcataagttgtgccacttctcaacgttatagcattagcatgagctcttggatttttaataggttgagaaggtaatatttcaaaaagtttggcttctatcttggccatagatgtaggtatttgccccatagaatttgccaaactcttcaacgttgcttcagttgtctactgaaactgtagtgcattcgtggccaaggaattaatcaagtcttcaatagagggcttggcatttgacggtttgcttgttgggcttgaggcctttgttgatagttaaacccaggtggtctagttggtgtagcttgttgttggtttccataactaaaatttaaatgatcacgccatctctcattatatgtgttcgaataaggataatattgccgccttggttgatccgaaaaacctccaatagcattaatatcttttgttggcctttcaaatagagtaggacaaatatcagtagtatgccccacaacctaacatatcccacaaggtcacactggttagcctaaagcgagttgttgcactatagatgttaggtgagctagttgctgcccaaattggttgttaataagagtgttcacttcattaactttcttcggtggcataacatcttggcgaatgccaaattattgtgagttggtagccattatagaaatcaagatcctgttggaaagcattttaccaggatcttagatctactcacaagtatgttgtttaac

SEQ ID NO: 262486 - DNA, 934 bp, Cannabis indica
tttagtggagagctaccataaaactatttttgaagagagacatgaaatgtcagatgaatacaactctcatgtggtaaagctaatgtgtatgttgatggaccaccttgcgctaccaccaaaaaaggaccaaggtagcaacagtagagctttgcattgaggcgtttttccacagtagattagcggtaaggctaaagtttcactagtactaggtcaccaatttgaaattcaatgtctcttcattttttgttagctttttttctcattctattctgactttgttgcaaattgtccttaagttgttgcagaatagcatcccttgataataaatcttcttcaacaacctaaatgaatgttgtgccccagctttatgattgaatcaaaggaggtactcggtcatacacttcctaaaatggggtcatcacaatagcaaacactacaagaatgccgacttttgtcggcgctattaagtaattgcaccgaaaaaagttaaccaatgccggcgcaagtcaaccaatgcgctggcaaagaaggtcaactttgttttcccacctccacccttttcccggcgcttaataccgccggtaatagtcaataatgctggcgaagtgcactaattgcgccggcaaaagttggcaccaaaccgccaaaaggtgggaattgttggcaaccttttgccggtgcgctttcattcgctggcgaaactatttatttattattttaattattatttacttttggcgccggcaaaagttgaggaaaaaaaggcggtccattttccctcgcagtgaaaaaacgtgcgcgcaaaagtaggtgggacttttacaggcgacatcacttgcgccggaaaaagttgtgcccttttgaccaaaggacacgttacatcagttttttacttttaccggcgcataaacgcgccgacaaaagcgctaaaaaa

SEQ ID NO: 262487 - DNA, 561 bp, Cannabis indica
cattcgaactgttgatacacaccaccttagagaattgtcaaaagatgagtgttgggcactatttatgaagcacgcttccaatggaaactctaaaaagttcattgaaaacccacaattagaaagtatcagcagagaaattgctaataaatgtaatggtttaccattagctgctaaagttctaggaggcctcttgagatcaacactggatgttgagagatggaaacaaatagcgaagaatgatatttgggagttgacacataaaaggagcaagatagttccagctgctttagaattgagctactactatcttcctccacacttgaaagggtgtttttcttattgttcaatattcccaaaaggctatgaatttcaaagagcggagttggtcttaatatggatggctgaaaattttgtgcaacatttcgggaagactatgagaatggaagaagtgggctatgagtattttgatgatttagtatctatgtcattttttacaaagataaagactaccaagacaggtaaatttatttttgtcatgcatgatcttatagttgatttggc

SEQ ID NO: 262488 - DNA, 1417 bp, Cannabis indica
cacatagtgaaaaaaaaatgtaaaaatataagatattataaatagagattaacatgcaaaatgcagcagtaaacaatagagtgtagttgttggcatgtgttcttacttctgcatttattataatttataacacaattaatttataaacaaaataaaaatataaaaattggtacataaataataataacaacaaaaaaatataagttaaaaatgaaagaaaataattattaaaagattaatgtaataaaattatattatatgaactaacgtgaaatttttccatctttttaagtctttcaatccacaatacatcgaccaaaaccaaaccaattaatatttgtattgattggtttgtcctaccactatcatcaattaaactaattatttcgttgccttttgatttactctttttttttttcttttggtacaaaatagcaatttagtatgtttttttttttctaaaattttgagtcaactttttttttattagtcgttgggctagaactagtttttatgtcctttaattcgatgttagattgaattttatggctatatgtcattttttttttattttaaaataatataaaatagtattatggattcaattttgttgaccgagattttcggcaaccgatttaataatatataagaaagctgtaggaagtttaatgcatgagatttttacgtggttggggcattaatgagccttagtccacgagtcttttgtatttatgagagtatttattacagataatgttcttggtagtttttctctctttggttcttgtgaaacccagaattctcgacccctgtcttaatgtgtttgggggatatttatagtgtttttctggggtgatccctagaaccgaactacatgtctttctctctattttcagtaggggcacacattcccagcagatataaaatgggaaatacatggcctataccctaggtatcttaggggttaggtagatataatcctttatcccttcttgactgatgtgatccctcataaagtagtcgtcactaggcttattaatcatagcgtaatagctgcagaagaggggttacgccgtcagacttaatgcttatggcagtttcaatacgccttctcccatacggcattaaatgcgaggtgaccgttcaaatggggtctggtgcctcccggaggtgctttgccatagctctgtcctccgggagtacgtggacccctcatatcttctccgggaggtattttcttgctgatactcttgatccaaaaagacttagtcaaattatttcagaaccatattccttaaatccacgtgtcgcagtcgcattggtccacgtattttgggcaaaattaagggcaacaaatttttattcatttctttaaaataatgaacttaaaagtcaatttttagtacgaacaaatgta

SEQ ID NO: 262489 - DNA, 1689 bp, Cannabis indica
aatcacgtaatacgcctatgttagttagggtgttgcatagaacatgcacccaaccagcactagggatggtatgggaagaatgtgaactaaatctacgtgtatgcatggaaaacaaaattgaaccaatagaggagacagaaaaaatgtgcatcaacgatgaagatctcactaaagttattaaagtgaaaaagaatatacctccgactgttagagaaaaatcatctctactataaaagagaacaatgacgtgttagcatggagtaatttagacatgactggactcagccctcatgtgatttttcatgctctaaacacagatcctatcgtggaaccagtttgtcaaacaagaagaccattaattctagtttgagtagaaatagtgaagacagaagtagacaagctgactaatatagagtttctctgggaagcattatatacagtatggctagacaatccagtatggtcccaaagccgaatggaacctagagaatgtgcatagacatcacagatctaaacaagacatgcccaaaagactactttctacttccgtgaatagatcaaataggtgatgctacttcagggtatgaacttctaagctttatcgatgcatactacggctataatcagatcaaaatacatgtgattgaccaggaacatactagcttcaaaactaataaggaaatttagtactacatggtcatgccatttgggttgaaaaatactggagccacatatcaatgccttgtcaacaagatgttcaaagatgttctaaggaagaatatagaggtctacatcgacgatatgctggtaaagtcacaaacctccatgagccacaatgaagttttagaggaagatttctctatcatccagaagtatggaatgaaaatgaacccgaagaagtgcacttttagtgttggatgaaatttatgtgttttctactatagagtcataaactaggtccttatatttttttttgacttcagtcgtttatatcataatagtttttaactctagcgtacaaatagtctgtatgtatggttgacaacttaatgaacttactagcactagtactatttcaggattaagaaactcagttacaagaaataacgtcaacatttcattaaactatagaaatactaactctggtgtgcaaacttttttgaatgtccttacaaccccttgctatcatataccagggtagtacctggctcccatataccaaggtgtatgtgacatacatggctctcgtataccatgaatttttgtgaacgctcatgtaagatgcatagctcccatatactatgtcttatttgcccccgagtgatcgaagaaataccctcattggtcacttgccatactaaatctcattaggctttcttgatcatggatcttagagagatgttacatgtgtaagcactcgtccacttatcaggagattcatgggttggcagtgtttaactcactaaagaaataactatagttacctcaagatcaactctacaagatttgttcagtgttgggatagttattaggtctgtgagttggaattttttaataacaataaagtaccaacaagctttactcaatgcattaattagatattaaattcaattatatcatcattatagctagattgaattagaaagaaatagaattggcaaatttatatttttatcaaagaagctaagt

SEQ ID NO: 262490 - DNA, 2714 bp, Cannabis indica
tctgattgaaacatttgtctgatgcgaccttcgaccaaccaccctgcaacaatcgtctgattgaaacttttttctgatgcaaccatcgcgaaaccatgcagcaaccaccctgcaaccatcgtctgattgtgtaagttatagtgtaagaggtattttggtaattaaaatcacataaaaggtataaatattgtctatactttatggaagtattttgtaaataaaatgtcaatttatattcttaatgtaataattcctacgtattatccatataaaactttaaaaggagaaattttccatattaaactagctccgaaacaatcaaagaatgtgcaagtcacagtttcaaaaggatagttgcaaagggtacaacctagggtaggaataattttcctaaaataagattagaggaagatgagaggatatgatggaaaactctccaaataaagtgtttaattttaggaggaatttgaagactccaaagtgttgtccacatttcttaataaaagaggagtttgaggaggagggagggagtgatcaaccgatagcggggtggtatggatctgatgcttgtcatgtgttacacaaatagattgaaaaagtaaagaacacgcagattcattatagaggttcgaccttctttgataacgagtaatgacctactccctttttagttatattaatacaaagggttaatactattcagatcactataggtgggatctgatatagcacccttaagaatacaaagtatgaattgggattaaaaaatgtcaagtgatgagagtgcttgtgtgggcgtgtgagagaaagtgaagaaaaggagagttatcagacttaggcttagagcttggaggctagtatcacacttaaattgaacttaggatttctaggttagagttaagacttttatataggaagtctaccaaaatgcccttgaacatagatattattcagttattctattaggcctttggggcccaattcgcagcccaaactatgtcgtccacgtgtagaagtgcacagaaaaccttgcagagcttctcttggccggctagacacctgcagggagctggctggtcggtcatggtgcagtccagaagttggccgaccatagggtcggccaggggtggccgtccaacttctgtgaggaagctagtctgtcacttgatgcccgtttgagtgtcggggtctccgtttgttgaggtattgtcatgtccttcctgttggtgagttgtactgccacgtggcgctaattttgtccacgtaagcactgctacgtcaggagacaaaaatcgggataacaatacccagcctttttttttattattttttgagtcagcagctacctgtcccagttcagatgttaattaaaaaaatcaatttcacgtcttcattttctctactcatattctctttcatttagttatattatttaataataataatatataaatttgtgtatatatatgtatgttagacacaaaatgttagtagtattgctaagaaattatatttagtcttaatttaataataatgtaatatatatgattttcttaaaatgttagcttaaaaaagcaaaaaataaataggatgggtcgggtcaaattcgactcgcttaattcaagtttggctctgctttagtccgatttaagagaattatcatgttaaatcaaattactattgagtcggatcgagtgggagctaacctgacctgattgtcattcctaggtaaaacatgtctaagtgcatgttagataataattatattttattaaaaaatttgccctatatcattttttctattctggtaaataactctcttaatttataatagccaaatctgttattaaaaaaaaatgatttttaaaatttgacagtattttctcattaaacaaaaatcgaatctatatctcatgcattatactatccaccttatcctattaactctaccacatgaacttatttattagatcccatttatatcagacctcacttggtctttggtttattaataatttatttattttaatttgataattagtcaaatctaattaattaatattaaaatgtgatataattttgtgttccaaccaaatattcaatatctatttttacagacatggatttccctacagttgaactctgtcggtggattctttatgggtccatacaattatctcatcaaaatttcatcacttcttccctatgttcagactattttgccctttttaacttacacgccgccaccaacaccaaagacttaaacaccaatttccttactcagaacacaaaaataagagtaaggaatattgagggtaaaattggacttcattgatgtgctctgtggggaagcgacggcctgctgtttggctatctctacagcgctggatctgaatgccaagtttgttattgttcagagttattccagagtaatgatcaatgcgctcaatgggcagggccgtcttaaggtgatgagaggtctagggcgaaattaatttaaaacgaggccttttattttaataaaaattaaaaataaattttaattaaattttgacacaatattaattttaattcttttatctctatgtaataaatatttttttgcaacgtaagctaactcgatcaaagtaatatttaattactaagaacatctatattgaagtgatatatattttagcacatttgaaagaaaaaaaataatgtgtttaaattat

SEQ ID NO: 262491 - DNA, 2260 bp, Cannabis indica
ccaacagaaaccgttggaactttatttcagacatgagcactcctatggtgccttttattggtgttgttcataatggaatgtggttcctcaaaggtttaggtaaccaccgcgaggtaatgagcgaggcttactcccccgaaaccaacacatggagcacgatcagcgatggcatggtttctggttggagaaacccttgtgtttctatgaatggggaactatatgctttggattgtagagatggatgcaaggttaggatctatgatcgagccacggattcatggaacaaatttatcgatagcaagctccatttaggcaattcgcgagcattggaggctgctgcactcgtggccttgaacgggaagctttgcataatccgtaacaacatgagtatcagtatagtggatgtttcgagccccgataaacatgtcgaaagcaaccctcaattgtgggaaaatattgctgggagaggtcattttaggactctagtaactaatttgtggtcgagtatagccggtcgaagtggtttgaagagtcacattctccattgtcaagttctacaagcatgatgaaattcaggtagaaaaaaccgaaattcctttcgttgtagaagagatttcgatgtgaaaaaaaactattttgagggttgattttgtctgttaaatctctatttgaggttatttgttttacattcatgaaaaaggaaaaaagaaatatgagtagatacatgtaaatctttgttacttgtgggaaaaattaggttgagatctttcttttgttgttggttttatatttatgttggtagaagaatatgtaatccttagaatatgttttttgtgaatatatacttaggtttaatctctgcatattgaatcaaattcatgtttaattttcatgttttgttattatttgcattgtaatgttgttcattgaaataaacttcatttatattcaatttactttcacaaacaaactaaagaaagcatgatgatgagtacatactttgattgtaagaaaagaaaaacacaagaaagagtagaaggtaggaagagacgatttttcgtcatcttttttgctaaattccccgacatttcctctcgtggaggcgtttcaaagtttcttcacgctctttctttagaccgttgtgaaaattcttaatgaaagcttctgctagatcatcaacatccttctcttctcgaccgagttggcgtctactaaccgcttcctttcccttgttgttcatcaccgttgctttgaaaacttctctgcttgaatccattacagctaccgaaaatgtttgtaatcgaaagttgggttaaggctcaaattttgctttcttggtgtttagaaatgtggaaaaacatgttgcttttataggtaaagttttgagctttagaagcaatggttttggtgagaaaaaaaagcaaaaggaaacatttagagaaaattgaaattgaagctaagctaagttatgctttatctagaatatagtacaatatattcttgtcaactttgttatggcatttgtggttagattcctctaaatgaatattttggttatggctcctccatcattggattattattattattattataatactctctaataatatgctaataattgataaatatgtataaataaatatctaatcttgataagatgaaaccaaatgatgcctattatgtgtatgtatccatatatccatataaattgattattatatatgattatatgctcgggaaggatttgttttaacttaattatttgttatggagaggatttttacttgatataaaaaacttggttttagagtacattttaaaacatgggcctttgtgtttaatagtaatatgctctggttttttatggcaaaattagtaaaggtttacacagaaatggaaaagtaattctcagctcaaaggagactgagtaaaacatgttgtatttatactctgtagagagattacaatgacaaataagagtatgacaggtggccctaatgttggcaccaagggaacaagaaataacaaaaaataaaaggttgattacactttagtacaaagcactgaaaacagagcaattaacactaatgataattaactaattcttaacaccacccctcaaacgagagggtgagttcttcacaccgagtttggaaatcaggtagtgaaactttgaatgagaaagacccttagtcatgcaatcggcaacttgatcagctgagggaatgtacctgacttctaattgcttgcttaacac

SEQ ID NO: 262492 - DNA, 2106 bp, Cannabis indica
aagaacgtccagccgccaccattttctctctccacgactcagttccataaatttagggtttttagtttttatctgtacagaatttgttttttttttttatctaaaattacttattaattgttttattttagattttattataaatttattaaattaatttaaatgtaaatattttttgtaaagcaaacttaattttactttaatggttaatattaggtggctatttaataagatgaagtggtattattttaaatgatgtggcattattttaaatgacatatcatgccatctggtgtttagtgtgcaagataacaacaatgtacctacagaatgtttgaaagtgtaacagaaggtatttatgccgccaaaattttaacttaggtattaaattgcaactaaaaaataaacttaagtatttatgccgcaaattactctaatatgcaataaattttgttgccataatagtaattaaagctcaaactcgaaaaaagtcattgatagaggtaagtaatacacgcacatataaatatatgtgtatatatttacgcaactcaataaaatatatattcaacatgcaaaataataaaatgcttaaccaaataaatttataacaaagttaatttcaaatcgaaagtgctataaaaatctatttttcttgccttatgtaaatatttatattttgttagtaatattcattaaaaaataataaaaatgaagagagaaagttattcaaaactaattttggggagtaccacacccttcaaaacaatttagtgtttaattttttctgttcatgggttgtgtggaaagtagtagtggcaagagaaataggtcattatcaatattaatattgttagttaatctttgggaaagttaattgagcttgtaagtaatcctagatgaattaaggtgtttaggatattgtgagccaaagatactaccttttatcctaccctaacttaagccaacattacaagctatataaagtcatattgatatcaggtgcagtgttaatagctcattttggggagtaccttttatcctaccctaacttaagccaacattacaagctatgtcatagtgtttcaattttaaatgcattattttagttaaattgtcattgttcattcaagtgagcttcatatttattaatcgttgttgtttggtcatcaataacagtttattaagctagatttggtattgaaaaggctagatctcatagtttgtacttgaatgataaaaaaatatatatatttctcgattgttcttagtgagtagaatagtaatattttactaccttgcataacattaagaattggtacttgaattgtgttcttagatctgatttaatgtaggaatatatttaattagatgacagaatttatcatgaattttaggaaaatctaatgaacatattgaaaattctagttaactttgtgtgttttgctgttggaacaatttgggcaattttaaacatatgaggatttaactattcaagtctactcttctattgatactttttcttgggattaattttctagccattgtagccatattctaatcatatttccatatctactattttattttagtttcattactcaaacaaattaattttcttaaaattttaagttgttaaatagttggttttacataaaatttgatatacaatgattgtggagacgatcttactaattatcattatattacttgggtgactatttatacttgcgtataacaattaacaattttcacaataatcaacctgggaagtgcttctttgggttattgttgataaaaacccatgtcactgcattattccttgttagatttgaggaattgggatccaaagaagttctcgaaaacctaaacccttgccttcatatcgctcaggttgactatatgtcaacttgggcgctgttgaccgaactaataaaatattataaaattactgagctgtaagaaagtgagagaaggatttttacgtggttggggcgttaatgagccttagtccacgagtctttgttatttatggatgtctttaatacagagaatatatttgggagagtttcacccttataaaaacagagaatgttcttggtgagt

SEQ ID NO: 262493 - DNA, 651 bp, Cannabis indica
tacgaggaacaaccagtgcagatactcgatagaagagagaaagtcttgagaagcaagacagtggcactggtaaaagtactgtggagcaacagtaaagtggaagaggcaaccttggaactcgagcggatacgcaacagaaatatccggagttgttcaggtaaatttctggacgaaatttctataaggagggggtaattgtaataccctagaattatgatatgaattagcaaaaccctaattataaaaatttgaataattgaggaattatattataatatagttcaatttatgtgaattaatatggtttataatatggtaagaccatgttggtgagccaggggcattttagtaattgtgacccaggaagggtaaaatgacgaaatgaatttaattacgtgcttaatagaactatactgttatatagtatgtctatgttgtcttctcaggtgtgttctgacaggttggcacaatatagtcacaaccgggtatttcgggccgaaccgggttcgggcccgaaatgcaaattggattgatttaattggcattttattgatatttgataggctgaatttgattgagattcaaataagctttggatgacaaaaatacccttgtgggggtaaatactgtgtgctttggccctaagggcat

SEQ ID NO: 262494 - DNA, 1845 bp, Cannabis indica
ctagatgtaaattttcctatattcttccctacaatttgagtaggtatatggtggttagtctctatatatatatatatatgatttaatagagaataataggacaacatgtaatgtacaacatatcattgttacaacatttaactaatataattctctttaaaagctttaatattaagtttgtagttacgatgaaataattacttatttacttatgtagattgataattaaaaaagagattacgtggtgcaaattctttttttgtcctttcgatattttaaataattttgggaaccatgtgcttaaacacatcgtacactttgagaatttttattccattaaaaatgacactgtcacaacaagctaacctctcaaagagttaaatataatccccatgagaagatgcagtgagattcgaacccttaactcaagtaagtaagaataccaataaaaatattcttataattccaccacacaacacgtgattccaataataataaatgaagaagctagtcacttaaaactttggccgattttccataatgccattgccatggatttctcaaccaataattgtttatcaagagaactgtttttagaacttatcttattttgagtaaaagagtagaaaatgggaagagaaagggtaaagatattagccgaaagataaacagtcaaaatgtgtggaagagaattttcaagtgtaagaagatttttttaaatgtggcacaatccaatcccaagaatctatatatgaggaataataagtcaagctatagagtgtgaatgcgtgagaatatatggttgcacttgcacatattaaaaatgtgatgataactttgtgagctcacttttactgcggtagattagataaaacacaatttgaattttacaaaatttacagtgagatgtactcatgctttattctttttcgatatttaaaattaattgtagttatttaagatatttagtaaatttttattatcttatattgttaaaaataaaaaaaaaaaaagtgtatctatataatcttttagttaattaagatttttatctttgaattttgacatttaccaaattatgcttcctaaatttttaaggtcattaaaaatatcccctgaacgattgagattgttggatttaaggacttttgtctaattttagtaaaaaaaaatctaacatgaatcaaagttaaaggaacatgatttagtatatgtcaaagttcgatggacataatttagtagatattaaaatctgaggagcatagtttagtacataaacaatcactgaaatattaaaattaaatgaaattaaatacaaatccttcaatttaactatcttaataattcagaaaacataatgtaatacatgtaaaaatttagaggataaaaattctaattaaccatcttttttaaaatgtattgtagtggcacccgttcattatttgaagagagagagaggattataggatctattaattgagtccaaaacaagtcatatcagcaacaggggacaaattaagccatttgacaagaaaggtggggtcctaccctctatttgaatcaaccttttcatgtcgtcaagaaagtcaaaagaggaagttaggtttgtatacatcctttttgtcaatttcctactcaattttcccatccttcattaaattaattaattaattaatttaatgttatttttaattgcttcctcttcaccaaaaggattactaatatatcatataggacttggtctctatttagaaaaattccattagagatgctctccttgtgacaattgtcacaattaaaacccccccttctttgtctccttcttcttgggctctctctctctct

SEQ ID NO: 262495 - DNA, 512 bp, Cannabis indica
tcatctttcaactgacatcatttttcgattgtgtgtcgaatatccttatgttatttgcaatacatgctaggatctctttcgtgcctcgcatgcctcatgtgctcaggcttgccgaaggcaaccttcttctcatgtgcgaggtaaatattttcctgagtttcattaagattggtataaatagtatccactggcacgtacttatcatgattcttttgtttctttttgtcctttgacgattccttaaaatcatcctttctttttgagccagaggcgcctgagttatcaaatcttgtagagacatcactttttgacacattgttgtcgcctcccgagcctattttcaacagattcatctcttttcgagcctcctctttttggacgaacacctgagcccttttgttaaactcagtgatgttctttattagacgaccctgtaagtcatcccacagttcaccccctacgattgagggatcagtagaaacccccgcctgaagggctgtaacgtgtgtact

SEQ ID NO: 262496 - DNA, 1019 bp, Cannabis indica
aggataatctcaaaggattaatcgatgaggtgtccgagaccaatccgacgtggcatccatgtgacatcagagatcccacaaaatcaagggtttgtctcctatgtcagaccttagaaagacgcgtacaacacaaaaagctaaataacttttttcaacgtccactaccctgacatttactatacatgcaatcggcgacacatgggcacttatcaacaacaggttgtacgaccccgtaagagcaactgaaaaaagcctccaatttgagtttcattatgatggatttttcaacatgtaagtattgtttacaagtaagactcacaagagcgaggtcgatcccacaaaaactgtagttaattaccaaacaattaattcctaattctatttggtgacaataaaaataaaaaagatgtaaaaataaagaaaacaaataattaaattaaaattaacaatgattcaattttagggtgattaatttcgattgcatctatttatatggtttaatataacttaattctcaaattctaattttcatgtgatagcgaatttactaaagaaacttatatttgggctaggacatttaaattttaacctatatgaaaattttctactctcttgataaatttaaatacacatgagacattaagcataaaaatcctaaatgttatacaaatcatataggtactctcgtcctattcaaaatttttgtttatttcattatagcataatcaatactcacttctcaaattttataatgaaatcataaaatatttaattggtgatcaagcaattataaaaaattaaatatgaataaaatagatacacatagaaaattgggggagaactacatcacattaaaatcaaaataaagtgtcaaataatctccattaataccctaatacgaagtctagctactcatattcattaaaaataaataactgaaaacaattaattaagaacatgaaaaataaagtagaagaaagaattacgttgaaaaaaataataattgaatatactctaaa

SEQ ID NO: 262497 - DNA, 697 bp, Cannabis indica
catcaacaacattagcaatgtatgttattttttattcatatatgtatataatactattgtatcattattatatatattttatttattttgtgtacaacttatttttcttttgatttttctatttgtttagatgtcttctgatgaagattggatggctacaccaaataaatcatttgatcttaatgaagcaatacaacgtattgagaacaaaaaagagacaagctaaacacttattggggacctaaaatcaaaactacgaataactatatcgataataggatggtaatgttccaaacaacacaaaaataagaaaaactagggttttaaaagaggcccaaccggcagaccggttcccaaccggaagatcaattcctaaccggaagaccggttcctagggaccaaccggtcgaccggttgttacaggctcccctgaaccggtcgaccggttcagtacagggaaccctaaaaatatcccccacaactcaaatcgagcccaaactctaccatactctctagaacacttgcatatactatactaaattcattttaagcaacagaacacatcaattaatagctcagaaattaaaaacaccattagagagccaacttatgctctctaacttcaagtttgagtaatctgtagcacaactagctatctcagcacaaaatcaactaaaataaacctatcttaacccca

SEQ ID NO: 262498 - DNA, 1217 bp, Cannabis indica
gatgttaatgaaacatacatggtagtaaatgtagatcctggtaaaatatttccaacagctcgggcctatctccttcggccaagaagtccaggggcagtgggacaaccccgttaagagagaaggtgtcgagcgaggaagttattgatctctccaaggagccaaccgtcgtagacccttctgccccaaaaatgactaactctaaaaactcacgaggagggatctcagacaagcccgagcagtcgaagggcggatccgagctggtcaaagtggatctgagcagatcagggcccctgccccacgtctagtgctgcatctagagactaagtgacgcaaagatatgctcacccagtacatgactcggttggtccctgaggtgaatgagcagctggccggggccgataatgacctttctctggagctggtgatgggaggagtcctgaaggagttcctgagggtgagttcttcctgacagtttcctcttgtctttcttcacatagttttgattgtaatgttgcttctctgtgcagacaggtttgaagatggcttatgcttattcccaagctaagtcggttgcctctaagaacgctaccatttccaacactatgcgagcggaagtggacatggccaggaaggatgctgattaagctagggttcaacttggggcagtctggatggaactgggagaagttaacaagaaacttctcactgctgagaagaaggtggccgagctgattaaagatctagaggcttctgatcaacttgaaactgccattgcttccttgtccaaagaagtgaccagcctctaggaagaaagggaggtccttcgagctgttttccataggttggaagcagagaagaaggccaaagaggaggaacttgaagctgaggttgagaagtacaaatcagaggccgagcagtaaagaattgaagtggcaaggcttggaggtaaggtgaacgccttagagacagtgggtctcgagatttttaataacttctggaaggctaatcccaaggaaaactttgattacttgggcgattccaaagacatgtttcttgagtattgcgcttctcaggtggcatatggagaatccgaggtggccccttctacctccggtcagaatgtttacatgccccccactcgaacaactgatcctcaagctccaaccggccaagaagacctgtacaaagagcctgggactccagccgtttgaatactt

SEQ ID NO: 262499 - DNA, 3563 bp, Cannabis indica
tatctctcttttaaaggggtgcattatagaatttctctattttattttattattaaaaattaataaatatcaatacaatctataatatctatagaatgttttgaagaataaactaaaaaaaaaaaaatatttgattatgaaagatttaataaattaatattataaaatgtaggtttatatatatacttgaatttttataaagttggagattaattaataaaaaattttgatattcttggagagagaaaagttagtaattgacgtggagagagaataccaattctgttagtttaacggttaaggttaacataatgctgtaattaattggtggaatagagtggagacagcatataggggataggtgattttttttctccacgaaactgtcgtgttatacctatcaccaaagatactgtgtaattatacgggactttatcctattttatcgttttctaagaaataacatcaatatattgtatttgtcaaacaaaaattatcaagtaacacatctgcctcgctaaattttgtccaaatgagtattttattttcatatatatatatataatatgtcaaaatcaaaccgaatgatcttactttagaataatttcttaagagagaacgaaacaaagaaagttcttgtaggcttcatataatataataattcgtgtgttagcttgttcgcctttattctacacttcaagatattatatatttaaagatgttaggcagcggcctgcttagttgtatacgtacagagttgattgatacatatatatatagcactaaaatattatgatagtatcatattattactgaaagcaaagatggcaaagctttctaataatctctttctcatctcaattcttggaatttctctcgtctttacgcaattttgtggtacgaaatatttgtttcttctttttacatataatagatagattatgttctacatttattgttctcttgattgacacctccaaaatatacaaattgaaaacaacttcgcacgtgatcaaaactcaaaatctatatataatatatatcaatatatatgcatgcaggctcttaaagtacgtttcaatttcaaagtttcacattttctggtactgtttatatatattatactaaaaagaagatagctcattcaactgatagtttcttaattttctatgcattattattttaaataaatattgttatcttccgtataatatcaaccaattaaatatttatatgtatatttgtttttaaaaatttatataattcagatggaaaaaaagtactaatggagtacataggagcaacgggcgtaccagtcaaattcaacacagtaccgatcaaccaaagcatcgactttcacttcatcctcagcttcgccattgatgcaagcccacaaggagaatcacaaaacggtgtgttctccccttactgggtccccacactcactcaagactccgtcgcccaaatcaaatcccaaaaccctaacgtcaaagccttagccagtctctccggatggagtctcggtgacacagtcctccgctggtacgatccggaagatcccgaccgttggatcaccaacgcattcacctccctcaaatcaatcatcgaagactaccacctcgacggaatcgacatcgattacgagaacttccctaaacgacgccgtcgctcaagtcccaattccaccttcgcttactgcatcggcgagctaatttccctacttaagaaccaaagcgtcatctccgtcgccaccatcgcgccgttctacacgacggtggggccgtacatggacctgtacggacggtacgccgaggtgatagacttcgtgaactaccagttttatacggatcgggttcggagcgcgaacgggtatttggacacttttcgggtcaggtcgatgcagttcggagcggagaagcttttgccgagctatgaggtagaagggagagggattcaaggggaggcgttctttgatgctttgagattgttggagaagagtgggttcagtgtgaatggagtgatgattttctcggctgatgcttctgtgggtggtggtggtgatgactattattacgagaagaaatctcaggctttcttgcttaattcaactactctattgtgattgttactattattattgttttcttgttattaaaaaaatattaattttccgcgaaatcttgttattgttatgatatttttttttttttttacaaaaccccctttacattttagttttaatacacttaaccccttattttttttttctgtggcaaaaccccccttatgttttaatttttgtacacttaaccttttattttttattttggtggcaaaacccccttaagtttacttttctatgcaaattaaaaattttagttagatattaccgttaaatactaactgaattactactgcatcgacttcgagattttaccgttacatatacacagatagcgcctacaacctttcttcaattcccaaatgaagccaccgtatccctctccaacgatttgctcaaactaatagtagtgttgcgtttcgggttctagagtagaagaatgttcactactcacctcgcaatcttcaaggcttgaattggaaagttcgtcacttgaagaggacggactggcacaaagacactacaacaatactaataattaggggcgaaaaattccgccggtattaaacccaaaatccgctggtatttacttttagcggcgggggtccgtcggtattgccccaccgctaatggtcggtctctattaatcattaatgattaataccaggggaccattagcggcgaacccgccggtatttaatgcgtcagaaacaatttttaacacattattaccagcaggggtccgccggtaataatggtttttataaaaaaaaaaataaatgtaaatataattatattgatatttatatttatttaatttttttttcaaattaatattatgaataaatattagaattaaaattaacaataatttaattactacacacgttatgaattaaaatttatccatcataaaaattaaataattatcatccatacattatttaaaacttaaatatatccaaacataattaaaaacttaaataaatccacacataactaaaataaacataaactaattattattgtcttgatcaaacaaatcatctataaaatttgagccagtagtgtttaagttaagatcaggatttggtgcattgtcctgagcttgcgatactggcggtgatgggtaatatggttgctgggaagataaaatctccacaaattgtcgagtctgtcgttgttgtggtaaattcggagattgttgttgttgcgaaacatttaaagattgttgttgtggcgaaaagtttggggattgttgctgaaactgaccaagaaaaatatatggattttgtgaagcgaaaaaattgacccggagaaggttgctgcattggaccaccaaaaaaacattggctattgagatgaactcccaaattgaccaaacatcggctgttgggactgtgatcctccaaaaaaatcagagtagaaaaattgaggagac

SEQ ID NO: 262500 - DNA, 864 bp, Cannabis indica
tcaactagttgtctaatgaaatgatatcgtatgtctatgtgtttggtccgtgaatgctgtacagggtttttggacatgttgattgcacttgtactatcacagaaaagaacaagtgactcttggggaaagccataatctgttagcattttgttcaaccaaatgagctgagtacaacagctaccggcagctatatattctgcctcagcagtggatagggagatggagttttgtttcttactcaaccaggaaacaagattgttcccaatgtagaaacacccaccagatgtactcttcctatcatctacactaccagcccaatcagaatcactgtacccaacaagagatgtgttggtatctcttgagtaccataggccaaagtcaacagtcccagacagatatttaaaaatgcgtttaactgcagtgagatgagactgtttgggaacggcctgatacctagcacatagaccgacactgaaagagatatctgggcgactggctgtgagatatagtaagcttccaatcataccacgatataatgtgggatcaacattgtctccagcctcatctttactcagcttagttgacagactcaagggggtaggagcatgcttagttttatctaacccatacttgtcaagcattttcttgacatattttgattgagatatgaaaatgccctgatcagtttgtttgatttgtagccctagaaagaaactaagatcccctattagactcatttcgaactcactagtcatgagactgacaaattttgacacttcctcatcactagtggacccaaaaataatgtcatctacatagatttgtgccacaaagatacaagggtgtaagtgcttaatgaataga

SEQ ID NO: 262501 - DNA, 1200 bp, Cannabis indica
ctaaagacttttctttgttacccatcacaaggatcaataaaagttcttgacatttccaataatatgttaagtggaagtcttcctaattgtcattggaatatgaaggaactaattgttctgaaattagataacaataatttgtctggaataatttcaagatcaatcggtttgttgtatggaattcaatatttgcttttgggacataataatttttcaagaaatcttccttcatctttaaagaactgtacacaacttcaagttcttgatgtcgaatataataatttacaaggaaatataccatcttggattggaaaaagactcacaaatttgattattcttcgaataagatcaaatcattttgatggagtcataccatctaccttgtgtcatcttcaatttattcaaatatttgacatttcattgaatagcatagcagggcttattccttcatgcatacaaaatttcacctctatggtagataaaaagaaacagagccatataaatatttggacagaaattcccatttatgatgacatttatttaacgtatcaaattgttacatcgattatgtggagaggtgcttatcgcgagtatagcaacactcttggattattaagagtgattgatctctcgagtaataatttgattggtaaaattcctaaagagttaacaaaccttgttgaattggttcaacttaacttatcaaggaacaatttgaatggcacaatccctatgaagattgggaacttgaataagctaaactctctagatttatcccacaacaagctttccggtgtaattccaacaagcttggcaagcatatctactctatctttgttggatttgtcgaataacaaattgtcaggaagaatccctaccggcactcaactacaaacttttaatgcttcgatgttcatgcataatgatggattgtgtggacctccattgaccaattcatgtcttggagatgagtcaccgaatcgtcctcaagatcattcagatggtgctgaagatagtgaagaatggattgacatgtcatggcttcgtatgggaatttgggttggatttgtaattggatttgttggagtgtgtggtaatttattactcaacttggagacttaactatttcaattacatgggcaccattggtgattggctttatgtgaggatttgtgtgcagacaaatttattgaagagaag

SEQ ID NO: 262502 - DNA, 705 bp, Cannabis indica
ggaagaaatggaggagggagaactaaattacttgcagaagaaagggaaagagagcaagtaattctattattgtgtttagtataagattggaaaaagaaaggagcaaaatcctctcaattgttaggtgtgattgtgaagaagtgaaaggggaagttttttcatttagaataatcattcaatcatcaattaaagtgtataaatgttttctaaaatctctatagtttagattgattgaaaattagttaaaattgacttgtcgaaatcggttatatgaattatctatttaatttatttattttttctagctaatattttgttcgcaattgcagtctactttaaatctaatgaagtaatgtacataactttcttggtaccaagtttccaattcacattttgtctaaaataaagttctcaatacattgttaaggttattcaatgtgatttagttatttagaagctctttaattattacactaaaacactccaccaatttaccaaagtagttcaatttatccgcataaaatgaaaaaatagaaaaaagatatcaatttatccaaaagaatctatacttatacctaaactggcatcctctaattattttaaggctaattaggatttttgtgccctgaactttgacatataccaaataatgtcccttaaacttttaaggtcgttaaaaatgccacctaaactattgagattgtt

SEQ ID NO: 262503 - DNA, 729 bp, Cannabis indica
cttgccaacgagtatatgctgacacttgctttgctgacgaatcctggacaatgcagctctagtaggatgacgaggatgctcaaagtgaaaccgtcatcttgtctcttatagtgtcagaagaagtgacctcagctcgaagtgacacagagtattcagggagaatatctgtgttcttagaccaagaaaagttacctccacttgaactattccgagaaggatggggaattaacaggtggctgatgctctatgttatgtagttttactttgttgttttactttcttctgtcgcactaaccacttatcttttcttttttttgtagacaatatgagctccctggctgctatggcatcttgttcaaactctaagaggaaaattctgatgctgaaggaaactgaacctctggttagggaaattgttcaggggatccctgctgcttttatttcttcaaagaagaaggttaggaagaggagtaaacctgttgatgtcactcctcctgcttaagacactaccagggagaatttaatacaactggtactgatgaaggatctacgatcaatatctttgcagacgaggctaagaatggtgtttcaaactcaggttcaaatttggtggagcagttacgtgcacagggatcctagcttcttacacatggtgatggcttgattggttccaaggctaaaaatattccattgtagaagttagttagcaccaagcctccacatgttatt

SEQ ID NO: 262504 - DNA, 1329 bp, Cannabis indica
gtctgaggatgaaatgttatgctgaacgttaactgagtacccatagctcgatgtagactctcccagaatcttcatgtaaatttcggatccctattcgaaacaatggactttgggacactatgaagacgaacaattgctctgacatataacttagcatactgatcaatggagaaatttgtctgaacaagtaagaagtttgtttggactgatcggctgtgtgcttatgcaagctgaacaggtaagaagtttgtctcgaggtaacacaataaaccacaaactttttcttatcagaaggaagggttagtactggagcggtaatcaggcgctgctttaactccagaaaacttttctcacaccgatcagtcctaacaaacttcaggttctttcgggtcagctccgttaagggtacaacaatctttgaaaaaccctcaatgaaccgacgataatacctagctaatcccagaaaacttctaaactcaatagctgattttggtgttggccaatcccgaacagctttaattttgaccaaatccaccatgatcccatctttatctactatatgccccaagaaagagacacaagacaaccagaattcacactttttgaatttagcatatagcttatgatcctgtaaccgttgcaaaaccgctctaagatgcaactcatgctctcttctgattcagaatataccaaaatactcatcgataaacacgataccacacatctatccaggtaatccttaaaaaacattagttagaccaaaaataatagaaaactgaaaaacaaataaaaactaagaaaaataaaagagaacacaagaaaattatctttgttcggatctcaatttgagtcctactcccagctctcccccaaggacgtttctccactctgaatcaacttgttacaaacaccaattcatgtactgaatcaccaagaacgatctaagatacattggctcttcaacactcaatacttgagctccccaacccatcatgacaccatgaacttcagccaattcaagtcttgatcttcttaccctttctctcactttctctctctgtgtctgtctaggtctgattcttctcactttctgaatgaatagaaaataaagctttatatatgttagtagctgacaatcccaacacttaacagttctaaaccgacaacaactaacataacagattttccttttaaataattggttgtaactgaaaaatagttagaaaccgtttgaaaattaacatttcaagttaagtttatatataatgggttatcatccacatattgttatttatattatttaaaaaatagttattttagaaatagtta

SEQ ID NO: 262505 - DNA, 728 bp, Cannabis indica
caggatttctaccacactaccaataaccttaatatttcacagagagcataccaacaaaacaaaataattaacagaacttgattacctcaaaaccatttgcaagttcatacaaagagttgacaaattttgatactaggagtacaaacaagatgatgattattaacgaggggcctttttctttccagcaatggctactttcttacccttcaaagttctacaattgttcttggtgcgctgacctctgcaaggcaagccttgaatgtggcgtactcctctatagcactgaatttccttgagtctccttatagccaaagcattgaaacgcctctgaatcaataaacccaaaaaaccaagagaacccattaataataatgccaaaggctaaacccttaaaaaaataaagacatagggggctttaccaaatctccctcaatcatgtactttgagacttcatctctaataacgataagttcttcttcagaaaagtctttggtcaatttgttttctatgctaaggtcattaagaattttgcgagctcgggttcgaccaattccatgaatgtattggagagagaactcaatccgcttgttgttcggaatctcaacccctccaacacgagcacatttcacgcttagaccaccaatctgattgattaaaaaaaaaaaaaaaaacgagacgaaacccagtttcagaacactgtaatgaccccttaattgaactttcttcta

SEQ ID NO: 262506 - DNA, 649 bp, Cannabis indica
tttcgggacgaaatccttttaagggggggacagttgtaaagaccgcttagtctaatttggaaattagcacttaattatgatttaattatgaaaattatttatagatatttaaataattatttatgttgttatatttgaatttagaatgcatttttatgtcatatagtgaaatttcataattttgcatttccggtgcccggcaacatggaactcggtgtttggctcagtagaatcacaacttagcatgttagtatattgggatagtttattagacattgggaatgtcgggattggtcgaaaattagaatttcccaaaataccctttagtacccttttatgttattttagtgtggaggggcaaaatggtcattttgccccattgacattttatcctttagtggacttagtgttgtgaaaatgtttggtttattattgttgtgttggctgaaatgagtaaatgaaacctttttattttcattttacaaaattggaaaaagttagaaaattgagaaaaaaataacatttcttcctctctcaagctctctttctctctctcgaaatcctaggggctgctagggttgatttttgttcttcaattcagcaagttttcaacaagtttggtgtagttctagttgaggtaatctttgat

SEQ ID NO: 262507 - DNA, 518 bp, Cannabis indica
tttcaaaatatctacatttaaaaatgtaattcaaaaatttatgtaaaaaaatgattcttaaaataaaataaaatatactctgaaaattattctaatttaagtttatctgaaattaaaaaatttccagcttaaatataattttctatttaattaaattcatgaaaatagaaacaattaagaatctaaaataaaatcaacttaactattaattctaatttaatatctaagaaaatattctaataagtttgtccaaaattaattaactaattaattttcaacttaaatatattttgcttatttaataaaatctcataaaatagaaacaaataattaagtatcttcaataaaatcaacttaattataaattctaatttaagttctaagaaaaatatcctaatctaagttggtctaaaattaattaacaaattaattttaaaatatatttttctacttaatgaaatattagaaaatataaattagttacaagaaataattatttagaatatttcattaaacta

SEQ ID NO: 262508 - DNA, 1200 bp, Cannabis indica
aactagttaggagtgatcctgaacggatgcgggcacctactccaccgttttttggtgcttccagaggccaagaagggcaaggagatgctggcccattacatgaacgtgctggttcgtgaggtcagtgagcaactggctggtgctgacaatgactcttctttggaattactggtgggcggagtcttgaaggagttcaccagggtaagtctttttggatacttccctttaatattccatacttagctcaaatgctaaagttttttccttgtgtaggccggtttgaagttggcctacacttactcccgggctaagtcttctacttccaagaacacggctctgtccgacaccatgagggtgtaggcgcacttggccaggaaggatgctgaagaagccaaggcagaagtcggagctattcggttggagttgggtgaagccaacaagaagctttttgccgcttagaagaagatcactgagttgactaaggatatcgaggttgatgaccgttttgaggagaccatcgagaccttatctgttgaggtaaactgtcttcaggaggagaggacttcccttcaggcagttcttcatcagatgaagggggagaaggaagccaaggaagaggagctttcgaccgaggtggccaggttgatgaagaaggtcaatgccttggagacagtcggtctagagctcttctttgatttttggaaggttaatcctcaggccaattttgactacttgggtgatgctaaagacatgtaccttgagttctgcgtgtcccaagtggcctatggcaaaatagaggcagcagcttcaacctccggtcagactgctgatgtacctcctgttcaaacaacagatccttctgctccgcttggcccagaagaaccgaaccaagagcctgggactccaactgcttaaacacttctctttttatctctttattttatatatcttatttggcctcagggccttttctaagacatcatgatcggtcaagcagtctttaaacttggaattactttttattttttggacaacaggctgatcgggcagctttaatctcggtattacgtgcttttgttatcctcaatgaatttcattctctgtttataattgtcgtgcaattgcgattattttatttttaccaaaatgctttgtaaaggtataggtgcccccaagtgaccgagcagacgtatgactctt

SEQ ID NO: 262509 - DNA, 1099 bp, Cannabis indica
aagtagcttttcttgtagtgttttttttcattaattaaaatatgtttgagtacattaagggaaggatggcctagcttaagatgccacaaacttgattcattgacagacacttgaaaaaaaattggtcagactcgaaactaggacatacattgtgactattattggttgacgactgaataaaggaactagctagtgtgtgacttgaagaacatgatgtagttaatgtgaggtgatatagtttgttgctaaccttcccttaaagaagaaccctcttcgaatcaatgtccttcaaaacattaaagtcggcataaaatttggcataagcattgttatctttggtgagctgagaaacacttagcaaatttttagcagtactaggggcacacagaatagtattcaatttaacatatttagaaatgttgagaggtttaagaagtgaactgccaatatgagagatagtaagggattgaccattatcgactgtgagccttgtcttaccattgtattcagtaggattctattgtctattatgtggtttggtgcaccactgtccacataccagttggtgtcatgggtgaggctactgagcagagttagccaagaatgcttgttgtttttaccttgcggaggagcacaagtagagccctaagtatgattttggatacccttggttggattgaagccaacatcaaagcgacagtagcacttggcaacatgatgacatggtttgtggcacagttgacaaataacacacccttgattttctctacctctttcgcgtccacaattgtagaaagtaggagatctgccagaattggaagccacaaacagtttttaattgggagctgcaaagttcgtagtgggattggcaagatctgtgttaagagcagagttagcttgatctattcgcatttcttgactctgaataaggtactgcacttttgagtgtgagctaatatgctctagaggtaagactgatgaaaacagagtcgtattcagatccaagaccaatgagaatgtaaaggatgagattatcgccactaaaaacttgccttgcagagttaaaaccagctgctatggccttcattttgaggatata

SEQ ID NO: 262510 - DNA, 537 bp, Cannabis indica
tggcctggcgggtgggtttcactgccgaaggagtcactttcagggtggactcaggtggatcgtggtggtgttctcggattgggtaggtctcgagctcgatggtttttggtggtgggttgatgcagttcctagctagatagtgatgagtgtttgtgattggtccgagtccgatcgttatttgtcttcttttatgttttttctttttttttgatgctgtaacttttattgcttgtgttttcttattgtataatggtctaaataactgtgttttcacaccgtacgtcctgttgttcaataggattaataattattttgagagaggttgcttattgctcaattatcagattatgagattccctggattttatattaaccccatgtttgtggatcgttctttcatccggattgtcttcggcatggttcgttttgccatttgcttttattttagtttgaattaatattcgagttgtcattattcaatatttattagaaaatctttaactaataatcattaattaatagctttgatttgtcatg

SEQ ID NO: 262511 - DNA, 1670 bp, Cannabis indica
caaatatagttattgatacgccttcaatatatttttgctattttacttttttaaaagtgagagttgtaataaactcaacctatatattgacaaaatatagttatccacacctttggtttagttacaattaatttgttattatatttaaaatcagagtattgctatactttctacaccgataaatgatattttttaaagttattttaaattatataaaatttgatacttaactacatcaatatagaaattgttagatacccattttatattttaaaataaattttcattaattatgatgttggacacttgtccgtactcttaataaatttattatgagagagatttcttctttcatcatttttttttcttggcaaataataattaaaattttctccgtcttttcactttttctttcttcagccatacaattaattcatatcttaggctcaaattaatttgtaatgtacacacaataataattccatccaaagaatcttaattattaatccttttagctgtaattagtccaccacttatcgtatcgtaatcgtatccaagtctgagtacgagtatcgtagtcggcagtggaagattcaaacgcaaatattaataaattaatcaaacaaatattaattaaattaaagagaaaaagaaaaaaatttgattaaaccgtccttccacacaataataaatttattatttatatatgttatatgttatagttagtgtgtcaacaatctcgtgttccaatagggagagagtcggtcatgaagtcccacctctcctcacccttataatatcaccctttcccaaccttttttatcctccacccaccatttgagctagctcttataactcattatattaagaatctgtaaagctcaggagggatagcaccagatcatcatcatcataattatgatatatatatatatatacataattaagactcatcatctatataatatatctctctagcgctatccatcctgagtttcatggcttcttcttactatatagtgctttctctctctctttcacacgaagtcatttttttggttggtattaaaggaattaatattactcatttaattttattcattttaattctctctctatatatatatacaaacttaattattattacattaatgagtttttaattattttgtttagattgattggtgaagggatctttctcaagtgtttggccttggccagtagttatatattattctttttttttttttgtgattaatgtttatttaataataatattgttaatttgtttgttctttttttctttattattatttaatagatttatttgagaatgtactaggatttctcacttcaggatcaagttggaagctggaacatataacaatggaactttggtcaacacttaccacaagtttaaggggtttgttttcgatattattagacggtttgatcaaaatcaaactattctttcgtaatttctgaatctccttactgattttttttttaattttcgggtcaattgtttgatttggtggacgaaaaaataaatattaaaacgttgtagcaacacaaaaatgtaagaattgttcaaaaataatgtatgaatagtatcaatattaggtattttatttcgttcaaacttgatgaatatattaatttgaaatgta

SEQ ID NO: 262512 - DNA, 642 bp, Cannabis indica
cttcccatcctgtcgctcgggacttgtacccctcctaggcaacgggtcccagggagacctcttcaagggtaaccatgcgcttactacttttctttgatgactttgagccagaagcagacatttttctattctgtaaaaagagtaaaattccagcagttaggccccataccaaaccctaaattaagaaaaagggaatgggggtcccctaaccgctggaaagaggccccctccggacacgtgtcacacaggaaacccaggaaggattccctggacaagagtcgggtgcaataaattcacagaagacggctttacacgataaagaaaacataaaagaaaaaaaaagggtctgtcctatgccctaagcaaccattatacgaaggacgtacagccttctacaaagaaagtaataacaacagaggcgtgacaataacaatcctatcactagagcagtaaactcaaacagactatatgaaggatttaaacacttgcatgcccagaaacttcgaatgcaaacccagaaaagaacaaacagataagtaatagcatgtcattcaataataaagcaaaggatgcaaaaaacttacgatgaagtgttgaaacagggggtcctgctgagagtcgagtaaagacaagaaggactgg

SEQ ID NO: 262513 - DNA, 3216 bp, Cannabis indica
ttgttgttttatgtctccagcaataaattaaaataaatgaacaaaattcaaaaaatttaaaagaagaaaagaaaaattgtatgtagaaagaaatgtttaattttttaaaattatatttttcttatatataagaatgaaatatgtatttgatcaattaagttttaaaatatttttgtatcatatgcattagatttttaaattattatttttttacattaaaataataattgtacatataattttcttttttaacaaatataaatatgtgtgaattgaatttgatcagttactttaacatgtcaatcaatattcaatccgtacaaatatataaattttaaatttttcaatctaatccattctgcataagtatgaatatccacattttacaaattagattagattatgtagattatattgaattaaatttaattaaatctgggtaagtatgaatatccacactttataaattaaaattgtgtaaattatattagattagatattttataaactagggtgtctttttgttactttctacagcttacgggtatctaatttcaaaagattacaaccaagacacataaatgcttgataaaaacatgtccagaatcacctccttttatgtaatgccctccacacttatatatcctccatcttaatatggagaccctcatacttgatttaatttaaaatttgatgtttcactaataagaaatgacatagtatcaagaaaaatatagtatgttttattgtatattatactattcgttcctcaccatacgtaagacttcagaccactacactggtccaacgttcaaataccaagttcacatcacgattcaatcttgtgaaatgtattcttggtaatgaataatgaatattgtttctttttgagaataatgaatatagttcagttaatactttcattgtttcacaaatttttcaaccaacacattttgtataaacatagatggaatcataaactatgtaatcaatcatcacacaccacttagataataacagcattgctggcaagccagaaattcatttagctgcaaggagttgggggcataaaaccaacaaaagaaaataattcttattatgatcaacaagagagaaatcttaaattctctaacaataaccttggaaaaagaatattaatgaccagcatacaattagtattatggttgaaagaatggcaaaatttcttgttggaaggattctgaagatatgaagcaaaagttttacactttctaacttccaatttatcaagggaagaatctaaaatgtctagctgccactgatttggtttatcttttatgcttatggagctctgtcaaagggttttgtgtcattataacaaatatcccagactgcctccatggcatcctttgcagctgcttctgagcagtaaggatttgcaattactgacttcataacccttcgtcttacacactccttcaaacattgcaatgagaatccagtttaagattgaattgcaaacaacaaaacgatgtaagaaactaactcatacaagcttcatgtgagaaaatggacaaagaaataaattaattacgcaagtaaggaatgcaacatccacaaaaggaaataagatgaaggtataaaagaaacacttcacaattcagagtagagtaacatagatgacaatttcatgaaccagctactactatacccctccataatgacatgcaaaagatgacccaaaaatgtaaagatgaccattgaacaaattaaactagtctaaagctattacaattttttttttgataaataatacaaaattaattcaaacaggtaaacatgagaaattcaatacgtgatctttttggctttttttgggtccctgtttgcatataagtttataatcttaaaactcataaaaatggcgggatgcaaaaacatgggtgtgttttctgtcatccagtacatgtttttatcctaagcattccgtttatccaattttttcttgcctttcatccttcaatttctccacacttcttaggaagcagaggaacacaaatatctagatagacagaaaactaaacagagaatttttcttttaccccagaataaacacaagatttcagttctagtttttaatccaaagaggtataatccactcacttgttcatgacctcgtatctttacaaaaccccgcagaagttcccgtttgtagtgacaatcgccgctgagatggccggcgcgtatctgctcaggggaacagtaaaaacattgtatctaaatctatatctgagagagaaagagaggaaaaaaaaataggtctaaaattcaatacagtgagtaatgcacacctcactacaagcatgatgagcacaattagcccagtccaagtttgccccacgacaatcatcgtaagcatgaattagctcatgtatcacaacttggttcacctcgtcttgtatgttcatgtgattactacaaacctgaatctaaaagacataaatggaaaaaaaaaaaaaaaaaagtaagttttaagatattaatcaattaattaaacaactttaaaaacaatcccaatttgtagaattaggggactaactgacaggatttgccttatttcagattccaatcatattatgaggttcttagttttcacaacttttaacaataaaagtacataattcgagacgagagagaggattgaattgtaccccttcgccgcgaacgtagccaccagcaatctgtttgttacaatgaacggccttaataaacctttctccaatggcgcatccagatttctccaaatgctccaatagaaacttcaccatcggagctgcaccacccaagagtataaatcatacaatcacacactttgataacaccacccataatcctaaaaccctagttcgtctttttacacaatttattgggaagaaagagaagaaaataaaagaaggaagttaagagagattactccgtagacttctgcgaatcatatcttggcattcgtcaatggttttcccaccattggaggcggaggtggaggtagaagtgctggttgtcccgggattctgggcgggtttttctgccatggttggtctccgccgagttgtttgttggtttacttgggttggcgctatcaaagtgtagacggctctcttctcatttcatgtacacaccccttttctttcaactttttttttttttttttttttttttttttttttatcttgtcta

SEQ ID NO: 262514 - DNA, 624 bp, Cannabis indica
ggggaagattaattgacagagcttgtgatgattctcttattcaggttgttttttgacaaatgataataatgattaaaatatgataactatcatatgatcatcgtctatgttaattataggatattctttgtgtttgtgtgtgttgggtttttttttaggatatcataatttggattttcttagtaatgggtagtatttttccaccatttagactagggaatagaacataatttacagaagtttgacaacaaatctgccactaattcataattacataaaactatagtggtcaaaggtgaaacaggtcaaaaaattatgcacaacaaggtccggaatagaggtcaaggtggtgtcaccccttcctttatgtgggtattgtgtttcccatattgtttccatgtgggactttttttttttttggttaaaattccatgtgggactttaatatgttggatttcaccttattatcttgttatcattatctctggattttcatatttgttaagaacagttgctccctacttaattgttactgcttaggaaggactagttttttttgttgtcatgtatattactgatttactctctgtagcttccttagtgctttcttcctctctctctctc

SEQ ID NO: 262515 - DNA, 1158 bp, Cannabis indica
aatatattatttacacaactttttaaatttataaataaaagtattcttatttaccaaaaaaaagtcactttgtttaaatactcttttaagtgttgtacatgtaaaatataaataatattttttattttgtcacaatattttttaatatgtaggtttattaatatcttaactaataaatttttaacacaaagagttaggtggaattttatattttttcattctattttgaaaattttgtgagatttttcaacttttttaaaagaaaactataagttgtgtttggaaaaataaataagttgaaaactaaactacgcatataaaattatgaattaaatctcaaatcaatcaattgtcatggaattaaattccattgcttcttagtcgccacttaggcaatctcaaatcgatcatttctatccacagatgcaactgtcgtaaaattaaatcccattgcaacatcacagttgatcttcagccagtccatcgaggggggggaggggtctagccgcgaataagagttggggctgaacgagggaagatcatggttgcaaattctgcaaaggtaatcatgatacaattaatactacaattatcaagaaacaagttatcatgtaccttctcattcctcgctttccatatcaaatctgccacaaaagacgcataaaggaagagctttcttgaattggtacctttttgccaagactccacaagaatttcacccaatcccaacaattttctccgctatcctaaacatgcattagaccctaaggagacaacctctaaatgtgagaagcaaagtcacaatacccaaaacaatgctccatgctttcccatgaagctcacacaagggacgggttctattagggaaatttgaatttccatgcttaaataacccatatattattccctaaactaaaactatatataattaattttatatgacactttttgtatttttcccataataccctccccacctacatctacccactccaacctttttctcatcaattcaacaaacattccacccgaaagcttccacaaccaccaaaaaaaaatttcttctcttcactcatcactaaaagctacaaccttccacactacaagctaccacactaatccaccacattagaagcaagaacacatacaagctccatc

SEQ ID NO: 262516 - DNA, 651 bp, Cannabis indica
ctcaggattactcgtcttattaccatttccagaattctgaggtttattccctcttttcttgggacctccaatcaaattttcatatgtctgaaggtcattgactaaagtatgaaagtcttgttccttcttattcatgacataatttgatgtatagggcagaaaatctggagtcagactattcaagatgagactcacttgagtagtctgatccatttcagcaccatgattctgggcttcctggaaataactagccatctggagaaggtgatcacgcacattctgatggggttccatccgtgcgttgatgaatttcttagtcgcgtcaaaacgagactggatagatgccataccgaatagctcagttaactgcgtcatgatttctgcagccgtgacagtgttagcaaaccttgttttcaaggtgtcaaccatgctggaaagcatgaagtatcgagctttgttgttagcattctaccaacgctcgaacttctctttaacagctttggttgcattgtcacctggctgttcaggggacagctcagtcaaaacaaacagggcactttcacgtatgatagcaatattaatgttctctctccgttttgggaagttagctccatttagcttattttcaatcaacagtgataacatgggatt

SEQ ID NO: 262517 - DNA, 855 bp, Cannabis indica
cctctttgtttcaaaccgatttcactcaaaatcatctatacacctttccattcaaaaggggtagtcctctgaagatgtttttgaaggaaatacttcactaaattataataatatctcttatatagagatattattaaaaaaaaaaaattacttttaatatttttttaacattatttatattaattttgatgcttatttgattttattttcatatcttttttctaaccatgtaaggttttctttatttttttcctaagaaaatatcatataatccattttattggggaattaccatatatattgcattttttatttttttttaagtttttaatttttttttatttttataaaagttatttttattttgaggctatgttgtttccctttcgaggttatactttattttataaaatagtttttatttaaaattatgttgtttccattttgaaattatattatttctatttttataaataaattgaaaaattaatcataaaagtataaattttaatttttttgtcggtttagaatataaatgggaagtaaaaaattaaaaaaaaaaaaacttaatataatgaaaaatataaattttatgtaaataaaaattattaaaataagactagaaataaaattttccttaactttttgtaaaattatactaattattgataattatttgattttttttcgtatcttttttctaaatcatatttatttttctttatttttttttaagtaaaatattatataagctctttcattgtagaattatcatgtatactgcatttttcttttatttttttaagttttttagttttttttttttattttttattaaaagttattttctatttt

SEQ ID NO: 262518 - DNA, 728 bp, Cannabis indica
gtatgtccctgctcggagcataaagatccttcttatgtctcctccgggagacattttcctagagacactcctcttttgtctaagacagttgatttctttaagagctggtcctctcagctccacgtgtcatccttatccaggtccacgtattttgggattaagggcaacatttaccccccaagcctcgtttcgtggagaataaacgaggcttgtttggtgcctccggttggctcatcgatttagtggcacgtgcttcaagcgcgtgggcttcatttatgatagtcatcattaacatttatttctttttgcaggaaacgattcgcttcccgtccattaatgatccgacgcatttaatcggtgtgtcagaaaagtactcaagtgtttttaactgccctgatgagcatttatcccaattgttggatctgcagaatgcaaatcgattacgattcccaccgtacgatggcgcctgatcacagctaccttgcaccctttctggtctataaaagccagccttttatcttcactgggttactttcaccacttcgccatttcacctcaagaacactttcgagaaaaaattcccaaaaccatagatttctttctgttatttctttgtcgctgtcaatccgcgttctaccgtcgatcaacaccaacccccagttttcaaccttcgtgtaagttttctgggtactttatgtttttgttgttcatttgcatgctagggtaga

SEQ ID NO: 262519 - DNA, 611 bp, Cannabis indica
gagagttaaacttaagtttttataccgtaaattactcgataaaaattcattattgttgatatattcaaacttgacagctcaaaaaaaaagttaaaatgggagtaatattagtgacattgtgatctcactccttttcatcatctaaaaagatggtttggtccaaaaccaaagcaatccctccctcaactttacttttatttatgtatattttctctgacataagatttaataacttgaatatttggaacacaatctatatgaaatgtttggtatagtgaccccatttcattacattctctttaactggatttgggtaattactactattagctgttgttgcctgaaaaggggacagcttttttttctttctttctttctttctaatttttgtaatatttttataatttatagtgaccctaaccctaatcacaattacactaaccacttcatttcatgtggttcttctaataacactttattattattattattattattatttctttttaacaaattatattattattactattaaaataaagagattttgtccatgagtcacactttcattagtgtgtctacgtggaatctattaggataaaaagacaagg

SEQ ID NO: 262520 - DNA, 607 bp, Cannabis indica
aaatataaattttaatttaatatttataaaattatagatttgaaaaatacaaatttatttttcgtctttagtattaattttccaataaatataatgtaaattacttaattaaagttggtccaaattaattaaattaattttcaactcaaatttaattttctataaatgtacatctcaattaaatttgaaatctaatgtatttaaaataatacattttcgaaatctcacaataaaataaaataaaataaatttgaaaaaattattctaatatatgttggtctaaaattaaataaaataattttaacataaatataattttcctatttaattaaatttcttaagaaaaatatcaaatatttaagtgtcttgaaaaaaatcaacttaaatattaattttctatttaattaaatatgtctagaaaaataccaaaagtctacctagaaagtatctatctagataattcataaactaattatttattttttaattaaaatataatatatttaagtctatttattttaataaattgttgatgaaaattacttgatttaaattgatctaaaattaattattaaattacttttcaactttaatctaatttttaaaa

SEQ ID NO: 262521 - DNA, 445 bp, Cannabis indica
aaaatatatatcattaaattatctttaaaatggtacatagatcactgaaaacggacctatggggagagaaatatggtagttttatggaagcctatttctttgaaaacaaaaataaaaacacaattacgaattttaccttaagatttcgaagacacggaacgatgatcagataagagtggttggttgccgaccccaaagttcttaagattagaacaattgatttggtgcaatggagaggataaaaattttgagagatggtgagaatacgatactatctggctgctagggttgtagagtatatacgtatatatgagatatcatattataagtttaaattttaaaataaaaatctaactaataagataaaaattatgctaatataatttaaattttgaattttaaactaactaaattgattcctcacttattattgttgggttttatg

SEQ ID NO: 262522 - DNA, 489 bp, Cannabis indica
gagttgaaaacacgttggaagcacaccctaagcagctcaccataaaaaattactgatcttagaaggaatttttaaggaccaaagccgcttccaaaaattagtattggcctcccagcaccaagcacccttagattctagcaagaacttatatgcacttttaaccgaataattcccacaagtctcaagtcgccaactccaaccaccattagcatctaaatcactgagctgaatggacaaaataaggtcctaatcacgggaaacaaatatgtccctcacaacatcctcatcccacgcgcgagtaccaacttgaaagaggtagctgaccgacttattcacaagagcagagtgccgtcagacaacatagttgtttgaatcatgtggaagccaagtatcattaagaatggatacattttccccattagcaattgttctttgagcacaggcgtgcatgtaacaccccaatttcccgagatgtcacataggatagtc

SEQ ID NO: 262523 - DNA, 4284 bp, Cannabis indica
ataattattttaagaataaaatagggtaaacatataaatggggtgtacttatagtttttttttggagtgtaaatataagtccccttagtattaaactaaaatatgtttcaccaatacttaattacactaataataaaagtatgacatattgtaagtgttggaaaccattagtacccaacatttctatgtcaaccctagctcatccaccacacgctgacctctaatcacagcatagctataactcaccggaaattatcaccataattgaattatttggtgatagtgtaacaccaacacaacacatcacactacaccacactgcatttttgtggcgtggtttctgaagttttcaagtctcgcaatgcagtcacagtttgggaattaacaagaaatggaaacacaatctagtataaaaaaaacaagccaaaacccaataaatacatttaatttaaaatagtatatacatattatttaatttaaccaagaccaataagaggtaacagttctcaacatatagttttatcattttttaactttcttttcaatcaaattagcctagctgatgtttaaaccacgacctctcacacagcatcatcttttcaaaattcagatccaaaatggctattgatctttaaatatttatttataaatatataaattcaaaattaacaatgtataccgaataagtgttcacaaaccactaatcaagccatcaaggttccatcaatatgaatctaatggaaacaaaaaatcatattcaattttcactcttgagtttagaatacatataaatatctactttgtcatcaatgggaacacttttgctattgaaaaatatctacttgcccaaccctttgactaaacttaaagaactttttctaatttgagctgtaatgaaagtattcccatgagctagaatttaaacacattgaaaaataataattaataattaaaaaaaaaataggatctctaacttacaatgagttgctatcaagtggttcgagcagtggttaatcaaaatagatccacgtaatgttcgtcactagttaaggagttgaacgcagataagataagcctgcagattttgagattcgttatcattagtaaatatagtttctatcacccagaaagtgcttctaatgtaaagttaatctggtaaggaagttcatataagaaaattggaaccaatagaaggaaaagacaggtgagaaagcttaatgtgattttaagaaatttggaaattggctattgagaaggtaaaaaaggagattcaaaaccaggaattgtagagaaatacaaaaagcaaagaaataataactggcaagaaagagaagaagcactctgcctaacaattcactattactccagacggccttaaatgccttaaatgcctctaaatagctacttgaagtttgattttctttttgtatttatcttgttccaaaacacatgcccaactctaatatatgaaatttgtagcgacaaaattagactcaatctagatggtccaatttacactacgtcagtctcaaatagggaatgtaacttctaacatcttatgtcatatgctttgatcttttgttcagaacaaaatttgagatacaattcaagaaaatttgcacaaaataattattcatcggccccctttcttttctttttctctaccctcttaatatctggctatttgctctcagcagaaaaagacattgcttttatattgatatacgagacggatgcaaatgcatctctgacctccattgtttactatctaagattcccaagatatgtgatatcactagagaattacaatcaactaaccaagtgaacaattacgagtagtactcactgtagaaataaaaagattgtttcttcaatacaattcacaccaaacaattcgattagaccctacaaacagaaattatttttcttgacgaaacacaaattgatgtcatgaagaagtttgatacctttcatttggtcaaccacaaagcagggtgcattttaattacacctagttccttattggtaatggtctacaatgaaagggtagtctcttgttttttcttttttttgttctaatcttctatttccttgttgggttagattttatagaagatcagctaacattcatttagtgccatgttagaaagaaaaaaaatcagagtataaagtatacacattccataaaatagagaaattggccaactttgtgtctcatagataaggtatatgcttttctaagctaaaagaaattcaaatttcatttatttattttttttcactaatggagaacaaagtgcatttctatgagtacaagcatgcttaaattacttgctttaagagatacaaaattgaaaactagtttatcatgtcaagctatccaattctaaatcaaataaaaagacaaacaataagttacaaagttaagatactaaaattctagataagaagatcgaatatctaagtctccaaactcagttctgtagagtgacatttttccagcattgaaaactctagtaaaaacaaataataataattatcattagaagaaacagactgtaatcaagagagagacagtgagaacaagaagtaaacacaaatcctactaaaaatgctcagcagataaaatatttaatgcagaagaaagaacaaacctgaagatgattataaatagaaggaacagataaaaaccgagcttgataagtctaaacttcttctcaccacttaaagccctaaacacttcagtaacatcaatgagatgccttttgtttacaaacctgaataaataatcaattggttatgatagtaaagagaaaactaaaaaaaaaagaaggaaaaagacaagcaattgcaaacatagacagaaattcaaatcaatcaattccatctgcataagattataacctcatatatagcaagtaatttattaaaaagcattgcatttaatttgaagatcagaattgctgtcaatcaaaattttaaatccatttagttattgatttatggaatatttttctcccaagcaagctcccaggcaacataggatttaaatgttccctttaaagcaattggctaaattcattaaaccaaatatactgttcaaaacgaaaagggttaaaactaataaaccatattttggcagatgtagaaggattttaaagtttccaaacacaaacatgaaagtacaacattgcactctatcatctatccataaccaacattgttgagaaggaaaaaagacttacagcattgcactatagcaagcaagggggagggtaatgagaaacaagagccagtgccatgtcaagaggaaaatagcacagagtagtccatggacaatgaattcagggacaatcaagaagttaattcgagaagatgattcaaaaggatttaaatagtctgcctccaaatctgataagatcaccagctaccaaaaacaaaagtagtagatacgcagtaagtacaaatttttgaagctacccatttctaaatattcatgtataaacctatatgctgtgtctaatgcttttaaaacctaaagcttcgagaataacatcatacttaaaaataaggcttcacattcattattaactgatatttattctcttttttaaatgttttgtttgatattgatcaagaattcatataaattcagagtatatatgagtacctgggattgtgattaatatttacaattttaaaaataaaaaatttcttctgtaaacattaccatatttctattgtatctcgtgattttttttccccttattttcactcaagatttcataattaacaacaatgaacaaaattttcagttctaatatagaaattctcgattaaggtcaccaaaaacacgtcactgacttcagtataactttttcactccaacattgatgaaacaacacgatacatcaaacataaataaacgaaatacacactcacatcatactcctgagtattttctcggcaaccaaacagtatcagtgaaaaataaaaaagagaaaaatcaaacgagaagatttacctgatagaaattggaggagaggagagccaaatcaaagaaaaaacagagtacccaaaagatcaaatcaaagctcatctttgagtaccaaagaaaatcagggtaggtttttgttcaatattttttaaatattcttaaatttatttctgggtaaactgaaggcgcttccttttgcaatcgcaaagttgacgatgaaggtgacgcctttactgaaatatggagtacagaatagatatgggcccaattttagtgggccgagaatc

SEQ ID NO: 262524 - DNA, 939 bp, Cannabis indica
aaggaatattttataaaaaaaaaattaatttctgaccttaaatttaaaaataagataaaataatcaaattttaaagaaaataagaaaagtggtaagcaaaacttgattttaacctattttcaaattcaaattacactaatatctaaaattaattttgaaaaatcaaattaatttatttctgataattagatttgaaatatgaaaaataaaatcaaaatacaaaactaaaaaaaaaatcggaagttaattacatgaaatagcatgaaaaatcgaagaaaacgaagaaaaattgcacgctgtacagatggtatgcattgcataccacccgcgcgcgcaaggagcccttgtttccacagcgcttggaggctgcaagtagcccttccgcgcgcgtgggagaggtgatcaccaccttgatttttctcgattttcaaaaattcataactaattcaaataaaatcgaaatcgagttctgtaaaaaaattaaattgcttaaaattttcaaaactatccaataaaaataatttcagaaacagacaatcaattatttttcccagaattcacaaacatcaatataacacactatgataccatccaaatcacaaacaaatcgttgtatttattttaccagttgtctataaacatcaatataacacactatgatactttatatgataacatcaatataacaactaccctgataacagttgttggaatttattttaccaggatcttagatctactcacaagtatgttgatttaacaacctaaatatgaacctctaaaacgataaacaaaacacataaaaagttaagaaaccttacagtgatggcagcggaataatgtgtctccttccactcagatctctaacccttgattcctatttgtcgtagagtataatcaagatctgagcccgaatgtccttcagatggatgtgatcct

SEQ ID NO: 262525 - DNA, 716 bp, Cannabis indica
tcataaagcaataattattattacattggaaattgatatctgttcatttggttggtgtacaaaattacattattttgtttcaaatttacaattttatgaaagctatttttataattttattttcatttataaaattggtatatactactctgttataattttttttttttgcagcacctctgttatagtattttaattatactaggtagaagttacgtgtcgatgcacgtaaatattagttctttatttttcttagatttctattaataaaggtgtgattatgtaaatgatttgtttttttttaaagtaatatttgtgttattatatttggttaatcaaatataattgtgtatagataagtattaacaatatatgaaaataatatttattatttacttagagaatttagaggaacaatatatgtgttttgtaaaatttaaagtaactattatgtcacgaaaattaaagaaaatgtgcgatcttaaaatagaaaaagaaattattaaataaagtcttaaaataaaaatatatttacaataaaatatttatataattacacgtaatttcataaatcatcatgtgaaagttaatagcatgtatgaaaattgaaccgaaaattaacaacacataatttcaaatgtatttctttacacctttctttttatgcaaaatatctagactcgattacttcaaagaaagaatcaggacaaaagaaa

SEQ ID NO: 262526 - DNA, 968 bp, Cannabis indica
tgaaatggaaaaaacttttcggagttgagtaaacagtcaacatatacaacaataaatattgttaacgaatagcctgtatatgaactgagtgatattaattgttttttaaaatgaattaatgtaagttgattgttttttaattcgctatgtatacatgatgttattattgtagtttttcattgtatatagtatattcataattaaataatttcattacaatatcaccaactcttatggtaggttattcaatatataattatatatatgatacacactattatttttaaaaggaataaaaaattattatatatatatactaattgaaagaaatcaaacatttaattaacttctgatgacttggggctttagattaaatacgcttaaagaaagtttgtaaacaattaatacgcttaaaggcaactagcttgtacctaactcgtctgcttaataaatttggacaagttttttagtaggtatataaatattggttgtattattcaacaaatattgcaaaaaaatacaaatagaggtgtcacttttgtttagtttttttattgtggggtattttcagtttttaaaaattatacaattttttattgacaaatgtataatatagagagcagtcatcagttttaggatttttttttttttaaatggttctataaataggattcgaataatttactataggcgcctatttttttttttttgttaattagattttttttcttctaaatttcgacatgtaataaattatgcctccaaatttgtaggcctttaaaaatctactcttaattattgagatggttggatttaaggattgttcattcatgttcaattatataaacacggtgattattcatatactaaatcatgtcccaaaactttaatatctactaaattctgccctcgaattttgacatgtacccagagttagtcctaaaatttagtggactatagggaaaaaa

SEQ ID NO: 262527 - DNA, 1597 bp, Cannabis indica
aggcaaagaaaagctagatcaaccatgaggtgacagtcttctccagcaatgtacatattgacctcactggcctgtgtgctgagttgccagaagttgttttgggctggctgtatttattgtgtattttgattttgtgttcaaatagttgtcggatatatttctttatcaatttttttttataacagggatcctcggaacatgctttttatgtcgttataatgtccgtttttagtattttattttagttaagtttttaatattatcacggtttttaataattaattattctactagtattaaactagtttataaaatcacacacgtggtgtccctatagattagggcattacaactagccactataatctccaaaaaatgcttgactttgtagtaaagaatatcatatgtcaatttggcttgccccacaagctagtgtcagacaatggtacacaattcgacagtgtcatgttcaaaaacttctgctcaagacatggtatcgtgaaaatcttctcatcggttgcccacactcaatcaaatgggtaggtagaggcagtaaactggattttgaaagatacattgaagaaaagattagaagaaacaaagaggaacaggccagagcaactacccgaagtcctatggtcatataggaaaacagaaagaatagcgatcggtgatacccccttcacctttgcatatggatatgatgtaataataccagtcgaaatagacccacactcccaccgaaggatgacatacgaccaagtcagcaatcaccaaatgataaacgagtccttgggcctattggaaggcagaagagaagcatctcgcattcgcctggttgcttaccaaagaaagttagctgagtactttattttaaaatttaaagaacaaagcttcaaagtaggggatataatcttaagaaaggtgctccctaacacaaaagactctgcaataggggtattgggtccaaactagaaagggccatacgaaataacagaggtcgtatccccaagcacatataagttggcgtgctacgacactaacatgaatctcatactaataccctgatactggaatagacaacaccttcgtaaatactatcagtaacagttacttttcaacaaaaagttgagcgattggtgtacccaattgccaacttataattttcttttagtttgcttattttagaattttatttggttattatttcttttcttctacaattttcttagtgtaaggcgtattgtctattatcgatgtaataaggtatgattgtccattttattcatcaataaaaattgtaaattatttttcatataacgacacaacttatatgattgttattgaattaactattgcattagctgaattgtcctctatggcgtgtgctacttggaatcatttcttaaattatttaatctcctctctcaccaactcaaatttttggcctaaatatgctatctagaaatgcaaagaacaactctttagttggatgtggtcttcaatgtcagaagcaatactttctatactttgcaaatttcaaaattagtaatgtttataattatgaaaaaataaataatattatcttattttgatg

SEQ ID NO: 262528 - DNA, 2001 bp, Cannabis indica
aagattgtagaccaggtgatatccctgtcattaaaggagataaattttatcttaagcaatgccctaaaggaagccttgaagttaaagaaatgcaacagattccctacacttcagttgtcaggagtctaatgtatgctcaagtttgtacgcatccagatatagcgtacattattggagtgttaggtagatacttaagcaatccaggaattgatcactaaaaggcatccaaaaaggttatgagatatttgaagagaataagagattacatgctcacatatagaaggtcagatcactttgaaatcattggatattctgactctaactttgcgggataccaagatagtaggagatcccctttaggctacatataccaagtttcttgtcgtaaaagaaagagtatagagtggacaatctgtatagaacacttaggtacaaatactacgattgcagacccccttactaagggtttgccacctaaggtctttcatgagtacattgctcgtataggtcttttagattatgaagatatctagattcagtgggagtttatttttattatcctttgtgttttttatttgtttcatgaaacatgtgtatttggatatttttctaattagaaattatattattcagtttatatcactttgtacatttaagttaaagttttgatctctataaagtaaggtaggaccaattaaaaattgatatgaatagatcaccatacacgtaattttcataccacattatcatgattgatctatgacatttgcctatgtcgatatatgtgactattgatgggtttagttgtgatttatataacaaaaactgctttgatcctatgttgatttagttaaaggatgagattgtacatgcctacagttgtgatgacaaagttatgagctccataagattaacatatttatatggatatatatttgggccagtgggagattgttaaaaatttatttatttacaattgtatatataaaatgtgttgggttataatgtaaatgagtcaaattttatgtggtctatttcagaataaattttatgacttaagggcatggttgtcatgattttaatatgtggatactataagaacaatttttaatttgatgagggaccaaattgaaaacaataaaaaagattaattattgttttcaattattaataaacaggtattgatcccaatttttcatcgcacctattcatattcctaagttcctatcatcaagaaaacaaaggctccaaagaattttgatgaaaaattagaagattatactattttaaaatcgattctatagattctgacacgcttccagtaatctttaattttatttttgattctcatgaactaattaagactaaattcagcattgttttgtgaaggacactgttacataggatagttgttgataactgtcctaactgtttttcagttagtctgttgtattctttctgttaagagttgttggttctgttgcttttggttggttcaggatcttgtatataaactctgtttttccacactcttgaataataatacaactctgttcttcttctctttctctcttaagattaaatactgacacggtatcaaagcttcaatcgtttatcaatggagaatccgattttagcaacaggtggagcatcaagattgaacaatgctaaaacacaaacaatcaacaagttcctctacctagatcatatcctatctcattcaaccattctctgtcaataaagctcgatgagcataattttcttccctggaaacaccaagttctagcctcaatcaaaggaagtaaactccaaaagtttcttgatgatacgcgtgcaccagcaaaattcctaacagaagccgatcaaagatcgaacattgtcaatccagagtttgaagaatgggaacaataagataatcttcttgtttcccggcttctatcctccatgtctgagaaaatgagatttatggttggaattttcttgttgggcacgtctccaatc

SEQ ID NO: 262529 - DNA, 1391 bp, Cannabis indica
gttattattgtatacttttccataaatagatagtgtcattatcaaagccactaacctagcttagtggtgagggaggggtgggaaaaagggagagtttaaactattaaactaatatatgattggaaaaaaccattacgctacactcaaaaaaaaataatgtcattatcataaaacaatattattatattaattagtttatgaaaaataagttattcttcaatataaatattagtatttctttagtattagtgtggatgatttgaaccttttctaaattaattaatggacgatagatatattttctatgtgatctatcatctaataattaaagcttaattctttttattgaagggattgattatatattatattagaatcatgagaatctgactaatcttggatctatcaatgagttcaaaatgcaaagagatccctctagatttgttatttacgtaaattacttattaaactatatacaacaagacaaaagctaaaaatatctttattcataaaataaagtaaatatgtttattttatgagtaattgaggacgaaatttctttatacatactttaatttttatacaattaatttattgtttttttagtaaaatattcttaagttaatttttcttctatcagttaaatattatcatttaatctagaacaattatatatatttatatttttacaaaagtaaaattttaaaattaatataataataattaaatgaatatttaatagtgatgttcagtttactttaaatttataaagaaaatgtagctaaatagaaatttcaattaaaaaataaataaaataaaaagaaattaatgtataaaatcaaaaaataaatgaattttgttgcaaataaacttttattttatttagaaaagaaaaaaaaatctctttcatgtatattaatagtaagagtagtaaatatgaatctgagccatctgaccaattagtagccttatatttgagctcaaactctggatcataaatttttccttaaattggacatggaattttgatttttgatgttaaaatttgaatatatctatttattaattttcaataaatttcttttgttttttagaaaaaaatatatatatattttcttgcttgtgccaaaaagagaggacaaagaaaagaaaaggcaaaggaaaatagagaaccacatattctggttctggtaaagaaaaaatcaacagacgatatttttgtgtatagggaaaaaaaaatcaagtaaagaaattacaaaatattccataaagggaagggtcaatggtgcaaatttagtaagaaaggaggggcaatcaatctaaacaaaaatttaatatcagacctcacacctccaaatatctctcttcccaacatgacgcacgtgaccact

SEQ ID NO: 262530 - DNA, 727 bp, Cannabis indica
atttatatatacaatacatttcagatttataataaatattaatcgaaatattaactacaaattttacagaaataaaaacatactttacacaaatgaaaatttgtgatctcttctccaagccaaaaatttgaaacctcttctacaatttctgaaaatataacacaaaaatttacattaaaaaacaaaaccaaaaaaaaaaaaaattagtaaaacatatattggtaaatataaatacctaaaatacttacatacttagtgatggaccggaggtggagacggagacgacagcggtggcggcgacgaagccggaggcggaaacggagaaagaaatgaaagggaaaaattgggggagggggtttgcttccgttttaagagaagaaaatgagaaaaaaaaataagaaaaaatgaaagggaagaaatgggggaaccaggtgtgggtgggtttgaatagaccaacattaccggggggtccgccgctaataatgggtcccgccggtactaatatgaaaaatattatttaattagtattagcggcggatccccgccggtattgatccgtcgctaattctaatttgactaaatgagcgggtattttcccgcatttattctatcagataaatactggcgggaatggtccgccgctaatactgataacccgcctgtattattatttttaaattatatttttaattttttaaaaaaaataaacactaataccggcggaccc

SEQ ID NO: 262531 - DNA, 1296 bp, Cannabis indica
ttatcgggattaaatcactttttggttgagatctacatttcgttctcaatttttcccaccttggtcgattttcgttggagcttcacacggactggttgttcaatctgtatttttgaaaataaaaattttagtttctatttttatttaattttcctttctaggatcaaaatataaattggtaccttaaaatacttactatagaaaaatcccattataatatacataattaaaaaaaaaaaaatcaaaattaaaattttctactagttaaaaacaatacgagggtgcatggtgtgggatgtactatataattttcttaaaatatttttatatatttatttttttctataaaaacaatttggttttaattttaatgcttatatattcaattattcttcaaactagtctgggtctgagtttggagtttgggttaggtgtttgaagttcggggtccagaggctaagtctgagtagggtttgagattcggggtattggaccgagccaggtcaaagtcaacttcgggacctaggccaagttctggtgatccaagttcagggtctgggtcaatgtccaattccaaattattataatagtagaaaatacaaataaagtataattaaaaaaaaaatacactgtttaaataaactttgaaattgactttattaattgtttttaaaattttcaaaatttgtttttcaattttaaattaaaattaaatagatacattgtttttttaaaatgtttctactttttaaattgataacatacattatttcattattcagttagtctaggtgaggaattgatcatccaaaactttttttagaaaagcagatatgttgtgtcatgtgatgtggtaccactttaggacggctattttattaattaagcctattagaactgatagaataataacattctttaaaaatactaaaatgatctacattatttaaaaatataatttttttattttttttttctacattaactttgactattttacttctaaagacactctaataactattataaatatattagttatttaaattataaattatataactttttttgctttactttttattaaaaaaaatgataacttcaatgtcaatgtaagaattaatacaaattcttagaataatatttatttctttctaatagtatagcaccttcatattttgtcaactaacatgtttactttagcgagtattctccaaaatttcatctttcaatatgcttattaagaagaagaacgaaggtaaggtggaggtcaattaactatgttacgtatgtaga

SEQ ID NO: 262532 - DNA, 595 bp, Cannabis indica
tgcattccgtactcggtatggacattatgaattccttgtgatgtcttttggacccaccaatgctccggcgacattcatggatctgatgaatcgggtgttcaaagattacctggatagatgtgtgatcctatttattaatgatattttggtgtactctgagtcagaagaagagcatgagttgcatctcagagcggttttgcaacgattgcgggactataagctttatgctaaatttaaaaagtgtgaattctggttatctcgtgtctccttcttggggcacagtagataaggatgggatcatggtggatccggctaaaattgaagctgttcgggattggccaacaccaaaatcagctactgaggttagaagttttctaggtttagttgggtactatcatctgttcgttgacggtttttcaaagattgtcgtacccttaacggaactgacctgaaagaacttgaagtttgtttggactgatcggtgtgagaaaagtttcctagagttgaagcagcgcttgactaccgctccagtactaactcttccttcagataaggaaaagtatgtgatctattgtgatgcctctagacagggtct

SEQ ID NO: 262533 - DNA, 1015 bp, Cannabis indica
actaatctaactctaactttaagttgcctatagtaagcatatacaagtaggagattttctaagatcgaggatttatatcatttcatgatagaatgtcgggaatatagtaatctacgccattcaatttcatggaagaaaatagaataatgacatcatgggcaaatgatttataaactattcctctaatgatatactatttaagtaaattctaaatgaaaaagctaagaggaaactaataaaggataattttgattaaaataagtatccaacgatatcccgtttaggcgagagtcaaagttatttttattttataaatatcttcattgtttcatattgtaaacactaatctaagttgtcatctttggatgaacaactagatgttacatttacaaatacttatctgtcaagatctaaaactattatgtttgtctaacggatgataatcctttgggatttgtcccattaaaaacaacaagctaagttagaccaaaaatgaagattcgaaattatactacaattaataacaaaaaacaacatggttcaatataaattcatacacattcagaaattatcaaatatttagcaagtaagaaagacatatgaaaatacaaaatagatatatcttaaataatttccaaggtttccaacaaactaatacagttctccattttgagttaagagtcaaatatatcattcattgaatagagtagtcgactcatctaaaatggaagccattctagcaaccttttattctattgaaatgagaatctgacgttgcttcgttttagtcgagatcaagctcattcttatttcatgagcttccaccattgtttcatactttgtaagtcttactcttagcagccactattcggatggacgttactaagaataaaacacttacaataatacttatcttttgaaattctacaacgttaaattactaatgaacgtccatctaatggggatgagtatcactaaaacaagaactgtgtagaactaacaatggagatcgaat

SEQ ID NO: 262534 - DNA, 942 bp, Cannabis indica
aatctatccttgttagcatcaacttataacttgaattcaataacaaatttcattaacattgaccaaccatagcaactgcttcagagcaatacaaactctacaagcaagtattattcatatcaataatcatatgcttatctttcctatcatatatatcacacgtacagacataattttagataacataacagaatgggcttaatctaaagcttatgcatacaaaactattctttcaaacaataatgtcaacaaaaattaaggtcttaaggtgttaataaagctagagactaaaaatgggtctttgaattctgcaagtaccaaactttcttcatcaaacaataaaattcaacactttcttaaagttgatctcatgatggtaagtgaagagctaagtagtagaggcgttaataatgagtttttcaagagataaatttaaattaaagctgaggagctcagctatgtaaatcaaaaactatactaacaaatcaataaataacagaatctaaagaatcaaaatcagaagaaaagaaatagacaaaaagtaacccatacctgcgtccaccggagccaccacctgcgaaccagcagtaaccctcccgttcgtctctacgtcgccggcccccgcgtttgtcctgtagcagctcccggcgttctcccgcgtttctccctggtttttctaatttatgattttttttttatgggtttgaaagtgaaaataagcaaggttttttcttcctttttttatcacttcaaattagttttttgtttttttacataaattcacataaaaattagcaatttaaattacatctaaaataactaacagaacaatacaaatgataaaaattaaaaaataatacagagtaattccccaattaataattacttagaaatttttacatgaaaaatcctttttactcactttattacataattaccctc

SEQ ID NO: 262535 - DNA, 1443 bp, Cannabis indica
gttgttagagaatatttgaaaaaattcaaaaacctaaaaaaatctccaaaatatcctaaattctaacataaattaaaatatctaaccaatttttcaaatttcaagtttattcaaaaaatttaaattaattaaatttctaataagaaaatataatataatatcttgaattttaaaatttagatattcctaatattatattcttaatcttataatttaataaattaaatattacaaaataaacaatttgaaaaaataagatattttatggttagaataataccaattttattaaaataaaaataaaataagtttgaaaaattttatggttagaaaacctaaaatttctattcaaacctaaacttaccaatttttcaaatttcatgtttttttgccaaaaattaattttattaaaaaaaaatatctaataagataaaatgtcaaaactaacatttttcaaatcttatactttaatttaataaaatatatttcaaaaataacaaattttgaaaatatgatatggttagcaaattttgaaatttaaactagattatttctaaaatttattaatattttaatatcaaaataagatcattttaaattttaataataaaataagtaatatctgatcttttaattaaaataaataaaataatcaaaaattacaaaattaaccataaggctatttttgtgaaaaaaacaaattttcaaattcaaaaggctactaatatctaaaactaattttaaataaataaaaaaattaataaaaattaattttattctaatgattagatttttaattgaaaatttagataccaaaatttgaattttgtttcattgaaaagtaatttttgaatcaaaagatatgatgaaaacaattttggtgcacatgggtatgcattgcatacccctgcgcgcgcggatgaagggggctgaccaagacagaggactgcacgcagcctcaatggctaagggaactcagcatgacacggtttcagacagtccgtgtccgagtttcctcggccaggatgtttgaaaccgcgtggatgatgagtgaatcaccttgtgcgcgcgctcgtgtgtgcatccagtttcagatattttcatccaaattcaaaaaatcataactaacataaaaaaattaaattcagttctgtacaagcctaaattcattaattttttgtcttctttccattaaaaatatttccagaacgaaacaaaaaatattttacaacatacgttgcgatttccatacaatcatcaaataatcacataaactatcatgaaaccttccaaatcaacacagacatcgttttaaatccatatttcatgaaagtacatcattaccatggctctgaggccagttgttggaatatgttttaccaggatctacatttactaccatgtatgttatttaacatcctaaatatgaatttctaaagtaat

SEQ ID NO: 262536 - DNA, 785 bp, Cannabis indica
tagagaaaatagcataaataaaaataaaataacaattaaaattgagactagagaaactagttaaaggtaatttgtcaccctcaataatcattcctaattcctattaatgaatataatttcaatttccagtcaattatctcaatctccctattgcatgtaatcaaggcgaagcgcttaataattaactcctttacctaagcagtaaatccacgaagcatgcaatttatttaacttagataaagctttaagatttatggagatagatcaatctaggcaataaatcaataaagcatacaatttatgtagcctaggttctattcttcatcacaattaaaaatacctttgacaatattaaaaattgcaatttatcgaaaacacttagaatcctagactattaggtgaatagtaatcctaagattatggtagcttaaagtaaaacttaatttagtggccatctaaacagtaaacaagattaaaccaataatcctgacattgaacatagaagaatataagcaatttgatataatagaaactagaaattaacattcaataatgaaattaagaattcatgtctcgggctttgaaataacccttaactaaaagaaaattacttagaactagacattataatgataatcataataaatagtaagattttaaggagagaaaaaaaactatgatgaagaacacttcgaagccgctatctccgtctcttccttgctctttctctaagcttctatctcaatttggtagctctagggttctgaaattcgtagcctaaaaat

SEQ ID NO: 262537 - DNA, 1351 bp, Cannabis indica
tctgtgatgagacaagcatgtttgcctacaatctaatcggtcgaatgatgaaggagtttgaacaaagggaggtctggatatggattggttcagtacttgtatctcagaggtggttgtgcagaacatgaagaagaagattctcaaggtatcttccattgctaattattctttatctattattattattattattattattattattatgggaactaaccttgatctattgttttagattgcaattcttcttccccattaggggcacaacctagttatcaaggcaaaaaaggaatgcattcacggaaagaatctgatggggcaaccattgttagagtgactgaggagcttctaccttcttttcccaagaggtataaaattttcaatgcttcacttagctttgtttgaatacttgaacaatttatatatttgtaacatcactaatggttttatgtatcatgaaagcataattttaatcatgaaaagttcatatttccattgcaatgaatccaattgcatatgcatgttaataactgtcttcttgtctactaatgcagtgtaatggaaaaaaagttaagacagttgctggacctatgattatcttttaatcttgaagtagacatcattagtgggtgtgtattctcgggtaatcttggccgttgtgaatattctttcgcctccatccatcatcatcgtcgtcatcatcatcaaatttttcactgtttagagttgcaagtcgagaaatgagttgatgatcatcgccattacaggacagggatggtaaccatttttgtatttgaggttacctatccaaattttgagtacttacacttagcattttttcttattgtatacattaagtgattaacttgagtcaactttaagtcaaatatatgagtgcatttattatgtagttagactaatcattacaaattaagattagtggcgatgatggctaatgtaaagagaatgaagtttattatgagtaaaatgcattaacattatttattataaaaatcatcacatttcgttgaaaattcaaaagtggtatgctaccaacatattattatttgacttcaactttcttctttttctttcttattcttcctttcgtttctcaatttcgagtaagagcatttctagaacagtttttagattttggtagtgttataattttaggggttaatattttagatcttgtattttttaaaacagtacaatatagtatttcgaactcaatttttaatataaccaacttgtagataatttttaccacgaatagatgtagaaaatgtacttagttttatcataattagatcgaattattattattaatttttattttgacaaaaaa

SEQ ID NO: 262538 - DNA, 665 bp, Cannabis indica
caattgataacttttataaaacagagagtccaaaatggtatttaccatttcttttcacttctctcccttctctgccaaacatagtgttaaattttatacacacatgattaaggataaaattttaaaaaggtaatcttatttttcacttaatctaatcaagtaatattagagatgtctctttacaatttttgttttttatttaaataccataatatattttaatcatttagtgacacactaacacctcattaatgatgacagtaaatatgtgatgtggaaaaaatgaaaaaagacagaaagaaaagaaacacatcaatttttttatataatttttgagtttggaattttttgattaaattcactatagagtattattttaataaatctctcttatacaatacatacattcatcttcatcccttagtattttttcttatataatattcattagagatgttccttgcagaattaaaatacttaaaattgtcttaaaagattatgattttatgtataataataatttcatgtggggacaaaaatgacagagaaagtgacctatagtttgtccgtacatattatgtataataatactagtacttaccaaagtggtagggtatgctactattctaattttagaatgccatttttatataaaaaataaataa

SEQ ID NO: 262539 - DNA, 658 bp, Cannabis indica
ttttgattgcctgattaccaattaagtgtttatgattttgatgcaagatttgagaagtgagtgtcaattatgcaatagtgaaatagaaccgaatttcaatgtaggacaatagtacctatattgtttggatagcctatagggtttctgtgtttaatgcctgttacatgtttaatttatcacgagagtagaaaatttacatgtaattgaggtggtttatatatctaagaagactataaattacctgagtaaaccttttattgcatagaaatttgtaataggaagataatcatcttaaaccataatcaatagatgcaattgaaattgaatgccctaacttttatttgttgttaattcctgtattaatttacctacttctcactttcacagtttttcttgttttttgtatttaaattttcttcttaaaattttgatttagccaaatagatgtaagaatttaattttaacgtacttaactacaatcctcatgggatcaacctcactctctgcacaacaagttttggcgctattgttcggggatttttaggtttatttagtattaaaaattaaaatttttgttcttaatttagtttttctttttctaactttagttactaattctgttggtttccgaaacttattatcttttttctttctagga

SEQ ID NO: 262540 - DNA, 833 bp, Cannabis indica
tgagatactacttgattgcgtacacttgcgtaataaccataaaatttcgtaacagggatttatataataaattatttataattattaattgttaaaagaggttttgttaaatatataattaattattttaagaaaataattaattataattaattgattctaaaaaaggaagttttacctattggtaacctactattataggtaaaaaaaaaaatataatcatgatggttacaataaaaatgtagccattgaatagtcacccatatatatacatatttctttcctattaaccctattcactatttcctttacatttccaatctcttttttttttttgaaggaaaatcttattaataacaaagaaacaagactacatcaagttgggcaagtcagccttacaaaaaataattaaccagctaggaaaaatatgagaaaagaattgagaagtttttgttgctaaacatctcttagtcaacatatttgcacattcattattttctctatgtacatgaacaatattagagccctgaaattcttccattctagccttgatctggtgtaggatagtgctaatcgcactaaagttgttgtcttgtttctgcaactcagtcaccactttcttgcaatccgactggatttcgatgtgagttgctgctgtggttagtgtcctcttgagcgcttccaggatcgcccatgcttcagccatttcgatagagcatttactcgggcaccataccagcaagcagaatctccccctgccagttgcgcaaaatgaagcctaatcccacacctgtcgattcctggttcatcgcagcatcacaattgacacagtg

SEQ ID NO: 262541 - DNA, 453 bp, Cannabis indica
cgttctcatttcaactataagatattttcccgcatttcaaaattgttgactgccattgtattagtgaaatcagcttcactcctctctgtaactgatgttgatggcatattccccttttaaacccaagttttctttgtaggcttcctacattattctttctcatggccatatcctgtccaaattaaacagaatgatggtttccattcataaagaacatcaatcgaaacaagctcacctacttcattcttaaaatctatattattagggaactcctaatttacgtccacctcaactaagattttggcatagagaagtttatctcgatttgtcgtggctccattctgatgtagcaattctccaattatatcgacaatcttcgccatatcacgtgtaccacatcatttaacatccaacccgtgaagttgctcttgcattttgtgccctaaataaaac

SEQ ID NO: 262542 - DNA, 528 bp, Cannabis indica
aaataacaaaataacaagataacttttaatccaaaaggatcacaagtaccaaaaacacaactccccctggaaaaagggtccagagttgagacaacaagcagttaaaaacaaattattactccccctttgtttatctaagggccaaagacaaaagaaaacatgaaaatatagacatatgtccaacaaaaacataaaaaagaaagagaaacttatgccccatagagcttgatcaaagaggacacctacttgaacatctcttgctgaacatcctccatggcagcaagacgattgttcacttgttggacctcatgcttgacctcctggacatctgcaggagcagaacttgagcttgcaccagcagcagcagcagcacaagctttaggatgcttgggaaaagctccatcaaaatactccgagggttggaatgtggtgccagtaaggggaggctcaagagtttcatgagagtacgccacatctttctgagaggacaaaattttatagattaagttaggaaacacaagcttatga

SEQ ID NO: 262543 - DNA, 893 bp, Cannabis indica
ttatgaacttggagagacggctgacaatctcctactggcgttccacatgtcccaggtcgtgcccccatacttttctcagtttcctcaggttgcttcacctcagagttctgggaatgtctttgggttgtctcctgccccttggtttctgagttgcgaggtttgcctcgtgaatctctgtttccaaggtcaggtagattttggaaaccattctcttgtgtcgccctgattgcggctatttcacactctagtttggcattacgccgatttacttcctcaaatcggcatctaagatgacagttttctaactcaacgataggtatgtacctggttttgtaacgccctaaataattatgcacgctacccaagatacttaagcaaccctaatcccctaaacgagattactaataaaattagcacggaaattaaactttaaatagaaatggaatgaaaataaacttgtaataataattttagctttacaaagtaagagttacaaaagttgggatcccaaaaatatttttacaaaacattattacaagtccaatctactggtcgaccgagcaggaaaacatagtcacaaaaaacatcacttgtagactccaacccgcttggtctagtgttgcccgaacatgtacattcgtcgtccagctcccatactcatggctgatcagaaacagcttttccctttcctgcacagtagagaacccgcgagacaagtccagcaagacagtatcaataacatgtttatcacactataataacattaatggtattcttatatgcctatgtgacacagacctgcatgttacgctcacatgcctatttatgccggcgtaatgtaggcctacgtgttgcgctcacacgtctaaatacaataaggcctttgaatggtt

SEQ ID NO: 262544 - DNA, 571 bp, Cannabis indica
gtgtcacgtgtaaaaaagtgtacacataactagtccatagtggtagttgaccggatgataccttaaatttactaacagtttgatagtttggagggttttactgccaaaatttgagcttgaaaggttaagtgtaagtgaaacaatagttaagagagtttaaccaccaaaaactcttcaataattagatttgaattcaaaattcatataactgttgagagattgatcgtattgataaaactttatcaatcaaaattgagtttaggaaaatatgtatgattttaaaatatagggtaccaaataagtattattaaaaatacaagataccaaacctgtatttagataaaacacaagtaggggtgttcatccaatccaatccgtactattttactcatagtgcatccgatccgcactaagtacggattccatattttggatttaatccaatctgcataatagctcaaatccaatccaatccaatccgcaaaagtacgaattggatcggttattttagattggtcactttttaatattaaattatttaatatttataaaaaatatatatttttttttc

SEQ ID NO: 262545 - DNA, 2104 bp, Cannabis indica
actccacaacctgtcataattcattctacttcatggtccacttttcccactcattacccttctccatcatcaaacctagtcgattcttcttcaactgatacatcgcgtgaagcctctcctgcagtatcctctagcagcccccgtgctcactcttcaactgttcattttgactcacctagttctgttttaggtcctgacagggacaatgatcaatatgcccatgacctgcaacatgaacacagcctgcaacaaccagtttcaggctgtgttgagcctactggtactaaaactggtcaagacatacctgctgaacacaatgttccattcccttcacaccctatgatcactagaggtaaagccggtatattcaagcctcgaacatttgtgagtcaagtgcaatccgaatctgccattacagaaccggttagtgttgctgaagctatcaaacatccaggctggtttaaagcaatgaatgtggagttgtatgctctcaaatctaaaggaacatggatccttgtacctccttcagatgcatacaacttagttggaaataaatgggtatataaaatcaagttcaatgtcgatggtattgtaaatcgtctcaaggccagacttgttgcaaagggattccaccaaaggcctgaaatcaattacgatgagaccttcagccccgttatcaaggttgctaccgtgcgaattattttgactattgttgtatctagaggatgagaaataaggcaacttgacattaacaacgcctttctaaacggtgaattggaaaaagaagtttacatggttcaaccccaagggtttgaagagaaagggaaggaaaactttgtctgtaagctggaaaagtcaatttatggcttgaaacaagctccaagagcttggtttgacaaactaaaagagactttgacagcttggaatttcaacaattcaagggctgatacatcattgttcttctacaaagatgaaaaggtaattatacttgacttgatctatgtcgatgacattattattacgagaaatgacaaaagcaagctgcataatttcattgttgaactgaacaataagttcaccttgaaagatattggacctctgcaatactttcttggcattgaggcttaccgtaatgcatcaagtctttacttgacacaaactaaatacatagaatatattctaagaagagtaaacatggccaagataaagatctatccaacaccgatgactgttggcaaacctttgtcactcactgatgggaagcaaatggaaaatcctactctttacaggagcaccgttggtgcaatccaatatttttgtcacacacggcctgatattgcctacggcgtgaacaaattgagtcatttcttgcaaactctaactgacactcattggagtgtagtgaaacgcgtgttacggtactttcagggtaccaaaataaaaggccttcgcatcagctgtagtgacagacttagcattactgggttctcggatgccgattgggcttgctgtcctgatgacagaagatttattgcaagttattgtgtttatttgggtgacactcttgtgtcatggtcatcgaagaagcaagtcgttgtttcaagatcgagcactgaatcggaatatcgtgctttagctcatgtagctactgaaatatcatgggttgagtcactgctgaatgaacttcattttcctttcccaagtccatctgtgacatggtgtgacaacctcagtgccagtgctcttgccgcgaatcccgtcattccatgctcgaactaaacacatcgaaattgatgcgcactatgttcgtgataaagtactgcagaaacggcttgagattcgatacattccctcacatgatcaaattgtcgactgcttgactaaaggcttatctccttctcattttccttccttgttgagaaactcggcgtgaggaacacaccctttcatttgagaggggatgtcaaggaatagcatttctgcatcagtattcctacaccaacaatatacattgcagccatacaattcagttgtcccctttttgtaaccgaatttgtgtattttcaattgtgtaatttgttttgtgtgaattctgttatgcctt

SEQ ID NO: 262546 - DNA, 1029 bp, Cannabis indica
taggcctgacggaccgagacctctcacccagtggttcccaactcacagggtttaatggaacgacgcttatcccaatgggaaaagtgagacttccagtcaccttgtgtccggacacccccagagcacattcaagtactgcacttttgtggtggtggactgcccgaccgcttacaacgcgatcctcggccgaccggccttggtagattttggcgcagtcacgtccattcggcacctgtgcttaaagttccctacccaggaagctggaatcgggacggtgagaggaaaccagggggaagcaaggcaatgttacaatgttgcaacccacctgcccgtgctgatggtccgggaaaccattgagccagaaatggctgaagaagatgagttggatccccgggtggggtccgaaaaaattgtggaaccaatggaggatgtcgaggaaatatcagtgtgcgacctcgactccaccaaagtactccggctgggaaagagcctagatccggaggaaaaagaaaaataataaaaacactgaagggcgccatcgacatttttgcatggcgccaagaggacatgactggcataagtccccacgtcatcacccacgtcctcaacgtcaatccggacatgccaccagtccaacaaaagcgacgccctctcgactcggtgaaagccgaggctctagagaaagaggtggataagcttctgaccaacggcatgatccgcgacgtatactatccggaatggctagccaatccggtcctggtgcccaagccgaacggaacttggcgagtttgtatagatttcactgatctaaacaaagcttgtccgaaggactgcttcccgctacccaggatcgaccagatggtagacgccacttctggattcaaattactatccttcatggacgcctatgccgggtataaccaaataaagatgcacacggcagaccaagagtgcactagcttcaggaccgataagggggtatactgctacctagtcatgccttcaaacaagtgcatccccttcttcaac

SEQ ID NO: 262547 - DNA, 954 bp, Cannabis indica
aataataataataataatctgaatgtgactatttaacgaaaatggttggtttaacgatttttttttcacgttttccgttaactttaacggttaaaactaacatcgttaatcaatcaattaattatatttattattattatttaaattaacaattaggtaatatcaagtctaagcaaacatgcactgcatgctagtaaaacttagtatttatattatatggaacatttttttatgggtattacccattgatgattattgaaaaatttaactatgaatatattaattttaaaaatattaaaccattagattttgatctaatagcgaataagaaaaaaatttaaatttttaatatttacccttttttttaatttttttttaaaaaaaaatctcttttttacactatatcaataaaatgtttatacaaaagatatttaagtcaaatgtaacctttttttgccggaaaacttctttttttcttttttttttttcagccgattaacaaccccatcccatataataaaattcagagatttttttaattagatagaaaaattaagaataatgtttactaagattttgtaaagtcaaaataataaattatgaactaagaaaaaaaattaaaaagatgaaaaggagatgggaatttttacgttatttgggtgttaatgaaccctagtccataaggcaattatattaggctagataaccttaaagtattacaatggtgttctttacaagcttaagaaccctagcttttagctatagtatttgattaatgagtttctctcctctggcatgaaggtatcatgtagtatttataggctagaatctatgtatgaatatactcgcgacctgctagggtatgcgtgtaacatggaccactaatgggataacactacttcaaatattaattggctttagcgttagttttgatgtcgataaatctataaaact

SEQ ID NO: 262548 - DNA, 1839 bp, Cannabis indica
taaaacctttctctctcaaagaatcagagctgcgatgtttagtattcctaatactaaatctccaggccctgatggatttagcttgggggttttttaagtcggtttggcctgaggtggggaaggatatccatattgctattgcccatttctttaataccaatcgattccctgaagagcttcataagtaaggcactctctcttattccaaaggctgattgtccttctaaagctgttgactaccgtcctattgcctggtgcacaacattatacaaatgtgtttcgaagctgatgtgttctcggctggctaatgatctctcgaatttagtgagtcagaaccagggtgcttttgtcaagggtcgttctattgcctacaatattctaattcttcagtattgaagaattataaaaggaaaaactgctccccaagatgcacctaaaaattgatataagtaaagcttacgagacggacaattgggattttcttgagaagcttctggtggcctattgttttcctgccaagtttgtcaagtggatcatgaactatgtgagaaacacttcttactctctgctcttgaatggtagattccaggggacttttaagggtgagcaggggcaaagacaaggagatcccatatccccacttctctttttattgtcatggagtatttgtctcgaagaatccaaaaggcgagtagagataagagtttcaggtatcatcccttatttaaaaaatttaaactcactaatgtttgttttgtggatgacttagttattttttgcaaagggaatgaggagtcaattcctgcaatcaaggatgtgctagatgaatttagcatgactttgggtctttctattaattttatgaaatctcaagtctttttaggtggtgttactcagctgatttctcttgcccagaagataaatctttctataggagagttccctctaaagtatttagggatccccctcagaccaacaaaatagagacttgaggattgtggttctattttgaagaaaatgaagcttaggctccactcttgggataataagcacttattctatgctggccgaattcaattaatccaatctactttgattggattaaggaattattggatgagagtctttcttctacctcaaagcgtgataaaagagattgagaagttatgtcgaggcttcctttggggtttgaaagaaaatcgaacaagagttcacttgataagttgggagagagtttgtcttcctaaagcttttggtggtcttgggtttaaggatggtactaagtggaacaaagcttcgttagcaagattcatttgggacttaatatataaaaaaagatttgctttgagttacgtggataaacttggtttatctcaaaggaagtgatttccggtcttataacttgaggatggacacgagttggtactggagaaagctttgtaggcagcgtacaacttacaaccaagctgatataatagtggctggcacagcggggaaaattttaaagttgttaaattgtatcacaatatgctgcaccaggttgctaaaccggctgctggtgcaatctagtgtgggttgaacatgccgaagcatgcatttcagctttggcaagctgctcagtctaggttactcatgagggatatgttgtgccgtttgaacatacttgtccccaataagaattgtgtggctgaaaccgagagccaccaacatgttcttttctgctgcaacttgtctaaacaagtgctgaaagctctctttcaatggttggggtttgaaggctggtccaataactttgctagctagaatacttggttgtgcaacaccaggtcgaacattatt

SEQ ID NO: 262549 - DNA, 876 bp, Cannabis indica
cagggggcaaaaatcctaattacccttattattattatttttaaaattacaaatcaaattaactatttggtaacatttttgttttctaattttttaatcacaaaatgaaagtaaaatttttgtttttaaaaattttgtttttgaaaacaaaaaagcgttctgtaaccactttatttttcaattttaaaaacagaaaacaaaagtgttctgtaaagtttatttctatttttattttttgattttatttaagtcaggtctaagttttgggtcgaattcaggttcgggtcagaggtcgggttcagggctagggccgtggggggaggatttgggttcgggtctcgtcggagtctaaaatattgattaagaaaaaaagttgtttaaaaaaatattgaaagtgactttttttgtttttaaaattttgattctcaattaaaaaattaaaaagtaaaaacagttttatagacaatgtttttaaaaagtatttttactttttcaattttaaaaatagaaaactgattaaaaaagtgttaccaaacgccacctaaactttaaacaattaaataattaataacatagaaataataaccagaaaaaaaaatagagtatgaataactaaaaaataattaaagcattaaaaaataaaaataacactaaaataaatattggttcaagttgaatagatcgatgtgatttatagttctactctagtttttaaacaccaccaaattttcttcattgattgagcaagaacaagcacaatacagtcgagatcgattctctgatgagttctctcaatgtgtttcaactctcacagttttacccaaaagtcttcttcaacaacgaaagattcttcttacgaaattctctctctctctc

SEQ ID NO: 262550 - DNA, 772 bp, Cannabis indica
gccgactgcatcgatggaggttccttcatcctctccgtttgtgacgtgcggctgaaagtaaggacaagtggtatttttgtaatattttcattttgggttgtacaaatgttcattgggccggcccacaatattgttgtaatatttttccctttttagaatattcctgtttttttccctaaaaaattagatattttttatataaggtgtaactttgaagcataaaaattcatatttaagtttcgattaccatttgaaattcttagagatctctttatagttttattacttttttagggagaggatatctttattgttatatatagtgagcctcttgctttttcaaagttgcattatttgtataaatagtttcgagtacattctattattctaagaagaaaggcaagattagactgatgtaaattggttgttccttttctattagtagcagtatacaaatgagtaataattgattggtggtataggacaaatattatagacaaaaggcataaatatcataatattactaaaaaatatcatgtatcactagtcttttaaagtccttaataatatagaaaatatatgtgctacaaaatatcgcaacagcaagaagctcttgcctctgatttcattattaatgtccaaaatatctagctcaaattactctttcaaaacttcatcatctttatctctatatattaaagatttagatatggtttttttttttttttttttgtgtacacatatcaacgctacaaaaaactgttacttttag

SEQ ID NO: 262551 - DNA, 716 bp, Cannabis indica
acttggtcccaagtgtattattgatagaggttctactgtatatatcatggccaatcttgaatgtcaaggaaaagttattgtataattctctagaaatagaaggtgtccctttctcttatgaaatttacttgagtaatttgcagcatcaatacttaagtttaaattttagttgtaaataaatatataaatttaattttttgcggtaataatacataagttataattttaaaacttttgtaagtacatggttaagtaaattgtcacgtggcaatctctaatcggtccaagtcattaaaaaaatttagttcaaagatactaataagaaaataacacgtggatttaatggcttaacatttaacggttaagtacctacatagttccagaattataacttaaatattattacggtaaaaaattaaagttaagtaattatacagcaaattactcaatttactttgaaaatctattgttgttgttgttcgtgctttactatggtttgcctcttctaaatattattttccttactttcaatgtttggttttcttcttttcttttctttttctccatatttcgctagtgacaaaatactttgtggacctaaactaattcaattttttctcatcaaacttttttttttaaaatagtaacaattatatcaaaaaaaaattacataatagataaaaatttaaaaaaaaatacaaaaatacatcaataca

SEQ ID NO: 262552 - DNA, 748 bp, Cannabis indica
tcaattctccattcagaacaacagttttaacaatcatttgatgcaactctgaatcaaaataagcaactaaatccataataattcttaatgaatctttagtgaaaataagtgagaaagttcaaatgtaatcaatacactctttgagtaaagccttttgtcactaaacgtgatttatacctttcaatctgtcttattttatccttttagttcttaaaaatccatttgcaacctattggtttgaaaccatcaggtaatagaattaacttccatacattattttgtccataaatttaatctcatcatccatagcttttatccattttgaagaatgtggactattaagtgcttcactataagtgacaggatccacaaaatgatcaatatcatattctccttctccaaggtaagtaaaattatcatgactctttgttgacttcttttgtctttgagatctccatagaggaggtacttctagaataacctctatttgttgatcatcattttaaatgacatattttacaattggatttctccgataacaagacccttatcaacaacaaaaccttcttcaataataggaccctcgtcatcttagatagtaggagcaatatattcatcagcaatgggagcgttatcaactagagtaagaataagactgctattattatcatctcttgaaaaagacataggaataaaaattcctttagatgactcccccatttcaagagatggtgaatgaatattttca

SEQ ID NO: 262553 - DNA, 584 bp, Cannabis indica
atgcagttcaacgatcttttatatctattgaactctagattatattcataactccacaagatctctataacaattaggggtggaaaaagctattgacatatgtagtttattttgaagtctagaatatactcaatacaccacagtatctctataactcacatattttgattagacatggatgtaagataataaacaaattagcaaattattagaacttattcttgatcttgttttttattccaattaatatgttactgtagtaatagaaattgataccaataatgttcttggacatagtatcacagtaccttatttgagtgggagaattttaaaattctaagccatctttatttggatgacacttgtgatagataactacgttatgatcataataggaactttagaatataactgagaaagtaaaactaacaaatcatatgcatagaaataacttatcagaatttgataagataggagaatttcgcaaagtctattcgaatgacttgggaaaaataccaaatcttcgtgaaattttttttggtatcttttaatgattacttaatcttcagcaactattttacatt

SEQ ID NO: 262554 - DNA, 1508 bp, Cannabis indica
aataacaataaaaataactacaaataaaaataaaaaaatcaaatctgacagattaattaaatatatatcataatatttttttttataataatcaaaatattaatggtatttaaatttatttattagtttgaaaaaatagtattcaaattaatataatagaagggaataatttaatcccataattttttaagttatcaacattaccctcttcaaaggtagttatattactaaaggaataacattgtaaggttaaatactcaaaacaaacaagataatattttacattaccatttccttgttagcattaaccccttccaaatagccccttatattgcttatgactaagagtcaatattttgtagtatcgagtttcttgttaagtgtgtaaaaatgtgttatatatattttaatttaaaattcttataggagttatagttgttggaaaatgagttttatactcattttattgagtccataatatttataggagattatgagttagaaattcaatttgtgatatcctaaatattatataaagaagtctaagacactgacgcaccacatagaaccgagagaggacaattgccccctaaaaaagggagaaaattgttcatgtattttgttagttacaatactgacatggtattagcttttgtgtaagctattttacatttatctttaaggttaagaattctaatcccaataatagcatttttatttgttaatatttaatgttcactttttagatctctaaaaaaaattttaagccaatattttattgttattttttttatattaaactatatttaatactataaaaatatttgtttgtatcaatttttaacgtgttatatcatgtagaaaataaagtacaactcttttttactaaaaaaaagtacgccctccctcaactaaaattctcggcctgccattggtgtaaggtgttcatattgagatgatgaagttttctatcaacaagcacttgcatgaaaatacaaagcttgataattcctaaagttattttctagagagttctattagtgcttagggataggaagaaataagcttttggacaaatgtgataatacctttgttatacccgaaatttagctggcacttcagaggatgacacacgtcaaccttagagaatacgaatcaacaaacataatggcaattatattaaaggatattaaaatagaataacttattaaatgcgggatcgatagagcatatttatagctcactgactgtaaagtctcaagcgagataaggatatacaaactattgctcatgcattgatgagaaactattctgcgtcagaagacacaatcataaggatggcatcagtaatataaagggaggcaccaacctcgctacgtataaaaaggtggtgacaagacatgttgactgttagagcacttagcgtataatatatattatacaaactaagcataacagttgaacaaatctgaacaacgaatagcaatccatcttgctataggaaggca

SEQ ID NO: 262555 - DNA, 695 bp, Cannabis indica
ggtttttgagaagttaaaacttggggtttctcattcctgtagaaaacgggaaactattttatctaggaaacactgaaaacgggttgctgttttctaatcaacttaccgtttatgtttggaatccccatttttcatgttttatgtttagggtattggtgccctagtgacctataggagaacttacagtggtgaattaaagacctaaaacaagttaggttaagttgattaatcagttcccttttttgttgtgacatagagctcgggatcgttgatctttctccatttgggtcgattaacatactttattgggacttgaggtaagaaaagtacatatgtaccacatagtatgtcaagatacaatctcagccactacagtggaaatgtgttaaatcaagagcagatagtaaatcatgatcgtttgtgaatcgattggttatgaaagtaaagagatgcattaccgttatggaagtgaagaagaagccatgactgttatgaaagaagagtcgtgaatctaagctgaaatcattgttaggtttcctacttgctcgttaatctcattagataatgatagtgacatgaatactagggagtgttattcgagttgttcctgttagacaaccgtgaaaagtcatgactctaaactgaaatcgttgttaggtttcctatttgctagttatctcattagataacgatag

SEQ ID NO: 262556 - DNA, 568 bp, Cannabis indica
agaatggtgtacaggaaaatgtatataaatgacctgagcagggaatttcccaccaaaagcttttggctcaagttttgtgccaccagaagatgatgccctataaatcccatattcaaattcatacacaatatctaaatcttagaagttagaactaaacagtataacctaattacgacaaccctaactaatattaaaaataataagaaacgggaattggataatagctaaatcatatatccctgttgtgaactctatacataacagagagaaacacttagaaaactcaaacagccagacaaagtttcaacctcgttatgcctcaaaatcttaagcacagtacctgttgtgaataaagtaaatgcttctccggccaatgagtgaaacggaattcctcctctacgatctccgatacggacccgatcagtcagtaaggggttgataatatttctagggtagcgctgatgagttggtgacagaaccaaacagagcccaaaaggccgataaagatgagtaacaaagacagagagagagagagagccaagaagttggattgggctcgcgctttgac

SEQ ID NO: 262557 - DNA, 619 bp, Cannabis indica
agctgagggcgcagttagatgtatgactgagtcagttaggcctccagtgagtggcggggctcctacccctcgtgcatcaggctttagcaggggaggtagtggttcgaccatggaccataagaggaaaacatccactgcaaccggtggcttgggacaaaataagaggttcagtgggaaccagagtcgaggtggtcatcagggtagtgctgagacccgatattcttaccaagagtgccccagttgtaaaaggcaccatctgggtgagtgtagagggcaggggtgcttccagtgtggcatgcccggacactacaagagggattgccctcaactcagaacagaagcaccaagggctctggcaagacccactccagctagggtgttcgccattacgcaagctgatgcagaaatgtagaagccaggctttcagtggtgacaggtcagctctcagttaacaattcttattactccgtattgtttgattctggggccacacattcttatgtggcagccagaatctttagaaaattggatagaccgcatgatagttatgaatcagggtttggaaccctattacctgacaaagagtaagttatctcaaaaaggtggattaggtctatgc

SEQ ID NO: 262558 - DNA, 1127 bp, Cannabis indica
agctccgtgtattgagtgtattgaggggtatataccccctccggtgtcgcttatcctcagttcgggtgctgcccttcgaggacctttgggacagggtttggacactcatccccgagggattgcccatgggtgccccaaagtgtgatgatacaggactcagggagaggctttgattatatcctggggtagcggagaattgtattctgctcatttcaggagtggtcggaggcagggctcccgaaagctgtgctctaggtgcatatcctgatactccggtcaggtagtatcctccgtaagccactatttgggcttcttccaaattgttgtacttttggacccttttttggaaatcttggacattagctgctccctcttgttgtagttcattccagaaaggagtccccgtgcggatcccagcctggtgaagggccagttgtagtccgtcgtctaccttcatggtctttgaagcctcttctttgaatctttttataaagttctttagagtttcagaaggcaattgttttataaagttctttagagtttcggaaggcaattgttttatattagtcaaggccgcgacaaactgtctccaaaaactgacttgtagcttgctctagcagtccactgatcatggttccaacttcttgaaccattcctcagcagagccgctcagcgttagtggaaagcataaacactttgtgtcattgctgaccctcatgacagtcatcactcaggtaaacggaaacagatgatcactggggtctgaatctccggtgtaagtcgccatttcgggcatcttaaagttcttggagagctcttcatccaatatgtgctgagtgcatggttcccggttcgcgcaattagagtctgagtcatcccctttttgtctctgggagaccctggcaatgtctttgcgtagtgttgccaactcagccaggattccctcattcaacgtgcctctggagattggcaacgcgtatttctttttaacaagatggtttcttaagtcaccaggcttttcattgattttctgtcttaggtcagctggagggtatcttcaatttccccccctctccccaggctcttggtgcacgtatatgctcgttcagtcctctcgattctgaggg

SEQ ID NO: 262559 - DNA, 3424 bp, Cannabis indica
cccaagaatgaaatgaatcatttatgtgatgccagctagtttggtaaatcacatgctcttcctttcaaaccttcaaatagcaaagctagtaatattcttgacttgatacacattgacttgtgtggaccttctctcattgtgtcaaataatggctacagattctatatacactttgttgatgattgcactagattcacttggatctatccattaaaaaccaaaatagaagccattaatgcttttttgcattttaaaacttttgctgtaactcaatttgaaagaaaaataaaaagacttagaacatatagaggaggtgaataccaagccttacaagacactgcccttgcccatggaaatgatttccattattcatgtcctcatacctcaactaaaactggtatagctaagagaaaacatagacatattgtagaaatgggtctcacgaccctttaagcacaagcacataggcctctcaaatactggtgggaagccttccaaacctctgtctacctaatcaacagacttccaaccctaattcttgatcacaaatctccctttgagattgtccatggaaagaaacctgactatgttttcctaaaagtgtttggtgttgcttgcttcccttgtataaggccttatcaggcacagaagttttagttttattctctaaaatgtgttaaccttcgatatagtgaaactcacaaggttacaaatgtctcactcccattggcaagatttacatctctagaaatgttttctttcaatgagttagagtttcttttcaagcttggttttctaaacaactatcaagctgaaaaacctgtcataacacagagttcctcttggtctgtcttacgattttttcagcctctttcaggttcatcagctccaaggccaacaacttcaacaccttccttgagcatacttggagaagtaatttccacaccaacacactctcaggtatactctcattcttctagctcttttcatcacactcatattgcttcatatgagtcttcagctttaggaagtgagaggggaactgctgcacatttgttgcacttgttgctgtacttattgtgtcgctttttcaagatgattttgttgttgaagaacctgaatcgaaacacactatagatgtttctctagctccaacacaaatcactgatcatcctcaagcctttgggcatctcatgatcactcgagccaaagctagaattttcaaacctcgagtgttcatgggacaagctacctggaattctacaacaacagagccctgcagtgttgaagaatctcttgcacaccctggatggaacaaggccatgcaaagtgaaaacaatgctctcaaagaaaaccacacttcagttcttgtgcctccaaaaccatatcaaaatttgataaacaacaaacggggttttcgtgaaaagctttcattttagagattcaaagctcaattagttgcaaagggctttcactaaaggccgtgcattgattttggagagaattttagcccagttatcaaggcttccatagttagaattatactgaccattgttgttgctcaaggatgggaaattaaacaattggacatcaacaatgtctttttaaagggctgtcttgaggagggagtttacatgttgcagcctcaaggttttgaagaaccatggaaagaacattatgtgtgcaagcttaataagtcattgtatggcttaaaacagattccaaggatctggtttgacaagttgaaatctaccataattagttggaatttcaaaaattcgaagtcagatacatctctattcttttataaacatggtgctgatattatcatacattaatatatgtagatgatattatagtcacaggaaacaacaacgaaaactttcatcattgaactgaacaaaattttactctataagatcttaactatttacattacttcttgggaatagaggtttacagagatgagacaagcctctacttaactcaaactaagtacatagatagaggacctccttcgaagagctaataacttcaccaacttaaagccatgtccaacacctgccacaataggaaaatcaatgtctttaatagatggtgattgttgtctagtcctacagcctatagaagcataattagtggtctacaattattatctatcccatgttagagatttatatgtataatatgaaatgtatgtatgtgtatataacatgcgaaataaatgaacatatacactatatgaatataggattgaaatacctccagtcattgaatctttgagctttagtcccacataagcttgatctgcaaaagaaattgattgatgtgggtagtcgggcttcctcgctctctcaactctctttagatggaatttcgctgttatgaacagaatgagtgaggagctcggtcccctgaaataaatttctatttaaaaagaaatattcttatatcccacacaaggtcagacatctcctatgttgttaacaagctaattagctagttcataaaggccccaacaactgttcactagagtggtgcaaagagagtctttagatacttaaaaggaaccatgcataaaggtctccacccacattagttgtgagagccactgaatatcattgggtattctaatgttgatagggcatgctgcccagatgataggagatccatagcaagttattgtgtttattttggcaacaccttagtgtcattgtcatccaagaagcaacatgttgttgcaaggtcaagcacagaatcataatatcgtgctttggctaatgttacaggaaaattttcttgaactaaatctcttctcaaagagcttgattttcaaacacctatagttgttacttggtacgacaatatgggagcaaatgctttggcttccagccttatttttcatgccagacctaaacacattgaagttgacatcgatttcatttgtgacaaagtcttgaacaaagagttggacataagatatataccttcatctgaccaagttgcagattgtctaacaaaaatattgtcaagttcaaggttctatttcttaatagacaaacttggattgatgaactcactcctgcatttgagatgggatgtgaagaaatgaaccttatttctctcgatggtattaatgtggtcttacatcggatatgtggctcactcttagtaggcagcagtaggtagatatactgtaataattataatgatgaggcaatcatgggctttatgggagattcccttttctattagtgttgttttacagctataattgagcatttggctcctctattgtatttagtcttttgaccttgcctataaatagaatttactaaggctctcatcaattgagctgaaatttttttaccatcaatttgcttttattttctctatacaattaaaaataaactataaaataatt

SEQ ID NO: 262560 - DNA, 733 bp, Cannabis indica
gataagttccaactaacggctcagatcatttggctctgatataaagaaaagtatgcacaaggattacgagatccaaatgagttatgagaaggcatggaggtgcagagagaaggcactacacctagctcggggtacacctgaagattcatactcaaaattatctagttacttgcacatgctacagttgtgaaatcctggtaccatcacggattttgtggtagaggatcgttgcttcaagtattgtttcttctctctagttccttgtatccgtgggtttaggtttttccgacctgttgtatgcgttgatgggtctttcttcaagactaggtatagtgggcaaatattgtgtgcagtggcactggatgcaaggagccatatcttttcgatagctttcgctatagttgatagtgaaaaccacaattcttggacctattttatgagaaaattgaaagaaatgattggtgatgttgagaacttagcctttgtttcggataggcatcaaagcattgttcgtgctttggatattgtgttccttgatgcataccatggtgcatgctaccaccacgttattatgaacgtcaaccacaagttcaagactaacatcttcacgaatcacacgtgttcctacacgtattcaaaattagagtttcatagagaattttagaacttcgggcaatgaatgttgcggttgcacaatatcttgagaaaattggatttgaaaaatgggtttggt

SEQ ID NO: 262561 - DNA, 617 bp, Cannabis indica
tttccaacttcatatacttattctactaaaaaaaaacttcatatactctatttcactctctttttcttttacaaattttaaaaatttatttttactacacaaattaattattttggttttaagagttatactattgcaatcaatttttttaagatgatcattttaatatgactcaatacttttacatttaatccatgtgggacaatgttctccaatatccccctcaagatggtggctatttttgctcaccaatcttgaatcaccttatcacaggccatgccatttgctcgcttatttttgttcggatctcaggcgtctttgcaccatctggatctcgtgcggctggctaaccatctggataggtgtggatcaaaaccccgctagggatatggctctgctgataccatgttgagaatcatagagttccatctcaaaaccaattggcaatgagtggagtagtccatgttctttatatatggctcaatacttttacatttaatccatgtgggacaatgtctccaatagttactaagaagtattttcttattttatctttagatgtcataagattaaattataaataaaattatttttataaaactattttgatagattta

SEQ ID NO: 262562 - DNA, 503 bp, Cannabis indica
ttcttaatggtttggtttgagaaatttattggtctggtttggttttttattcaaaaaactttaaagttagatggttttttgcaagtaaattgatagtttggggagttttaccgcaaattactcttaaaaattttatttttattttaattactcatttcaattatcattttgtaaaatatagtcacgtaaataattttttattgacctgacattaccacgtgggcaaaattataacttaacaaggctggacagacgacaccttaaaatgtaaacggaacagtactttggaggattttccaaccaaaatatgatgttggatagttttttgaaaattacttaataaaaatagtacaattacttaaaacaatatgaataattataaattctacttaaaccgtggtttcgaaccaaaccaaccattcttaatggtttggtttggtttggtttgagaaatttattggtctggttgggtttttaatattcaaaaaactttaaggttggat

SEQ ID NO: 262563 - DNA, 516 bp, Cannabis indica
tgcagtgcggtttgaaccgcatattaacaattcaaaccgctaactgcatcccctcgcgcggtttaggaaaaattcaaactgcgaccgcaccgcaaagaattttaaactgtgtttttttacggcgtggtgcggtgcgggcggcttggacagtttgacgaacacctatatcgtgaagtattacctatagaaggtgttgagcaccactgatgccctatagcaatgctccttaaaataatataaattatttttttatattttcaatgagcattaatagtagtatcgacttttatagttaacttgcactttgtgtattgaagcataaatataaaaattaagccaaatttaacataaaatatactccatttatgaaaaatgatcttaaaaattattgttaatcaataataaaacgctatttataaaaagtgctagaaaccaccaattagttggtgaccattttttttttaatttaagcgttcatataatgtacaatgcataatttgggactcgaacccagga

SEQ ID NO: 262564 - DNA, 610 bp, Cannabis indica
tttaaaaatcaaatcctttcatcacatggttgttaccaatacttaaattagtgcttaatgggataaaaacgttggacaagagaactggaaacatgctcaattaatttatgtacatttatgaacgttttcaaaaactagtttcaggtgttcgtaaaataaccataaaacaacttaaaaacaaccattaaacaactgtttccagaaaactcaaaattgagtttttgtaactactctctgaaatcttcctccaacgtcccaatactcatttaaatgatataattgagtattgtaacagtttctaatagctagaaacttatctcattaattccataacttccatatgtaataactcacttaattacatataatccttaagttagaatctatttttcagatttgtaacttctcatatgttacaacttttatgtgtattattatattatatataatataatacaacctccaatacatcatatatatatatatattaatctcatatcaatctgtcaatataaaggaaagcattagggaaattatgtggcaacttatataagtgcttttgcctattctttgcaacttctaatttatttaatactagggaactaagccg

SEQ ID NO: 262565 - DNA, 722 bp, Cannabis indica
cgtctacttcgaatttttattctcatgagatggattacagaaaaatagctaagtctagatgctctaatttctagagagagaaactaaaaagagatgctcttaccttgtggaaatgagctagaggagctctccttttatgatattttatgattttaatgatattttctgagaaattcttcgagtatcttctctattttcagcaaagtttaagattcaactatttctggggatcaaacagaattttcaaagggccataaaggggacccagcgcccaggttggcacctagcactatgcccaacacctatattgtcaacctggactgtttccaatcaagttctcaaaaaagtgttttgggcattctttccgtcatcagaattaatgaagatttaagaaaactcagggaggaaaccacaaactcgaggcccttgaaatagagcctagaacccaggttgatatcaacctggtgcgctggtttcgatcactcaaatgtcaaatctaattcgaccaatgaatccaaaatggtccaaaacgaggtagtagacctcgtcctcaagctcaagaaccttgaaagtatcaaaacgacaacccaagagctcagaaatgaagtacccatctccaaggttcacaaatagcctggtgcgcttggtctacttatccgattttgattcattttttatcgtccatctagtttttcacaataactaagatccatgaagtcaga

SEQ ID NO: 262566 - DNA, 648 bp, Cannabis indica
aaaatcccacaaaaatcgcaaatttgggtgaatgctgtcagtaggctgcaaccgcaaccttcgaaggctgctggccgagaatttttccctgtcatggcgagctgcatggtcaggcatgtctgagcaagtgacatgcatgcgcttcagacaaggaatttttccctgtcatgcgcgcggatgtgtgcgttgttcgagtgactggtgcactcgatgcacccactcgacaaccatgcatccaaaatttcccaaattcataacttcctcaatttttatcggaatcgagtttcgtaaaaaagaaaattgcttaatttctcacaaggaatccaaataaaatattttcaaaaacagaaaaattatttttcatggaaaaatttcgtacaacacatacattcatcaaataagcacataaaccaacatgaaaccatcgaaatcaatacaaatcatcgttataattcatatttcatgaaagtaaatcattaccatggctctgaggccagtttttggaaatattttaccaggatctagattcactaacaagtatatttcattaacattctaatatgaatttctaaaacaatgaaataaacacataagggtttaagaaaccttacattgggtgcagaggcatataatgactccttccgttca

SEQ ID NO: 262567 - DNA, 6525 bp, Cannabis indica
atatatattttagagtaaatattttattaattttactgtactaaacacatcagaattaacccactattttctctcgcccaccattgactcttactttacattcctcccctaccaaacacctcattttctcacacaaacactttttctctcaaaaaactcagagatctttctctctcttcgccggaacaaagccgacgatcgagatgactctatcacacatagctacctcaccatctcgatctaatatcctaaggccgctcacagccgccttctcatgcactcttcctctccgccgtccgatctcatcggcggcgaacggcgactccaccaccctcacgatcgagacttcggtccctttcacagcgcacaatatcgaagagccctcgcgctccgttgaaaccacgcccaaggagcttctcaccttcttccgcgacatggctctgatgcgccgaatggagatcgctgcagactcgctttataaggccaagttgatccgagggttttgccatctctacgacggacaggaggctgtcgccgtcggcatggaggccgcaatcaccaaaaaggacgccattatcactgcttaccgtgaccactgtatcttcctcggccgtggtgggacactcttggaggtgtttgctgagcttatgggtcgccaggccggttgctcaagaggaaaaggaggttcgatgcatttttacaaaaaagagtttggcttttatggcggtcacggcattgttggggctcaggtcccgcttggatgtgggttggctttcgcccagaagtattccaaggacgaagctgtgtcctttgctatgtacggtgatggtgcggccaatcaggggcagctcttcgaggcccttaacatctctgcgctttgggatctgccggccattttggtttgcgagaacaaccattgtaagcattgctcaagaattgtattttaagattggtctttcgtgggttagtttggttttgatttgggttctctttaatacagatggaatgggcactgccgagtggagagcagctaagagcccggcgtattacaagcgtggggactatgttcctggcttgaaggtgaggctagtaaattcgtgatcatctttttgttgattctgtattacgctgcattcaaattttattgtctttctgggttttgtccacacttttccagctgaaaagagttgttggaaattgaaattgcatatttagcaaagctacaatgcattgcatcactaaaaaataccacttgttgaaatggatttagttggaatagttggtggagaatgttggacggttgctactagttaaaatggagttagttgggatagaaacaaatttgtagcgcttgtttacttgttaaggccattcactttatttctgttgcccactagtttcaaagctacttttcttttttccattttccctctccgttatatccttttttttgcctcgttcattagtcatgcagtttaatagggagattatacgtgttttttattacaggttttttggttcgaataattttgctttatacaagttaaagcagttcttatgccctttatttgttgtgcaaatgcttgtcctttttttttttaatttcaattgtgatgaggtgatatataggcttgaaaatatgctgtagcttgtatgggtgcaccgcaaatcgtagctactcaactatttgctctagtaactggggtattcagtcaacgatacatgatctatattctcttttgaacaggttgatggcatggatgcccttgcggtgaaacaggcatgcaaattcgcgaaagagcacgctttgaagaacggaccaattgtgagttattgctagtgttctctaactttcttgcgaaagaaacatgtagtcgatactggatagtattatcagattatttaaaggatacaaaaaagaatttattgctccagtactattgctggcaactcaaaggtttccaaacacagaaaagctttgcggttgttctaggttgtttttcttcttatgttctgcagctgaaagtatagaatttagggacatttgcttgttttaaagtgcatgggtctagggttagtttcgggtcataattcattaaaatctgtagtattggttgggcaagtagattgttaatagttttttaatgaggagtgagtttaaccttaattattgtctatttaaataaatgttcaataatagttgattgataacatgaacatgcattagtaagtaacatgccatgaatgaaatcctacacaattattcattaatcattaaaaacaatgaaaaccaaatttcaaaattcaaaattgaaatcaaaattcaaaattaatgatcatcttttaatcatcattatctaaataaaataaatcaaaactgtagttcctgcatgacttgttgtagataagtatgagactctggtttgagaaatggaatcgggtaacaaggtgtacgctacaacaataagaagaaaaactttataaaatatcataaaactcataatattcatatactaaattcataaaaggttgaagttctaatgaaaattcctaacttggaggaatggtaaaaatctaaatatataaagaagacattttcttagttccaacactagcttaggagctgccttgactttgagaaagagtgaagaaggagatagctcttcagggagacgaacagtgggagtggctgccgtgactctgttaagatttattgtgacttagaggcggaagggacgtcgtatgcctcgatggtttaagatttttaggctttcatttatctttcctattctatttattgaaaatctgttaataaaagactcaaactaaagcccattcaagtcatttaaaagcctaaaaatagctctgaaataaagcccaagggagcccacaatacaacagccctaacacacaaagccaagcccaaggctgaggtgtgtgtctcatacgcctcatcagtgtgcggcgtatgcctcaatagcaacagctgaggcgtagcctcatgtacatttttggaccacccctcgaatggatttgaaaacaatgatgagactatgcactggtaatttaagctcttatatgcagcaccatatagagtagaaaaatgacaaggaaattgtattttcttaagtatattggatccatgagatgatgtgagtaagagcttaatttgatgagttttctttgcagaattttgcactttacatatagaaaaatatagactatgctttgaaaaccaatctgaggatgtaaattgtgtgattcaattcaaatatttggaacatatttactgccattttaagtctatgctcctttggataaatgtttcaaagccacatgttatgtttattaaaaaatagaaagcaaaaaagatctcttaggcattgtatcttcatgtataaacctccaaacaatcccatacagagttgatgtaggttcttcacagtacaccccttctatagctgacatatccagaagaccactttgtggcggtccattctaggcttctccagttattcccctttctgcagctcaccacttctgtgggcctcctctttcataatgtgagtcccaatagaggatgcttctctaataccatttgattacttgtgagttcttttaaaaatttggaccattacttgtgagttctaagactagcgtatttgaggagggtgagcaagtgattataaacaaccaacagattctatatctagtcgatgtggaatcccaacacctttgcacttgaattttaccccatctggtcttgtcactctcccatttatttttgttatgcaagtatgtttaaatttttgtaaggttactccacatgtttgtgaagtttccttgtatagaaatactatgttctatttattctgtataatgtgaatctgaatgacttagaatatttgccttggtttcttttctagcgtcattggtactttgtgtctctcttggccttttcctctctatagaattttttggttaacctatgtaatatctttgtaattttgttcagattctcgaaatggatacttataggtaccatggtcattccatgtctgatcctggaagtacctatcgcacacgtgacgagatctctggtgtgagacaggttggtgcatgtacttttgagatttctctttaggagataacttcctttgtgtttgtttgtataatactgaagtgcttttctttattaatttttaggagcgtgatccaattgagaggataagaaagttgatattatctcatgatattgctactgagaaggatctcaaggtaagtaattcctttctctttttctgccctttatcatttcgctggaaattgtttgtttgttttttattcatttggtcatttggaaaatgataatgataataatgataatagtaagaagaagaaagagtgaatttgattttttactccccaaactattatcactatcttattatgcccccacgaactttcacgttgttttaaatacttctgaactaggtgtttggtacgaggtgttcaaaataatttgattataggaaatattgtgaggtttttaaaataatttgactatagggaatattatgaaagagaatattatgctttaattgaattacattgtttggttgagtataggaatcttatatattattttaaaaaattaaaataaaaatattttttttattatatctatttaatgttaattatacataaaataaaataattatttattaaagaagtatatttattaattagtaaatattaaattttattgtatttttttattaattaaaactatatattttatcactatgttatatttaattaatataatggaatggaataattcaatcccacctcaacattttccttcccaagggtagttatattactaatagaataacattccaagcgtagtgttttatctaacgtgtctaaaagaatttatggcactttaaacaatgacgtggtagtgacaagtgacctgtcactaccacgtgtattaatcaaataaaaataattaataattaattatacatttaaataaaaagtttatgttaatcattaatttagttcagtattattttttagtattgaatatatatttaaatttattattagttattttttatttaaataatacatgtagcaatcatgtgacagttgtcactgccacatcattctattagccaaggggcccaataatgtaacgataatagtttaagggcatttaaaacctgaaaaggttcaatgggcataataagatagtggtaatagcttgggagcaaaattttaatttactcaatgataataacaataataataataataaacttgaggaaaattctatgcactgaaacatctctatccgtttattatccgaaataatttttagtcaaatttcttctcataatcatgtaaattatagttatttaagacatcctgtaaaatttaagaaattcaaataagttaacacgccgaaaattgcattgaaatcgtgtgttgtactcgtgattattttattttatacgcgtgtaaaatagactgtttaaacattgttttctatattgtaaattattttgaatttctcaaaattttatagaatatcttaaatagctataacgtacatgaatatgaaaaaaaaatagattaaaaaattattctagatgtcgaaataaatagagagtgtatcagtacatatcttttaaaggggtgcattgtaaaatcaccttaaacttgacatccgtctacttgtttttaggaaccactttttctttgttggttctcatcattttgttgttggatgttttcatagaattctatttatacccatttcgtctgaactttttcagtaggttatggaatctgtggatccagtccgtggaagtttaacaatttttccttgtattttaattacaataaagttgaaaaatattttatatttctgaagaacaaataatcgaaatatgcaatgaagctccctaaaaaaaataaatgataattatcatccttaaaaaattccaacctttcgttactgctgatacagttattctgcttttacaggatactgagaaggaagtaagaaaagaagttgacgaagccattgcaaaggcaaaggtaacatgcatatttctgattcataatttgattggttcattgctccgatcgttataggatgtttgattttttttctttttccattttgtttttttaggagagtccaatgccagatacgcatgaactcttcacaaatatttatgtgaaagatgctggacttgaggtgagattaacatttgacagcttgaaagtgtaattaaattagtaagaaatttttttctccattacccgatactgatgaaagtaatgtggtttcatttgccaggtttttggtcccgataggaaagaaattagatctgtgctcccgtgaacggaaatgaaggggaaattaccctaaactgaccattcttgcctcgtcgccgctttctcctaaattggactacacttgtccgcttgccggaaaagagaaaaaaa

SEQ ID NO: 262568 - DNA, 514 bp, Cannabis indica
tgtggctcgaacatgtacatacatcgcccaactctcgcactcatggatcatctgagacagatttatcctttcctgcacagtacatcacccgtgagccaagcctagcaagacagtataaaatatcaataatcataattatcacatcacataaacatcaatgccatttcacatttgtctgtatgacacagacccgtgtgttacgcccgcacgccgatttatgtgtatgtggcatagacctgcttgttacacttacacgtctaaatacaataaggccttaaaacggttcatctcgtttctagtcaccgagtccaacccgattattccttgaacgcataatcctaaatctcaatataaactcatatgtaactatgcataacacattcacattaatcatcactagggtaatagccctagacgaataaaccgctcatgttagggtgataaccctagtcccggttcccaattactcacatatatcattttcaatattagcgccaccgtgcatactctacgt

SEQ ID NO: 262569 - DNA, 1682 bp, Cannabis indica
gtttccccagttacggtttacaatgattcggattgtagtggtccggattcaaaccgtggttctccgatttatatgaacagccctaaaagagagcatgggaagttgtttcaggatggtcttgacaaataggacaaagatgagaaatactcacatgtttagtaatatgattaaggcaagtcgggaggcattcggtcacaacacgccaaaggaaatttttagcctttggagggatcttaagttgccacaaatctattatcttttctactttggattaatgacacattcttacaaacaaaaatatagaaatgtaagcatgatccagtttaatgaaccaagaatctaataaaaacttaaatagaagccataataaagtaatgaactatatacaaaataccaggcaccagaaaagcagtactagaattaaggtaaaaactttgtgactctttcgtgttagcttagaaagatactctctgcataagtagcaaagttggagcccctctcttgtctgcctatatattggaccctcctactcttgggatcataaaaggacaaagtacgaaagtctgtagaaggagaagactcatcaagacttggcttgtcaacaattcgcttgctaagtaagaggttaccattatgtgatacacctaatggccagatttggaagagatttatttgagaagatcccaacgaaagatgtttagtccaagaatcccacacaccatattccttcatcacccatatctcaattttagttgaatagttgaaagtgagcagagataggcagtcacgcatgttaaaaatctgtggaaagggagagtctttatacttgaaagatgaagggagtttaatgagcttgaattcttcactacttagatcaaaggcaactaccccataataataatctaccccttcatatctacggctataatatattgaccaatgaatagagccactaacaaccacactctccttttcaacagtaaacaccttaggacaattatcatcattatcactatcattatgagcataggaagcaaatatgtcaggcatgagcatagttttccatgaattgtttttcaaactatacacggcaacttgctcacctctttgaaagaatgaacaacattgtttatctccatatgatgcagccaccactttgaaatcattggtcaatggttcgtacccaaatccatacaaagtatgcattgaatacttacgacctcgagatggagcatatggagaagaagggagtttcctatgctttcccatttcaattgcagggttccaaaggtaaacctcattatgatcttcttctaccaaacaaatcacaccattatcactacccacaaactcaacattcctacggcaaacaggaaattctatagacgaaatctcatcaaagttttctgagctacgaattgagcctcgcattacaataccaccaacactgtgtatgtcatcattagaacactcaagggagaagcccagtagggttcgatgtacctggtttttgtggtgagcatcctgttagacttttatttgggcttacattatattttattggttttattaaaacttgggttgattggatagttctttgctgtattagcccatgttgttggtgatcaattgttaatgggcttagcatctgtgagtaaagtctaggtgaagcagaagtgtgg

SEQ ID NO: 262570 - DNA, 1592 bp, Cannabis indica
aaacagaaaaaatatttttcacgaaaagacacattccctctgattttggcggttgtgtggttttgaggtacatcagaattaaatgaccatctttttcactttcgcttcgaatcgcgtccattggatcaaatctttcttaaaatcactatcataggtataaaataacaaaaaggaaccacctttgtaccatttcataaagtttgagaaaaaccattaatcttcttcgttaacgaccaccgttaaattcgtccatagacttgcatgccatccttgtccttgacctttttcctgcgagtttcctccgacttcattttctaaaagcgatcctttctttgttcgaaggtttgtagacagaattctcaggcattgccccaagccctaactccaaacggtaagttactttcttttttctcatgtttattacacattgtggatcagttacttgatttgtttgtattgttatcatctcatctggttttggtaatttttttagggttaaaactgttcatactagggttcaggcaatatgtaagttgttttcagatctccaactcattaccttttagtttgataaaattctctccagggattgggactgctttagagtttgattttccttcagaattggccatcccatatgtacccaatccctcaaaaccaacctccaaattagagttcaatgatgctagggatagggaacacacaatgagaacccaacacgaagatatttctagtcgctacaggcacttcttgcaagaaaaatccgaagacagacgtcgattcttgcgagaggtagcctggcctaaaccacccaccgtgtcctttatccctgtggcatatcctttgtttttacccaatgtcaccaggtgacttgattttaaattatgcctcccaagccacgtacgtctaaaaactcctcaggatcccagcatcaccttcgaggctgagttaataaaatcgagggtgcgatctatctctggctctacgagcaagatgctgaagacctgtggaattgcaattgggcaattgttccaagttaggtcagtacgagagggtgaattcagttggtaccccctgcacgctttgccagcagtaacccaagaactagtggtgagactagtactagtggttcaactagtatggtcgcttggagtcttgtgcatatttgtgcaggggccatcctccctcttcgagactacttcaaggattacataaatcacattggggttgccccattctagctgaatcccatctcttacaggattcttgctggtttgaaagtcttgtacaaacttatgaattggcgttgtcccatgctcgtagagattgagtatctttactcagttaacgccgttcgatcgaggaagaacgctgcagtgtgatttttctatcttggcactcatgttagcgagccaaaaattattgttgatttgccatgtaaggtatccttcaaggacaacttcttctggacgtctggtctttgccccattggcacaaccacgtttcacaaacttcgtaagtgattgttctcttcttacttatttacattagtcttcctttttcaagtacttgactaatattttgtttgttct

SEQ ID NO: 262571 - DNA, 730 bp, Cannabis indica
ccggggatttggaatctctgtctattgtgggacaacaggtaagacagtagttagcacgtagagtatgcgcagtggcgcttatattgaaattgatatgtttgattatctaataactgggattagggtttaccctaataggaacggtttaatagcctagggttattaccctagtgaaatatgtgtggaaatgtcatgccatgttatatgtaatgagattcaagggttatgcgcttaaggcataatcaggttggactcggtaaccataatcgagatgaaccaattctaaggccttaatgtctttagacgtgtgagagcaacacgtaggtctacgccacgtagatttaaatagatgtgtgagtgcaacacataggtctacactatgtagacataaatgggcatgttactgcgatacgcaggtctgtgtcacacagacatatgtgaatggcattattgtgtaaatagtatgatgagcatattattattattattattattattattattatgtgatatactgtcttgctgggcttggctcacgagtgctctactgtgctagaaagggtaaggcgttagctgatcagccatgagtttaggagctgggcgaagaatgtacatgctcgagccacatcagatcaagcgggttaagggtctaccagcgatgtattttgaaactctattttgccgcttaggccggctgaaagaaaaagacttgtaataaagtttgtaaata

SEQ ID NO: 262572 - DNA, 2132 bp, Cannabis indica
ttttattaagaagtaaaaagtaaaataatgagtcataaagctaaagactaatccaacaccaaaaaacacataataactatgatgaaagcaacaccatcatcctattctacttgggtacctaaaaatttcaaagagagaccaaagtaatgtaaacacttgatagaattttttgatatttatatatataatatatatacatatatatgttcttacataacttttttgttagtactataaaaacatagtaacaatactataattaactagttattatatagatatgagtaacactataatgaatctaagaaaaagcaataatttttccttttagtttcgctagaaaataattaatattttgggaaagtgatgaactttcttctttgataactaaagaagaacaaatccattttctgttacagtgatttaaactcagatgaatcattaacgacagctaggaaaatagtagttcattggtttttttattgtgaaagcacattggtgatcaaatctttaattcatttacctttttagattgcttttcacttaaatttttttgtgactcttgcttaaccaatgatatggtatactggtatttttttttaaagctagattctcatcaactcgttttaggctactttaataaaagtacagttttatgccaacaatcaagagcaccattagactgcaacagttataagagcattcatgcaccactagaatacccacatacatcatagttgacataataaaaacaacccaaataacagcagtgcatccaccaggtgtcactagatattagtattcacacaatataatatttaatgatcattaatctagaagcatataatatcctataatggctctagattaggagaatctttaagtttgcaattcattcaggtaaagacaaaagtggaaacaatttccaagattcagttacatttatttcactgtcaagaaaccaacagagattcgactagactcagctgatgatgttatgtgaaagtttttattgaactagaaagaagaaattcctgttttgaagttcaaagagaacaatgaacttaccccatttctttatgtatagaattgagtctattctcttgtatgcctcatcctcacaccaatattccagctggtgttagcttgaaaccaaagagatctcctttttctatattgtctttggtctttttaacaaaaaagggcatttgttcttctctgcaactataccctttatgatttgatttttttattcttcttgtttgtgatatgggtggaggaatttctctacgaagaagttttttccaaaaaattaaataaggatagttatggtgggtcttgatgcttttggaaaaacaagcattctctacaagctaaactgagagatgttgttacaacaattcccacaataggtatttaatttatgaacacttaatcccaaaaagtttatggttttttgggtcttaagggagacagagagagagaggttgtagtgtataagcaaaatcactaggcaaagattttatataagcaaattattactctaaaagaggaggggaaaaattcaatttttgttttactaattttcttttcaatttcattacccacagtttcccacagttgcaaattattttgaggaattgattcaaggaaacatatataggtgagactcattaatcataacccagtacacacgcagactagggaatttaaaagaaaaaaattgattcgacagggagaaaaaaagagaatcaaaaaatattttcttggcattcaaaggaagagttaagagataaaccttggttgtgcaggagctgttgatgacagagttggcgaacggcagcgtgggtgatcggggacagagaagactcttgcgattgaaggtgaagagctgcagtcgatgggttgattttacgaatgaaaaaaaaaaaacccctcactaaaatgataatttttttaatttgaatgagggtgattcggtcaactaaaaaaattcattaaacccaaattttagtttccggtaaaagctaaaatctaaaagtgggtgtgggccaactttaacaaaaagctataattttagcttaaattttagaaaaagctattttttttttattttgccaaacactttttaa

SEQ ID NO: 262573 - DNA, 523 bp, Cannabis indica
atatttgcgcttaattacatgtttgagattgatcaccttaaacatgatttataatatcaatacgaaatctaaaaagtgagtattgagaatactaaaattagataaacttgattttgatgtgaaacgagattattcacatagcctttgtgacatttaaattattgtttaatgcagattatatattagtctatctcagagatgaatagataacatatgatttagggtctaaaagatctgaaaagagttaggttaattttataatttgtcattcacttaaagaaagaggaataataattagcattaataattgggtaattaaaataacatgattttgtgcatctcaagaggtggaaagctgatttttttaggtaaaacaagactttttgctctctcttgagaagagccttcctgagatgctggaaaagcccgtgaccatgacgaaccctgatacctccatggaagacctgttgaacagaataaccaatctgaccgtgctggacgatgaaggctgggaaatcaacga

SEQ ID NO: 262574 - DNA, 549 bp, Cannabis indica
tagtgcgagtttatttgccaaagttgaacttcggcataaccattattatgtgacttagcttagaaactagtgaaatatgtgcatctaagttttagttataaatttttcttttatttttattgtgactacgtgacaagcatttccttactgagtttagtagctcacccttatcaaacttaccatgtgcagattaaggttctaaaacttagagagccggtggcaagtgagaccttggaggcttgtgtgtgaactcgttgaggaccatataactgagggtggtctacggcacactccattattttaattagtgttattaaattaatgtcgcagttatttttagttattaattattatgtcttttaagtccaaaccgagctcaaatatgaaatatttttatgtttataaataaaagcgacattatagattttccgcattttaacgcttgtaactaaattagtaatttatgaaaagtcgggaacgttacaaaaatagagtgagcgataaatgttttactcaatttttagctgcttttaaagatatcttaccatt

SEQ ID NO: 262575 - DNA, 539 bp, Cannabis indica
ccagcgaaatacaagaagtcaggataagtatggttgagaccggaggcggtaaggcaaatcaaaatccccagaatccccatggtcgcggccatggccatggcagagctcaggggggtcgtcctgtaaatccaccacaaaatcctctagattgggagcagaggtttgcaaaagtgcaagattgaatccgccaacaagatgaagaaattaagagattaaggcagcagggtcttcctttcgtgcctcctcagaaagctcaggccgttgttgctccagcggtgccagcagaacagcctgttgctggcaaccacatggagccattatatgaaagattccgtaagcaagcacctccattgtttttgggaggtcttgatgtaatgaaggctgagcagtggctcacagtaattaaacaaattttgagttttatgggggtggttggtaatgatcgggtgacctgcgccacttttcaattcgaggaggatgccctcgtgtggtgagagttgataaccttcactcgatatgtcactgttatgacctgggaa

SEQ ID NO: 262576 - DNA, 737 bp, Cannabis indica
ctgaactgtgcattgccatgtctttagatacgattcgcttaggcatccgcgcgcgtatcaccttgtccgagtgactggtgtgcgtgcgattgagccatgtgcatccggatttcaaaaccacataactttctcaatttttatcagaatcgagttccataaaaacgaaaattgattaatttttcacaaggaatctaaataaattattttcagaatgaaaataaaattattttcttggaaaaattttgtaattcagacacattcgtcaaataacacataaaataacatgaacacatctaaatcaacacataaacaatattcatcgttttaaatccatattacatgaaagtaaatcattaccatggctctgaggccaattgttgggaatattttactaggatctagatttagtaacaaatatgttgaattaatatcctaaatatgaatatctctaaaataatgaaattaaacacataatggtttaagaaaaccttacattggttgcattggaaaataatgactccttctgattagatttctaatccttgttttttctttgtcgcagagtattatcaagatctgatcctggatctctttctctccttcagatttggttaccattgtcttaatcactatgattgagtgcttgacttgctatgtgtgggcatggcactctttcactagggttttgaatatggtgaagaacaatgaaggaggtgaaattactatggaaggaactc

SEQ ID NO: 262577 - DNA, 653 bp, Cannabis indica
atattcaacctaattcccagaaaaacacactgaatcttaagcttaaggttcatagctcaaatttgagcaaattcatccaaacacaaccaaaccagcatacagaacttaaaatcaactcaaattaaacttagaattcgaattgcaactcaacctaaccctaacaacccctaacttcaaaaatcacatacacaaaccaatttcaaagctttaaaaactcaagataatggtactagggtttaccttgcctcaaagctacttgaatccttagctttaatctagaaaaataccaggttttgagggtgattccctctggtttaccccagccgaaagagagaaagagagagtttatatttttttggtttttctttaaattttccttattttccctaatgaataaagcttaggaaattaattcccttgctgaaataataagaagccacatgtcactctcctaggcagccaccaaaccatctcttaccaaattactaaaatgcccccaatgtttaattctagcttaattcacacctaggggtaaaatggtcaaaaaccataaccccgcacaacctcggtattttattttctccaatatatattccattaagaaataaagttctaacttacccatgtgatcaaactagccatccatcgcattt

SEQ ID NO: 262578 - DNA, 942 bp, Cannabis indica
gggttgaattatatggattaaaaaagaataaaatattgggaaaaaatacttaagtgccgtccactataatggaccactttagagttacaattttaccatttttttccaacttattcttcttttcaataataccatattttccaattgaactttataaatgccaaaagagtttatttaatatttataattaattactaaaaaaattgtcatttatgtaatttattaattaggccatacaaagtctcttaattaacaaattgaccccaaaccctcttttcttcacaattaagccattgcttagtgaaaaattcataaataagacatagtctaattttagaattataatggattaactaaaatcaaataactgattctgcaagcactattatctcaactagtgaggggaccatgggcctatataaccgagctttcaataagtagatttagaattcaccaagtaaattctcaacttattaatttcgccttgctccactatagatttgaaattgaatacactctgagttatatagaatgctttatatgtaccacaatatagatacgttaggattatccattgttacaatccaaatagttaaggatcctttatagatgatctacattaatcagggacatatttaccgttctactcttcaatgtattttatccttaaaacacttagcaaccgataaataatactttagtaaactaatataattcctgaaatgaggcctcaatcatttacctctatttagccaagctcgaaggaaataatcatttaacttctaaaaacttatagaagctatagattccatatctatgtttagcgctccaactcaattgaactaccatgctcccaagatgtaactatccaccagaaccaaagttagcttccacgaacaagtcaagaacacaaatatacaactaagttgaacctaaccatat

SEQ ID NO: 262579 - DNA, 683 bp, Cannabis indica
attcctataaatgtagtatttgttgaaacaaacactttcttatcttaatgaccatagaatggtctcgaagcccactctcggcagtggcatgtggggcgcgtgcggcagttctagtcgtcatttttcaacgattcttttttccagcattattagaatttaattttttatttttctatgatttttaattaatttttttgactctgtttaataattattattattttaatgataattatgcagttaaaaattattgaaaataatttttgatgattttttgaaatctgtaaacaaaaaaaaaaaaaaaaatgggtttcttctcgttctgtttgaaagtcactctcttatttaatttatcttgactatgtaatctccaccaatattctttctttcacatttttccattatttgttgttctaaatttgtaaaacttgattatttgctgcaaaaaataatgtgttatggtggacactttatttttgattatcaatataataaaagcaattaatatatctctttttggaaatttgattgaaaaatatgaaaatttttaatgattattttatcaccaaatttcatatgttatagaaaatatttattttggttggctatatgtgtaattacttgtctaaaggtagtagttatatatattatttcacattccatgaagtgagttaatattaaat

SEQ ID NO: 262580 - DNA, 937 bp, Cannabis indica
tatgacccaaaattggaaccaaaaccgaaagtcgacctggataagaactaggacttggacttggaatcataattgaaattggacctagatccagaactgtaaccggaccaggacccggactccaaatttgacctagaccagaattgggagccggacccggatcccaacccaaacatggactcgggacccgaacccgaacctgaactcagatccaaacatgaaaccagactagggacacagatcagggtcgcgacctaaaaccgcaacccagtctcggtcccaaacccaaacttagaaatggcacctgggacctaaaccagaaccagacctagacccgtgaaagtgatccagatcttcactcgagattcgagtaacgggacctggaacagaccagtaggcggtgtctagatctgggactcagactaggaccagaacccagacaaagaaccaaacccgaacacagacctagacctgggacacaaaattagaacctgaacaagaatcggtgaacaagaaccctagaacaagactaggaccgtgaccaggacccagacccagacctacaaccgaacacaaacctagcctcagacccaaactgagatttgaactcgggctgagccacagaacacagtcttgtacccagaacgaaactgagccacaggcctggacctaaatctgggacccgatgcaaaacttagacttggacctagatagggatccggatacgaaccaagactcagaccaagaccaagtctgggatcgaaatgctggacctagatcttgaacgagatcttgacccagacccaaactttgacccgcactcgggacctgcactttgacctaaacccgaacctagacccagatcggggtctagacctgcacacaatcccagacacagactcgcacccgaactcaaacacccacacctagaatcaga

SEQ ID NO: 262581 - DNA, 380 bp, Cannabis indica
agggcataaaacccaacacccacgaggtcttaaaatgcagtaaatcataatatttttacatattaaatcatataataatataagatctcattaatacataattaaccttgttgggtttgctaatctagttattaaaccttagggtattacaattatcccatccttatagaaattttgtcctaaaatttacctgaaaactctggatatctctactgcatatccgtctctagttcccaggttgcctcttcaacttcactattcctccataatattttaatcaatgcaattatcttgtttctcaagactttctctcttttgtttagtacttgtactggttgctcctggtatgaaagatcaggttgaagttccaatgcttcata

SEQ ID NO: 262582 - DNA, 651 bp, Cannabis indica
ggtaaaataaatttccaacacgtccatctagtttttcataataactaagattgatgaagttagagaagtcaacttcacaactttgcctttctcattttcaacatggaaaactcactcggaaatgaagagttttaagtctctcattctacagaacgacatatctccgagaaatggtgaccaacttcgccagaagacaaaaacaaactaagtgatgtcaaaatatcacttaggcatcttaaagtacaccccttggacattttttttcacttgcccagtgtccaagttgacgtcatatgtcaacctgggcgctgagatgtcaacctaggcgctgggatgttaacctaggtgttaggtcatgaactgcctttagtaaaatagccataagtcactcaatactgatctgattgaagcaattcaacttgtgtttcgaagataattcaatgatttataaagtcatgtctcatacttcaatcacaattatgaaattattgacctcaaatttcacccccaagagagttacaaaaatatgctccgggttacctgcacgagccccgctaggctccgaaaactgactatcactatcagaagctaattttgaccgttagatcatcatctacagtcaaaaatatctaatatgagttttttttacct

SEQ ID NO: 262583 - DNA, 680 bp, Cannabis indica
tgaggaggacggctagggttttggagggatgaacgtagcattacactgataccatattagtttcatatgagagggaaaccctctgttcgaaataaggaaaagaaagtctgaaaaatgactttgtatattacgttaggttatgtttgtacagagaaaagatatatatatatgtacaatatgtgggtcagcccaataagtatatgggcttaagtaattgggcctaacaattctaatagtctcagggtacattaaatgagtgtcagagtacgttactattttttaaccctaattacccctagatcaatctcagctgtcagatcaaataactccctcatctgacggttaccgtacatcacggattacaatccgtgaaagtacaataacgggacaaaatcatatcccaatatattttacctagaacctataaataatgtttttcgtttcactaatattattccaatttgttttttattattattctggtttaattgataaattaatattgtccatttgttataaattttgaagtttatataatgatatatcttctctttggtttcagttcagaattctttggaaaacacctccttaaaaaagagatatactgatatatctctatctgttttaacctccaaaataaatttttagtcaaaattttttcttatggtcatgtaaattat

SEQ ID NO: 262584 - DNA, 576 bp, Cannabis indica
ttttcatttattattttaataagatctccttccctataaaaggagagctcatcttgctcattttttacattctaaaaagtccccataaggtctaagcatctctctttactttttttctcaagaatttcgcacctcacacttagcccattctttgtgattcttgtgaggaataaaaacttaaaatagatgtagctctattaccatcgcgtcacggagagtgaactactataaatttattgtgtctctcttacttatacttaactctcattatattctcgccaatctaacgagcgggggtggccagatatctgtgtctaaatttctgtgtcaacataacatgtcacatatgtcacacttattttaatctaatattatattatgtactgttgatgaaaaaataatattgtaacgtccccgcttcaagcctcaattgggcccttacacccacggactaatggctcttatacacgggtacgccactctggctgcatcctagattgatgactgaccctacagaccaatagaagtgtttccagcgtactttgtcctcactcgcacgcttcttgggaaaacttc

SEQ ID NO: 262585 - DNA, 500 bp, Cannabis indica
atcactattcataaatttttacaatacaagtagaaattttcaaaatttattttgataacttcatttaaaatatacagtttttactttataattaagaaaaataaatcacactttattatcaccaataatttttcaatttgttttgtacgaattcattgtactatagttaatatgattattaacacataatgaattaatttagattgttattccacattcataatttcttgcaaggtttacaaataaacttatgaaagtcagtaactttgagcaaatcttatccacggacaagatgagttctcacatttagaaacttcaagaacaagcactatagtagtggctttgttttataattagcgaagacctttatgttccaagcttctattaaaacttgattagacacatatttaaaggtctttattacaaaatgatgtcactcataaagatatgtaagttcaacctgacaataagaaatgtgttattaataagaattcttctac

SEQ ID NO: 262586 - DNA, 584 bp, Cannabis indica
gattcatcatggcagatttcaatcccatcatccaatttgagagggattcgaagtctgattttgcacaggcaatacccacaggcaatagaaagcagatcaagtcagtcaatttgtgatgtaattccgaaattcaagtggattggaatgttggatttgcataacacagggatcaagatactaccaaaatctattggtgagttgaagtttctgtcttatttggatctgtctcaaaatgtgaatatgaaggcattaccaaactctattagcaggctacaacttctgcagactctgatactcaaccattgcagtaatctccggaagctacccaaaggcattatcaagttattcaatcttagacatcttgaaaacaagtcatgttattgtttgactcagatgccgcgaggactacatcaactatcaaatcttcgaacattatcagaattcgggctgagtaaggagcctactgattttccctcaaagccaaagggcaagctcgacgaactaagtagtctaaactacctgagaggcgagctcaaaataaaaaatttgaccaatccaaaagatgataagacagcagcagcaaa

SEQ ID NO: 262587 - DNA, 1394 bp, Cannabis indica
aggggggatgttaaccaattaatcattacctaacagttttttattaattattgttaaggttgttttagttgttaagttcgttattactgtgtaacaactctattttactgcttgtgtatagtattacattggtctataaataaagagctggcaaccctattttgggtaagcctttgcatttcactttgtgcctttgttcttacgttttctgctcttagcctcttttcctctgttctggtttttaccttcttcattatttttcaaaatattttattcattaaatcaactcaataaatataaaagaaaattaataaatatattttcctaagaaaatatataactaatatttaaaactgtcgcacaaagggcggctatgttgtctagttaaaattataagctaaataaaaatttagacttactttttccaatttggtattactactatatatataaaaaaaaattagtgaaaagtagttttctaatgttttggaactgtttagtatatagctaaaaaaaataagttagtaaattagttaagacacgtaaataattctacttttaaaaataacttctccaaaaaattttagagaagcaacccaaaagattcttaaaataaaaaatagtctctttttttttcattgaaacacagctagaaagattcttttaactctagaagttaaaacaaatcttgtataagctaagtgaaacggttgccataatatataatatataaatatattcttttttttttcataatcgacataattcgtaatgtttaaaaaattaatatatatgagatagaagttagtataatttatatatatatatgcactaagtattagtaacatgtaatatatgtttgcttagagttgttatttttttttttgtaatgcaagtatcaacttttattaaatgcaaacttcagctaccaagcaaggtagcaaatcagtaggaacagacaccgtattgaagagacgatcaggatataatatagcagctttagcgaaataatgagccaccacattgtcagatcgtttaacaaaagaaaccaacacatttcttaaacttgcaagcaagtttttacagtcatttataacttcccaaaacaaagaaaccatggatagtggactctgtaatgcttgtacaacacataagcaattagtttccactttacacatttgaggtcttaaattctttatccaactgagagcttcccgaacaccaatggcttcggcaagggcaaggtctacttgagcgtgggcaaaggtggtacgccttaaattagcatgtcgtaatgtgtctaataatcatccccaaaccatagctacgcccccaatccaatatgttgcatcgacattgatcctcacactattaacatcatagtaaacccactg

SEQ ID NO: 262588 - DNA, 741 bp, Cannabis indica
atatcactttcaatataagcgccactgcgcatactctacatgctaaccactgccttacctattatcccgcaatatcagagattctgaatcccccagtgctcttgatcaggtgtcggtaatcctagtcacacaattcgggagttcacaaatagggttaacccctgatttcacattcataaaatattcacatggcatttaaaattcaaatattcagatagagctcgaaaagagctttccaacggtatatagaactcccaaatcaaagtctgaattacaaagtaatggctatttgaagtttgcaaaaggatctgcccagaaagaaatgggcgcgccgcggcatgctaaaaccaagcaataaaccacgaatttcagcccttaaatcacatccaaacaaccaaattcataaccaaaactctcaaatcataaaataggtttttaatcatcatacagagagtttaaaacacatacttcatgcataaaattcacaattaaacttaaaaatcagattgcactaacaacctaaaaatcaagcttagcttagcaacttcaagatcttaaacaagagcttcaactccaacaaatcaaacaatttccagtagcaaaaaccccataagaacacatgattccaagctagaaaacaccctatagtcttactccatgctcaacaaacatgaatgatgcaatttctaactcaattcaccaaattccacatcaaaaccatgaacatgcaacattaagaac

SEQ ID NO: 262589 - DNA, 1302 bp, Cannabis indica
aattactagttcttatatcaaaaccacatgttggcctaacttaatttcttgttggattttaatttgtatggaaatgaagatctagattatgcttggcaagttggaatgggacattactacaatgcgttttttgaaggttgtctaacaaattttgaaataggcgatgaaggtgtcgaggcgactcaactttatccagaaatcaaatatgtttccgtagacgactacatgaggcgctatctctaataaatgacacatatatagaccttaatataattttaagtatataataaagtctgctggggtttctcattcttaaatttttagatgtcggacgtcgccttttcttttagccaggcccgtcaactctcctagggattaggtgtggcttggtcagggtctatggttttactagtacgattagtcttataactgtgatataattttgggtgtcttttgtttaggttattgtgattaatgttctttgtgatatggttttgtttttattttattgttggttcgtcttctttgttctttgatggcatgccatcaaatcgttgttagtgtttgaaaataacaagatttttatggttaaagaagttgttaattagtggtgtagttacgtacattatattttataatagttgagtgttcaagctaagaagttgaatgaacctgttgcaacagtttttactattatgtcttatgagcggtggaaaaactgaatatatgtgttcttgaatctaactatgatgttgttaccttttttatctgattttatttcaatttcttttgttaaacgatctgaaaatcaagcagccggttggttgactcattcttcttattataatcattgtcatattcctaaccagagatgtcctaattgaattacaaatcttattattttaattgattactattaataaaattacataacatttaccaaaaatacataaaaaatttaagggcaccaaaaattatcaagaattataatatctgtattgcatatcataaatttgttatatacgtattttgtaacacttatggtaaaatctcctattgtaaaaacatttaccgaatctttgtttattagcaatttagcatgtgatcatttcaatattcaatatatgtctatacatctatacaatatataaaaaagtgggtgacttttgagtttggttgttattttgtccagatgtaataattttttttgttctatacaatatattaaaatatatatgtgttgggactttgagtttaatgaagttattttgtccacctgtgattttttatttattttttttt

SEQ ID NO: 262590 - DNA, 736 bp, Cannabis indica
aaaatatctacaaaattaaagcataataaaatgactaatcctatgctgggtccaccgatggtaattagtcaatattaagatagtgtcattttatttttttatttctatattgttttattcatatcatgcataaatttaccatttaaacagtgtttcctatcttaatgagtccatgaccgtagaaattagaataatagacctactacgtactctattacacatacgtctgaatgtaaaaatgagtaatcgagagtattcagaaagagatcatttctaagtttcctgatatcatgtcaaaattatagtctatcattgcatcatttattatgttttgtaggaaactcagtgagtgatcagtggtctggtacacaagaaaaaataagttaagacgacaagacaataacacagtttaaatatttcattataacctatacgaacaaagataaatattctttttaacaacatttaattttacttttaaagccattcaaaaacaaaacgatcaaagaagacacaacaaaatatcatcaccctctcgaaatgaagtatgaccaaagagaacatcacgaccaatatgtaactcccctcagcatttgaagatagaatatcaaagagaaatgttgcttgaacactattgtcccctagaaagtagtccaaaccgaaactagaataccatcaagttgggttttatgctctaaataaaactctaattcaatgtaatccattttattcaaca

SEQ ID NO: 262591 - DNA, 904 bp, Cannabis indica
taggagtgttcgtgagaacactgataccacgtataaatctcttgtgtcaagttatttatttttctgcaaatattttatattctgcctgttcagttttgctgtagcagaattactttctgctgctgcaaacacttacagtttttatattttcttatatacaactgacatttgcaaaaatacgggttttcattaataaaaaaaatgtttgataagataaaatgttaaacctaacatattcctaatcttaaaaatttaattaataaaatatattttgaaaataacaaatttgaaaaagatatgatatggttagcaaattttgaaattagtacaagattatttttaaaagataatattttaatatcaaagtaagatcatttaaaatttaataaaaaaaataatatctgatcttataattaaaataaataatctaaaatttcaaaaataaacataaggcttctttgtgagaaatcaaattttcaaaattcaaagcctactaatattagaaactaattttaattaattaaaaaaattaataaaaattaattttattctgacaatgagatttttaattgaaaattcagattctacacaaaattctaccaaaaattggcttttgtttcaataaaaaatgatttttgaatcaaaagttatgacaaaaataaaattggtgcacagggatatgcattgcatacccctacgcgcgcggaatcaaggggatggccgagggaataggcggaaagcagcctcacttgaccgagggagctcggcactgcagcccttcaaacaggagccgtgtccgagaatcctcggtcagccctgtctgaatggccgagcgtgtccgagcggatccaaggctcgtgcgcgcgcgtgtgacattcaaatcctgatattttcgttcaacttc

SEQ ID NO: 262592 - DNA, 187 bp, Cannabis indica
ttatcaagatctgaacctgaatctctttctctccttcttgggcccgattctccttcttgttgattggattcttcagtcttacacactatgattgggataccacttgatgtgtgcgggcactcactctatcactcaaggttatgaaattatgaagagaataggaagagaaggtggttcgacctaatag

SEQ ID NO: 262593 - DNA, 951 bp, Cannabis indica
tttcttctcaaaattgcccaaacttggtgaaagttcttaaataagacatagtctatttttgaattctaatttacttgttaaatacattaattgagtctacaagatgatattatcttagaaaatatgagaaccatgggcatatctaaccaagctcctaataagtaaatcttaaaatttatcgagtaaatttcctaactttttaattctttttgactccactatagatttaggattgtactaatgattacatagaatgctctatgtataaaatatagatacgctatgaatttatctattatttcaatcacaacaatctttgatcctctatagacagtctacattgagtagggacaaaattgtcattttatccttcaatgtattttattcttaaaacacttagctacttgtaaatgatattttgggaaactaatataattaccaaaatgagcactctatcatttatcgcgttaagccaaactctaaggaaaccatcttttcacttctaataaacatagaagctatagatgtccatatctatgattaacactctcactaagttgcattaccaagtttccaagatgtaagcatgggctagccccgtaggtaagcttgtaacgaacaagtcaaagaactagtgcaatacatttaagtgagagctcaaccatctcaagattgagatcaaatgatctatgatcaactaagtgacattgacttagaaaagatataatagtatatttatgatatcttttccactgtcaatatcgatccaatcttaggtatagtcaatacatctgatcttggtttactttactaatgccttagaaaagacattccacacagttaagtgtaagtaaacattatcgttgattatcacgtcgatataaatccagtgcgttgataaattgtgagactaaataatttgaagcatataataacaattactttccactg

SEQ ID NO: 262594 - DNA, 1097 bp, Cannabis indica
caactaaaagatcaaaagtcgtagaggtaaaaaaatagacaaactatgttgtttacaacccaaataaacatgtgataaatcacacctttcaatagtaatcactcaaagatcctccaataaaaattaagtaataacaaccctataattcagattataataaaagaaaatgacaaaccgaccaaccatatttgagatcatgttgatgaaagagcgatctataaaatatgggatcaataaaagtctagagatcctcttaattcgaatacgaagaggaatagccatataaagtattttgagccattcaagaacatactaaattacccaaatagagacttgccccctcttcataattataacaatccctactataataacaataataaaatggtgacagacaccattatacaagtgttccatataaaatatcacaaataaaaaaaaagccacaaataaaagcttcaatggcaaaaaaacacccatattctagtgagaattttacatccctattaaggattgttgatgcagaaatctagacacagatctttgggccacactcgcacactagattagtaagaaagaattataagttaagtaaatataagagagacacaaagaatttatagtagttcattcctcgtatcacgataataatgtagctacttctacttcgacttttatttctcccgagatggattacaaaaaaatggctaagtgtgctctaattctagagagaaatgccctgaccttataagggatggaggtcttattaaatggaaataaaataattcaaaatatggaaaaatatatttaggctatttttgaacgtagatgatgatctaatgtttaaattgacttcgaaggtcggtcatcaatttttggagcttcaattgtatctacaagccccgtttcaagtaagttgtagcttaaattcattactcccttagaggtgaaatatggagtcgataacttcagaattgtaattgaagtgtgagacttgacttgatagaacattgaaatagcttaaaatacaagttaaattgcgtgaatcaaatcaatattgagtaacttatgatgtaacaccctaactatcttaggcg

SEQ ID NO: 262595 - DNA, 644 bp, Cannabis indica
ccaaattgtaaacacatccaaaactcaaaaataatatagactcgtggagtatgtatatcttaactacaaaactacgtaaaaatatctagtgttcatttgttattttagtctcttcttttcttgaatttattcttgaatcaataatcttcttagattaagttgacgaaaaattgcgtcaacagtttggtgttttcattgagagaacgaaatttcaagagattcaagaggaagagattcagattcgtcatcttcacaatctcaactatgaaattggttaaaattgagagtctagtagaatcttcttctactaatcatcgtcaaagcatgcaggaagtaattttaaaattcttgcctattttacataatattataattatatatgtgaagtatatataagtcttttagccaccaaaaggacatatacagaatatatacatatattcatatatatatgagagaaagactatatatacatatattcatatatatacatattcatatatatacagaatgaatacatatattaatgtttatgagagaaatgttgaatggtgacaacgttcaagatattttatttgcataaataataaaaagtgcttgggttgttcacttattgactactcaagtggttgtcaaaggattta

SEQ ID NO: 262596 - DNA, 520 bp, Cannabis indica
attaggaagagtcatcaaagttgttcttgcagatcgtggaggagaatattatggtcgttattcagaatatggactacacatgaggccttttgttgaatattttcaagaaattgtgtagtttctcaatacaatatgtcaggttcacctaaggaaaatggcgttactgaaaggagaaattgcactctcatggatatgttagaaacatgatgagtagatcaaatcttctagagtttttatggggtgaagcacttatgactgcaacttatatcttaaatcgtgttccaagtaaatatgttcccaaaacccttttgagttgtgggttgggagaaaacatagcctgattcatcttcgtgtatgggattttccagctaaaataaggatttatgattctaattttaaaaagttagatctaagaacagttcgctgttatttcattggttatccaatgttctcaaaggctatcggttttgctgtcctactcgtgatacacgaattgttaagtctcagactgctaattttt

SEQ ID NO: 262597 - DNA, 840 bp, Cannabis indica
aaactcatacgagagaagccctgaaaaaataatcagaaatctaaataagattgactcgtggactatccagaattttaactgcaaaaaccacgtaaaaaaccatgtgttcatatttttatttctatagcttttatttttctgtgtgaaatcactactgtgaggttcaaatttagttaacaaaaaatctgcgttaacaaaatagtaaaaatcaagcataagtggccgaccataggatgtgggcccaccacttgcaattttgccatttttcaactatttaacctattctttcataaatgccatatattctaattcaaccacttaaatgcaattagacttaataaagtctcttaattaacaaataaaccctagaatctcttttcttcacaactaagccagagcttagtgaaaattcataaataagacatagtctaattttaactaatatgatcactgaaataagagctcttccatttatctctattaagccaagctcaaaggaaatcatcatttcccttttatgtctaaatggaagctatatattccatatctatgtttagcgctcccactcaattatactatcatgttcccaagttgtacgtgtgacccgaaccaaatggtaggctttaactaacaactcaaagaacacaaataacactcttgagatcaaacctaaccatgtcaggattaagatcttttgatctaagatcaaccagtgatattgacttagaaagatacaacggtaagattataatatctttaccaagatcaatatcggtcccagtccaatgtatactccatacatctgatactagcatactttgccaatattttggaaagaac

SEQ ID NO: 262598 - DNA, 1251 bp, Cannabis indica
cctgaacttttctgactgttaaattttttctctgaagtctaaactattgagattatcgaatttaaggtcttttgtccaatttcattcaattttactaatttagtgattgtttatgtactaaatcatgttacttagactttaatatctaccaaatcacgcctctcgtactttgacatgtgctaaatcacgccctctgaactttcatccatgttagactttccttactaaaattgaacaaaaatctttaaatccaacaatctcaatagttcaggggaatttttaacgactagaaaaattcaggggacatgatttggtacacatatcaaagttcaggggcaaatatcctagttagcctaaatttaatatttctagagcattatagtcttgtttttgtcctttcacttgtgctaccagtaagcattcacaggttggtgaacatgttaatgtgtaggtaggagggtttgtttgactcatgctaacagtcatgcttctgactagtgacaattctttggatgtgatcatcaaccaatctattgataattggacctattaggcctatggcgtacgggaatacatcatgtttaatgcaaattcataaaaattcaattgaccatacttgattgtttgctaccacaggcaattttcccatggatgtttgatgagtttaatatctcaaagaaattgaaagatgctactgatatactagctcagaagaaggattggcctccactatacaacgttgctgctctaaataacaacaaggtctgtttaccttgatatgaaagttaatcagtcttagaaatctaactttttaggtagccaatgttcacatgagttgagttgttgtatctaaccatttaagtttgtctttggtgtttctttcctaattgtcaggttcctgtagcagcatctgcttattatgatgatatgaatgttaacttcaaacaagccatggaaacagcttctgagattgcagggattcgattgttaataacaaatgagtacctgcattcgggtctggacgatcctgggagccgggtttttgaatatttgatgggagtgcttaacggaaagaagcctttgttctgacttgcatttcatatcctgccatactttccacgtgtaacctccccagcctcttttcttattaataaaaatgtgcctttctcccaattcttgtttctcatcattcatactaatactaatacatttcaggaaaaaaaaaaaaacttaacataataattaaaaatt

SEQ ID NO: 262599 - DNA, 544 bp, Cannabis indica
aatcactttgtggcagagtttaagagaaagcacaagaaagatgttggtggcaatgctagagctttgaggagattgagaacggcatgtgagaaagaaaagatgactcttttttccacaactcaaaccaatcgaaatcgactcactttatgaaggtattgatttctactcaactattactagagcagtttatatacatatatatcctttattgtaatgaactttgtgttgtgtcatattagagtcaataatactaataataataataataataatcatgcttctgcttgcttgcttatgtttggaattgaaaaggaaagatggaaagatggagaggataggaaagatggagatgaaagtagctatccttctgtccttcatgtttggtattaggagtggaatgaaaaggatgtagaagaaattaattgttaatattacaattaattgagaaggcctaaaataccttaattatcttgaatcaattatatattctaaagggaagtagctaactaaaaatctacatttctcattttgtttttggtgattt

SEQ ID NO: 262600 - DNA, 682 bp, Cannabis indica
cccctgaacttttctggtcattaaaaattactcctgaactattgagattattggatttaaggatttttgttcaattttagtatggaaagtctaacatagatgaaagttcagagagcgtgatttagcacatgtcaaagtacgagaggcgtgatttagtaaatattaaaatctaaggagcatgatttagtacataaacaatcactaaattagtaaaattgaatgaaattggacaaaagactttaaattcgataatctcaatagtttagacttttagagaaaaattttaacggtcagaaaaagttaagggagcatgatttggtatatatcaaaatttaaggggcaaaaattctaattaagccttaaatttaaacaagtcataacattttcaatgccacaaaggccataccttcaaaaagttaaagaaaggttagttgtttgttgtagggaaaacaaacagaatgggaacttgtagctaagatgtttctgcttgacatctattttttaagacattttctttcaaagttccaaaacagtcatctatcttgtagcccataacttctctgaacaacaataaatcataaccatagttgtaaagttccaaaaaagtcatgcttttaaaagacaaatttggtgaaggaaagtagctattctacatcacagaatcaaagaacattatatcata

SEQ ID NO: 262601 - DNA, 567 bp, Cannabis indica
cccactttgttgattgtatcttagattcatattggtcaaattaatttgtaggtattggcaaacagcaggagaaagagaaggagaaaatccaatgaaaaccccacttccttatattatcatatttggtatgtcaactccttttgtaatcttagccattggttttgctaatggttggattaaggtacctattagatgatttggataggattgcggcaccaaaaatatcagcagagccatcatgatcatgagtttttctaattcagatatgtatgtatgtgtttcttgtatacgaatgaatcaatacattattcttatagcatgtttactaataagtaatgggaatcaatagtaaggtaattattctcttacatttgtttacttgcattattaaaattaggaaagggagaagttgattaaataagggagaaaagaaagcaccaattttgtaaggaatgccattaagggtaatggatttttattatttttattttatattttaatattaaatatataatgacaattttgtcctttaaaatatgtcttgcaaaataactatcatataatata

SEQ ID NO: 262602 - DNA, 723 bp, Cannabis indica
aacgaaaagaaaggctcacatttctgtgattaattatattcctggattggtttatgttgagatgaatttgatagttttagcaatggaaaaatgttatgtgctcagtttacactagatcatgttcgtacccggcttgtaacgaacgttagtaatttggacaaatatattgtaatattttaaggtagttgcaaactagaaatgcaatccccaaattccaagcattaaaaatgttgagaaaaataacaataatagtaataataataaaattgtgacattccatttcatttttcaatgttattgttttgtttattgggaagtaaggagttattgttgtgtggattgtgatgatgcagtcttcaaacttcaaactttaacctttttcttttttgatgggatggttaaaccaatgaccaacctcaactacttatataaaaaaatgaccaagctcaacccaatcagcaggtggtgcctttatctatttccaatccttcaacttaattctcatcacccacatctgcatgcaatgtgtgtacgccgtaatagttggcgttatattgtaggacatttttttcactacacatttaggttgccacgcacaaggtgccttaaaatctattttttaagttatttggataggcagcactctataattagttagagcactcacaacaagtgagctataatagctaaaagctaaaaaaaaaatagctaagagtttaaaat

SEQ ID NO: 262603 - DNA, 673 bp, Cannabis indica
ttgtgcaaacatttcttcataagcattttgccgacctgtgctatcagcttctgatgaggtggagactgcatcatcttcagactcaactggatgacagctttgggccatgaaagccagtacctgcttatcctcatctgatccttcactggctgtggagttcttttcttcttcactgtcactccaggttgctgcaagggccttcttcttttttagtgtgttggcgcactcagcctggatgtggccatatccatcacactctctgcacttaattcctcgacctttttgatcagtaggggcttgtccttgtttgaaatttacacctttgtttctcttgagaaaattttctttgtcagctggtgaattttttctgtagttctttttcaagaattttgcatagtttctcgtcaacaaggcaacagtttcatcagtaatgccattcaattcttctagaactggtttcttgttttcttggtgaataagtgcaatgcttgcatctgacttttctttcaccacctccttctgtttcttggttttcttccacctggacagtgatagctcataattttgcaaggacccgatgagttcgtcaagatcgagttcctcaatgtttctcatttcttggattgaggtaactttggaaatgaatcttctggggagaacaccaagcaccttt

SEQ ID NO: 262604 - DNA, 837 bp, Cannabis indica
actacattatagaagagctacctatgaggctgtaccacaaacatatacaaggtaaatctctgttttttttttaatttatgtaatttatttaattttgcactccattatgaattacttaacttaattgttgctaatatttgctaattttttaattggtagtggcgattgtggaatgtttgccatggagtacattgagcactgcatgtttgaaccgttcatttgagcatgttaatgatgataacatgctcacctttaggcataggtggtgtgtggacttattttacaaggacttaacatggtagtttttgtaacgttatttatatatacacatagtcttttgtaattatattatataatattgtgaaatgttcaatcgctcaaatgtcgtacctatatctcatagacatcacaaataatttaacagttgtaataataacttgcagaaaaagataattaactcgctaaaaatgtcgcaaatatatcgcatagaaatcgtacaaattagacaacatagaatattcggcatgtcaccagtaaaatcgccaaatgtcgcacagaaatcggatcggcatcgcaaataaaaaataaaaatggtgcaacaaattcgcacagagtcgcatacatatcgcataaaaattgcacaaaacatcagttatgaaatatgaaataaaatcgcacatgaatcgcataaatgtcgcacaaagtcacagacacattaaaaatgtccatgcatattgttaaatattcaagctatagtcctgttaaataacaaccaacaatataacacatatgcatctaaatattagagaaacaattcaaactcgagctttgcatgta

SEQ ID NO: 262605 - DNA, 607 bp, Cannabis indica
tgattgtttttgtgttgtgtttaaattttttttaaggttgtcaccaatatattttgatgtctaaataatttacatatttaattagtgttgttttctagttgtatttttactgtatatttaattaatttttctcgcaaaattgtagtacaccaacaaaataactatataattcaaacgacagatacaactacattattaatatgcaacaacacacatacaactacattatcaagttaaaaagctctactcactattaaaaatcaagtatgacagaagcctcatgctttacatgcaatcgaaaactaatgttttgtagtaacattgtttgttgctttatagttgttgtaaagttgtaatcacgttgtttgatttcattacttttttaaacacgttgttttcatgttgtttatatgttgaacttcagtagttaaaatttgtagaatctttaaattttatatactcttgttttcatgtttttatatagatgtattaaatagatgttaacaattataacaaagaattactaaagtttatgtatcaagtattagtttaattgtaatagttaatgtttgtttataaaaaatacaatagttatgtaatagttaaa

SEQ ID NO: 262606 - DNA, 926 bp, Cannabis indica
gtctgcagaagcaaagtctccagtaagttcaaaaaggacaagatctcaggtaataaggtttgttccaatctatcatttttgtggtattaaggggcatactcgacctaaatgtttcaccatgcagaatttttcaaaacaaattattttggtaatttgaaaatttttctgataaaagtgttacttctcaaatgtggtactttgatagtggttgttctagacatatgacaggtgacaagggttttttagtgaatatcagaccaatgcaatgtggtgaggtcacgtttggcaatggtttaacagaaaatgtcattggtgtgggaactctcaattttgaagggttaccaaggttgaaaaatgttatgcttattgagggactaaaagctaattcacttagcattaatcagatttgtgatcaagggtataccgtcaattttgacaatgatcattgctttgttcttaacagtaataaacaatgcattttacaagggtttagatctgtttataattgctacactctcacacctgttcttacttgtcattctacatgtgaaaataccagtgctgcatatatttctaaaaatcttgttcaacattctcgtacaaaacacattgatataaggcatcattttattagggaacttgttgacaaccaaaaattgcaattggattatattgatactgaaaagcaattgactgatatttttactagagccctagattcaagtcagtctgactccctcaaaaattctttgggggtttgcactatttaattctttttatttggttctccattttgtacaaaattttaagtagttcttatcttgcatctatccttctttcattcttagttgtcaaatcttgtttatgttttttggtgataattagcttagtgtcttgtactcctcatacttttgaggttgtgttaa

SEQ ID NO: 262607 - DNA, 686 bp, Cannabis indica
acccatttctttgggtatggagtaggggtaaaaatcagtcggttatggtcggtttttataattatataaccgaccggtcggttacggtttttattttacgaataccgtaaccgattgtttagaaattttaactgtataaaactgactgtagggtttttcagtttggcggttttggacggtttttggcagttttaggcggttttggacggtttattgcaatttttggcggtttttcggtttaactattttaataattttaaaaactgaaaccaatcgccatgtcaaaaaaatcgaaaccgaaactgaccgccaaattcagtgatgacgtggaaccaaaaattcgattacggtctggtcgatttcagtttatcggtttttatgaacacccctagtatggagcgacaaaagaggggaggaaaggtttcgggatggagtgagaattccaaaaaagccaagaaagattattttttggtcctccaaatttctctaatttatgctaatttaattctaaaataaataattgttgattttactaatattatatttacttttttagatgacgtttggtaatacttttgtaatcagttttctgtttttaaaatttaaaaagtgaaaatatttttcaaaaacatgttttataaaattatttttacttttcaattttttaattgaaaatcaaaatttta

SEQ ID NO: 262608 - DNA, 1897 bp, Cannabis indica
tagaggttacatacttgggacagttgctacctttcttttgcagcgagagtatgtgttttagggttacgatgttactagataagtattatcttacttttacaaagtgttgctaaagaaatagatagtttgcatcgtcactttctttaggggattaatgagaatcaaaataaacttcatatcactttttgggagctgaattttttattaaaggagtttggtggtattggctttagaaatagtattaaatggaacaaggttgttttagctaaattcatttgggacatttctatgaagcaagatcttcttcgtgtcatatgggtgcataatatttatttaaaggatcatgatttttggtcttattctttgaaagcaaatattagttggtattagtgaaaattggtcaatcttaagaagttatttttgtgtccaaggttagtaaactttatcagaattttcttcattatgagcatggaaattacacctaagttgtgtatatgacagatagttttttgtgcattcacttgggaagttgattaaaagagattttaaaattagaattttcaatataactaatagaaagatgaaaaagtgagatttgactgttttagattttattgaggacaacagagattcctctggccatttgaaaattttgtctgtttgtagttataaaaaaaaagagtctggtatgtcagagattctctatctagggaaagatgtaatttaagtctttaacgttttctgtctgtaataattaaagtttgtaatgttttttgttagttgagggcctatatatatggcctcattttctgttaaggggacaagtttttgaataataaaaatcttatctatctttccaaatatgtctttctaatggttatttctcgactaggatagatcataagaatattatcattagcttaaagattaccacccagaagatatataaaagcgaagtctatatagtaagtgtcaatctcaaaagcgcaatctacaaaggttaagaggaaaatccaacgttaaggaaagcttaagcttgatcctgactatatggattagtgttatatctctttctatgtatacaactcatatctaatacacttaaatggtatcagagcccaaacaatattctcattgattgatacttatagggaaagcccattctcttacatcatgactacaccttatgatattattaactcttttgttgaattaaatttttttaccctttttttttgttattttctacattttttcttttccattgtgaaaatctaaccaccaaacatatatttgaaatgttcttattcaatccatcaacgaatttttgttttgtttttttgttaaaaaaataatgaattaccgattttagtggaaattacaaattttatgaatttttattctacttgtgaaaaaaaatagtcttttcaaaaatattatcttggaaaaattcaagaaataattaaaaaaaatatgagaaaaccaagtataggtaccaattgtaaccagttacccttactccccgtttttttttttttttgagtatagggtaatggtattttacaatcatatattagctcaatagcttaaagttacttctaacccatcacctctcttacccttagtgaccttatatgatatctttttcatttttctaaaattaccttataaaaataactctttaaacgatttaggtccagttaaagtttgaggccagtgaatttggtatgataggaaggcccaaaccatagatatcttttataagagcccaaaccatattattatgaatctattcttcgtcgatgaaaataggggacctccaattccatcttcttctctttatgttcagtctcagatcataggaagaaattagcattgggagagagagagagagaga

SEQ ID NO: 262609 - DNA, 491 bp, Cannabis indica
gagtctaaatttatttaagtcaaatgattttgaaatctttgatactttactaattgatttcattctctgggtactaacaccacttataactctcttgtttcaagtttttaatttgcacatttattttgtttctggtttgattctgcaaatctgtgttctgttgtgacaggtttctaatctgctactgcagatcggtacaatcacatttttttactatcattaaagaaacttattgacatatgcaaaaatacagtttattagatgtactctgaaggtgctaagcttgttaaagcattcaggaacatttctggtgctgacattgttaaagttgagagacttaccttgcttaagcatgttcctaatagtcgtctcagaaggtttgtgatctgaatcaagtcagtctacgagaattaatttacattcaatatacgcctcctccaatgagtttcttgagatgatgagtctttatataatcaagctcgacaattact

SEQ ID NO: 262610 - DNA, 841 bp, Cannabis indica
aattaaattagactatgtctagtttatgaaatttttcagtaagatgtggcttgattgtaaagaatagtgttttggggtttatttgttaattaagagactttatggagtctaattaataaatattacaaatgacaattttatttgatagttcttttaattattaaataaatagttttggcatttatagggttgaaaatgtaaaagtggtatttatgaaaaatagataaaatagttggaaaaatgacaaaacccaaacttgagtggggctcactaagtggtcggccatcaagtgtatttttaccctattttaatcatttttttattcctaataattcaaccctaaccctaatgaagatagtataaaaggaaggctatggtctcttcatccaaactaatgcctccaaagctaaaaacctagctttttgttgagacctcttccttcttctttcttcttcaattcaaaacactcagtctttctttaccaaataatatttagccactagtgattgagtcagtgcccacacacatcaagttggtcctcaatcataatatgtaagactgtgaagaatccaatcaacaagaagaagaatcaggctcagatcttggtgatactatgctacagaaaggatacaagggttagagatgtgagtagaaggagtcatttaattttgttgcacccactgtaaggtttcttaaactttatatgtgtttatttacattgttttagaaattcatattaggatgttaaataacatacatggtagtaaatctagatcctagtacaataattccaacaaaaaaattttgcagaaaattaaataacttgacacaagagatttgt

SEQ ID NO: 262611 - DNA, 1180 bp, Cannabis indica
tttaaattttcaaaattggtttctttttcttgtcttgcttccaagtttatataaaccaatctttgtcatttaactcaccacctacccgaaccctttttcttgttccttgtgtgtttctgttcatcttctctttcagatccaaaatggtgagaaccaagaatctagggcacactaaaaaattggaagaaaccgttgcaactccttccaatgctccccctgctgcttcagttcatcctcctgctgttgcaaagcctggagattcatcgcttccccagcgtgaatctcaaaccgagaagccaaaacgtccacccaagcaagttgctcgcaaatcggtaagacctcttcgcacctggtcttcttcatctgaatcttcgaaggaatctcctcctccgttggcagttccccctcctgctgcatcaattcctggctccactccaacaggcccttctactcgaactcgagcccagcaagcctctgctgagaaggaacttcgagcctctcaatctcgtgataagacagtccctccagccaagaagaaactcaagactaatccaccctcggcctcttcaagttccagttcagaagaagaggatccaatggaagtctcttcagacaaatcagtgtctcttcattctgagaaggacagtgaggacacagaactcgagccagagcctcctcgatcaaaatctgcttctgcagcaaaggcctctgctgctgccaaaggcaagcagcctatggaagagccttcttctggtaatgttccttcatctctttctggctgccctcgattttattatcgtgataatgaacgtgactggaatttatatgcaaaccgtaagtttgaaagtgagaggaactatgatttgcatgctcatcgggtttatgggattgtaaagtttattcaatttcatcaatgggaaaacactctcactggtttcattggattcattgcaaacattgttaaggatttctatgctaatctcactgatgattttcttgatgagaattctagactatatcgaagagtttatgttaggggtcattggttctctttttctgaaaaggacattgctcaagctttgcaattgcccgagaatgtctccaatgcagtgatgtccatggatcgtgagttgatgctctctgaactcacgggtgctcgatcagaattgaaaccagggga

SEQ ID NO: 262612 - DNA, 1427 bp, Cannabis indica
cacgtagagatatgcgcaatgacgcttatatggaatgtgatatatatgagaaactagaatctgggattaaagttattactctaaagtgagcggtttattggcttagggttattacccaagtaaattgttaatatgtaattgttatgccatgatatatataaatgtatattgaagtaaagggttatgtgttcaagacataatcgggttggactcggtaactagaaccgagatgaaccgttctaaggccttaatgtaaatagacgtgtgagcgtaacacgtaggtctatgccacatagacataaataggcgtgtgagcgtaacacgcgggtctgtgtcatacagacaaaaatgaaatggcattaatatttatgtgatgtgtatttatgattatcgatatattttactgtcttgctgggcttggctcacgggtgctctactgtgcaggaaagggtaaatttgtttctaatcagccatgagtgtgggagctgggcgatgaatgtacatgttcgggccacactagaccaagcgggttggggtctaccagtgttgaaacttttgtaactctattttgccacttaggtcggctaagggaaaagacttgtaatattttgtaaaataatttttgggatcccgaaacatgtaacttttgtttgtaaggttaaaattattacaagtttattttcattccgttttcgttaaaagtttaatttccacgcttattttattagtaatcccgtttggaggattagggtttcttaatcatcttgggtagcgtgcctagggcattacaaagacagagtacaagtggagcacacccttgccaatagcaagacaaggtcttcttacaaggtatggcaaaaccgtcaagcaacaagcaaaaggagttaagcgagctgtcaaggagctgtaccaacatgtctggccggccaagggaagtctataggccaactaggatgagcttgtatggccagatcttggcacaagctggccacccaaaaggtgactttcagaccaagggagctttcgttcgacccaaagaacctaatctctgcaaggaaaaggtatagaaacctgacctccaattgccaaaggctggcctccatctcaaaaggctagcatcctcttagtaaagttggcaggaacatgacctacaagatcctggcaggcacatggctgactagaccctggtaggcacatagccgaccataccctagtaggagcatgaccggccagacctcaacctgtagaccttgcatggttggccagacctcattctacaggtgtatagccaactagcttctccctgacaagataatgatgcacaaccttcatctgtggacaataagtcaagctgcgagttgggccttgacaatccattaagatgctatgaaaatctctagttttaaggggcaacttagtcatttgta

SEQ ID NO: 262613 - DNA, 572 bp, Cannabis indica
catatttgtgaattcgttctttccgttcttttcttttctttttttaaaaaacaaaaatccttgctgaatgcagattactaactggtgctattcttgcccatgagttaatgcatggctggctacgccttaaaggtaaaaaaaagctacatataaagcttttcttccatgtttatttaggtgtatttttcttcattcaactttgcaatgatgcaggttttcgtaaccttaatccggaagtagaggaaggtatctgtcaggtgctttcccatatgtggcttgaatcagaagtaatgccagtctctcgaaatatgccttcaacgtcaacagcttcttcctcatccttttcatcatcgaagaaaggcggaaagtcgaactctgaaagcaaactcggagagtttttcatgcaccaaattgcacacgatgcgtctccagcttatggaggaggattcagggcagcaaatgcagctgtcaacaagtatggtttacctcctactctcaaacacattcatctcactggaactttcccattgtaatgagaatttcaaatcattctgtatcattttacttctgtt

SEQ ID NO: 262614 - DNA, 507 bp, Cannabis indica
tcataggtattcgataaaggagtgtaatgatagggttgacgagattattaggagttaggggcacttcaagttgtttcttgaaaccattagaatatacccctttctcttaatgtacttcctaaattttaaagaacatggcagcttcttgaattgggaagacatggctctgttttcccaaggaaaatcgtaccatagattagtcgacagttgcatccatgccaaagtctcatttgatatttctatctaacggccatattatttgtacttaatgccttgtagtcatttctaacgatgtctctattctttgttttacagaaaaacaaaggactcccaagataagtatgctgaactcgatcatgggcaagattgacaagaatatcgcccaaattaaggctacggttgggcctcaagtgatctcagaggctgcccaaggtaggggaaaaagaaagagcatggcaaaaagggcccgtaaatccaagactcttagtgccccatccacttctgcca

SEQ ID NO: 262615 - DNA, 623 bp, Cannabis indica
acaaaaaattagaacctgaacaagaatcgccgaaccatgaccctagaaagagactaggaccctgacgaggaccccaacccagacctagaaccgaacacagacctaacctaagaaccaaactgagattggaactcaggcccagacacggtcgtgtaccaagaccggaactaagacctggacttggacttaaatctaggacctgatcccaaacactgacttggacgtagatagggatccggatacgaaccaggtttcggaccaagacccagactgggatcaaaatgcttgacctagatctggacccagatcctgatccagaccaaaacattgacccgcactcacgacccgaacctggacctggaccaaacctagacccagatcggggtccagacctgaacacaaacccggacacagactcagacccgaactcaaacaaacaccaagaatcagacccaaagctagacccggacccggacctaaactcgaacccagagcaggatcagaacggaggacttagacccagaactgcatcctgacccagatcggtattggaacttgagactcagacccaacctagagcaagacccagggcgcaaacccacacccggagcctgatctggacc

SEQ ID NO: 262616 - DNA, 747 bp, Cannabis indica
tgggttcgcgtcatgggccttggtctagattgggttcgagtcccaagttccaatatcgaggtgagtctgtatttagttctgtgtctaagtccttggttctgatccttgtttgggttcgagtttgggtttgggtctgggtctagctttgggtctgattctagctgtgggcgtttgagttcgggttcgagtctgtgtccgggtttgtgtccaggtaaggaccccaatctgggtctaggtttgggtcgagatcaaagttcgggtcccgagtacgggtccaactttgggtctcggtcaggatctcggtccagatctacgtccagcatttcgatcccagtctgggtctcagttccagtctgggtacacgaccgtgtccggatgtgaggataggtttgtgttcggtcccgagtaccagtcttagttttggtctgaggataggtctttgttcggttctaggtcttgttccgggtcctagtcacggtcctagtcttgttttagggtcctggttcaacgattcttgttcaggttctaattatgggtgccaggtctaggtcgtggttcgggtttgcttcttcgtctgggttttggtcctagtctaagtcccagatctagacatagcctactggtcttttcttggccccgttacccaaatcccgagacaagatctggatcattgtcacgggtctcggtctggttctggtttaggcctaggtcccatatctgagtttgggttcgggatcgagactgggg

SEQ ID NO: 262617 - DNA, 757 bp, Cannabis indica
aaaaaaatactattgttattaatttttttttatttacaaatgtttatttttttgaaaaaaaatagtgagacagatggtatttttaaatacactctacctattttttttttagaaaaaaaaaacaaaccatatttaaatctcaaatagaaaaaaaaaaaaaaaaccgtaagcattatatctctccagctacctcttccctttgtcttctttcctctctctcggcacaggtgaggcagccaccttaccttttctctcctcatttctttgtgcgacgaccattgctcagctgccctaccagtcgccgcccctcaaccacgcccaggacaacaccctgaagacctgaatgaagaccaccgacgatcccgttgtcattattttcccagaaaaattgagactcatgtcgtgctcttcttccttcaatctccatctcgttttcgtctgtcgtggataatttggcgagtcatcattcatggatccgagctacaacaacggtcggatatatttttttattttttttatctgttttaggtttgttacaacctgaagattttttgagttcattaaaatagttgttgtttgcaggtacaatggttgttgaggatcatgggattccaactcaaaaccaattggcaatgagtagagtagccatgttcttatatatgactcaatacttttaaatttaatccatgtgggacaatgttctccaatatcccccctcaagatggtggctatttttattagaatattttaattatgg

SEQ ID NO: 262618 - DNA, 778 bp, Cannabis indica
aacattatcattcttggtatttggggaattcttcgtacataggttggttctagactcaagacttatgctaatttttccacattatgcatctcatgcagttgacagaaatagtattagaacatggaccagatatcttggggattcccatggaagtgaagaaagagcttttattgaacttacatgaagcttcgttgacaatggatccaccagaggactgggaatgtgcaatgcctgaccagattgggatgcagcttgcatcagcctggggaatcgatttacaacagcatgagaaataatatttcctaactagatgcacagcttgatgaaatatttgtataccttttttcctttattttgtcacgtggtggtttgaatatatatacttttacaccaagctgtagaaagtggcccttttcaatacttttccttttgagcttttacgaacatttggttcataatgtgcattactgatccgtttgatgaaaattgaaaatgagtataattttgctttgtattttgtgaaatattttaatgctacattaaattaaagtctacaattctagtggggttcttctggtgatcaaaggaagatttgaaacagtacatcgacctaagacgatgggtgggcttggattttgggattttcaactctttgatcaagtttttttggctaagtatggaagttatttctatacctagattcattgcttgcttgaattttgaaacataaatatttcccaaattgctctatccttgaggccatggaaaaagttggttc

SEQ ID NO: 262619 - DNA, 649 bp, Cannabis indica
tatttttataagtttcccaataaaatctatacaacattacatttcttttgagaagacagtaatccaagggacttgtatagaaagtgtacacaaaatgacaagttagtggtaaaagttcgttatcatttaagactcctttattatttctttatttctttttcacatgacttatatataatgaaactacttaagtaggaaaaaagcattaattagcaactgacttagtaataatatatttggtaaattataattataattgcagataaggtaaaagctaattgaggacaataaagctaacttttgttaatacaaactgataagtacttatgataggggtaacttttcatgtacaacaaaaattattatattacaaaaaaaattgctaaaaaacatatttacaaacataatattcaaaaaaacatattgaatgtttacaaaaacataatattcaagtcattaaattattaaatgtaataaaataaactattaatacttactaactaaataggtcattaatgacatgtatcattaatacttactaattaaatatttaaaataagcaaaatcacatgaaattattacactaacttaatacagtagaacctctattcaagaataggactaagtaaattatattctaattgggagg

SEQ ID NO: 262620 - DNA, 1219 bp, Cannabis indica
aaaaaaaaaaaaagatatgaatagaatatatataacatattttgggtgggggggccaaggccactgtaggcttgtatgtgcctccgcccctggttgctgttgttgttgctactattgacgtcaatggatagttgatcatcacactctggaattaagactagaaggggtggcttggaaccttctttggataaaatgtcaatggctccctgagcaatgtggaggaattggtttggtttaggggagtggaggagggtaatacttgcctccggatcaatttttctttctttgtttttggaggagaggagggtgttaggctgcgtaactaactcaagcaaacaagtaattgagatagatggcagggttaggcctagggatgcacattttcccgtatggggatggcctgcgggacccgtcccagtggaaatttctgtctaaatggggatgagaattatttttttatctccaaatattaaaactgggtgggcagggcatcccgatagattcgtttaatttattaattattttttgttaatattttatattttataatatgtgtttgtattttttagtatattagtgtaattttataattttttaagttgtgtttttttataataatcagtatattaaataataataatgtgtaaaaattttaatttttatgtaatttaataatttttatattaattttttttaaaaaaaaatctttagttttacattacaggggattcccccatctcgtcccccaccctattagaggattcctcaaccccgtctcaaatagaaaataacggaaaatgagaattaaaattctttaaaaggattgggacgagagagcactccccgttgtatagacttttacgcttctttatcttattataataaatatttttattcaacacatttttaatgagaaaattacataaagtgctattttttgttaaaatttttgtacttttacatttaatttttttcggtaatctatgaagacacaaacaaataaaaaaaaataacaaaagaactacatgaaagtaacagaaaaataacataaaaaataatatataaataacaaaaaatcagtaacaaaataataaaagtataacataaaaatacatcaaaagtccgtatttcatgtaaataaaatctttaaatcgtaaaaatatttaaaattccgtataaccgtatttttgtattttttttaatttttgtgttttttttt

SEQ ID NO: 262621 - DNA, 867 bp, Cannabis indica
attttgaaatgaaagaaaagaccattctattattccattctattattatttctatttttatattttcattcctcccaactaaacgtctgttcatcattgcaatcaagtgacaaatctaagtatacatcttaagaaaatttataaaatctagagatcgaattagttactaaatactatgacaaatttctttctattattcgttcactaggaaacagctcgtgctttgcatgcagttgtttataaatttcactataagaaaaaatacttttactggtgcatttcgctaaatgcatcggcaaaagttgccagcataaacggaatgctggatttctactttcattcagccacaacttttgtcggcgcaataatgcgctggcaaaagtatgtcaacaccggcgcattggtgtatttcgtcggtaaaacctagacaatgaatcgccaaaaggtgcgagatgtttgcctcgttccattattttttgccggtgcaatattgcgccagtaaaagtcctaaaaaaattaggaagaatttttatcgcgtgtaaaatattttaggggggaaacttttaccggcacataaaatgaaataaaaaaattttaatggtgcaaatagacttttgctggtgcatatatgcgccggcaaaggtcaaaaaaagaaaaggaaaaattcccgcgtgaaatttattggtaggtgagaatacttttgccggtgcaattattgcgccggcaaaagtattaatcaaaacgttcgttttgatttaggataaattaaacactgaaatgcaccggtaaaagtgtatatataattcaggagcacgaaagtcccctttcttccctattttctaattctgaaaatttctctctctctct

SEQ ID NO: 262622 - DNA, 918 bp, Cannabis indica
cttctccaaaccactgctccacccccaagagtaaacaccatcccagatgtagatttcctgtcatcaagacatgcctggaaatctgaatcggtatagcctacgggatttaaagcaccacccttgtagactaacacgaatttccttgtactcttcaagtacttcaagatatgcttaacagcattccaatgttcctgtcctggatttgtctgatacctgctcacgattcctactgcataacagatgtcaggtctagtgcatagcattgcatacattagactcccaactgcagaagcataaggaacccttctcatgtcctctatctcttgaggatcagtgggacactgttccttagatagacggataccaaatctagaaggcatggttgcccctttggtgttggtcattgagaatctctctaaaaccttatctatgtaagttgtttgagagagagcaagggatctgttcttccggtttctgataatctaaataccgagaacataggcagcttcacccaaatctttcatttcgaattgagtgtctagccattccttgatgtcagtcattttcttgacattgttgccaatgatcaaaatgtcgtcaacataaaggactaggaatactaccacttggttttccttgagttgataaacacaaggttcatcttcattctaaagaaagccgtaggtcttgatgatttcatcaaaccttttgttccaggagcgagaagcttgcttaagtccataaatggacctattgagtttgcaaactttcttttcctgccctggaagaacatagccttctggttgctccatatagatggtttcttcaagaattccgttaaggaaggttgtcttgacatccatttgccagatttcaaaatcaaaagcggctgcgatggagagaagaattcagatggat

SEQ ID NO: 262623 - DNA, 1482 bp, Cannabis indica
ttacaaggcatatgatggatgtactattttgatgggtaatgattctagctctaaaattgttagaatgtgaactgttaaggtgaagatgtttgatggtgttgtgagaacactgactgatgtgagacatgttccaacattaaggaggagcttaatcactttaggagctttgatactcgaggttgtgtctattccacaaaagatggtgaaataattatcaagaaatgcaacttggtagttgtgaagggtaagaaagagcaagatttgtataaattagtctagaagacttattttaggtggagctgtgaaggtggagtcaagtcacaaaaggcatttagttagtgtgaaggaatgtgacaaggtggggaaggctccaattttagttaaaagttgtttgaagaaagaaaatatcaatcaaaggttgaagaatgtgaagacaagtgctcaagtgaagttcaatgagagtatgaattcaatgcatatatactcttattgatggtttgaattgtgagtttagagaatttgagttaaggtggagattgttagagtttgactccaattatttatttctttatttatttatcaatatatgtaaagttgcaattttttttgggtaattattaattgtgagaaaaagaaaaagcctggtgaccaagttttgatgagtcttcttaaggaagatttggaatgtcttggtccccaagttgtcttgatgcctaagttttgtaactttataaatatgtattttgtgtgagagagagggtatgtgtgtaggagaaaaagtagtgagttttgaaaagagaggtgtgtgtgagttcgtatatggtgagagtgagtaagaagcaaagagtgtattggaatttaagtggagagattgagatagagagtatatgtaattttgaagtgataagtgaaatatatctctctttgtgggtttgctagttttatcgaattaagtaaattgctttgcttcgtttctttattatttcactgcgcttgaagtttatcatctttcccaacacctttcagttttttctatgaacgttttctctataaagaaatgagagaataaatggaaaatgggcaagagcttaaattatttaaggatccacctgaaatttgcttatacttttatagttataggtacctatatatacgatttcagcattacaacttgtatgctgaaatcaatagtattctcccttgttttttaaccttttgacaaaaaaaaaagagatagctattttcataacatattgaaattttttattggctttgctcaagagcagttgtaaaaaggaatctccttaagtgggagaagccacagtcttaaatctttaagccacaaactcaactgttgagttgtcttgaatattttgaatttgaatttcaatatttttatgtgtttgatttgctgctattgcgctcctctaattagatttgcaatagctttgatatgttctaatatcatcatacagaagtgaa

SEQ ID NO: 262624 - DNA, 1039 bp, Cannabis indica
attcaagtctaaatatatatttttttttattttaagttcaaatttggcatactaaaatattgaaatttgtctttattttaaatgaattgattgaaacatgatgtcgccaaagcaacctctcttgtgtagatttctcatgaggaatgttagatgtttttgttgttagttctttatcactcataaaatatgcaacaacaaaattcaattctatagataaacatattacatataattataagtgtataactatagatctaaaaaatacctttgttgattcaaagagaagaattcaaatggcggaagcgtaccttaattcatagatagtgatgatcttaatccatcttgtagagataatctttgtggtgattttgggtaatgatcttccaagaaaacaagacttaggttttctaattttctctcttgatgggggaagatgagaatagaaattctcttgtttcttggggaccactaccaatttataacctcatagctaggttattaattttaagtatttctaatttagcccctcaataaattagaaatatcgcttagggtatctacacatttagcccatgacactttaatacccaatgacccataattactaaaatgatcactttattttgggccaaacttcaaatagcaatacactaatatacatatgagcccatattgaggattttaatccaacaatctcccacttgggctacatatgttttctgatagtgtgtaaccttataagcgcttaacttttgctatcataattataggtatttcaaaacaatctcgtccattaattatactaacataggatcaaagcggccttcgcaacatttatcgtagctaaacccatcaatggtcacgtatatcaatataatcaaatgacatagatcaatcatggatgcgtagcatggaaattacatgcaaatgtgatcttagcatacctatttccaactggtctttcttaattgagatcaattgtttattaattctttctaaccttaatagaaagaaaatattcagagtacccaaaacttaa

SEQ ID NO: 262625 - DNA, 764 bp, Cannabis indica
caatccgcacaagtgcggatatccgcactttgcggattggattggattggatcgtgcggattggattggatcggctattttatgaacacccctaataaaatgtagagaaggagtcaaggatctttgagataagaccagagagagagctgaacgattcttatatttatgcttgatcttcgttgcaattgaagacaatatgtctcaatgtgagtgataggcaatttaatagctgagcaccacgaaaaagcataaaagagagcttgagcttcagacaaaaaaaaaaagtaaggaagctccaacttttggtgttgaaaaacctacaacaatgtgaccctcccaatctctaacaattgctctcaagattgtgcaatgctttcaaacttccaaagcagcatccaaattcaatttatactctcctggaagcatcagggaacaacttgaggatccctagttaaagaattactcttgctagcctcgatcctcaactttatagcaatacctttttcaaaatggagagattgagcatccttgtaatcctgcaaaaaaagcttttgcaaaatcttctacatttgtgaaaaggtcaactttttttatttaaaggggaatcattccttcgtgaccaaatcaaccagattatgcttaggaaaagactaaagtcctccttattaaaagtatgagtaatttgcggcataaatacttaagtttaactcccagttgtaaataaatacctaagtttaatttttggcggtaataatacctaagtt

SEQ ID NO: 262626 - DNA, 512 bp, Cannabis indica
aaaaaaaaaattaaggatgatacccttttatctaacttttttttagaaaaaaaaggggataaaatgtgacattttaatcccacattttgcaaataaaatgtaggttttcaatttattttttttaaatatattacatttcatttatttttttaacaataaataataaatctaattttttatttttataattatatggaataggtatataaaaaaagttaactaaaaaatgaataattaatataatttttaaaaacaataataataattagtaacttcaattaataaataacacttcatatgttgtgtataaatctctaaaatattatacacagtgtctaaaaaaatataataaaatactactaatcaataattatatattaagggaaacaattgacttaaccattgttgtcgaagcggtaagagataatgggataggccgccgaactgattaaaaattaaaattaattaaaaggaaagtacttttatatctttgtatttatagtaaagatgag

SEQ ID NO: 262627 - DNA, 1336 bp, Cannabis indica
ccggaacagaaggtgtgactttgctatttcatagttccttattgtttatgaagaatgcgtctgccatttattcattgttagactagcttgattgctttgaatcttaaaatgcttgaaatgtagcttgtttggatttatccttgcagcttccttaatttttaaccccaactctttctcttcttctgtgtcttttcttcctgtaattctgcatcaaaagcattcaatgaattaggtattatgcagtctatgaaatgccgtcaatgctgttatactttctagattgtcttatgactaaatttttgagggtatgtgcccatcgtttttactaatcactatttgccattgttctgttgtcaattaagaatcacttcagtatttctgtttaagcaaaacaatgtatcccttagtaacaaaaactttgcaactcttgcagattcttttactttgcggtcccccagggcttggaaagacaacacttgcacatgttgctgcaaggcattgtgggtatcgtgttgtagaggtatgcttttatatctggttagacacatagtggttgctatactatctttcagctatattttgtgttatcacactttgttgtttcgtccgtcacatgaatttaatatcattcattgtgacgcttctttgaatattgtcaaaaataggcatgtgagaattgtttactttaggtaattgaactttcacatgcagttgctctttttcttgtttgttttgggtgtgcttttgaaaggcttcagtatacttaatgagaatttctttgcttgtagattaatgctagtgatgaccggtcttcagcaacaatagaagcaaaaattattgatgttgttcagacgaactctgtcacagtagacactagacctaagtgcttggttagttataaatttctagttgtccattttattgtagtatgtctgcagaagaacagcaacgaatggttaatttcttttctataggtgattgatgaaatagatggagctcttggtgatggaaagggtgctgtggaggttattttaaagatggtaagccttttaattttatttggagaatgcaatagtgttaggagctggctcatgctaattataatctttaaaagtcatttcgttttctaatgaacaagtttatgtgataactatgtcatattcaatgttgttattattatgattatttttaataattttctgttctcactgttctgagaatgatggttctcattttactgttcaatgtggacccactaatttttttgactttgttttgcaaaaggaagttgatgaaattcagaaaagtaacctttttattgctacaacagcaatcc

SEQ ID NO: 262628 - DNA, 1729 bp, Cannabis indica
tccaaaggctgggcagcctatgcttgaaacatgggttcttgggtggcctctagactaggtcatggggtctggccggccactaaggcttggaaccctggccagccaaagctaaggctccaagggggtagccagtttctttccctctattgacctcgactagggtctcgtgacggccttagaggcatatacaactgtagtcttatgtgtggttccttttgggaactctgtataaggctcgataatgagtccattatagtcaattgtataacttaggacttactatgtgtcttagtaagtgtacttaaactgtacttggtcggtaattgaccttgtacattatgatttacctagaaggtacccttaggtactgttgactagaatatgtttgtagctttttcaggttgctcacctccccttatctcttctatgcaggtggcattgggtgttggataggggaggtgacagctgcgcgtagatcccttatttgttttgtaattatggccagaacaaagtagacttgtcgtagagcgcctccatatgacccgccagggtggctacaaagggtagagtcaggatcgtggaggaggcttctcagtcccatgttgatgttgatccagagattgaccagggggctgaaagtcctgatgctgagtctgatcttgaggaggttgcacatgttagggaagaggaggtaaatgacttgtactgtcctccccaactgtcccttgggtcgttacgatgccaatggcgattcgttgaacaggcttggtgaaccttcaatgtgaggcctagatcatgtcttggagtagtcttttgagcctaagatactggaagcgagatcatagggagacagttgggtctctcctgcttttaccctttttgacgaggcttttagcaagatacttgctagtggattagtgaggagtgtccgttgtgagataccctgtagagattaccgggcacaccggctttcccaggttggttggccttgtcagagtgtcatattgagcatggggcggtattgccacttcatccatacttccgagatattgttgcaactctgagatgtgtccgacataaatcaccccaaaaagcatcaagtttgtcttatatgggagctaggttggcctcaacctactccctatgagatcggatatttttttatttgaagtctgctccgaaacagaatagaattgggtacttctacttcagtcagatcagtcaccaatggttgggtgatactaatagtgcagtcatgttaaaagttggtgggtacgccaagaagtactttattgcttatggcgttcgaaggattggacactacgagttccgacgagtctcgttcttcaaatgctctatgcccaccttacaaatgaagaatagagcaaatcacattctgtctttctcggtggagcagagaaacatactccgtttgccaacttcctagaagtatggtttgtattgtgaaagacaccctcccgtactaatctgtccatatatttattggtatgatagcgcggtatacatgtaaagttttggcagtacttttttatttaaaaaaatatatatatattttggcagtactttgaactaagacaatttatatttgtttttggtctctctatctctttaaataataataagaagttagagcataataagcgacaaacaacatagcattgggatcacagttaaaagggacggcttctatacaattatatgtgaattc

SEQ ID NO: 262629 - DNA, 545 bp, Cannabis indica
  modified_base (208)..(208): a, c, t, g, unknown or other
atcggattcatattttttttttatttatacataaattttaatttagtgtaaatatcattaattgagcttgttaatatactcttatgaatatatataatttttatgatactttttaatatatattttttatttttaaaattatatatgtttttttagaaatatatctgtttgttttcaattgaacaaaaaaaaaaaaaaaaaaaaaaanaaaaaaaaaaaaacaaagactatcaacttgaagcaaaaagaaaaaaaaaatgagtcggtgtagtacattgtgcagactgaatatgttttataaaaagaaagtataaaaattttgatttaaaataagaaagtattgaaaattttcataaaagcaaaaaaaacaaaaataataataataattaaataatgtgaacataatctgttacaactcttgaatggataatatctacatttcactttttctagctttccattagtttaatttacttccccataaaaggacaaaactataggtcctaccctaggttttccttatatatatttatatattaaaagtg

SEQ ID NO: 262630 - DNA, 750 bp, Cannabis indica
aaaaaatttcaaactatttttaacactgtaaattattaaaaaatttacattaatggtattgtaagtataaaaatatgggaaattttatttacaccctaaaaatttttaaagacacctcattttaataatttttattttatataaaatttatatctttaattgtacaaagtttttttaacttttttcttctaattcgtatttttaaaaaatatacctatcaaataaaataaaattatattttaaatattatgataataaattaaaataaaaaattatataaaattttcttagaacaaaatataaaatatatatacataagttagaaaaaattaagaaaataaaattaaaataagtattgaaattaacataaaataaagaaaaaatttaaaaaatatatattaaagtaatttttaaaaattatttaagtttatattttttttaaataatgggatgcaaatgtaacacccttacaaatatatatatgggaaatttaatttacaccccaaacattttttttttttgaatgaaatcagcactttattcaaaaatatcgtccaaaactaagtacaccccaaacatttctaagtacaccctattttaataatttttattttatataaaatttatatctttaattttactaagtatttttaacttttttctttcaatttatattcttaaaaaatatacctatcaaacaaaattaaattacattttaaaaattatgacaaaaaaatttaaaataaaaaa

SEQ ID NO: 262631 - DNA, 504 bp, Cannabis indica
tataatattttttttcaatatttttaaaatgttatttatctttatataagggcctaagtttttttttttttttcgcctatggtccatttcaactcagggccgggcctgagtatgaggtggtgaaatgctaaaatcactcaaaataactctatctattttctccttaaatatctcatttaaattaataaaataacactgtaaaattacttaaaataattttatcttatttttatttttaattctttttatatatattaatttaattaactattttttttttatatataccattcaaaaaaatttctaactaactaaactaataaagaaaaaaaagatgggtagcaatcaaaaaaatatttttattattattattaaaaataatatatacgtgtattgtaaaaaaaatcgtatttggaagtattaaagatattttgtcaaaaaataaaatctaaatacgatccatgtaacccgtttaaaaaagaggtttttttcattagtgtacaa

SEQ ID NO: 262632 - DNA, 809 bp, Cannabis indica
aactccaaaaaactttctcacaccgatcaatccaaacaaacttcaggttagctccgttaagggtacaacaatctttgaaaaaccctcaacaaaccgacgataatacccagctaagcctagaaagcttcaaacttcagtagctgattttggtgtcggccaatcccgaacagcttcaatcttggtcgggtccacgatgatcccatctttatccactatgtgctccagtaaagacacgagataatctgaattcacactttttgaacctagcatacatcttatggtcccgtaactattacaaaaccgatctaagatgcaactcatgttcttcttctgattcaaaatacatcaagatgtcatcgataaacacgatcacacatttatccaggtaatccttgaacacccgattcataagatccatgaatgtcgctggggcattggtgagtccaaaagacatcacaaggaattcataatgtccataccgagtacgaaacgcagtttttgggatatcttcctcacgaattctcagctgatgatagcctgagcgaagatcgatcttggagaagatcgtcttccccttaagttgatcaaacagatcattaattcgaggtaaatgatactttttttatagtaagcttgttcaactcctggtaatcaatacacattcgcagagacccgcccttcttcttcacaaataataccagagcaccccaaggagagtatctcggtctaatgaatcccagattcattaactcttgcagttgtatttttaattctttcaattccgctggtgccattcgatagggtgcctt

SEQ ID NO: 262633 - DNA, 533 bp, Cannabis indica
atcccacgcacttccatcaaagggcaggcgctagcagacttcatcacggagtgccaagaaggtaaagctactacaaacatacccacaccaccagtcccagcgtggaaggtatttatggatggtgcctccaacaagaatggatccggagcaggggtcgcgatgatatccccgaacggacttcaactccaggcagccctacggttcgaattcttagcttctaataacgaggccgaatacgaagccctgatagcagggctgagattggcaaaaaccgtggaggccaagagagtagaagtctataacgattcgcaattggtagtaaatcaggtatcaggagaatattagacgcgcgaagaaaagatggccgcatatgtggcaatagtccgagaactgctccacgagttcacggactataaaatagaaagaatccccagggaaaagaacgctcacgcagactgtctggctaagttagcttttgatagtgaaattgagaaattaggggtggtacctgtggaacgcttggcagagccaag

SEQ ID NO: 262634 - DNA, 2300 bp, Cannabis indica
atagccacatgtttttaacttaagctatttaataagtatgaggtagtgtagatagcaatacttttgtagactttattgggagtccaccacagatgagcttgcacattatagtccaataataataataataataataataataataataataataatatagtatgatgatgaatcataaaggaaacaagtaacaaattgcaatttttttgtcataatgttttacgagtctttcaagtgggtgcacttgtactaactgatctgtaagtcggtgaatatagacaaatcaagcacattgcagtttttttttgttttttaaaatcaaaataattgcagttttcttggtgtgcgccgaaactactttgtatttgtgttgtttttctctgatatgagattttgtataaaactacactcaagtttacgcccaaatgttgaaatgttaatggcttttcttgaactccaaaacatatggcaccggcaagtcaagaagacccaatttagctttacacatcaagaacaagataatcttgttaaaaattaaaaaatagagtatttttctattcatttgactcgaatgactcagtctattcatccgaagacttttcctccatacctcattttcaaaagcacttttcagttttcacacagattagataatgttatttttttcctctttttctagagtatagtatagcgtagtgcttatggttaaggtttatttaaactcgtttcgctaccaaaagtcagtgttacagtgtatgtattttcattttcatttctttattttacgaattttagaagttttggaatgtgagattcaatttttattaatggttggtaagcaaggttgactccatcagctgccgtgtgacgacttctttatagccaaagactgcttttttttttgttctctctttctttctctttccaatttctatagttttgaagtcttttttgggcagtggcttatatgggcctttcctttactttctcatattttggtctcaatcagatttagcacgccaagtttcccaaaccagatcatcaaaggtaagagtttttgctcttgccatttgtgtacaatttccttatgtttcctaaaaattgcatctttattgtttgtcttgtaatggaattgaataattgattcttttatgactttttcctttttctttttttagaattgtattttctattgattcttatacggaactcaggaaaaaaaaacggttatagaaaatgaataagaataaggggatgcattaacaattgaaaataaccttttgtttcccatttcttcaattttgtatatgctaatattggattttgttgtctgtttatgggtttgagtgatatgtgttttggataatggttttgaaggtctgctgttaggttgagctctggaatttgttctatacttgaagtgaggaaattgttgtattatttttttttgtttgtgtaggagctatgaagtgcttcccattctcagtcggtgagaagaaagaagaccccaagagcacaaaatcgatttcgggtcagtcctacaattcaacattcactgatggtgaaatgaagagatctggctctgaattcaactcccaaaatgcctctgatggaagcagcgaatcctcaaggcgccaatcatttcctagtttctcccaaaggccaagcaatctcagagtgttcactgtgccggagctgaaatccgccacaaagaatttcagccgctccgtcatggttggagaaggtggctttggatgtgtctacaagggattgataaagagcacagacgattcatccacaaaactagaagttgctgtgaaacaactcagcaaaagagggttgcaggtaaattttggttaatttcatgttttttatttattttattttattaggatgtttttataatgttatttttgcatgaaaacactcagtgaaagaaaacttgcattaaaatcattgcaaagactaatataggctattgatagattttagtccaggctaatattatcattataatgatatggctactgtaggctcatgtagaagtgattcattaattttaggtctacatgaaatctgtcaaccgttgatatgaggttggtagatttttggttgggaattccataatagctcaattgagtattttagaagtaaacacatttaacagtttaggaagcattagaggagattcgaaattctttctacactatattgtattttcttgagaagaaaaacaggagttttgtatgatttatttttatgatttgagagtgatcttgtacaaggcgtttcgagtgaat

SEQ ID NO: 262635 - DNA, 523 bp, Cannabis indica
aaatgtttggaaaattttagtttgtgaaaaaaaaaggactaacaacaacttcaaaattatgtaaattattttgattttaaaaataatttttcaaaaataattttgagaaaatttaaaaagtccaatttctctccaaaaagaattttttaattaaaaaataatgttttatttaaaatgactacttaaacaaaaatatatatatttttgaataataaacatatcattaaaataaataaatagagtgtacaaaaaagatagaccaaacccatccaaacaagtttctatttcaccctgaatatatacataactaattcataaaaatacatgaactagggatactttagaaaaattcgatagcaaacttgaaaaaataacatagtaaaatggttggagaaaacattcaacactaaacaagcaaaggcttcgaaagaaaatggagacaaagatgcatccacaaattttgctcaaagatagtttgggctcccatcaaatttttctccaactccaacattagtaaactaca

SEQ ID NO: 262636 - DNA, 1446 bp, Cannabis indica
gaggagcatgagctacatctccgaatggttctgcaacagctttggaacacaagctttttgccaagttcaaaaagtgtgaattttggtttgctcaggtgtcctttttagggcacattgttagcaaggatgggatcaaggtggatccaggaaaggcagaatccgtcagggattggccaagaccgaaaacagtgatagaagtcaaaagcttcttgggtctagtcggttattatcgtcggtttgtagaagggttttctaaaatctcaacacccttagccgagcttactaaaaagaatcagcgttttgtatggtcagacaagtgtgaaccaagttttcaagagctcaagcagagattgattacagctccagtgttagctttgccttctgacaaagaaaagttcgtggtttattgcgattcatccagacaaggtttgggatgcgtgctgatgtaagtcgattgggttatcgcttatgcctcccatcagttaggattatgagcagcgatatccgacacatgacctagaattggtcgcggtagtgtttgctgtgaaaatctggcggcattatctttatggagaaagatgtgaaatttataccgaccataagagtctcaaatatttctttactcagaaatatttgaatatgagatagaggcgttggttggagttagtcaaggattacgattgtgagattcagatttcacctcagttagtagaggacatggtcagatctagcattgagtttgttgtaggcaagcttcataacttgacgctgcaagctgatctgttagaacgaattaaagtcgctcagatgactgatccagagttagtaaaaattagagaagaggtttcagctggtcaagccagagattttacagtgtcagacagtgggatgttattgtttaaagccagggtttgtgttccaaatagtgtggaacttagaaacgaaattcttgaggaggctcataccactccatattccctacatcccggcaccaccaagatgtatcaggatcttaaaccttacttctggtggagcggaatgaagaagaatttggtagaattcgtatcgagatgcttaacctgtcagcagatcaaggctgaacatcagagaccggcagggttgttacagcctttaactttacctgaatggaagtgggaggacatcacgatggacttcgtggttgggttacctagaaccacgggtcaatttgattctatttgggttgtggtagatcgattcacgaagtctgctcattttctacaagttaaaacaacctattcagtggatcagttagcagagttgtatgttaaagaaatagtaaggcttcatggggtaccaaaatccatagttcggatagggatccaaaatttacttcgaagttttggaaaattttacaacgggctatgggtatgaaactaaaatttagtacagctttccatcctcaga

SEQ ID NO: 262637 - DNA, 538 bp, Cannabis indica
ctcattctgtttataacaacaaaatccatctaaagagagttgagagagcgaggaagcccgattacccacatcaaccagtttcctttgcagatcaaagcttatgtgggtttgaagctcaagaatcaatggctggaggtatttcgatccttaaattatagtgcatatatgatttattaattccgcactttattcataatcatgtatgttttagtctatacaaataaatgtttaacaaaaaataatttgtgggacaaattacaaataatttgatatagtttttttaccaatttaatatgaagaaaaatatatataatttttttagttgggagggctatagcctcctccctacctttgtaagtactagctgtgtcagtggttagtggtcagcggtttgtaaaattgtggaactgatcaataatatgaaccaataacagcatatcactatgtagtacttttcaccttatcctaagcatatatgttaaagccacaccgttcatataaatgtaattacttaattaaagggggtaagttgaaaaat

SEQ ID NO: 262638 - DNA, 730 bp, Cannabis indica
gtaatagcctaatcctcgttacttgtattgacttaagatcaaggagaaagattccttttcttatagctcttacaacagtatctctgaatatataattcttagataatagtatagtcttagcttaactgcttttcgaccgatcccttgcccaatgaatatacatcactatttatagggctaggaagcatggagaggaagggtttcccctctagttgcaatgcatataaataaaaagatcgtgggatcaatgctgaatcaaggatcgtgggattgaggttgaatacactgatagtgggatcgtgtgtatgccatatccacgtaaattgatccttgagttatagggattgtgctgatgactcacgatgcgaaagctgaattcgctaagtgttggtcgctctgcgcggattgctgaatactttgctctgagcgtgccaacggtatgtcctattcaaactatgcttctcgggcagatattctaagtggattccacgtgtcaccattcatgtgatgccacgtcagagtgcaaaaattggaataacagtataaatagtttattagaaacacgtataatataaaagaaatgcgcgtgtttgaactttatttttgggatgtatagttatttttaaaatcttaagaaattcaagttccgtaactataattagttaagtcatttgatatgttttaaattagaaattaagtgaagtcgcattttgcacaacccttttaatca

SEQ ID NO: 262639 - DNA, 714 bp, Cannabis indica
acgaaggttaattgagctaattggtgactaagttcgtcctcaacgggtttgctcacttcattaacctgtcgtgatgaaggattagggtctcaacaaatgccaaactatttgcattggcagccacgtttgaaattaagcttctagctactgcaggagtcttgtctaccagtgcacctccactggctgcatcaatcattctcctatccaatggtagcaagcctttcataaaagtggaagatagtacaaccattgtatagttgcatcctccaatgagaagggaaagacccacgagttgattttctcttcagtcactgaaggaggtttcataatagaacgaacaatatgaaattcttttaaatgattattaggatcttcattgggaaaaccatggaaagacaaaaacaagtgaacgaggcttatttcagttcaaaattaacatccgaaggtggataatggatgcacaatggttgttgatcaagatctggcacgaccaactctttcaacgtcttgttttgagccatggtcttgtgataattggttgaatcattagaatcaaacttgtgatcagctggtaatggctctttgacaggaccaagacgttaaaagagaggattattggtgatagtctttgatgagcgagaagtagatgataactcaagatagtactatacccttgatagtctctcttgagtatcgtcttcactagacatgtac

SEQ ID NO: 262640 - DNA, 1148 bp, Cannabis indica
aattaaaataaaaaaataagaaaaacagtgaaagtaagaagcaggtaaattaataagggaattaacaatgaataaaagttaggactttcgattttaattgtatctctattgattatggtttactatgattttattcctattactaatttctatgcagtggcaggtttactaagataatttatagtcttatcagatatataaacctcaattacatacaaattttctactctcttgataaattaaacatgtaacagtcattaaacacaaaatccctataagctatctaaaccatataggtactctcatcctatatcaaaattcagctttacttcactatagcacaatcaacactcacttctcatatctcgcatcaaaatcatagatatttatttgatgatcaagcgattaaaagtaattaagtacgaatgaaatagaatacatagaaattgagagaaaactaaatcatataattaaaaccaaaaatcaatatcaaacaatctccatctagaccctaatgaactgtttagctactcatgttcattgtagaaaattcacacatattaattttagaaaagagaagaaaagaatgttgaaaaccccattgaaaaagcctttgcgatcaattttgctctccaaaattcgtattgcttgattgcctctcatttccttctgaattgcattctaattaagagtttttgagttgtttcagctttgaaaacgtactaaaatactaataataatgtatttatataggctaacaaggttacttaatactaaaaagatttaaagttttaaacttaaacaagagaaaaaccacagctctatccttttttctcgctatctttttatcttttttttttttagaaattttctgctgcgacaactgatagtattttagccataactctctcgatattgttcagaatttgacgattcaagctattccagaaagataaaagagagatctagaacttttatgttttgaattttagaacttttatgttttgaatttctccaaaatttgatcaaaacatagtctaatttaggcttgaagtttcaggtttattttcttgtacaattttctctattttatatatcatctttttataagatttgaccaatttatacattctaagtgtcaaaacctg

SEQ ID NO: 262641 - DNA, 595 bp, Cannabis indica
aaaaatcctacacatggagtgcgccaagtcctacacggacaagccacgaacagccggagtctaccaattgaaggaggaggacagtgtgaaagctcaactcaaagctttgaaaaaacaatttgaggctttcaaaactcaagaaggtaaagcaatccagatggctgcaaaagcagaaaagaaagaaccatgcttcatttgtggaaggacagatcatcaaccacaagagtgccatactcttagtatgttgaggggaggagatgaagaacaatgtaatgccttaggggattacaagaagccttataatgcctactctaacacatacaatcctggttggcgtaaccatcccaatttcaattggaaggatacaagtcaaaatcaagcatctgggagccaatggaggcatgatcaacaaaataattctcttgagaactccatgaaaattctcgcagactctcaactagagttcaggacttattttactcaggtgatagaggaattgaaggacataaagattcaattaacaaagttaaatgattcttcagccatttaagagcgtggtaagcttaccgcttagcctctaatcactcccaaaggg

SEQ ID NO: 262642 - DNA, 1696 bp, Cannabis indica
agattggtggaaaatactatctcttggatgttcatagttggaaggatctgtaagtattgttcaagaatcagttcatagctgcaaaagattatgatatggaagttagctctccgatgaacatcaaacagtaactaggagaatgcattaagaagtacatctagcgaatgatgaatgcggccgcaaagactaaggttaatgatgatatgaagctggtagctttaacctcaggaatttctattagatctttcctatggggagatttacaaagaaaatggtcacacacattgtcccatttcttggccagagctcaaggcttcataaacctagaagaggtgtatgtccatgcttacggagtgcttccagtaccatccacaatgtcaatggaacaactcaaactccccaattatctatcacagctattgtccctctgagaagtacactcactactccaacagtctatggacctagcacctctggtcaaatcgatgcgtggataagtttttctggcttcagagtggcacaaaccagatacactattgctcctgcacaaacaattcaacaaaatagaagttctgaaatcaaatgtaagtcattcatggaacaaataaaattctaaggctttgagtcaaaatgaagcctcaaaaaggggaagagtcaagaatcaagatactccaagtataccaccctggttgttactcgagagaatgtttggagagctacttgaaatatgctatttgcaatatggttcattacaaaaagcctctgccaatgtacaaaggtggaagacataaaagggaccaaaacaaaaagtgtgaataccacgacaatattgaacacactacaaatgagtgtgactatttgaaggtaaaaatcgaatgattagtttagtcatctatccaattgggtgtggatactagttatttatcctagacaaggagtagcacacgaatagcttttcattcctaaatagtaaggagccgtaaatcctcctcatggagtaagacttcctcaagctcccagaatgcaagctccggctatgaaggcccttagggggtacaaaatgtcccagtggcaagacctattaattctcctacaccaaggaatccgtatccacctagagttgctctgcccgcattagatggtcatgtgaaaactatatctggaggtctgcatatcgttgaaagcccaagaaattctcaaaaaagatatcttaatgaattgaacaggaaaaaaaaaacctgtaatcttgtacaaacacccgcttagcatcctcgaatggattacttttacagaagatgatgttaagaacgtgaactttccacacaacgacccgttggtgattgaagctcaaattgaaaataagagagtttctaaattctagtagataatataagttatgtcaacattattttcaaaaccgccttccatgaaattgggctagtggaagctaatctgatgccctgtccaatttagctataagtttttaatggagattctttgttgccaattgggaaaaattcaacttcaattacactaaatggaggaaaatctggaagcaacacaacctttactttcaaacgttgtacatttgtagcaatggattgtcccacttcctacaatgtcatactaggatggccagtcttagtagatttcagagctgtaacttctatctgccatctatgtatgaaattcccaa

SEQ ID NO: 262643 - DNA, 558 bp, Cannabis indica
accattccagtttagattttattttagaattaccttcaggatctatctcaacttgagaagaccaacctgatagaaccatcctcaaagctctctcatcttgagatttgatgaaagccctcattctaacttttcaataaggataataagaatcattgggcaagggtggtctagaaatcgaacttccttctgcaaaaaatgacattttacacaaaaacacacaaaaacgttaaaagtatcacactaagagtttagtgttccgctctgataccaattgaaaaaccgagttttgcaaatgtcaataatatatacaaaaatataaactgtatacatctacaaaagcagaatgtaattctgctactgtagagaccagttttgcagcgacaaaacaaaactggcagaatataaaaataattgtagaaaattaaaacacttgacaaaagatatttatacgtggtatcagtgttctttcgaacactcctagtccacggggccacacccaaagaatgtaatcaatgaataaagtatcaacaattacaaagacaattgacttaaacaagt

SEQ ID NO: 262644 - DNA, 780 bp, Cannabis indica
aaatcagatacaagtggggtgtaggaggtatagtaacgatgaacagagtaaggtctgttcggcatgatttgccaattatgtatatagtatccttaccccgacaacttggttgattgatatattatgagattacatgattaacctatggttaaatagtaaatgataaataaataattgggctacctaacctatgttagggttgaactcgttttaaagggttactaatgcacttacgatattttagcatatatgatcttacttaactaaaagtagatggtctgtactcgaatgtaagttggttttagattttggaggtcttaacagtgcaattaagaagttgggatttattttgtgaactatagaggtctacaatatgtaagacataaatatggttagaaaaatatatggtattataaatatgaaagtgatgtgatacccagaaggttagtataatagaagaaacaatcattgaacacaattacacaaatctatcagcattgcagatttagacttcatcagtatagcaatgtaacaccacctgatgaaatgtggaggaaagtaggacaaatggccgatactactggaaggattcctctttggataataggtactgtaactggtgttctggtgatcggtttacttggtattttcttttatggttcatattctggattaggttcatctcttagttaatatttagttaataaatgataaaatgaaatttagatgcttatgggcgatatctaatgaaactgtcgctggaattgagatctcattcaa

SEQ ID NO: 262645 - DNA, 777 bp, Cannabis indica
tattattatcttcatgttactgaaatcattcattcctaacctcgatcacactatatcccgaacgcttggtaccaaaatttttgagtgagaaatcgtcaatgccatcaaagcaacccagaattcgttgagtttctatttttaaccttttttcttcttttttttttttttattttccatgttcttgctttacatgattttgatttattaagacagtagggtaattattcttaggtatttttaagtatcccatttcccttttgaatcaaactctttccataatttcataatccttaaggaatttctattttgtgacaaaaaatgcccctgtttgattctgatttgaatttcatgagttttaagaacatgaaagcctagagtatcacatcacctaatcaggcgagctcgtatattacattcatagtatcattacattgtcattgtttaaccaatcaatctttttattatataacaatattaactatatctcaatctcaatattaatcaattcataacactattaattgtattacaatacaacgtactatgcagaacaatatacttttcttacctcaatctggctcaggtatgttggccaacctacttggagtacgatcgatgatcacaggccctatgtcataacaatgataaccataagtatatcccaaaacactacttaacagttgtaaaggacaaccttgggtttcctaccaaatactatagttcaaatgcactaaaataaaacttatattttggctctaaaatatacaccatatggta

SEQ ID NO: 262646 - DNA, 822 bp, Cannabis indica
aaatcaattcagggtcctatttgtactattttagaaaatacagggtccattttgtcattaaaaaaacacatggtccaattggtagcttttgtaaaacagagggtccaaaatggtatttaccctagaaaaaataaccaaatcatatataagaaaaaaaaaattaaatgagtaaacagtagcaaaataaatattaaaacttcatatacataaccaaacattatatttatcagaaaaataaggtcaagaaaaaaaaaagataaagacctgagtttatggtcaccaagaacaacgaactccagcacctgagaataatgaactccaatgcctggccgactgccaaaatgcttacgaaatagaaaatattgagctatagttctttccaacatagaaaaataaatgaaaaggattaaagaagagaagagaaaaaaaaagtcttacaagttgtaaacttagaaggtgcgactggcgtgtggagagctgaatagtggtggttcctggtgcagatggctagcacagttgcagatctgaatggtggtggtggtgcggctagggtgggagaacattgctggagttggagcctggatgagtggatgggaggcacgacgatggggcggggagatgagtgtgagagtgactgagtaagagagaagagagctatggaggtctgagtttttttttttcaaaataaaagaaatggttgatagacagttgtgtttgaagttggagaaagaaaggagaaactagagagaggaaggattatgttgttgtattaggtttagggtttgtattttagatgtaggtaaatattatatatatatatat

SEQ ID NO: 262647 - DNA, 4479 bp, Cannabis indica
tttttctaatgtaactttatttataacttctcaattagaatacaatttaattgaacccaaatatattcttaaataaatattttactgtatatattgtagttgcacattatatttctggttcaaaatagtactaaccttagagagaaaaatgtagactttaacatcaattatgatgctggttggaggcttggcctaaccgttattgttttagtgttttctaacattataaagatgaatttgtttaacccactagttttttaagatttctacttcgattttaagaattttagtggtactcacactttctataaagtaaccgtttaagtagttaacattttctgttttataataataattattaattttaaatagataaaattctaacaaagtctgaaacacactttaattatttcttatttgttctataataatacttgattcactttatgtatgtatactcatgctgaaatgtcttgtatataagaagacatatacaaggaacattttactttagcagctgtatgttgaaagtggtaccatattccatatcaatcctcccaagcatggaactcattctaaaccagacacataattataagctgtaaagcagctttaataactagctacctttatcttttggaataaatatatatgctaacttatcatttgcttgatttacaatcattatagttgtctcctcagattttattctcaaacaagaataagttaatactcaataaagaaaaagttagcattttcttttcgttgcatgcatgcatgtatatattttgactgtgaaatgagttaagatcagagatttcatcatgtctgataattcatccaataaaacttctaatcctaaaaactctgccaacccaccaacaaaaacagaaaaagatgtttcaccaaaaatcttgattgatatcgttagggaattgaaaaattatgtcgaaacagaggcccatacccttgttcacagccaaaaagaaattgatgatacactacagagaggcgaccaagaagatcagcacaaagaaagtagcaccaccaccaccgcgtctgatccgaaaaaggtatcatcttcatggtgtgactgtgttcgaaagcataaaccagctgatggagaaggaagtaaggcaaaaacagataaatcaggtggggaaggtagcaccagacgcggttgtggtagcaccagacgcggtggtggtggtatcgtcaacagagatccagatgaacagattaaaaagatggagatcaatcttgaacaaatggcgaattacttgtctaatctggaaaactacgagaaagatttcaagaaaaagattgaagatcatcaaaatcgcatcgagcttctttttaaaaatatcaaggagatgaaagatgagtcttccaaagataataatgatgatgagaataaatataaatattctattggcaacaagctgtgggacataaacaaggagataacaaagttgaagcaccgaattccttcttcgttccaaaatactactgatcatgaggatgaatcccagaagaagacggaggaaacaacaaccggcccgaatactcaaattgctgtcgatgaactcttgagcttatacaccagcaaaagctttacacaaagctctttgcatgaggaaatagaaaggatttataatggcgatgatttagaagaaaatgagaagaagtgcttgttgtgttttgcagtgtttactgagaacgaggagctgactaagaggatgctgacgtattggtgggcaggagagggatacatacaagatgatccaaataagatgatattcattgaagaagctgctgggaaaatccttgctaaattcactgagaaacacttgattgaaccagtgtttaggaagcgatggtccattgctaaaagctacaagatgcagcctatcattcggtctgttattgttcaactcgcggccaaggaaaacttctttgcttacgatgatgataggaacctcaaggcgagatcccccaattgccaaaggatttgtttggtgaaacagataataattgacgatcaaaaggatgagaaggatgctgcagctgcctctaaaccgcaaccagaccagcctccaacaaacccgaaagacgagaaagatgatgacaaagatatgtctgcagcaaatgtccaaccacaacagcctccaaggccgaaagatgagaaagatgatgagaagaatatccctgcagcttccaactcttctaatgcaaatgcccgaccacaacagcctccaaaaccgaaagatgagaaagatgataagaaagatgcaaagaatgagaattattcgaaagaatgggaaactaatctggagacaatattcaacgtggacgagccatttcctgatcttcgattagaatggctagctaaaggcagagataagaaatgtcctactgaagatgaaaaacgtgtccaagtagaagaatggttatcgaaaatgaaagctctcaaagttctttacttgggcacatggcgagcttcgggtaagcatcatatcgaagtagataatattgaattcttgaaggctttgaagagtatgtcgtctttaaggcttcttagtcttcagggcatctctagaatcattgagctaaaagattcgatgaaagggcttactaaattgacagtcttagatctcaaagcttgtcataatctagaggagcttcccaaagaaatatcatatcttcaaagcttaactcacttggatgtatctgattgttacatgatagatcacatgcctagagagttaagtaagttgaccaatctccaagttttgaaggggttcgtaagtgggaaggacaagaatcagagtaagaagttttgtgcttttgagaatttggataagatgaagaagctgaggacattgagtcttttcataagtaggaaagatttcccgtctgcaaaagatttgaagacttttggatgtcttgaagggcttaagaggttgactttgtcatggggagcagataataatgcaactagtggtactgattctactgcttcaaagaaaaagaaagggactaatactgaaactgcttctccttttagccatcttgagaagttggatttacaatgttaccctcatgagactactcccaattggttgaagcctgagaaattgggtaacctgaagaagctctacattagaggaggaaaactcggaggtgatctttggtactcgaactccaagaatgatgggaataatgagagcttattgaagaacacgtggtccgttgaaacgctgcgtttgaagttcttggctggattgaagttggattgggaagaaatgaaagagttctttcccaagttgtgctacttggagaaaattgattgccctttagtcactatgtgcccttgtgatgccgatggagtttgggtttctggagatggtgataatcagcagcctcagcaatcaaaataagtattcaagaagagttttaatcaataattaaggtaattaatttttaaatttcttttgtaactttatatttcaataattatatccctttcattgttgtatttgatggcacatcataaataaattgatatatattaatttattatttagtaacaacaattaacaactacttgcagttgcatgctcaatgtttggtagatttttcctcatcatttttttggctgtcattaacggattttgagtagacctggtcatatttcttcttctcagcgttgagtgtcttaatgttctgactcatagtatcagccatcaatttcgcggccaaaggaatcccattacacctacttataagcgtcttttctatcactttcttcacatcaatatttttaccacttaatattatctcatcgtaacatttctttttaaggtctttttcaactaccttttcccaatcgaactcctctgttgttactccaccataccattttttaacgtcctccgtaacggcgtctttaaatatcatccacaagctttgagggtccgataacggcagaagacggtgaaggtattgctctttaagcttagccatctccttcactatgttctcttccctactagtcaccattatggttcctttgtaaccttgtggcaattcagacacaagatcacaagcgtccttaacaggaaatgacgttagatcgtcgaggacaattagatacctctttcctattagttggagtcgaagaagatagagaagcccttttagtaattcctcagaattattagttgttatcaagttgtatgtatcgatatcaactccaacgctctccaacattttcttcattgtcgtttccttaggttgttcgtcgtttttgataaccggagttgagtccgggccacactcaacgccctgaaatgaaattattagtagatttataaaatattaaggtgtcgtttggtaacacttttgttttctaattttttaatcacaaaatgaaagtaaaatttttgtttttaaaaattttgcttttgaaaaacaaaa

SEQ ID NO: 262648 - DNA, 1024 bp, Cannabis indica
ataacttttgcattcggactccaaatgagatgaattaacatgttttggaaagttgggaacgagctctatcattttgggtttcataagctcttcgaggaaatgatgaaatcattgtcaaaaatatgttcaaagatctcagtccatcacaaaatgtcttttcagcacaaacctacacacttggagaaaacatatcaaatctatacaaaaataaatactaatccatctaataattgactaagaatgagtgtataaatgtgcactcatcaaatattataattttatcaataaaactattaaaaaatattaaattaaaactatatattttttgaataaattcagtaactttattaactaatcaaatcgttaataataatataacgtgctttagaggaacaatcctccaactgaagcacacgacctggagagaaacaagaatctctggctaagcagtgagccagcttgttgcatatcgtttgacaaaacacaactcaatattgtttcaagataaaagcaaaacatgaacatcatgcactggaagaccaaaagaagatgacaaagagattttgctttgaatagcttgtatgcataccaagctatctgactcaaaaatcacttgtccccaagagtgacggtcaatccaacttaatgcttcttttatgccaaccatcttagcaatttcaggttgaaccctccccaaatgaccccgattgaaagctttcaccatatggccatggcagtcatgagccacataaccaacaccaaatctgccttcatgctcaaataaggcaccatcaacatttaccttgatcttttctgaagaaggtgcactccaatgctcaaccaaacgacctccgtcgatcaacgaagataaagaaagactctttcttgtttgagcgtctttgaactgatcaagtagatttcttgttgatgtaaccacatttgcagcagtctaacttttttgctgccaaacaaagtcatttctggcacgccaaatagcccagctgaccatagtcgcctcctccaa

SEQ ID NO: 262649 - DNA, 582 bp, Cannabis indica
cttcctcctcaagtttcccagccctatacatactgaggtatgttcactgggcaaagaggaccgagagattgaaagtcaatacgccgctaagctaagactatattattatctaaaattatacattcagagatactgttgtaagagctataagaaaaggaatcttcttccttgttcttaagtcaatacaaataacgaggattaggctattaccgaactgctcggggctgaacctctataaaattcttgtgtcttatcgcttatgaaatagactcattgtcgtggctaaaagcgaagtcaacattttggtgctttcattgagagaaggatcacaaatcgctcttttcgacactcaaccgtcaacacgatggtgcaaactcgtagaggcctgtctgacccagcaaattcacaaacgctggatttggcattacaggacccagggagttcaagggttccgcctgctgttaatcccggacagacagggagcgtggtgaatggtgaaacaactccctactactgaaatggcgcctcgtgtgcaagagactgggaataaaagttctgcacccaaccagggcattcataata

SEQ ID NO: 262650 - DNA, 3266 bp, Cannabis indica
agatcctggtaaaataaattccaacactatgctcatcaatttgtaacctttgactccttcaagatatccaaggaaaatgcacttcctagctcttggttcaagtttgtcttgccttatgtgagcataggcaagacatccaaatattctcaaatggctatagctagataagtgtcctgaccatacttccaaaagagttttgaaattgattgcagatgaaggacatctattaatcaaatagcatgttgtgtttgctacctctcttcaaaaacctttaggcaaaccagaatagataagcatacctctcaccctctccaaaatggtcctattcattctttctgcaaggccattttgttgggggtttctagggactgttttgtgcctcccaatacctattttcgtgcaatagtcactaaatacatctgcacaaaactctagtccattatcagttctcaattttttaattttcgtctcagtttgagtttccaacattactccaagctttttaaactttgcaaatgcatcattcttattcttcaatatatgaatccaaacatatcttgaataaccatctatgaaggttaagaaataccttgcaccacctctagtttgagttcttgagggaccccacaaatctgagtgaatgtaatccactaagttgttagtcttgtgcttggctactccaaactttaatttggttgccttcctaagcacacactgctcacatagtcccatggcattgattttgtctttgccaaaagcaccattctttctcaaaactttgaggccaccataattgatatgtcctagccttctatgcttggtcattattgttttatcatcacctgaggcaaatgcatttgcttattccttaacagtcttcccttgtagttcatacattccattcacaatgattgccttcatgacaagtcctgctccacaaagaacctttaacatgccattttcaacattaacaaagcatccatttctgtcaagcatggccattgagatcagatttttcttgatttctggtacatgtcgaacctgctttaactcaattttacttcctccatctagctgcagctttactgtcccaattccaataatttttcatgatctgttatcttcaagtcttacagatccatgattgacttccttgtattaaaaaaaaaatgactcttatttggacaaatatgaaaagaacatcttgagtaaacaatccaaacatcctcagattttgatttagaaattgcaagaacacttgcactttcataaccattactatcatcacaatctgagaccacatctgcatttccctccttcttttgatgataacttttaagaattggacagtctcttcttaaatgtgaggagttgttacacaagaaacattttcttttaaacttagtacctccttttcccttacctgaattgttctgatccttgctttctttcgttggaaactttcctcaaaccaacaatccatccccagtattctcatctggttgttctatttccttttcatctccttggacattaatgcactttgaacttcttctaatgtcaaggactccctagaatacatcatggtatctacaaagtgctcatagctctctattggtaaggaattcagtacaattatttcctggtcctcatcctctatcttgatccctatattctctagataagaattattttgttgaaatcatctaaatgatcttaaactgttttgtctggaatcatctaaaaagcatacaatttttgctttaagaacaatcagttagcaagagattttaccatgtataaattctctaacttgagccaaattccagcagctgtagtctcctttgaaacctccctaagcactcgatcccccaagctaaaaattatggcactgtgtgcctttttgagtatctctattctttctttctcacacagagtattaggaagctttgattctcccataaatgcatcttgcagaccctactgaactagtagagcacacatcttgactcgccataacccaaaatcattctccctataaaatttacaagatcaaactttgtattcccatcttcttggattaattccttaaatcttgaaacctctatctttgattctcggactccaagctctgataccacttttggagatcaatgctaattgaacctattcaactccaagcttaaaaccaaagaactcatacacaaaagctaagaacaattgattgagaataaaaataacaaactgaaactttattgaacttgtaatgtttagtacattatgagcttatgttgaataaaggaaagatagatgtatttatagataacatatcgctaagtacactatactaagacacaaccgaattcacttactcagttagttaactaactgatctttgacaatttatagtaagtgtcatcttagactaattgcaaaggcatacaaatgcaacagtatatattaaaatgataaaaatattacacaaatacattgggtatgtcatataaatatttatataatcaagcaataaaagtttataaaaatacctcttgctccattcaactgcatgaaccaccttcttcaacaacgacagcttccagcaaccaaactagcaggcaaactaaaaagaaatagagctagacggagaatcaccataaattctggcgacttcacttgtgaagaagactgtaagaaatctaaacacatacaatttcaaatttattaaaaatcgggtagaaaaactggttcgaaactaaaattcaaccctgaattgcgattaaaattgtaaaaaactaatcctccaaatattaatttttagatccataaaatgaagatctgtctgaaatagatctggagttcctgatcaatccaaatcaagtataacccgaaaagaatgtatcaatacactagctaatgtctttctcgttgcattaacattgttttctagattttcaatggtggatatattcatatcaaatcatgaataaaaaaaaaattgaattcatctagagccactattgtgggaaatagaaacaatcaatgactcacgatttagtttacaataccaaagaacacgcaacacaatcaagaaacaaatataccaagagatctcaagattcaagataatgaattaagtagtaacagaaaagaataacaccaagcttaatgaattcgagccatgtgcgatgctctacatctcagttggacaacaataactatatctttattgatgtcagggtttacaaggttacaagaatcttcacaaa

SEQ ID NO: 262651 - DNA, 778 bp, Cannabis indica
atggaagtatacgtggatgatatgcttgtaaaatccagaaaggcttgggggcacatagacgacctggacaaatgcttgaaagtccttagaaaatacaacattaaactaaatcccttaaagtgttccttcggagtcagctccggaaagtttctgggcttcatcgtcaatgcccaaagaattgaagataatctagaaaagattcaagccctcctagatatgaactcgccaacaaaaaccgaagaagtgcaaagcttaactggtcgaatcgccgcgctcaacagattcgtttcaaaatcaacagacaagtgtgtcccattcttcatcatcctgcgaggaaacgagcagttcgagtggacagtggagtgtgaaaaggctttccaagggctaaaggcacaacttgcaaaacctctcgtactctcaaaacctctggccggcaaggaactgggaatatacttagctgttacggaacatgccgtgagtgacgtgctaatcagagaagggaatgatatacaacacccagtctattacatcagtaaaagactcattgaggtcgagggccgatatccgttaatagaaaaactcgcatactgcctcattctaacagcaagagagttgaggcattatttccaagctcatcctgttcgggtgtataccgaccaaccactacgccaaatactgcaaaaaccagatgcttctggatggctactcaagtgggcgtagagttgggccggtacgaaatcactttccaaccccgaatagcaatcaaaggccaagcctt

SEQ ID NO: 262652 - DNA, 753 bp, Cannabis indica
ggttatggaaattgaccattttacccctagctttagaaatacccaagttataactttaagggcatttttgtcatttgggtaaatggggaataggtggctgcctagctttttgacacctagcaagctgattttttcagcaagggaaattgattttcccttatcatttatctcatttaatgaaattaagagaaaagaccaaaaaattgaagaactctctcctttccttctctctcatttcgaaaccagcaagatcaaggggaagagctgctgatttttagtgttttcagcaaagaaaccttgggagattcaaactaaggtaagccctaatggaacccttctttgttttttaagctttttcttgatttgagattatgtttttgaataatgagggctgttaggttaagataggtttagggttcgaattttagggtttctttgagttgattttaactcctagcagctggttttagtgtttgatattgattgtatgcaactttgaacattgagttcaaagctttgagctttaatggcataaattgatttggtgtgtttttctgtgaaatactggctgggttttattgtttatgcattgaataggagctctggaaggtttcatggcaattggtgaagaattgagcaacaaatgaaaagtttggggaaaactggtgcaaaccggctagccggtttgcagtgccacaaaaaccggctagccggttttggcagggttccccgggcctttcattttctcaattt

SEQ ID NO: 262653 - DNA, 746 bp, Cannabis indica
attattttactaacattttaaattctcattaaattagtatcattttatattattatatattttagtgatatttttaaattctatcaaaattaaatttttcaaacttattatttgatggatcacttaaataaatctttagatcgctatgacgctatgcttttaaacttattcgatcattatagatcaggtgccaccggtgcaattcacagtaaatcttggacgcctctcctaattagggggtattttagaacaatcctatggtcctattaggtagcagaaacaagctgatcggtggatcactcaaataaatgtacctctttatgatgctatgctttcaaacttacttgatcgttataggtcaggacctatcaacgcaatgtgcagtaaatcttggatgcctctcctatttagggggtatttcagaatgattctacggtccaattaggtagcaaaaaattgctactcagtggatccctcaaataactatactttgctatgacgctatactttcaaacttactcgatcattatagatcagaacctaccgtcataatgtacagtaaatcttggatgcctatcctaattaggggatattttagaatgatcctacggtccaattaggtaggagaaacttgttacttagtagattactcaaataactgaacttcgctaggatgctatgctttcaaacttacttgatcattatagatcaagacctattggagcaatgtgtagtaaatcttggac

SEQ ID NO: 262654 - DNA, 5407 bp, Cannabis indica
tttaagggctcgattttaatttctgttacgtaagaattgttgtatatatggtatatatgtgccatgtgaagtttggagtaatttggataggtttcggagtatttcagtgagtatgaaatttgagattttcgtgctaaaaaatggtcagccgtttttaccaaaacggtctaccgtttttggaaatttatcataactttttactcgggtgtctatattggatattctatataccatttagaagtttgcgatgagctctacaatatggtgtatgtttcttgtctctataattattttgattctttagcagggcgagttatcaaagggttctatttttctactagttttattattgatgtagtggagactaaacgtacttcatttctttggaagagcatcctatggaggcgtgacctctagaaggaagggtttcttggttggtggagagtggtgatacaattcatatacaagaggaatcttggatccttaaagaccacgtgggtcgattttattcgtttgggggttgatgtggataggatatgtgatcttatgcttgatataggtgggtgtaatgctcctcttactcatgatcttttgaatgatacagaggcttctttaattttgtttattctgtcttccaacttcgataaaagtgatatattaatttggaattttttcgacaatgactggtttacaataaagagttgttattggagctcagtagcttgaattgggtggggtcaaacctccccctcttctaggccttctaagtgatggaagattctttggaagctctctcttcctccaaagataaaattttttgtatggaaagctagcttaaatcttatcccaacttatgctaatctaactacacatagaatgaacgcttctaatgcattaatgcatgccttatttgtttaccgaacaatgaaacaactctccatgccttgtggttatgtccttcccttaaatctattcggtatgggtagagtttgaggggcttggatagtttaaagatggtgtccagtttctatgaacttttggttggagttatggatctcttatctaatgaagaaattgagaaacttcttgttcttttgttgagaatttagtatcgtcgcaacacatttgtgcatgataataagttgatttctgatgatatggttagtagttgggctcttagctatctcgggcagttcaagatgcccaaaaccattttgaaatgctggtccctgtgagttcacaacggtcttcttcttctcatatagcaagggtgggtcctaagttgattttgggagagtataatttatttatggatgctagtatttgctctgaaaagaggtggtttggcatggggcgattgtatcttgtcccaatagtgatgtgctttgtgttgctactactccagtcgatggcacacttgaactgcatgtggcggagggtgcaattggcttcggccctgttacaaggttttcttctttgtaggtggttggagtgtactcgcatttgtgtattttctgattgtttgtgtctggttaattcagtctctaataagatataagtttgcaataagtatggtattgttattaatgatatttttttatgtttggaagtctttctctcttatttttacctctcattgtaagcgaactaataatgctcttgcacattctttagttaaattggctctaactttagatgattctcgaatatgactgccttacttactttaatttctcatgcttgtaatgattgccagatccctttagctttatgccttttttaatggaattattcatctttctcaacaaaaaaaaaatgatagtattatcttcacttgcacatatttgagttgatttagcacatatttttaatttcataaactcttggattttatttatttttcaataatatatttttttattactttagaaatggtaagttaaattaatgtggggatttgggtgtttaccggttggaatcttataattttagtcataattaaagaagcaaataactcaattagtaattaaattatccaataatttgtcataattaaagaagaaaaaaaatgatccattgagtaattaaaatgttacttgaaaaaacacaatttaaaccaatccaaatcaaatacattctttaacctgtgtacaatacaagtcatatttacattattttgcacagccccaactaagagttttggaaacttgaagatatcattgaaaagcgccctgtaaagaaaaaaaaaatgttttataaattttaacgtagtttgtcaagaatatctaacaaaagacgaaaaggaagtttaatagacgcgtgagtccttctattgacttaataaaaattacattcataaaaaatcggcgtaaaatcatgaaatatatataaatataggttacaatgtagtttttacaagaaaaaaaatgagctcacttctacagtttttatatatgtatgggtatgaagggggatattatatagcatgttgaggcttcgaggaaattgtcatctgcaatttttcagcagataagaagaggggctcgagaagttggcgataccagtcgaggacttcccaggatctgctttcttcccaggagttccacattcactaaagtcgagaacacgacactcggcctacaaaaacacgaaagaaagaaagaaataaaaattagtttgaatataaaagctagcagcaccttcaatgattattatgttctaacaaaagaatagctacaaactttgaacttttcaagtacaatgtatgtgtatgtttgactaatcaatcttaccaaaatattttgtggcaatgtggaacgaattcctagttgactgctctttccccaagtgtcacggttgagttttcctttcatcaatgattcaggagtgtcatttcctaaaacctcctgagcattggcgtaagcagttgcggtatgctcacttacttgtttcatcaatccaatcgcatcatagctcctctctacagggctcacgaaataccccatatcctgtagaagaagtttccacagaattcgtgaaaaaattatttcccatcaaagccagaaagtttaggtgattaattgccaagaaattttctgataataatacctcgatagagatgtcagtatcaactctgggcccagctataaaagaatttataaaccaaggcgacttccatgccgaaggggattcgatacttcttttaaatggggtatcaccaaatctgaaaaaaaaaataaaagataaatcatatgaacccattcaacaaccaaagaaatctcatcttaatcacaaaattagggcctgaatcttacatgctgaaagtttcaactgtgacattgctcccagcagtagaaacattcatctcagggagggttgacgaagaatcatgttgcccacatgtccctgctatagcctgaattttgagtttcttcccacttaatgaaggagagcaaaacggtgcagaaacaattccagaagatatcgaactaagacctcgatttggtgaaggatcaaagcttttgagatgctgatttctaggtgttcgagctttgaaatcaacttgtttaggagaaaataacaacagatcattcatattatgttcagtaaggaccccagagggcaattgggaagaggaatcagcatcaatcttggtcttatcttcaatttccgatgcttcttggtctgtatttttatgtagttcactatcacagaaaacgtttcctgtgtttctgtcgtgtgaaaacgccatattgttacccactttctcagaatcctgtcctgaggtacgagccagactttcagtatattcacttggctctttgacgttctcattctggttaggcgacggggattgcaaagatgctttattacccctattatcatggacagcaatatctaaacgggaataatttttggtcaaactagaggtcatatcattctccagctttttgtcctttttcctatcggacaatggtgacataaactcccggtgtcgtttcttaaaaatagatggtgtacccgtgaatgttttagcagcactcttaagcaccgcatcaggactaccatcacgtgttggtgaatcccataatctaaatggagtaaggcagttggaaggcatcatcagctggcgaataccaagaggactatattcttgctgcatctcactgccggactgtataagatcacaactaaaaaatggaccatcaaaatttggaaagcgaggaggttcgtaacatagtactcctgcatcctgttcacccttgtccacttttggtcttgaaaccgtgggacaagtttgagtatccgattttgagccaaaactattgacaggaaccaattttgaaggatccttcgatgtattcagttgctcttgcattctcgacatatccatattatcattgcaaggagaattggcagaatcattggtatagataaatccatcacgtgaacaggtggcatactcttgttctggaactataagcaaactatttgaatcactgccaaatacaagtcgaccatcatcaacagacactggatcagaaaagaagttttgagagcatgaaattcctgttacatcagcgcttgaatgacctggtacttgtgaaggcacacttccaccagcatcagacatctgaattttagatgattggtgtagtactgaaccagagcctccaccttcaagatttcttgaggaaaagcattcatcattcattgcttctgaaaatagaaccctacaacactcatcatcagatatcagcatgtgctctggtttttcagaacctgtgtgcatgttccccatggaagcagaaacgattaacccaccagaaatttctaatgaaacattagctacttcattgctctcactggcacctaaacaataagtttgcatctctgatgattcccgttccaaatgtcttgaagaaatattagacatgtcatgcaaatcgaaatggtaatccccacccattgaaacttcagcatcatttgaaaaattttgccggagatattttgcaccacaatctatgtcatgagatatctctgctctggaaaaagcagaatcctccagagatggataatagggttctgaacaagatgctgggctggagatgggcaagttgcctgaaccagttacttcagtagtctgaagttcctctcttgtatttaataccacattggccatttctccagcagtctgaaagcgaccggcgacagttgaatcttgactgcattctgaaacctcctctgcttctgtccctctacaactactatcatctccgctaatcttcaaagaagatgaacctatgggttggctttgttgtccaacttgaggtaagccctggaattgtgtaagcaagcctgatttaagttaagaatccagtttcttttttactagaactgttccaat

SEQ ID NO: 262655 - DNA, 527 bp, Cannabis indica
tccatattcgtcccagaaggcctttgaacatccggttaaccattctctcatacgttgaaccaacattttttaacctgaagggcatgaccaagtagcagtatacccccttatcggtcctaaagctaatgcattcttgatcaatgatgtgcatcttaatctggttgtagccgaagtaggcatccatgaaggataatagcttgaacccgaaggtggcgtccaccatctagtcaatttggggtaagggaaagcagtcttttgggcaagctttgttgggatcggtaaagtcaatgcacacccgccacgtcccatttggcttaagcaccagtaccagattggctagccactcctcgacgtcttgcataggttctacaattttttaggatcccacacggggatccaactcatcttcttctgccaatttgggctcgatactgtgatggaccattaacaatgataaatgggccgcgacattataacactacgtggcctctccttgattacccctcacggtccctgttgggttttat

SEQ ID NO: 262656 - DNA, 946 bp, Cannabis indica
atttcttgccatcccagtcctcactgggtcttgtatgtggaaattgcatttgcctactttcctttatttgttttaatttttactttcattttcgtattctttaagatatacctacttttataaatgatgtctctattatacttcttaaattaatgtaaattatgtgctacacttaagtagaggacaagaatatattagacaactcactcgtaaaagtgggtagattttaataaaatataatatgaaagtatttttgattaatggaataaaaaaaaaaagtaatcctcaacttatcctgtcttgtataactcttcggtccaaaggaattgggccagctctttgggcctctgtaacattgtgacttgtcttgttttgtcttcttaggaaaaatgtaattctccgtgtatttgtttctcattgtggcctagataattagctcgaagccatccagctaagtgatacacatatctcagaagcaattaaaattgaatcccacaagcaattctatcctaagagaggactttgccaaggagatccgctgtcgccatacttgttcatcctatgcagcgaagttttgtctcgtctcttgatgcgggaggaaggtcggggtcgtatcacgggatttaaggttagccgatgtatccctcctatttctcatttaatgtatgttgatgatacgtttatattctgtaaagcgaataaggaagaagttgagacagtgcaaaattgtatccgaacctactgctcttggtctgggcaaagtttgaatgtgaggaagtctacctatgtcttttctaagaatgtggaggagccaagtaaggctgagattgttagtatgctgggattccggtgcatggatagagaagataaattcctgggaaacccaattctttggtcaaaaagtaaggtgaaggattttaagttcattaaagagcgtctttgtgct

SEQ ID NO: 262657 - DNA, 556 bp, Cannabis indica
ggggctccagctcaaggatttaactccatgccttcagcccgtctatggtttctccggtcaaggagttgcgcctctgggacaaatccgcctacccctcacagttggacaagctccaacgagcataactatcatggcacaattcctgatattggatgttccttcagcctttaacgtaatgctaggccgaccagccttgtatgacttaaaagctgtcacatcaatattccactcgtgcctgaagttcccaaccaaaaacggggtagggtgtcttagagggaaccagcaatctgctcgggaatgttacaaccttgcagtggccaaggctaagaaggaagtatcctccagccagagcccggacaagggaatgaatattcccaagtaggaaaccgcccaaggcgaggatgaagatgtggatcctcgacttggggacccaagcagcaatgttggacctgtggaagaattagaagagatcgaggtcgatccagctatcccggccagaaagctgaaaaaatcggaaaaggtttgttgctcggagtaaaataagaattgataaaat

SEQ ID NO: 262658 - DNA, 517 bp, Cannabis indica
atttttttaaaaaaataatttttttctcttttaaatatctttagaaaaattaataatggcattccaacaatagaatttttctttatatatcatgcatgcattttactttcaaataaaaaaggaaatcaatttcctattaataattttcgaaatagttaattaacgaattaatgaagtaatcggaattatagatataaactttgtggtaataataaataatagaagaactaaccttgaaagtaataaaaggtcattaagtagtggaactatcaacatcataggtcataaatattttttttttttttgagagaaagggagcccgctaaaaagaaagaaagtccattaagtcgcaggggtcatcgcctatccaaacagcaacttcatctaaccctgtagcccagtgagccaatttgtcagccaaggaatttgcattacgcttgatgtgggctattcgagctgccgggaagagagataaagtttctttgatttgcgaaatgagatcaccgaaaactgagag

SEQ ID NO: 262659 - DNA, 4964 bp, Cannabis indica
catttgtgaaattaaccctattacaaaggtctaaaaataaaagcaaacaatgtaatggtaaactcattgccaattgattttgagatgaaatcccatgattctcaacatggtatcagagccatatcccttgcgggcaagcgatcctaccctatacatatagtgaccatgtccattctgatacggttcaagattgatgagcaaaaaatagccatcattttgagggagaatgttgtggacattatccacataaaataaatagtaaagaattgagccatatataagaacatgggctactccactcattgccaattagttttgagatataaccccataattctcaatagataataataattccattacaattcccattacactaaaccaccgttagtttaaaaaaacaagtcggtgggtccgctactccgcttagagtgttttgcctgtttggcagaggggaaactcagaagaatacgcaaggaaattccgcttcgggaagaaagggagaactaggatttcaattcacagtgaggaaaagctatggacgaccacgaatttcggcgtatcttggatctcttccccctcgtccgatcccgagattttgttgtaatgactacttccacactctatatctctgtttttttttctttaataaatacctgagacaagagattgattgaatttagtggtctgtatgtaggtatatacaaaaaatctaagaaatttatagacctatacttacccttaggagttaactaccaatcgaaaatgaaagtgcattacttttgataaagaactttgttagatgtagaatgagctgcagctagtggattatactgacttattaggtttacccaaataggggtttaagtatttgtgttggttcctgaattttaagtaggttgtccaagttagatttaaatttatgttacaatgcattgtataaacattactaggtttttaccttgtaatggcttgtatatgaatgaactcttgttatttatttttgaattaaaaataagaacgatgtacatgattggactatgcatttcttaactgaatgcagtttcaggctgaatcagaatcatcaagtagacaatcatcttctaagccgtcgcagaatgaagaggtactgccatgtaatgttgttttgttttaagtacaattctattttcttgtattatgaactgtattaatacaagtagcgttgtttttgtttcaacattgttgtggcaaaagttttgacataatgttaatatttctgtgacagctaaaagattggcaagacgcatgggaagaaggaagtagcaaagaagttgaaatcaaaggacctgatcataatggtatgctttcacttgtacaacttttatctaaagaaatctatgtgcttactctctaatttaactagcataatgagacttatatggactttgcaaatctcggatattttttttttattgcttttgcctattcattagcctttgcaccacttctgtatattagctagcttattgcatatttatttttagctaagaaccgggtttgcatttgggatgtcggttcattgttaagtgtgataacctcttattagcctttttattcagcatactattcgtgtactctttacacaaatagattgacaagtgaatatttcatttacctggactttctgggtacccattttcaaaagtttctctttttggggcttcttgtattctttgtttgaaaagaaaaaaaaaaagcaatgtttcagataattgattcccttgtgtgacaatatatttttcatttccttttcatgagcctcagtttcaaaagtcttgtcgtcctcaggttatatactgtttcttatgaagtaagaactacgatgaactggggctttaagttagtaaataaaatgatcaagcatactcctcacgattctaatctactttctttcataaattactacttattattattattttcgaactgtgtgtttcatttttctttttaactagctacataaaagtaacattaatacattataaataagaaacgttcttcacttgttaattcacaatctccagtacataattgatttctatatgcttgtggatgtgaaatttaacagatgcattttggaagaagctcaagtcagctgttgagggaaaggtatgttcagcttcggcttttaagcatattattatgtatattttaaaaattaggctccctgcaatcttataataataataaattaattttaaaagtactgcattgtacattctgctaattgttggaacttggtccaaaatatttgtcgtgttcttttcttttaaaccacatttcttcataaaattttataatctactctatcacctttggaaaatgaaactattttagtctatattataacttgtgctagataatctaaattctaaacatttaagatataacatatatcattgttgacagtcttagtttagtatctgtacttaaggtatatataacaaatgttttgaaaagagaaattggtgaaaaaaaaccccttaaatattacattttaagagactgaaccctctatatttaattcttgatggtaaactaccaaaccaccgttataataacaaatccacagttccatccatttttctcagttatctagcagcatagactgtccatgtcaatttcaaattaaatataatgaaaatatattttaattaataaaatatgatgtaataaaaattaagttagaaactcaaaaaataaaactagaacaccaccaaaataaacccagatcaccaccaaaataaacccagatttcttctaaaaacccagaaatttttcaaaatctccagtcctaaacaaaagaatatttcataaaaaatcaccaacaataataaatcaccacccctctgcaagtccttctaattgataaaaaattaagttagaaactcaaaaaataaaactagaacaccaccaaaataaacccagatttcatctaaaaatctagaaaattttcaaaatctcattcctaaacaaaagaatatctcataaatctttaccaatattaatcttacccctttgctgttccttctaattgataaatttattgcaacccattgtgattttaaacaatgaaatctttctcattctgctaataccttcaatttcaatttacattccagctctagcactaattcttaacaagttccaaaaagagaaagttaaggagttacaaaacaattcaaagccctgatcgttcttcattttccacctccctaaacctaacaaaattgatctatcatacaaaacccacacaaatatttaaaaccagcacacataaacaaattcgagatggttattttagttgagactagtcgttgatgaacatttgggaaattgaatacatgtttggacttattcttatgagcaaattttgagttgctaagaaacattatacgagattcctcaatgtgaaaatgatgtatttctgactaacatatgttggtgttgcatagttctaatcggatacttggtagagtcaaatgttagaataattgtgatgggaagttggcagtaaaaatttctcataaacactcccaataatattagatttacttcaagtgatacataagcatatacagtacattttgttgaattattttgtactatcgagtttaggtcaatgtttttggctagtttctgtggtttggtggggatttagtgtttgtggggcattagtagcaagggagttgaggcaagcatatttttgttatggaatgttgagcttcttatgttcaatggtggcctaaatctctcctcagaacaatcaaatatttgcaaatttaaacgaaggagcaatgaaagcaatacgattataattaccagtgctaaattatgtaggttgatgcagcagatgcagagaaattttgcaagacatttcagagaattcataatcaacttgtaagtattgtttgtatgatcattttcatggaccatagctactataaatgctgagtcctctatacttgcaaattaaattagattgtactactgcctaaggccttttttttatccacacatttcaggttaataaagaactgagttcagaggccgcccaaaattttctaaacttgtcaatttctgacaaataggctaaagtacgctttgtacatttgcttgttcctttttttcttattttcttaaaattataaatggcataattggatttcggcttgtgtgaatgcacacctgcttggatcaaatttgttacttttagaacaagtaatggagaggttaaatccatggagaaagagagtttatatagtccattgtattgtttgatgtaggtctcacaatttagtgccctgaaactgaaactagtgtataacaatagaaagagtacttcaccattgtcaattctcttgcgtactcgagataatattttgattgaaacatattcaaacttcatgatttgtagtttggtcaaattttgtgtttcatggcttgagcgcttatttaatggcagagttgatcattggaccacataaatttacagttaaaaaaaacacatttggtaatcgtagataagaacgcgagaaatccaaactcaaatccttttgtttttttgttatgaatagggtgaccaactaaatagatttactaacttttttcagcaaaaaacttcaatatatatttcttttgcaactagatttattgtttagcaaaaataaataaataacatgaatagtgggggaatgcagaatcttccgcatatcctagcaatgtcattatacaattattaactcaaattattcaatgtacatcgcatatacaactagcatttaattacaatgttaacactatttgtaaagggaaatttcactttttggccttaataatacaagccatattaaaatttataccctcccttaatttgtacaaatttagtccattaattacatgaacttcccattttacccttt

SEQ ID NO: 262660 - DNA, 855 bp, Cannabis indica
ggaaataacggttccgcacacagccagggtgttcataatatgactgttcaacaaggcatcaacgcccaaacgaccatcggagacgcaaccgaattgcaaaacctccgtgctgtgctcggactcatgcagggtcacaacaatgccctgcatcacgatcaggaggaattacgtgccgcagtaaacctcgcgtttgacgaacagaggcgtatgttcgccgagtggagggacaaagagatggaggcattaagggctcaccatgcagaaatcgaagatcgtagtcggcaagccactgtgctgatacgaagagcctatcagactgtaggccagcaaacgccgagcgtcattcccctgggagaaatcgaggatgacctgacgatgaatgcctcccagacaaccaacggtcagccgtccaatccccggtcacgagttccattcgtgggccaagaggtaggcggacagaccttgtccgggaattcatcaggaggagtcatgctcgatggatccacgcaaaataatggagccattccacctgccaaccaagcgaaccaatcgctaaggcagccaggttcttctgtgttcaataggttgggaataacccatgacctaagggacggtctaaacagaagaaggggaacaacgagcaaaatactacaacgaacgtgcagtccagagcccatactcaaatccccgctcagaaagatgctgacgtagtccaaccttaccagaatgccaatcaagtcagcccagccgtacaggcccagctcgacgaactgaagaatatgtttcatggcatggccgggcagtgtaacaacgatcttgagttagaccatgcacgcagaactcccttctcaccag

SEQ ID NO: 262661 - DNA, 595 bp, Cannabis indica
atggagccaaaaatggcaatttttgttttgggggcccttaaagcttcgattcttcacgtcaaaacgtcttctaggagtcccttaagtttaaacacaatcttattttaacccagaaatgactctaacacatttgaatccaagattgttcaagaacgtggatgaatgtgcatgaaaatggtgaatttcattctgggtgttcaagggctgtttcaatgcgtttaaacccctaattacaacctaagaaacccaatgaaaactctccaaacagcctagctctccaagaactcaaatctctctttctctctctaagcttcacatgaaactctatcggtctctctctctctctgcacacagcctcctcccttcaacttctttatgcgttctaaaccctaaaagtatctcataaacatcctatatatactcccaaactctaatcttaaccctagatcaataacttaatttttttttaaaaataaataaaatatatatataaaaaagtgtatcgtatgtatataccataatctataataataataataaaataataataaattaaatacaaataatgctacaatatatttacccatattattat

SEQ ID NO: 262662 - DNA, 953 bp, Cannabis indica
ggacacacttgtctatttattttagggacaaatctgctgctgagtgcggtgatccgaccagtcaaactttgcacttcctttgttttagttggcgacttcatgtctaggagggcttgaatcttctctggaatggcttcaattcctctggcattaaatgaagcccacaaactttcctgagctgactgcaaaggaacactttaagggatttagtttcatgttatactttctgaggactttgaagcattcgtccaggttttctatgtgcccctcagccttcctggatttgacgagcatgtcatccacatacacttccatatttttcccaatctggtcttttaacattttgtttaccaatctttggtatattgctccagcattttttagaccaaacgacattactttgtagcaatatacacccatatctgttcggaaacttgtatgttcttggtctggtggatgcattttgatctgattgtaccctgaataagcatccatgaagcttaatatttcatgccctgctgttgcatccacaagctgatcgattcttagaagtgaaaaacactctttggggcatgctttattgaggtctttgaaatgaatacacactcgccatttcttgttcagcttgggtaccagtacgggatttgtagcccaagctgggtcgaaaatttcaattatgaaattattgttgcgtagcttttctacttctttttttagggctagtgctcgctctttgtccaatagccttcgcttttgttgaactggttggaagttgagatcaatatttagggcgtgtgacacgatagagagataaattccgaccatatcctcatgcgaccaggcaaaaacatctaggtttgctctcagaaattttatcaatgctaattttactttgaagaacaaaccttttctgatctttaactttctgggcgggatatctggatcgatctcaa

SEQ ID NO: 262663 - DNA, 516 bp, Cannabis indica
gctgcataaaattcaacatggctctagcatgtacgtagcttttcgtgcgtgaaagatcaatggggttcagtatgtcttcaacaattcccagaagagaaggactgcttgaagtctattacacgcctattgatgtttcagcctttggtcttttaaagcgaagtcattgcttgaattttagtgcaactttagcctttcctcatagaagctgaagtcttccacattaaattcagcatggctctcgcatgcacgtggtttttcatgcgtggaagatcactgggggtttaatacatctttaaccctctttcctaaaggagaaggagtgcttggagtctttcacgcgcccagtgaagttgcaccctctagtctttgaaagcgaagtcattacttggatgttactgtaactttagcctttcctcgcaatagctgaagtctgccaaaataaaatgcaacgtgaatctcgcacatcaaagcacaccacagcctgcaatagttgttcaagttgtggcgcagccttat

SEQ ID NO: 262664 - DNA, 1146 bp, Cannabis indica
atacatatttatatatgttctggacttaaataaaatttaaacattaaacataatcatgaaataaatcatgtgaaccatgcaatataaaagtgatttttgatcttttattaattagtaaatatgattatattgaaatggttttcatttagggcagaaaacccaatagatatccacaaacaaagtgaaggagttgctcgatagagtagacggctttatcaaatagaagaagtcatataacaggcccaggcgagacatgtcaatagcaagcagtcacgaggcacccaacagcctcttcacccacaagaggtgtaggcaggcaacaacaatactgcctaaacctctagtggtaaaaatactagaaataagcacaacactaaaaactcttggaggaacagtggcaaaaagggaaagtttaacacttttccatgccatagaagaataaggaggaaaattatacttgctccactctcttgacggagaagcctgagaccatctttatggccactcaagggacaatcccataccgaaagccatttccaatgccaccaacgtggcaagacatctttgggtcataataggtggcccccacagcgctggtgaaactggcaaagctagggagcactatgctttgacactcaaaggaaaaatacctagttgtcgaagacttgagctctaagaaacataaccatagagcccacgatctcctttagcgaagaagatgcagcaccggtctgtttctcgcataatgatcccctggtcattacttggcaaatcaagaatatgaatgtggctagatgtatgtgttggaattttatgccctaaataaaacccatttcaatttaatctgatttgttatcaataaaagattagaagacatttatgtttacatgtagttttcatgtttatggtttaatgtatacaatttctgttaaatccagaacatatagttattcacaattccagtgatgtcaacacagtggaaggtaattttgattatatgcttcaaaagataatgtccctatattcatcagtgcactggatttacagtgatgtatgtcagtttccaatgtatggagtatacattggactgtgacccatattgatcttggtaaagatattataatcttactgttatatctttctaag

SEQ ID NO: 262665 - DNA, 271 bp, Cannabis indica
ttgtttataaaatttgggaatttaaaaaactaaggttctaatttttcttttaattatactgttgccgcaatttttttaggatacagtctaaatatatgtttcgatttattgatacatgttcactaccattatatgccgtaagtttaaacatatatatgacataagtttatttttttgtttgaattactaatttcatgcgtgttgttgacttttgtcaacatattattttggtgatatatgcttttacatatccaattatacatatatatat

SEQ ID NO: 262666 - DNA, 3032 bp, Cannabis indica
aaaaaaaggaagaaaaagaagaagaaaaaactgaaacaaaaatagaagatacaaagagaaaaaatgaaaagaagatgaagaagaagaagggaagaacaatggcagtaaagagagtctaatttatcacttcgttttttttttttttttaatttgttgttatttttttttttgaataattaatttgtttgttattaaaaagaaagaaagaacatgttaaaaaaaaaaaagaaagaaagaaagaaactactacacatgtgacaatcccttttcaaatcatttttttttaaaaaataataaaacaaaacacattctacaaatggtataaaggagaaagataaacaatttcttactgtacagagaatgcagtattaaaaatataattttaagtgtgtaagagtataaatgaatctttttttttttacaaaaaaaaaaaaagcagtatctaatgtaaatttccctttaagtaatgatctttcaagaaaatgagttttttattttttttttcttgatggaggaagaagagattagattggctctgcgattagtgcacatttgtacacttattcctagtcatttattagatgatttagtatatatttcttaaatatttgtatagatttgaagtgttttctctctatgtgtgtaggtttgtgcttaaaagacaaatttatgatagagtgatatctttgagccaattattgataatgttttcatcatattctctaatagcttatcaaatccaaaatgataaagatcgttcttgtctttttcaaaatacattaaataatctcattttggagtgtggatgcttaagttattcatattttattgagcaaggtcagaatagtcacgttctaggtgaaatgtcgcatgagcttgcggtcaccagtataggccccgagataatagaagccccccgagacattttttctcgcatgaacgactttgacagagtaaaagcaagctatctccagaggagtagggcactcccagcctaagatgtggtacataaccttgaggctcgcaaggatcatgtaggaagtgggattcggctggaatggggcgactccgagatagttgcagtaatccttaaagtaatccctaaggggaagaatcgctctagcttgatatgctcaaggctccaagctccaatccctgaggagttactagtgctgggaccattgcactcctcgcgtattatcctttctggaggataacagttgaattccccaggtttcatagacctaataacacaccctttctattgcttaatgctgcaagacggaaggatgccactaatataggccccaatagacctaatcttggactcaataagttctgcctcgaatgtaacattgggaacctgaggggtctttgatttgtggggcttaggaggaatgatttcaaactcaaggtcacctggttcaaatgcaatagtgacgttggtaaaaacattgatcttgcaagtggaatagaatataaacacaagggttcaggccaggcatcgtctcgcaaaaagcgatgcttgccctcagaaatttcttgcaagaaccgcctataaggattgacagtctcttcttggttcgacttaatcaaatgatctctaatcttgacatcctttatttccaatttggattgaagttcaaagtttctggttttatatgggcaagctatatgtttgggacatttcgatattgcagattctggagaataaatttttgaactagattgggacatctttacaaaagaaagacaatcctaatttctagatgaagtttatcaaaccagaggcttgaggaatatgataaacctaaactatggctaaaccctaaaaatcacccagaagatacaaaccctaattgctaaaccaaacgaagtaatgggatgtaagacaagccataactcaaataaaagcaaaatgagaacgagatacttactatacgaaatcaaaaagtcagaagctggagatttttacagatggagacgtgatggccggcgggataagtttttgaacaccgggattcgaaaagcaagtctaaataattcgtaggaagaatgtcaaagataaggatggcatgcacgcgttcagagagctcgagtggaagtttcagaaagctcaagtttttggagaagattaaaatggtagaaaatttgattcttaccgttttataccttgtatttttcaaccatcagatcataatatggaagatctaatggatgagaatagaatggaagtggaaaagacagcccattaatgctattgatgtgtatcagaaccataaaactgtcaaaatcaaagacatgcattttttcaagagaaattatgacaaatataccctctgtaatcattaaaaagcacttttttttattaaaaatgaactttttaaggggcaattgttatacccaaaattcagctatcacttcagaggaggacacgtctcaaactgggaagaatacgaatcaataaatgtattgattttcaaaatggaataacttattaagtgcggaagtgacagagtatatttacaacttgctgactataaggtcttacagaagataacgatatacaaattgttgtctcgtgcgttaacgagaaaccatacgacattggatgtgcaaggcgaggcatcaacctcgttacgcatgaagagacgtaggcgagatataatgattgttaagacacttagcgtataatacacagtatacaaactaagtataacagtcgggaaaacccaaacaactaatagcgagacgtccattttgctataggaaggcacgctcgtggtaccttcactaattagcttcagacatctttcagtgagatttacagctccgtcgagtcagttctctcggatagaagctgacattcaaatgatgttggctgttgaagttcaccttgtcgccaagaactgcggttgttagatggagcattatgtcttctagcgtagaagcgacaagatttacattattaacctcaaaaagatgtgggaaaagctctagctcgctactatggttattattgctatgttccc

SEQ ID NO: 262667 - DNA, 596 bp, Cannabis indica
tgatgttatgaactacttagtttgttttgtgggccaataattttttgttattggatgtttatgattttaattatattttgttatatccttgagaatgatattgaattaaaaacatgcatgtagtttatatcttgtagtgattattgtcttttaagtttaattgcttaatgacaataatattttattggcttattttttaaaattaaacatgtttagtgacactaacttattattaagtagtgtaaggttaatttcactagcttaattattaagcattgcggtatcagcgaagttgaggacttatgttatttaattaatcacatgatgaacatagtttcttaccacactactagacttgttgaccatgtcgatttaatactttagtatttgtaattataaataacctttgaagaataaaaaacaatatgattgtcatagttcaatattaaaggttaaattaagaccgtacatattgacatgctatcaaagaaaaattatttttaaaggggccacaaatatttttatgttgttcaacccatgagtcgttttaaataaatattttgatatataatatatatgtattaaaattaatgtaa

SEQ ID NO: 262668 - DNA, 260 bp, Cannabis indica
tttattttttacgttgccagaggctgggctgcacctagcccggccaaaattttgtatttttatgaacttgtttctgtccccaagaagcgggacaaatttaaggacgattttttcaccctctaggcccaccccttgaatgagggcccggttcctattaatcaccaaaagaacgtcaaggagtaccgccatcattttttcttttcttctggcttccaggccatggaccgcccggagctcctcacggagtgggttaggattcc

SEQ ID NO: 262669 - DNA, 711 bp, Cannabis indica
tgagatttagtttcactatcgcaaatcattttgtgctttggactactcattctacttcaaatacttttattctacttcttttcatggctccttggacatagtttttggtatagcttttcaatagaaaaattctactgcataaaatcagttatatatatatattctatctttaatcaagtttttcaccatcacaacttgtttctaatacgaactactcctttatgggacttcatgatttcaccaattatcattctttatatacactgattgtacccaacgaacctaaaggttatcttttttttcaaagctgtgtcccaaacatatcttcccatagcatggcttgattaaattttttatgcaacgaaaacccaacccatcagctaccttggttggcacacctgctaccatgatatataacccaaggccgaaaaatcatagctacttttccacaaaaaagctctacaaatattatctattttagttaaaatagacttgggagaataaatatttgagcccaatatgtatgaattgagatgagtactgagtttataagtacacacctacctgcataagacatatttttaaactccaactttgattcgtgcagccattttctccaaaatactagtacaattagtttttgaaagctattttgcccatataggcataccaagatatctaaaaggtgaagtactttaagtaaaacccgaa

SEQ ID NO: 262670 - DNA, 665 bp, Cannabis indica
gacagtttgatcaaaccttgagtataaagactagtggttcccatagcgaaatggtttcaccccaacattgttaagctcttgattacgaattaaacacaagcagtgatctgagacaacctcccacttaaatcaagcatatgtgttggggaatttgtccaaccaaatgttgttagtgaaaactctatcaagtttagaaaaaatcatgtcacctatctcatgcttattagtccatgtgtaaaaagaacctgaacttttgaattcctcaacttgacccaatgcaagccaagattgagcatctaaaatgtctttactctgaataggtctccccccatatctgtcttgaaaactaaacatagcattgaagtcaccaaagatgatccaaggctcattaatcttcccaaaaccagtaagtaatttatcccaaatatatttttgggtctccatcgagttactcccatatatagctgttgttggaaatattttaccaggatctagatttactaacaattatgtttcattaacatcctaatatgaatttctaaaacaatgaaataaacacataagggttcaagaaaaccttacattaggtgcagcggaatataatgactccttctgtttagatctctagcccttgattccttaatgtagcagagcattatcaagat

SEQ ID NO: 262671 - DNA, 502 bp, Cannabis indica
atcctattttcactgcacacacatatgtctgacaagtgtgttcaattttgtaagtctcctctactaaaattaaaaatcctggtttacaattgttagcaatatgcattttttcacaacatcaattaagtatgatttgttcttgagatactaattagttattctcttttgaaagcataacatatatttttgtcatttgtaatgatttttgattaaattacttggtttagaatttcttatatttattgtacatatttttttttattattttcggttctttaaaaatataaaaaagtaaaagagggaggcgttgatgacttgattcatgggctaaggaaatttgtgcttaattggtaagtatcaatatttattctttcttgatttattttgatatgttaccatttaaagtttgttctcttatatggaaatgtgttttaaatcttgaaagtttgtattaaatgggatattttggaaatatattggtttttctagtttccttttattt

SEQ ID NO: 262672 - DNA, 594 bp, Cannabis indica
tacgttgacatggacgagtaccctgtcaccaccgaaatccaggtcatctcccctcttttctttaatttgttttatcatttatttattcgatcgttcttaagtttgtataaaatgaaatcttggtttaatttgctcactttgattcttttttattttatttttttgtttttttttcctatatttctttatacctaatattgaatcctataatcaattgtttagttaaaataattaagacattaatcaatgccttccttccaagtctcggactcataatgtcatgcatttcgggcagagtagagactcgatacgtggcctcaccatttataatttcgtgacatgtgtcccattcccatatgcatgactaatgatattattataaaaaaaaaaaaaaaaaattactgacattattatttaaaaggtaattattaaatacacaaaaataaaggaaatttataaaaaaaatatataaaaatttaaattaattttataaaaataccatcactaattttttaaaaaacatatattatttttataaaataattgtaaaataattaaaaataataacagtaaaaaattaaaatataaccgtaa

SEQ ID NO: 262673 - DNA, 656 bp, Cannabis indica
gaaaactagggttcctgaaaattccccaaccggtagaccggttctgcaaccggaattccgattctaggaattcctgaaccctcatccggaattctggttgcacaaccggaattccggttcctagcaggaactttttgaaaattcacaactcaatcaaatccaacccaaatcacacaagaccttcaagacctgttctaaacatcctatagaacaattctaaagcatcaaactcacccagatagcacagaaattaaaatcaccatgtgagctccaagctttgagttcaaactcaaacttggctaaagctcacttacaagcctcaaaactagcttagaactacataaacaagcacaaaaacactgcagaaaactaaccctaattcatgcaaacactacagccaccaaaaccttaattttctctttgaaaactacacttttgcatagaaaaaccttagctttactcaacctaactatcatgcttcacaaacagctcaaattaactcaaataaacaagcttaaatctctgaaaatatcaacaacattccagcaacaacaatgacctaaaactaagcatgcaacacatcattttcatcaaaattcatgaagaaaatttaaaagagaagctagagaaaacataccaacaacaagaggtcaaaa

SEQ ID NO: 262674 - DNA, 544 bp, Cannabis indica
atagaataaaaaataagattgctgataaaattgtagtatatatatttatatgataaataattaaagtaaaattagcaagatgtaatttatatatagataccttaaattgatgattagtgagtctcgaagataatatttttatcaatgattgattgcgataattaactctacttgactgatactcttctcttttcatcataacgagtctcttgcttctattctctgtcatcactatgttataatcaatctgttcacctagatataaaaaaagttaataaatattgtagaaagagtaatgtagggaggaagattaatattagagagactaattaatttagggaggaatgcgatttatattaagttgttattactattatataaatatagggtaattatatagtaggtcctagtatttttaccctatagtatagggaagaaaattcaaccaataacaattgaaagaaaagagaatgtataaagtgtttgtttacatatgtgtaggagattattacaatattttgtattattatcttattcttatttt

SEQ ID NO: 262675 - DNA, 1005 bp, Cannabis indica
aattggcattgtcgctggaaaaattactaaaaaaattaccacgaaactaatttcttgatgaaaaaaccgatttcttgatgaaaaaattggtttcttaatgaaagtaacaagaaaataacaaaataaccacatgaaagtaacaagaaaataatatcaaaacaacaacaaaataacataaaaaaataatatacaattaacaaaaaaataataacaaattaacaagagtacaacattaaaatttaaaatacactaaaaagaccgtatttatataaataaaatttaataaaccgtaaaaatattgaaaattccgtacagaccgtaattttgtaattttttttttttttttttgtaaattatcccttttaaaattaaagtatattttataccattttaaaaaatatagagtctaaattattattttacaaaacaaagggagcgaactctaacaaatatgaagcgcatggatacaagttatgtcttgaaatgaaagacaattctgaatctactttgtctacgaacaaggaagctatacttaatataactatatctggcttagcttccataaacttctttttaacttttagaattaaaaaagaaatttctataggtatttggataaaaattacctattaatttttgagaaactattttaaaaattaaaataatttatataatttttaattaactcactattttttttttttaataatatccaaacaactttaaaaaaacagtacctttttttttttaaaaaaaatcttcatataatagttatccaaacgttaaaaataagataaaacttattcttatcttatacttctaactataagcaaaagtaaaaacttagacaaacagggcatatgaatcttatagagtgttcgatcttggctcaggatgaacgttggtgtcatgcttaacacatgcaagtcggatgggtgagtatgcgtaagaaccttttcttatgagggtttaatctgtaattttcactcaagtaatttgcggtat

SEQ ID NO: 262676 - DNA, 3612 bp, Cannabis indica
aaaaaaataaaaataaatgcttttaccaagaatggataatcgttgttgtctcagttaaaatcttactgaatatgtaaattggttttcacacagaaaataagagagataaattgttgccatgaaattaaaaggtgccatgctgacacaataaagctaataggggaacacatactctgttgcaagaaaaccatcagttagcccaccaataaatattacttgctgcttgtaatcacctgttttaaatgcaacctacacagcagagataatcatcaatatccatcctgttctgaaaagctgttaattttgagttggataattaacacctaggacaaaagaaaaccacgacaaaggaaaataaatccaatatgtcaatgcagaacctaatcttcctaataagtgaaaccaaaccataaaacaattttatagctttacacacatttcatttttaatattttgttcttttaacatttgggatgagatcctctcgctgaactctatgaagctcttatttagataggtcccagacaatcaaactgagacctcctggaaactcatggagtgtttcacaatgaacagatataaggatattaataaacttccaaacctatgtgttaattcacagattgccaatcagttttgtgataggcaaggtcgggtgcttttggactcttaacttggtccacgaacaaacaaaggcttgggataagcataaggcccatgagaaagccattctgcagcaggttatacatcagcaacacagcaagttacaatcaattttgttatgctatattttatttcctttaatttgtaatttgtgaaatcgctatagtatagtggggttgttgtaaggaggggtatgtaacatgttgaatgaagaaactggtttgtaccgaggagattagcactatctcaaagagtgcagtacccaatagctagctattaattggtgctttcactgagagtaccttccgccatgagcaaagaacttgctgagaggttgaaaacgatggagttgtgtttcaagcaacatgttgcttctcaattggagaagttaaattccctgcttgagcaccatcacacatcgattgcggaacctctggttcctttatctctaacgtcactcacttccaactcaaaacccctagaagttgatgatctcgttaattaccacgttgtgccaaaacgaatcatgaatccatcagatgtccctcacgttgtttcccaaattgtcgtcaaaatcgaaatcttcctagatggtaccgcaacaaccatccaaatcaattcctcccacttgcgctcaatttcttcacacatcttgaaccacacagtgggccctcgcactatgtcaatgaggtcagtttgtcgtaccccagagaaggggcaaaacctcttcactctatcggtaatttacgatctaggtaagagctgctctttcaaagctatggagctcttggatgtgatgtcgtctagagggcttcttcctgatatgtacttctaatgctattatcaagggaaagtgcaaagaagaaaaatgatagagcttttgaatttttcagaagccaaaggttgtaatccaattacagaatgatggagagaagttattgagtatgatggtttcaagaggaggtgacccaactataatcactaattacagtatattgatcagcacactttgtaaagacgagaaggtaggttagattcggctatagaattcattgactaaatgacctctattaaactgtcttgggctaactatagagttgtggagggtggttttgttccgattcagttgctgctcgagacggcgtgagtacatcacaagcactcaagccaatccattgttagatcagcgtggctccatgaggtggctcaccacatactactgctggactaggttttcgatggtggccgccttgcttttaaggagaggtggtgttgctctcaccgcttgaatagcatgtcgaggtgtgcactcaatttgtttgttcaacttgttttggcctttaccttggtcctctttagcaggagttgatttcctctattgcaattgggaataactctttacttgctttaaaggacgagcacaatatgggaatgaagcaactggtgcagtcaatttgctcttgctcacaacctttgttgtcttcattggtcaaatcgttcagcgctaggtcctcatccaatgctctcgcagtacacctatcaatttcacatcagagtctctttggtctgttagtaagttctatggtgtttctggccttgtcctcaagatcgtttttctaggactggggtggtgataggaaaggtcgagtgctttcgactctaacttggtccaagaacaaagaaagacttgggctaagcataagaaagccattctacagcaggttatacatcaccatcacagcaacttacactcaattctgttatgctatattgtatttcttttcatttgtaatttgtgaaactgctatataaagtgggaatgttgtaaggaggagtatgttgaatgaagaaactggtttgtaccgaggagagtagcactgtctcaaagagtacggtacccaatagctattatttacctatttcagctattaatttgtgacatacagctgattcaaaaggataatgagccaaaagactattcattgactacgcataactccacttattgccggctgattttaagttgtaagcccgtgaacgttaataaaacatgtattgaaccaacctaccgaaatgcctcatacaattgaattctagattgaagtttataactgattaataacactctatgattcagaattttgataagagcatgttcatggttaacactcatctgtctactaaaactaaacccgtgccacatataaacaatgtcaacactcgtgaaacatcgcaaagctgtaaatgaaccaaataatttgaagattttgaaagtatgaatttacaaacgaaacaattcaaaacacagtcaaatacaacaagatcgagctccacaactaatcattcagacaaattaagactcaaatgaagacaatgaacaaccaatcacacaaagatttacgaacctgcataggcttggagccatacttgaacaaaactcctcggtactgattcttccgcacgaccggaccagcaaagtctccagaaccagagccaacagagttgctagccatcttaacggtaccaggccggtctgaccggccacgaacgatgccagagagccaagaaccggtcgaagaagacgaggaagaagaagatgaagatgtcaaggaagcggatgaagaagccgacgaagacagcgaaagattcatcccagagagctctgattcaactccttccttcgtcgtccatgtctcaggcttcggtgtgagaaggtttggttgtggagactcagaagtgtttaagatgggttcggttcggtacggtacagaagcttttgtacgatttacatctcaaggagaaaacaagacccgatgacgtggcggatgagtcagtacacgcgccaactttgacggcggcgcgtgtgtcttatttaatggtctcttgttgggctatctttgaggcccaacattgcacggctttgtttttcttacaaaaatactttttttt

SEQ ID NO: 262677 - DNA, 512 bp, Cannabis indica
cgcaagaactttggatcgaacaaatgacattcgttgctacatcggatctgaaaaatcctacaacaaattatgctgcttcaaacaagaaaggacctcatccacccaactccaccaacaatagtcgtggacgtggatctactagaggaagaggtggacgaaatcaaactggtcgtggaaacaatcgtccaatctgccaggtttgtggtcgatctggacacacagccataaaatgctaccatcgcttcgatttgagctatcaaggagaaggaaactccaatcctcaagaatcacctactgaagagccccaagccatgttggccactgcctcctctgtcaccgatcctcaatggtatttggatagtggtgcttcgcatcacgttactgctaatgctgctgccttgacaaacaaatctgattataaaggcaaaggaaagctcacagtaggtaatggtgcctctcttcccatatctgtcattggaaattgttttctttcctcttccaaaactctaatt

SEQ ID NO: 262678 - DNA, 697 bp, Cannabis indica
gttctaggtttgggtatgggtcttcgtcatggtccaagtctttttctagggtcctggtccgacagttcttgtttaggttccagttttgggtctcgagtctaggtctgggtcagggtttgggtcctggtctgggttcaggtcctagtctgagtcccagatccaaacaccgactacgggtctgttcctagccccatttctaggatctcaagtcaagatttggatccctgtcacgggtcccagtctggttctggttcttgttcaggtcttaagtcccaagtccgagtttgggttcaggattgagactggggtgcggttctaggtcctggcccctattttgtgtcccgagtctggttccatgtttgggtaggagtttggttgcgggtttaggtcccgagtctaggtctggatttggattcaggtctgggtcccagttcttttttaggtttgacttggagtctggctcctagtctggttacattttcaagtctaggtcttggtccggttacggttccagggcgatgtcctagtttcggtcccattctcgggtcccagtctacttccggcttcggttctaatttggggtcacagggtacaagttggggtctaggtttgggtctgggactgggttcaggtccaggtctgggttcgtttcctggtctgggttcaggtccggggttggtcaccagatacagacaac

SEQ ID NO: 262679 - DNA, 528 bp, Cannabis indica
aaacaaaaaaaaatcactttcaatatttttaaaaaagtttttttttcttatcaatattttggacttcgatcagatccggacccaaatctccccacggccctgtggctgaacccagcttctgaactgaacttgaatccaacctcggacctagacctgatgtaaataaaatcaaaaaataaaaataaaaataaactttacagaacacacttttgttttctgtttttaaaattaaaaaataaaagtggttacagaacgcatttttgtttttcaaaaacaaaaattttaaaaacaaaaattttacttttattttatgattaaaaaattaaaaaaacaaaagcattaccaaacgacatctatatttatactttattctttattttagttcatagtgagtgctcttagatcccgcgggaaagaaaactatattgaagtttcaccgtgcttttgatagtgatcttcaattcttggttcaataaatatttggaatatttacaccatatataatttttctctaaaatttatatttat

SEQ ID NO: 262680 - DNA, 523 bp, Cannabis indica
ccaataggaaagtctacaccatcaaagaatggtgctctacttgtgcttaaaccttctagcatgttattgtgtgaattgcttggaaacgacatactcttagattgtgaaatctacccaaaagtaagagcccttgctctgataccaattgttagcccaagatatgtttccaagaggggggtgaattggaaatttaaactaatttcagaaatttaaaaaccccaaagacaattcatgcaaatattcaagtttaatgcaataacaaagataatcacaagtataaacaaataataaacttgaaatgtaaagactttagggatagaaattgcaaactcttgatttttacaaggttcggtagaactaagccacctacatccttggtcttcaaagctatggacctagctttgagttccactatcgagccaagttaacgggcttgactaacccttaccactggggaatcaccaaggtttttcccaaacctctcacaatagttttcttccaaggactatcaacctcaccggat

SEQ ID NO: 262681 - DNA, 496 bp, Cannabis indica
taaaataataaaaaagatataatataaaattaacaatatagtatttagaagaaagtatagttactaatatgtttaaaattataatctggatatctcttcgatagcagaaagtgtaaaataaaaaaaacacctataaccataaatttaatgtaaaatgagaaatagcccaataaaattagtactacgggtgagcaatgttcgattttttacacacaaaaaatttaaaattataatccagaaatcaagtgaccattatataaatatttaaaaaaccgattattttaatccatagtttggtcgatttaaactgaccataccgagcttctttcttttttaaaataagtctttaaatttgctatagttatctgaaaactaaaaaaattagagtattatatcaaatatcatacaatttaagaaaaaaaactttctcacttaaataaataatgtaaaataaacttttttaaatttagttcaaattatttgtgctactagtatg

SEQ ID NO: 262682 - DNA, 1543 bp, Cannabis indica
ctgtaagttctatttatttatcatgatgcatttaaaatagttcttacatacttgtaaaattggtactcgagatgaatggtactgctggtgctgttgtacttttatttttctttttctttttgagtatgtgaaggtacatagaaaatgaaattagcctgttgacatttcagtccttctggtgtgtcattctctaactcagcattagttctaatgctaattctagtgtttcttatccaaattcttctataacttagtgaagattcgtctgtcatattaagcagttataatagctttaagaaagaatctaacatcagaatttatatcatatatcttaagcactctttttcttttacaaagaactttttgtcttactataattgtgtaatgtttgtgtcttatagggctcttccctcctttgagttttctcaccaaagttataattggttcaccattaaattctaatagcttttttatgtttgactcatattgcttcttcaatttttctttttttaataatcaaaatgagctttaaggactagtagtaactttatatggttttagagttttgttattggtatggtcatttcttctactattatattttgatcactttctgaaaacttcacatttagttgtaattctttaaatgtgttgaggatgcatctgtttctctctctgttttttcatattgttttttgactacttatgtagttcttggtttaaagtctcttgaatggaagaacacgcctcctaattgggggaggaaagatccttgtgaagctaagtgggatggcattgactgcatcgacactcgtgttacttcagtgtaagaaaatcttttatagttaaataaataaatgtcttcttatttcagccaaaattcactgcttcctgatatgtaaaatgctcattttatgcagaacattatcaagcatggggttggaaggtcagctttcaggagatatcgaacagttaactgaactacagactttgtaggtcttctattttgtgtaattattggctttgtatgaactatcaatgagaggcttcctttctcccttcggccaacaatatgtgcttactacttaaaacatttaatgctctcaaagttaggagtaggaagcactaatagtaacttatcataaaataaatcattttagttaactgttatgatagaaataagcttcaaatttttataactagatatcttaaacacccttattataaattggcaactaaattttcataatgcatttctgatttttatttttttgtctttccatacagggatttgtcttataataagaaactgacaggaccactcccacaatcaatagggaatctgcagaaacttactaacttgtaaggagatatatgttgaattgcctaatggaaatttcattttgagatctttgtagtaattttatactttttattgttttatggttgcaagaatcttggttggttgcgccttctccggtcaaattcctggcacaataggatctctaaaggatctggtctttctgtaagcattatacatttt

SEQ ID NO: 262683 - DNA, 558 bp, Cannabis indica
taagcaaaaaaaataaaataaaaattcattgttgttatttattattttttttccaaaccttttatattttttttctatcaatttttttttgttgtattgcaattaataacaatttttataaattaattagagttttttagtgttttgtaaaaatatataactgtatgataatatttaaaaatattaattataaactacacatttttttataggggcccaattttaaaaattagagcatggcctccaaaatatttaagacggtcctgatgtaaaccaccacaaagctatttttttgtgacaaatatagcacaatttttacagatgttcttatacaccacatttatagcattctattagagatattttaacaaaaactatttggcataacttttaacattgtgttaaatttaaccacaataaatactaatttttttttctactacgattaattattgtaattcattcttttattaaactttacattctttatatactatattactatcatttaaataataaaaattaaaaataataatttatatgtattctcaataaaat

SEQ ID NO: 262684 - DNA, 842 bp, Cannabis indica
tggaccaattcatccaccatgtggaccattttagatacttcatggtactaatagatgcatctatcagatggtcacatgtatgtttattgtcaagtcgcaatatggcatttgcaagatttttggctcaaataatcaattgcgagcgcaatttcctgattatacaatcaagagagttaggcttaacaatactggtgaatttacatctcaagcattcaatgattattgcatgtcaattggtgtttcttttgagcattctattactcatgtacatactcaaaatggtttggctgaatcattgataaacacctacaacttatttctagaccgctaataatgaggacaaaacttcctgtagaggtatggggtcatgcaatcttacatgctgcaatgttaattcgcataagaccaagtgcatatcataagtattccccattacaacttgcacttggtcaagaacctaacatttctcacctaagaatctttggttgtgctgtatatgttcccattgctccaccacaacgcacaaagatgggccctcaaaggaggctgggaatatacgttggatttgaatctccttccattatcaaatatttagaacctttaacaggtgatattttcaatgcacattttgctgattgtcactttaatgaggaacttttcccaacattaggggagaaaagaaaaatctacataaagatattacatggtgtgaaccatcattattgtatcttgatccttacacaaggcaatgtgaatcagaagttcgaaacattgtacatttacaaaatatagctaatcaattacctgatgcatttgttgacactaaaggagtaactaaatca

SEQ ID NO: 262685 - DNA, 1394 bp, Cannabis indica
taaacattgtaccaattttgcccctgtcacttcaagatactctccatgtgactctcttatgtcagggtattttgggtacaacacatataaaaagaggtatgtttcaaataaatataaacttagaggtaaatttggttaattgattaataaaagaggcatttttcaacttaccccttagattttaccatctgatccgatccaattgatttcaaccatccaatcgatccattggatatatttcatatacatttattggttcaattgaatttattcaatattttagactagtatttttggatcggatcggatccatccaatatttcaggtccaatatgtactggattagactggatccatgcaattcaagaaaaaaagagtaaaattttaatgtatacaattataaaatctaattactcatcaaaattaaataaaaatactaattaatttaattggatgttggatgtattggatatttagacaatctatccaacatccgttccgatccaattggatattcaaaaataacatacaatccgatccgatcataattggatatctaatatttggcggtcggttgtgattggatcggtcagttgtgattggattagatcgatttatgcacactcctaattttacatgtattaattaaatttaaataacaaatttattatgtactaaataaggataaatgatatgtattaaaaatacttggtgggacaggaacattacactaatttggagacagattttctttcagagaagtaataaatgtagtgtaaaagtttaatgagaaatgttaaagggcaccagtggtgtctaacaccatcctatgtgttaatatcgctattggtctaattaagtatcgggtcccatataatttaatataataacttttagggagtatcgctagccaatcacaatacgacatgtcgagaaggtgctagacactactgatgtctaataacaatggtcaagtttaatataattaaaaaaaaagaattttatattatattttgaaagatataaacgtattaaattctactaaagaacctaatatatttatatatatattttttttgaatgaagagcacctaatattcttgtcaatcactttcttttaaagtcattcaatttcaactgagtttgtctacttaaataataataaattaataaactttatattctttgaaaatttacatcacacttaacttatatgaaagacttatcttaaatgtagggatatacaataaaatatataaaatatttacatactttttttagctaaatcctactatgagataaggattaaagggtatttgaatccttccataaattctcttttagccatttaaagaaaaatgtataaggttttctttatttttacacttcaaaat

SEQ ID NO: 262686 - DNA, 751 bp, Cannabis indica
atttcttggaacatttgctgccagtcagcaggaggattagcattgccaacccccgcattatcccccagattctacggaggtggaggcggtgccggtggattggttttgtcaaccccaggctttacttgctcgccctgtggtctagatgatggtggagggtccattactagtacccctgtaatcaacaaccccagcgagttaagcaccaataccacacttatgcacttattactttaaaccctaactcaactattaactccatatagcatttaaagcatggcttcacatagcacattaatactctagatgcttgcatactgcctagaatggaaagcggtaaataaatgatcacataagcagtaaagtatttactctcaacacctactgcaccatgagtcgagcttgtctctgacgatgaatgtacatgtttggccgatttacaggaagtttaaaaacattggcgctctgatactaaactataaagccctaactcttaggcatgctacccaagatgattaagaaaccctaatcccctaatcgggattactaataaaataagcgcgggaaaaattaaactttaaacaaaaacagtatgaaaataaacttgtaataattttaactttacaaaccaaagttacatgtttcaggatcccaaaaatattttacaaaatattacaagtctttacacgagccgacttatgcggtaaaatagagttacaacagttcaacgctggtagaccccaacccgctt

SEQ ID NO: 262687 - DNA, 670 bp, Cannabis indica
ccgaatccaggatccgtgtccatgttcatgtccgagtttaggtccggcggggtcggggatattggggtcggggtcggggtcgaggctggggccagggttgaccccagacccccctttgtaaatattataatacaagttaatacaggttatttattatgtattaaataatatgattcatatttttttaaaatttatagtcgtaattataattaatacaatataatattttatccaaacacagtatcatttgttacagtacgacccttatatacggtctaccaaacgagctcttaataaatatgttatacaaaaataattgtaaggagaggaatactttgattatgtatatatgtaatttatttttaggctaacgaggataattttttcttccaaattttatgtattaaattatgtttttaaaatttttcattgttaaaaattctttccaaattgttgttagatttaagggcttctgtataattatttcattcaattttattaacgaacgcctaacatgacgattatttatgtattaaatcttgtacctcgaactttaatatgtaccacatgcatcctaaactttcgtcgctatcattagtaaaaatggaacgaaaatatttgaatccaattatcttaacagtttgagaaaaattttaatggcttgaaaagt

SEQ ID NO: 262688 - DNA, 886 bp, Cannabis indica
tctgggaattgagtctcgaatttgtaattctccctctaagtggctgctgtgattgttagtttccaacctagagagatggtccgccactttgttttctgtcccttttctgtctcggatttccaaatcgaactcttgtagcaacaaaacccaacgaatgagcctcggtttagaatctttcttggctatcaaatacttgattgccgagtggtcagtatacacaataaccttggttcccacaagatacgatctgaatttctcaaaggcaaaaaccaccgctagcaactctttctcagtagtggtgtagttaatttgggcatcaacaagagttttgcttacgtaataaatggagtgaaagatcttattcttccgctgcccaagaacacctccaatggcaaaatcacttgcatcacacatgagttcaaagggcaatgaccaatcgggtgctacaatcacgggggccgtaacaagagctgtcttcaacttcaaaaatgcttcattacattcagcggtaaactcaaatggcctattttgttccagcaagctacacaagggtttagacaccttagaaaagtctttaatgaagcgcttataaaaaccagcgtgtccaaggaagcttcttatgcctttcaccgtggtaggggctggtaacttctcaatcacttctagctttgccttgtcaacttctatccctttgctagacactttgtgacccaacataataccctcttgaaccatgaagtggcatttctcccaattaagcaccaagttggtttcttcacatcttgctaacacactaaatggaaggtggttttctcttgatcttctggtgctatagaaatctgattgtaatccgaatatccattaagaaagcaataaaactcttttc

SEQ ID NO: 262689 - DNA, 603 bp, Cannabis indica
agatctaagatcctagtaaaaattaattccaacagaaaccctccaggttgcactgccgcgatatgtacaatcacttgcaagctccatctcactgttcctccagcttcgcttttcctttacctagacaaggtagcaaactaatgaatcaacagactgagtaagctatgcaagacatatatataagcaatgctagaccagcttattgcttacgccgccctgagctcaacaacgagctcaccaaatggttaagaacattcttaagggaagtacgactactgtaccaaatgcactaaagtactaaccctatactcgtgttggtagagccattattgtactccctggaattactaagtgttgtaccacatgcacgacgtaccccctggtactcgtgttggtaacacagtaaccataccgatatcctacactatactaacacccttaaaatcacataaacaattagtgttagtcgtataaatagttaaaaacaagcatatattcatatatacgttattatgctatcttacctcgttccgtgctcaagtgtgctggtaagcctgagtggaaacgcagctcgacgctttacaaggccctaaaccataacgt

SEQ ID NO: 262690 - DNA, 1915 bp, Cannabis indica
gcttctttcaaatcccgggctggtgttgtattaataaccaagttggccgaaggaatgaggtgcattggctctgattctttgcctattgctttcataaacagacccccaactgagttttgtgttgccaacctctcaatagctccagctcctatatcatccattttcttcctgtgttcgaaatatccaatgtattcggagcctatgtgatcggcaggattcacaaatagataaggagtccatgccgaaagagctgtaaatggatcttcagagggacccctttgctgagtagccttcatggcaatggtaagtcctgctgttatcacacttgtagcaaaccgaattccatgtttgatgttcttatccttgattctctcgacaggggcagaaaagaaaggcgggttaaaaaggaaagagttgaggaaaatgcctgtcttggccatgtttttcccggctagcattgccattgctgatcctaaggaatggccagctaaccaaacgtttgaatcgcctaccaatgcaaccatgtttcgtactgcttgaattgctatctcaaaacgagatgttctgtgaagtccgtgctgaaggaagtgaatgttcaactcaatatcccttgaaaatgagcctggctttgttaaggtaccacgaaaagctattacatatctcgggcttccatctaatgagtggttaaactgagctgttggaggtttgaattcataaattgcaccgaagatggaagaatcagcatcgtctactagttgacgaaacagctgaaagtgaaaaaactcccaccatggaggcgcaatggcctggtcacctaaccgtttctcctggcgatctcgttctagaatgtagacaccttgaactaaactcgctgcaacagaccttctgtgattttcattctccctacaaattccaaacaatagcaagataaagttgttttccatatttttcttttcgaaactaagatccccccttaaccatacaatatttttgaagaccaggaaattatagcaattgctatgtaggtacccaagaggaactcgaacctcaaaacttgtgggaccaaaccacatgtctgatcatttgagctaccccaattgggtaaaattgtttcccatatcatcttataaaatatcaaacacataacaaaatagtataaaatgatgctatcagaagctgcttcattcaatcaagactaacagcagatttgtatgactaaagatggctatttgaaatgacataaacataagacaaagctcataacagcagttattatctcatatacactttcaaaggataacaagagataagtaatctaaactaaacattttctcaaccaatatggtgataggaatttccaatcaatattacctatgaacagcaagaacagtaaaataaaaataggaaaacagagaaatattttgtattgaataccaattgggttacaacccttaccaatttcttcaccccttacaaaaaatcatctccctctatttattctaattcaagcaaatatctatcatatggctaatcatatccaagcacattttctaaaccaatatggctaatcttattagctcaaatgtacaaagtttttgctttacattttgtttagtctagtctggtccttcagattaaccttaaaatcttttcttggtagaatcttttatgaggaattcaacctcaatcctcatggaaaactatctctcaccactcaatctaatcctcatatatcaccatattcaattagttcaacagtaaatattgaatgacagaaatcccatataccagtttttgcaaattagaacatatgattcaaaaacaatcttcttcttggggtagaaaggaaagtcttaccaatcaatggaagttagatggagtggtccagaaaggtcaaaaacattctctctcagat

SEQ ID NO: 262691 - DNA, 880 bp, Cannabis indica
tctggcccaccttatcttcattaaggacctactgttagacctttaatgctgatttggattccacatttcctttgtgggaaatttggataacaggagcttttctggattgttaatgatttagttaaattggtataaatgaagaactagtctactttgttgagctcatatcatacacttgcagaatagaacaatatgttcatgttcattgttcaggatcacattcatttgagaaagagaaagtgaaagagaaagagaaacactcactcgatttgatttgagattgagagaggatctaaaaagtaagcacagaggccaccagagcagatcagagcacccaactcaatcaatttaaggcttttaaattcaatttagggtagaaaggaatttaggaatttgaattcaatttagagtcactatccacatgcagttccaaaacagtatacacatcaccgataacatggaaagtcaattgacgagttgttaaggttgctggtaggcattttcaaattcaagaaaagagaaccatagccaacctgaaataagaagatacaaccagagagaaattaaagagtatcaaaactattataagaattgcccaaacagaaactaaaaataatgtaaatatacttacagatttgaaggacagacagtgccgaagagggagagacgtcagggctgaaatagagagagagtggaagtgaactagtgctgaaagttagggatttcaagtttcccaatttactattgccagtgctttaaaaaaaaatacttttaccaatagtgttggtgaaaagtgttggtataagttgtaacaggaacttggtgaaaaaccattgccaatacattttaacactggtgaaaattttaataataaaaattt

SEQ ID NO: 262692 - DNA, 861 bp, Cannabis indica
ttatttagacattgggagtgtcgggaatttagaatttaccaaaaatacccttagtaccccttttatgttattttagtgtggaggggcaaaatggtcattttgccccatttgtattttgtcctttagtggacttagttatgtttttattcaacttttattagtggtttttggctgaagtagttaagtaaagagtatgttatctcattttaccaaaaattaaagaaaaaggaaaaaatttcaaaaccacccattttctctctagctctctctctctttcggccctctttgagcagcaaggacttgggatttttctttgtgattcaagttgttttctcaagattttagtaagctcaattcttggtaagctttttggtaacttgttcttgatttcttgagttgtaagaaaaagcaaattttttgcatgttgtgggattttagttgctgctgttattgttgatgtttgttggttgattcagtagttaattcatgattgtttaagtgtattcaagcagattttgttagttggttagttggttttggccaaggttgagttttgaactcaaaactttggatttcaatggtgaaatgttaaattagtttctgtgaatgttgtttgtgtttggggatgttttctgcagttatattatgcttgtttgagtagattaaatcaggttttgatgcatgttagtgggatttaaccaagcttgagttttgaactcaaagcttggagctctaatggtagtttgtgtaattatgcatgaagcttggttttgttgctttggaattgttctttgcggtctaaatagcaggtctggaggttttggtaagttttggtgttgaattgcatgagaaatgaatttt

SEQ ID NO: 262693 - DNA, 558 bp, Cannabis indica
cattgtgtttgaaacaaaaaatgaattgctgttctaatatacacgaaaaatggactaatgagtttcttggcgtctatcattatgtttgattatagtttcctctgtattgaaaaaaaaaataaaatattattcccctaacaaacgataactagtaggtttattaacatatataattgtaggttatatgaaatgaaataaattgttgttccaatatacaaaagaaaaataaaatttgtttcaatatgcaaaaacaaattaaatataaaagaaatttttgacaaaaagaaatctttaagaaactaaaatgttacttttgatttcggctagcgaaaaaatatgtgcttctgacatattaaaatgatcatcttaaagagtagatcgtaatggtgcaattcttaagaccaaataattactagtgtagcaaaaaaaatcttttaaaatatatatatatatatatgaaaaaaaagtcttttatatctaaatattttttacatatatctaaagttaaaaaacaaatcaatgtgtgtaggacaaaataattaagggttatttgcggca

SEQ ID NO: 262694 - DNA, 596 bp, Cannabis indica
aatatatgcgtcatcctccccttgtcctcgtatcaacaaggagaacgattctctgtaagtacgagttgatcttaggaaccctacagcctttataaagcgatatagactcgcatgtctaggttctatcagctcaacacacgatgtctagaagaagcgactacctaaagacgcagacataatgataaccctgcgagttgtacatcggaatatgaacagtcaactcgcaggtacggaagacgcatgcgttgatgaacttagtaactgccattcatttattaatgttaacgttgcttagtttaattattgcaattcaatatgtaaataatggattaacaatgaatgtaatccttgtgtaaccgattggacacctgctttgtatataaagaggtgatccaccatgaaatggcacctacgaatcctttgctacagtggactaagcagatcacaatctgactgaaccactataattctctgtcttattgatattttccagttttgttgattgttttcccattcccagtcgagtactcgccgttctaggttgaatactcgcacttgtcgtttctcctaaacttctctttcgtattagtaaaatc

SEQ ID NO: 262695 - DNA, 478 bp, Cannabis indica
aacatttgttaaacatacgaaacaatagtggaacaatccaaaaacaacattagaaaaacaatgacaacccaacattaattgttttaatgtttctgcttcatctcaccggatttaatggttatttttcggttattctggtgttactgtggtggttctgtctgtgggtgtagaagatggagacctcattttttatttttggtgtttacaatataaaagaaaaaaaacttgaaaggcaatataaaagttatttttaccgtgtggcagtatttttgtaaaaattaggtcaaaatccagtatatttgtaagtttcccttaaataattgtcttatttccacgtgtcttttgtcaaaaatatggataacatttacccccaaatttttggaatattgtggattgtagaagcttgcttcagtctacataagtggataggaggaggccaaaggtgaaacctttacaatttttccaaacaaaattgaat

SEQ ID NO: 262696 - DNA, 482 bp, Cannabis indica
catcaaagaaggagagaaagagatccaagttcagatattgattatgttctcctcgtaaaatatttccaacaggggtccccccctatgacccaagttgggggggggggtaatgttacgaaaattataaacactacgcaagtatacgcaatcaagtagtaaactcacacaggtgaggtcgaaccacagggaattggattaaatactactaaactatacctataattctatttggcaaatcgaaaacaattatgatttaagagaattaaagtaattcagaaaacttaaaacacagttaaagtttaagcaagatgagatgatagggaggagaatcctgttgttgtttacccaaatcgttaatgcctaattgctatcctattcttgaagtgaatgacagattataaagtaacctagctcttttcagatcttctagattctaaatcacatgttatctaattaattccttaattaaactaacatgaaat

SEQ ID NO: 262697 - DNA, 570 bp, Cannabis indica
tgtcattgaaaaagaaagaaaagttagaaagtgttttaaaacaagacatgagaataactttttctattatgcaaaactttgatcttatcccaatttgccaaaataaccatgcatttgcaggtaccctctgcattttgatctaagttcctggtaaaataacttccaagaactggcaccagagccatggtaattgatttgcttgtgagaaatttggacttaaaacgatttgtttgtgttttggatggtatcatgttgctttgtgtgtcatattgatgtttgattgttgtttgtgaattctgggaaaatagttacttttctgtatctgtaataatttttattggatagtttggaaaattctatgcaatttacttttttaaagaactcgatttcgatttaatttgaattagttatgaatttttgaaaattggaaaaatccggatgatgaacaccttcccacgcgagcggaatggctgcatgcagcctcctgcgccgtgagatctcggccagcatctaggggacacgcgcggatgggcatgctttgcataccatccgtactgttcatcaaatttt

SEQ ID NO: 262698 - DNA, 765 bp, Cannabis indica
tccatggaaatgcctgctacaacaaaagaaaaaaggcaagtgttagaacatccatggaaaacaacaaacactcagatatagcaatcaagctagtcctaccctgactctctaattcggccctagcaaagttccgaatcttaacgctggcagcatcgtctccgagatagctgtccgaaggccggaaccagctggatgaaatataagccgaagggtctaagggaacgggctccggaggaccagaacccatccgggaccgacctaggaaatctcctaagttggaaaaataaaattccttcatatggtctccccaccgggtcgagggcatcctaaacctataaagacgctcatcgaaccctacaggcctaagactggcatattcgccaacagaaggaacgtaatgtactgctaaaggagacttaccggagccggaagtgctggcgccaggagccccagtgttcggctcctgagccgaaggctttggcctaggagcccttctctcagccgagtcccaatacgaaggggcttcccagcgatcgcctggcttctcctctcgaccgggctccccacgcgaagtggcctcccggaagctgcttgagccttggagtaagctttctcctgagccttccggtagagatattcctggtacttcttctcggcagtggcgatgatctcgtcccggaagatcttctccgcggcaggcgccctcacattgggacagataaccctggaaaggttagagtcctccactgattggtgcggcaggat

SEQ ID NO: 262699 - DNA, 493 bp, Cannabis indica
ttttgtaaaaaaatgacaaaagttagtataccatgtaaattttcttataaaataacgtgtgttttatgcatttcaaaacatatgaaatggttatagataactaaagagtcaaactatttatggggcagcctgtcttatcctgcccattaaggtctcctaactagggcgggtcaaatcttatcttgctcaatacttaaaagaaaaaacttcacaagttttctttcttcaacttttaattgaaaaaaaaaaaaaattgatatcattttaaattttagtttgtaaaagtttccgattgaaatttttattttgttaaatcataaattaaattttgtatttttaaaatagtattatgaattgattttttatcaaaataaaatttaataataactcgatctaaaagttatgacacaactagctatgttttctgtatctattagtgttagaaattatcttcaaatttgatatattaaaaacaaaaattattaaaaattaa

SEQ ID NO: 262700 - DNA, 478 bp, Cannabis indica
gaatgtctagctacatagtgagctactcaatttcttgatcgtctaataaaatgtaacatgacattttgtagagatgaaagtaaaaagtttacaattaataaataaccaaaccataaacaaaactcatagcttcaacagtctcacctgcatacagaccttcatgatactcgacttttaagtttaaaagcattcttgaactatctctcgtcacaattccaaagccatacaacttgtctttttgaaacaaggactgcatcaatattgatcttgatgttgtttgtacccagttttgcccattgctaatatttaccatcaatgtttccaagagataaagatgataaacacaatttatcgtgagaacctcattataaaagggattttttttcagcaaactataataaatcgataaatagtatcatcatcatagatagaaaaaaacctgttagagctagctaccaagaaaaatcacaaagccatg

SEQ ID NO: 262701 - DNA, 487 bp, Cannabis indica
gaacaatctagaatctaagggcattttgtcttttgtaaatatctagctaaatatcctattttcaagggatttgaattgcaaacctagggtttatgcgtcctatataaaggccttaacttctagctaaaaacctaagttgcctaagcctcccctaagctagaaatctcaaactctctaagtgtcagactctctctctctctcttcctcaccctctcacacgcccaagcctaggttgcacaacacccaaggttgtccaacacttgagttctgccagacaccgattcatacattgtaatcctaaagggtactatagcagatcccacctatagcgatctggatagtaattcccttagtataatataactaaaagggaagtaggtctttacccgctatcacaagggggcaaacctctataacaaatcccattgtctattgctttttactcatatttgtgcacaaactgttgagttttatgtcctaaataaaa

SEQ ID NO: 262702 - DNA, 875 bp, Cannabis indica
ctccccagaaattcgatttgcatattgatgaaagtaaaatgtttatgattagttactagttgttgcctaagtccttctagggatataccctagggataggaaaattttagaatgatggaatggttgtgtacttagtgtaaactattacaagattcatggatgtcctgatcgtgatcttaagaaagctagaactgttaatagaggtttgcatgtttgatagctattctaagtgattaggggtggaccatcctattgtcattaagataagaaagtgtttatttcaacaactaccacttttctaagaaaatgattaaatcttaaagtagcacagaagaggagatatttttttcttgatttcaaagtgttctatcatcttattcgatataagatggtcccactgcctctgttgtcttgatacaaccgatgaggttaattccacttatgttcttagacagatggtcacggtaccttgtcatagtgggagggtttcaaggaaccctgttatgacttggaagacactagtgattaaaatccattgttagtttaaacaagtaatggatagtcagaataaggaactaagaggcaaggccaagagaactatggttaaaatcattcatatggaataaccaaaagttttctattacaaggacaagaaagaaaattttgaaaataagtctattcaatggacttaataaaacttcctgatcctagtattattataggtttgagattatctaaacctatgacttgtggtatggctggtaatttaattactctagtgcaagcaacttacttttgtaacttgctggagcatttttctaatggaagtaaatagaatcttctcgacttctagatatagattttatttatctaag

SEQ ID NO: 262703 - DNA, 599 bp, Cannabis indica
tttataaaaaaatttcctattttcaatcatttatatcagttattcaaaagaactaaggaaataaaaataaaataaatttatgtgatttgcggttttactaattatttaattttttttttattttttcattaaaataatatgaagaagaattaacaaaacataaattaaattataaaaaactaatttttaaaattgtaatattatcaataaattaacataaattatataccatattaattttatacggcatgaatggtggctacgttatcttgcatattgatatgtgccaaatcgtatagattaataattaattataattatactagtgaagctatacgtgctccgcacatgcatagcacacataagattttgaatattgagattataataattttaagtgacaggtttttaatgttcgaaaacctatataaaaaaggagcacatccaagctttttactacatctaatcttcattagaagcagcctagtggttcttttcatcttcacttggaatattcatcagtaactttatgtttcttatttatattatcaattgcaagcctatttatgtttcttctttcaccatgagctctaagctta

SEQ ID NO: 262704 - DNA, 595 bp, Cannabis indica
gaagaattttaaacttctcaaacttcagtttacttgtgtctcaattaaggtggaaattgttataattaagacacatgtgaactgttagtttgccacatcatcaccaactgtcctaaccaactaattcagttagcctctaaacagttacaaccaacaactataaataggttaacttgctcacttgtttagataggacttggttttatgattttgttattgtttagagagaaagtttgagaaactaaaaaccagagattgtgagagtgtttttggagggatgttaaagggagtgtccattcatgaaatggcttccctcatgtgaggattttctgtaattgtctctgcattgtaattgattcatattgctggttttccctctctctccattgattgtaatcaaatctaattcagcaataaagattcttcttcatgttcataattcaaacatatgttttcttggtgaattcaatttcttactctttcataagagttcattattcttgatcatttgatcctttattttgttctgttattgtttgtttattgttgtttcagcagtgttcttgcacaacagttagttaggagtgtggtttgt

SEQ ID NO: 262705 - DNA, 524 bp, Cannabis indica
gtggcgtgattgtattgtccaagtgggaaaatgttagaattattataatggactaatacaatcatatgtttaattccataatacacaatcattaactatgtgcctaatgttgctaataaccataatgggatggttagcaacttaattatgtgttagaggcacatgagagcacccgtaatactatagttggcccattaaattatagtataccataaaagaccccaaaagcccaattagttaataaccccttggggttataagggcaatagcatgtgtatatatatgtgttatgtgtggtaaaggggtaagatgagtttgtatggtaaaagataaaacggttagctccacaagtgctctctctagcttttgctcaaggatcttggtggtgattctcattgaagacattgaaggataatggctcacatgaatggtatgggaggtatgtgttttattgtctttgatgctttaaataaatactagatcttggctttaataattatggattatatttggttgatgctatt

SEQ ID NO: 262706 - DNA, 8428 bp, Cannabis indica
cgaaaacctcggtcaacacatctcttttaaggggtacattgtagaatcaccctagattttaacatttctctattttataacattttcgttattattatattattatttgtagtctagttacgatgaaatggaatcgtttcaattcaacgtggtccatgtttggaagagaggtatcttactctactcgagatcaatattcaattcattcagagtataattattttggatttctctgctctttttttgctaggacatttctctacacttcttattcactgtttagaaaccttcctttccaaatcttctattgttgtttgtcgattttgtgtttttttcgccgaagctctgaaaccgaatacatacatgacctccgcaaacgcactggcttactcttctccatttctcagactccattgctccatgcctcgccctcctaatcggtcgcgccgaaaacccagaagaacctccttctcaaagccctcatctccttcctcctcacccttatccaccttctccgccttttcagatgtctccgactctaaaatccagactgtcatcgacctcgaccacctctactactccaccaaactcaaccgtttcatcgccgcgggcaaggacgcttacactgacttacagaccctaatcaccttcgacgacgaccgaaggctcgtcgtttcgtgccgccggtccacgctgcatttcgcggggagtatggtcgttttgagttgtgtggtcgttttggggttcagggtattctttggattgctgaagttggtttccaggagtagatttgggtctggaaggttagctcccgtggttcggagggataggagtcttggtgggaaagaggttgtggttggggctgggactgggacaagagggaactttgtttcgagggaaaaggggtttggggtttgagtaatccgttagagtcgaccaaggaggatgccattggtggttcccaaagggctctgaagaactgggctcgggtcgggaagaggttgcccaaatggtggccaaagttggagaaacatcacgatttaatgacggatcagcaagagtaccagagggaagccaacagattggttcgaggtttgtttcatttgtattcatgtatcaatcttttttatttgacttgaaacttttcgacctttttttctcaaggataacaattattattttctctttataattaagggtgaagaaacgattacgctaatcgataagttatgttactgatgagttctgtcataagaatgtggtgtgaagttaattattgtactaaaagctctgaagtaataacagtctctaatggttttaagctgaatttaggattaaaatgttataacaagcagcactatcggtgtttgtttagcatgatgaactaatagagacttggtgcttcattattcatattactttagaggttcaatgtaattatgaaaaagtttgaaagttaaggaaaatgcatttaaagtgtttaaggggtaaaataaggagctctctctcttaattttctcagtttctttaccatcacctggagcggtaaagaattaattacactatactgtgctttgaacagggaaacaaagaatatgatcaaattaatataaatctattttttactttgtataattatcattttctaataatatataatgttcaatttggcgatcatttttataaaaggcttttctataatatatgtgcttgttatagaaaatagtattatcattatcttgattaacataaaatgttatttgaagcattgagttaggggatttattaggctggtctgcagtgtagtgccttttcaacttgtatattttttactagttgttatttaaattggtttgacactttacctcttttttcttatcgttgtatattaggaaaatttcccaaacttagtttaggaaaaattttctgttgtgttgtgttttgtaggtaaaatctgacatctgtcacattttgcaaaattttggtaatgattttgatctttaattgggaactcatccacttgatttccagcaatgacggacaatagactgagcggaaaggacattgtggagcatgatatcattcaagtcagtaattttaaagctataattgtgttccatattgtttttgagctgatctattggttcctaacatgtgaattatgtagagaaagagatgcatgtgcagtttaatgtgggttgatcatttgataagtgtttgtgtacttgtgtagcatgacagagataaaagagagatgcatttgcgttttatgtagggagattgattagtcaatgagtttctgtgcgatattaaaagaattaatctaacatccaaaataaatcccttagtatggggataacttaatcttgttttaaaagctttgtttattttatcctatcaaatcccttatcttcatgtatttcaacttgttttcagcactaatttagtgctgacaaattattaacttattcttcaatgttttttccccttatgtttttaaattcaatcctacttttcaaatgtatgactatttgtttgcaaggtctaattaatattctctgatttttattttaataattataaaatatgtgtttgcgcatgttatgcttggtctttctttccattttaaaatggactagtcattccacctgaataatgaaaaagtcattccaacatccaatactataaaatgcaaccaaacaaaggaatggaataaaaattgatttctttcatttccattccatttcattacctccaattaaacactacctaagtgtgataaggaaataattattaagagttctgatcattatcttgtattcttgttgaggacatcaaattcagcttggtatttttgttgcatctactgatatctgtatgcaatgtttttgttccctgtatgtgtgagcagttacgtcaaatatgcaggacatctggcgtacgagtttcctttgatacatcaaatacacgggattccttctaccgtacatctgttgattatgtcctaaatgtttgtggcaggtatgtattctgtgaaaggagttttgttggacattttcgtcacattccaacagcctgatactggtttttgtttgtgcctgataatgtctcccggttctataacctgtttaagaatttttcagggcgccaagttactcatccttaattcagattgatggcgaggatgtacgtcactttattgctggacttgctgaggacattggacttgaaaacactcgcgctggaagaattgtgtctgctgccgtggctgcacgcacacgttcacgatttttgcaggcttgggtaacttcaccacttttattttacatttccatatgaataaaccacaatgtctttgcttcacaaagctgtggaaactatttagatggtgctcagttgtaacatcacagagtaaaagaaaaacgaagaaagtagaattgaattctattgaactaaattttccgattacaaagtagagagacaagccttatataggctgcagaaggggttacagatggtaactagtaaccgaacagattaactgcagtgtaactaccttaaaaaaaaacataaaaaactattttctttcttttttttttctattttttctattttgaaatgaacaacaaaagtgtttacacatagtgacatttaactacctctataactgatgtatatatatatactgtatgtatatgataaatatcagaattccgaactgaacttgaaggtgtggagattttttcagtttgtttcaaatggttctcctggacttgatttgcagtaacattatcttagaaacgggaagtacatggaatctttaggtctagaaaaagtgtcattttaaattaacgagttactaaattccatgtttccagtatttaatggctgaaccctagtatgaagattcttttctcaagaaatcgtcttattattattattaacaataacaaaatatagctgtacaaaattgtttgacttcaatcatgattttgaatttttgaattggacgatatagttgtacaaaattatttgacttcaatcaggattttgaatttttgaattggacagtccccacgacaacaaaaattaatatgataagaacatagttctatacatatcctggattagaagtctctaatttttgaatttttactatatttatattcatacatgcttctttaattgcaggccttggaaatgcaaggtaaacatgatgaagcaatgtctgagctgtcaaagatatgccttattctacgaatatttcctccagacgaatcatcagtatgctcatttacattgattttccttttatatgctgtctctgtctgtatgttttgaaaatgattttcctttcaagtgcactcaacacaactatgtatatctttggtatcagggccagttttgaatcagtaatgaaagtggatttaagaatgagtactcaagcatttagattgggttaacttaattaaaccagttgtttgagaaatcggccacagctggtggtctgagttgcaatttaatgcagggatagaaggggagtggaaacactttcatttcatttatagtataggccattacagattagtaacaactaacaaggctcaagtgattgtttagacccaaaattattttgagtgaatttggaacggttggtcatgagttttagcttagtttgttgttttacgtgtaacacaagttgtttatgggatcatgagatgtctcatgtaattatattgtacaactgtacatttttgtttattggttgctaaagttacaaagtattactacatttatgtaggatttgtgcttgtttttttttttcttttattaagttgctatgttttatgggccaatggttttgttttaaaaaaagctaatattgaacattgaatgttatttgtaaaagatgcagtcacctttttatttatttttttggtcaacattctttcattacagcccatttctttatccaaacctacatataccatacctgatgtgcatgcaacttttttcatttaacttcctatacatacatatagcataccccgctgtgcatgcaactttcaaacctttttcatttaactttctcgcatataaatatgtttgtgagatcatgttattctttgtctagaatttatttttgtcaattctaatttcaatcttgttggggatctgaatcttcagcctgaaatggagatggttgctcgaggcctggagaagaacttgaaagtagaacagagagaatttttaatgagtatgctgattggattttgtgatgaagaaagtcagagaagcgcagcagaagccctgggtttggtgagttgttttgtttcacaatccaagtttgggttctgcaaatgataaatacaaatcataatttttacatttaaaaaggggtttgaaaaggggttaagcttttcgaattacgtataaatacaagtcataatcttataaataatatacattaacacctcctgagaattggggggaacaatggtgttaatctggttttgggtaattatgtctgagggcgtgtatcggttgatggtatctgactttttctctacatggttgtggtatttatatgcagatgccatctgctggtggtgatctacaatagaacaagtacattatgaaggtagcaccttatttcatttttggaatgaaataattggtaaatgaacagaaatagtttttttttagtcttagtttatttttcattattattttaatttgattactagtataggtgttattcatctaatgaagcaaatgaatagggaaaataaatgcctgaatttttgttgacttaatatttgtattgaacgtgatcttaaacacctccaaatgctcctaatttgtttgggcatacttagatatctcacattttagacccaaagatataatttttaattacttataacaaataacgttcaacgttttacactattcacgcaatactatgtaggttttgtgcggctagtgtggcaaaaactttgatggattgtgtgttgactacgaaaattgtgggtaaggatcatttaatttcgctcgttagatgttttttttacttgtttctctttcgttttggtgaaagagaaacatgtttttgtggatatggtccttggacttttgataatagtttatctcactggaaaaattaactagaattggagacaatcagaaactcaaatatgaattgttgtcgttttggaagttacacatattactaaaccattgacaagagtggttaaggccgtgaagatttacacataataggtaataagaaaactcagctccaagagccttgataattttattattttattaacttatatagtgaaatacaagaagattctagaagaggtacacctcattacacttattacaatacctaacaataaaagggaatattccttaaaaaggtaaaacagaaaagatgccttcaatgctagaaccgtaggtgatttctcaataatgacttgttagtagctgacttgataaaagttgttaaatgggattggtgacttgtcccatgttaccatttcatttcttaacacctcctctcaaactaagtggggattgcaccacacttactttgtcaacaagaaattaaaatctagtaccagtgagacttttggtcaagcaattagctacttggtcatgtgaggtaacatttctaacttccaattgtttgttcagtatcttgtttctaacaaagtgcacataaagttcaatgtgctttgttcttgcatgataaaccaggttggaagttaatgcactagctcccatgttatcacaccatgtgattgcagccaaaggaaatttgatttcttatagcagggactgaatccaagtcatctttgcagaaacttgagtgagggttctatatttagactcaataactggatcgagacaccacaagttgctttattgaggaccatgaaattagtgtatcacctaaataaacacaataccctgttgttgatcttctgtcatttgggtagcttgtccaatctgcatatgagaatcccattaggctaagttttcacaaactttgatatgaaaaccatgaaatggtgcgcctttaaggtatctcaatatgcgcttgactgcactccaatatgctattgtaggagctttgagaaattgacttagcttatttacaacaaagctcaagtcaggtcttgtgtgagtaaggtattgaagagctccaacaagacttctatattctgtaggattttctaacaggtcaccatgagaactagacaatgttattccaacagtcattggagttgggcatggtttcaaatgcaacatttggttttctgcaacaattcatgaatatatttaccttggttgagatagatacctgtctcatctctagtcacttcaattcccagaaaatattgcagtaacccccaagtcttttagagcaaatttcttgtttaatttagcatcaaattgtcttaactttgttaagttgttaccaataataattatgtcatcgacataaattactattagcattatctcacgatttgattgatagtaaaacaaagaagaatctgctcttcagttcataaatttccagctgaccaatgtggtttttaacttctcaaaccaacacgtgatgcctgtttgagactatagagtgacttaagaagttgacacaagtgtaggtttttctagatcaacgaaaccctctggttgttgcataaaaacttactcttcaagttgaccattcaagaatgtgttgttaatgtctaactgtcgagtctcccagcctttagacataacaattgttaggacaatcctcacagtggatgctttcactataggattgtatgtttccccataatttagactaggcctctaattgaagcccttagcaaccaactgtgctttgaacctttgaaagctaccaacaacattttttttttgatttgaacacccacttgttaccaattatatgttagaatattttatatggacttacataaataagtgttgctcatagagtgtcaatattaatatatgtagataactatattcatggtataatgccgattatgcaattaggaccataatgggatggtcggttttattatctgcatttgaggcacatggaagcaccctaatgactagcattttaaacccaaaactatatctactctacccctagggtaaattagtatatatatgtgtgtgattttagtggaataagggggatatatgggtgatatggtggtaaaagttttacaaggggatgctttccataagctctctaaatgctcagaagatgttgtggtgaatcaaggagactcacaattaaagaatgcacaatattaaggtatgtttattattgttcaatgccctaaataaaataattgatcttaggatgtttatgagtattaattgtgtt

SEQ ID NO: 262707 - DNA, 1614 bp, Cannabis indica
cgttacaatgcgcataacagaaagatacatgtgatcaatgctgattgcaaggatcgtgggattgaggctgagtacactgatagtgggatcgtgtgtacgccatatcccacgtaacttgaatccgtgaggttctaggggattgagctgatgactcatgatgcgaaagctaaattcgctaagtgttgattgccctgcacggatcgcagagtatctcattctggatgtgatagcgaggcatcctgttcggtctatcgttccgagcagatgctccaagtggactccacgtgtcaccattctcgtgatgccacgtcaaagtgcaaaatttgggataacatttgccccccaagtctgtacgggacctctaaggttgcatgtagacttcttccgagctggctctacctttagatggggacacgtgtctagcatgaccgttcgagactcgatgtgaagcttactgggcgtcccttcggtttttggctaattaatgctctgacaattaatattttgaaatccgattttctctctccacggctgacggttgcactcgattacttttgatttcccatattcgtttttgaggcgggaagccgaggcgtctgaggttccttttgatacagttacctctttgcctataaatacccatagtacttgcacataacccattttatcacccttcactgttaagtaaactccagagcgaaaagagagatttctggcttcaaagttgccgaagtgccttcagacaattgctggtttgcttgacgttgcttgaactcagacattcgaatttttaagtaagttcctaatttcctttatgattttctttgcatgtttaaactttgaatgcaactatgctgtagaaagaatgcttaggaaaccctagggttagaaacttctgcgactcttctttaccatgtcttcatgtgggcttacagccatagagcttctctttgaaccgcattatggctatcttccatcttgcttattctaagcttcataaacgtttttggcctaactcaagaagactatctgacttcttgagttttgacttttctttagacatagtcgttctttaatctgttgagtactcctggtccccatatttgcttgtttttcgtttgatactccgtccaacactcatcttgtgtgttgtcttttgtagatgaacccaactgagtcttgggaactcagacatcagatcgaccgggatttgcttcaacttttgcatgaggttcatcctcgtcttcgtgctagtcctccttctaacgaaggaaactcttctgaccttgtacccagccataggatgatggctcgtacaaagaaaaccacgcgtctggccgatacttctgatcctcaagtggctcggcttgccactctgcccgacgccgaacaggattcggccgtcccgatggaggaagggcgtgagggggacgctgaggtccaggaggttgaggagctggacgaggtacgtccgggcagtccttccgaggcggagggagaggaagaggttgaacccccgtaactttggagagtacaacgaggcttggcagccactcgatgctgacggagacgtcctggttgagggcgtggactacgtcagtgaggagcttgctg

SEQ ID NO: 262708 - DNA, 676 bp, Cannabis indica
ttcagtatcaggagtctttacttatagaagggaagcaaactacctatatcattcttcttttctctttttaatttttttttacgaagttagtcatattttcggaaatacatgagcagagcattttacaaagaacaaatagaaaaacggtgtaaaagtttgatagagttgcaggtgccagtttatgcagcagctcaattaacaggagcaatatctgcatctttcacgttggtcgttcttctacacccaacgaaagaggttggcaatacattgccttcaggaacagatattcaagctctaattatggaaatagtggtgacattttctatgatgttcatcacttcagccgtggcaactgatactaaagctgtatgtatcactctcaaccactcactttatcaaaattcatcaaattctttggagtctaacttataccaaaatcatttggcatcccagataggagagctagctggcatagcagtaggatctgctgtatgcataacatcaattctggctgggtaagcaaaaaatcacacttcattttcagatattaatatgttgtttcttcttttgagtttagagtccatccacagacccatatcgggaggatctatgaatccggcgaggactataggaccagctattgctagctcatgctacaaaggtatttgggtgtata

SEQ ID NO: 262709 - DNA, 3918 bp, Cannabis indica
atggatagtttaggcttgttttatacctatagtgtcatctattgctcatttgattgtttctttgttaaagatttcggtacaccatctcgctgcatgttcttgtaagttggcatacttggtaaaagtttacttacttatgagaactgtagggaggtgctgccgaaattttgaaaaaaaaaagaagcaatcttaagagaatagattgcactatatgtatatcacaagcctgaatgggataggttctttacccttttagaaatggagtgacaaagtggagtaggacacattttcaactttaatttaagttgtgtgttttcatattgtgtagcaatatggtgagcgacagaagctggatgacttcaaacagacgatctgtaaagtctcgtaggggtgtggatgagtttgttggagttgctcgaatgcaattaaattctttatgtcgccggcaaaagtcattcgccgacgagccattgccggcagcttttaccgacgagttacacgtacttttgccggcgagcttatgcgccggcaaaagtagcttttcttgtagtgaaaatggtagctggtattgtagtggtattttgctcaagagagaaacttgctccactattttgaatttttggcagtaagcacaaaggtattatttaacataacgattagtaacctccattttgccatcagattgtggattataggctgagctcattcgtaatgtagtccccataagtttgaaaatctttttccaaaatgcactcatgaaaataggatctcggtccgatacaattgtacgaggcattctatggagacgaatgaccatgttggtgaataattctatcactttggttgatgaataatgatttagaagggctccaaaatgagcatagttggttaatttatcaataaccaccagaatattattgaatccatacgagcttggcaatcccacaatgaaatccatggtcaaatcctcccaaacacgctctggaatttgaagaggttggagcagcccatatggtgcttgtgggaagtacttgactgtttgaaaaactagacaagcttgaacatacttatgcagatctcaacgcatttcttctagaaaaaattgccacataggcgaaggaaagtgtgctcaattcctgcatggccaccaatggtagtgtcctgaaattctcgaatgagagtaagcttgagattggagtgtttgctaagaaggatttggttcttaaagtacatcatcacatatctaaagacattttgggaagtggcttcgctttgagtctgtagttgagtgtagatcagtctgagatctgggctgctcaagttctcctgcctaagttcctctaaaatgtcaaaccaccctaaaaagagggttgtttggagaaacgaattagccccctcatgctgccttgaaagagcattcacaactttgttttcacggcccaatttgtactcaattttgaattggaatcccaaaattttgaagaaatttttgtaggtctggtgtttgaattacttgagtcaacaactccttgagactcttatgaccaattcaaataaaaaagggacgtcccaagaggtattgacgccacttagtcatcgctcccacaatagcacgcaaatcgcgcatataagcagaggtaccaaagaattgagggacaaactcttgactgaaaaaagaaattagatgacatgcttgcataagaacacctctaatcccaacatttgatgcatctatttcaaccacaaactccttagaaaaatctagtagagcaagaattaggatattggtcatagcatgttttagagtgttaaaggtggttgttatttaaggagaccaattaaagttgtatttcttcaacaaattggttagaggagctacaccggaagcataatgggaaacaatctgcctataataacccgtaaagccaagaaatcccctgagttgtttgaggttgttgggtcgtggccaatcgactatggccacaacttttagagggtttgctcccactcccagtgcagaaactaaatgatccaaataatcaattgaagtttgaaagagctgacacttacttcccttagccaaaagctgatgttgctaaactagttgaagtacttgtcgaagatgtaccggatgctcagcccatgtcttgctataaacaaatatatcatcaaaaaaaggtaatgacattttttcgaatgccaagttaaaattggcaattcatggccgcttgaattattgatggagcattggtcagcccgaatgacattacaatgaactcatagtgccctttatgatttctaaaagtggtcttatgagtgtctcttgggtccattcaaatttaaaaatagcatgctctcatatctagctttgaaaacaccttagcccacccaatccatctaacatctcatcaatggtgggaatgggaaagcggtctttgacatccacactatttaaggcttgataatccacacagaaccgccgtctaccatcttttttcttgactaataaaataggagaagagtatgggttggtattggtgtttgcaaaatcccaagagataaaatcacgcaccatgttttcaatgatatcttttttaaaaatgaggatagtgataaggcttcacattgataggagagatttcccgctaaaggaaaattttatgatcaacacttcgatgaggacgtaattgttttggttcttagaagacctcttgatactcaaaaatcaagtgtttctcttcacttggtaagttatcttcccaactcttattgtttaaagctatggaattgtgtacttttgctactgtcattaatcgatacacctctaagacttccccttcattgagcaaggtacaaaactgattgaatgtcaaacaatgaacacccaaatcagctaaacccgccaacttgacagtctttccttgccactaaaattccatgataagggccttatgattgtgcaaacaaggaccaagagtttggagccattgcatttcaaacacaacatcaagatcccaaatagatagcacatactgatccacaacaaatttatgcccctacaaccacagttcaagtccacaacatatttttgatcacattaaggagttaccattacccatgtaatctttgaagcacctggtatcttcacatttctctcaaaaaattagctaaagttgcttggatgaaattattattgctgccagtatcaataagaacttttagcaatttagttccatgcttagcacttaatcaaaaaatttgtggattcaccaaattagataaagtattaaggatttgtttagcccaattttcctttccctattctagatgcttttttaggtatccttgggagttgggttgacaaccttgacctagacattggcatgaggatgtgcaactgctgaaaaactctttgtaatcccatgcctagaataaaacttagttaataggtcattgtcgaactatgttccattgtttgacagtattttctaaggtacatagaagtggaaaataatgttcatgataacaaagttatgaaatttctttaatgtgatggtagccagtggttatgctttagcccacttagtgaaataatccactgctacaactttatattggacacctcttttcccctttgccaaagagcctatgaggtcgattccccagaccgcgaatgatcaggttttttggaagcaaaacccaggaggcaaattttctgtgaaagctgcctatactgtggaaaatgctgagaggtttgcgccagagaaaaagttatggaaatggatttgggaagccggtatccatccaagagtgtcagtccttctttggagaattctcaacgaggcaattcccacgaaaaccttgttagacttttatttgggcttacatttagttttattggttttattaaaacttggg

SEQ ID NO: 262710 - DNA, 559 bp, Cannabis indica
ctatgtgtgggcctccaataatgacttgtaaatgcccatctaccggtggtggcacttgattattgtctgcttgggcggccctctaatttttatcgatcttgacatacatagtccttttgcatgtgcaggttgttctttcttattaagaattcaatttcccgcttcaaatttttgcattcgttggtgtcatggccataatctccatgaaaacggcaaaacttggacatgtccctcttacttacgtcctttttcattggatggattctctctaggggtctgttcatctttgctagcgaacgttccctttttccagttgccttgcctattgttatttttagaccttttatcgcccgagttttatttgcttgggtacttagggagctgaacgaatgttccagcagacggagcttgtggctgaccaggcttaagctcgacttctgcttggtgaatgtcctctacaagcttgatgaaaccatctacacgatcgaggaagtcactcatggaatctacaggtccatctttcttgatgtccttccaaagctctccgagaacttcgatg

SEQ ID NO: 262711 - DNA, 967 bp, Cannabis indica
aaattttagatccgaaacccgtttattttaagcagggaattgtcgacggtttaaaactgttggtagttcccatttttttttaaacaaaaacaagtttacttaaaaatcgtcgtctatacatcctgatagtttaaaatcttcaggaatacccaattttttcccgataattttaaacagttgattaatttatttagtgcttgtttccctaaaaaaagtatttttaggatcgtcgctaatacttatttttgtagtagtgcaagaaggatcttaaccggagggggagcatgatttttggcaagtgttgattggtttagttagctagatgtatacattcactaactttgaatatcttaaatattcatctgtagtgaagtaggttctgtgaataagtgtattgtggtcggatgggtaaaatttgtttttgtattgttctggaatgttatatgttattaattgtatgcttaattttttttagaaacgttcgatttatagttattgtactgctaaaatttttggtagaactaacataaattttttgatttaagttatttctttaaagttacctttcttttcttaaaatttctcaaaatgatataataatttccataatttagtcgagcaagaattttatcacctaatgagatgaagctactggttgatgtcatgaattttcaataatatctctctctttctcattttcagatctcttgctctttagggtggagttttggggtttttcttccaaaaaaaaaaaaaaagagctttacaacattatcatagacaattaaattcaataactaataattcagtagttgggggacacactttactacacttctgacatagaaccaatacatacataattgacatcaacttaattgacataaataatgaaatggttcttagtcacactttaagaagagagaaaaaacttataaagaacaaataaattttccaaagaaaaaaa

SEQ ID NO: 262712 - DNA, 2473 bp, Cannabis indica
tttccagaatttcagagacaccaataagagaaaagattacataaataatatggccaagtcattaaaaaaaagattacctaggacacttttttgcaagtaaatccttaaagaccctttgttcaacatggcaccctgatagattagtagtataacagtcattgaccaagacgttctccaaaaggacagcaagcatccaaaatgcatcttcctctgttttcattacgagcaacaataatgctgcaacataatttaaaccctgcaacaagaatagtctaagtcaaaaaattccaaaagaaaaaaccatttaaagaaacaaataaagaactataaaataaacaatcccatcacttatgtgccagtaaaaaattaacaaaaacttaacatgtttcaaaagatccaatctgaacgatcaaaaggaaccaaatacaatgaaagcataaaagcaaacaaaacaggtacaatatataaataagtaccaagactatttttaagctccagaatacaaattagatgaaaattttacaaggcttattcttgtttctgataattcaatgcctgtggccgaaaatggttatgtttgaaaaatgagtgagggagaatcaacctgacaatagcctacatcagagtcacgaaaagaatatccaacaagaacacgtcgaagtgcagcatggccctctggagtatccaaccatgggtgacctggaaaggttcgtggaaggtcctgcatacatgattcggaactaaatgaaaatttgaagaaatttaaaagtgaaatgagaatctgcgtgaacaacaaatatgcattttcaaagtactgagacatttatgaaacaataataaatagacaaagcaatcgaaagcttcaacatttaaatcctcaataatgaaccatataacaaacaaacaagttttcattcatagcattgacatgaatcagacactaatccagcaaaatagcaatggtttataatacacttagcagaagagaacaaactgattttagcatcactcatcaaatccacattgtggtaataacaaagacgcatttgtgttaactgctgctaccagatcttgagaacaagcaaagctaccagaatgtttcagtttacatcatcttaagaatctttctgaacgacttcaaagtcaaacaagtaataatcataattaagaatattatcatcttacttttggttttcaactaaaaatatttccatgatcggcaatatgcctgaacgtgtcacatgattccatctctttgtctaaaagtttgtagttttaattttatggtcagatgactcgtacagcattaacatattcaatccaagaaaagtttgtgttttgatttgttctaagaataaacatacactaaaatagctcggaaaacagaagttattaacagatagataaaaaaaagaagagaaaaatccaaaagccaccatttcaggaaacaaaacaaaacaaaaaagaaacttttgcaaatggaggcaatagacaagcaacatggtgcatagtataaagctgcccaggattttaagatcaaaaagataattttgtaaggaaagttaaatacacatataatggaaatagtcatcataaactaaagcaaggggactaacatgatcaatctgtcgagtggcgggtgtgacctttccctcaacagcctttaagagatcatcgtaatagctctcaggcacggtagacttcttcttggcagccccagataaagaaaaccacaccttaggcctaagcagtggtggaattcccttcctaataagcctcttcaaggtaatagcattggcaagagtggaaaacttaagagaagattttaaggcaatcccttcagatatggaaggctccagataccaatttgcacctttattggcttccaatgcccaccaaacccgaccttgcttccgcaccttctctctcacctcattcaacacattaacatcatcaacattcccttctactgtaaacatataaaggtcttggaacttcacagtgagattagccctcctagaatggatgctgggcctcaaaatcggtatctgggattgaaattctaaagcaaggtctcttttgctttgagtcccatacattttggcttctgggttattgtgatagatcaagagggataaaggaagagacgaatagatggagagagaaagaaagatagaacctttaggggtcagatgcccttgtcaagcaagaaagaaacaccagctaaaaacccatggaaacggtcgaatgttaaagtctaagaaacttaagtttgaaaaaagaaaaccaaagaagaagctccaatttcaacagggtacctcaaaaatccatgaatgaagagttgcagacacaggatatcaccaaaatctcacattccaatggccatggttagttgggttttcctccaaaaagagaaaaagtccaaattgcgtttaatatatatatatatatatatgtgtgtttactccaccgg

SEQ ID NO: 262713 - DNA, 920 bp, Cannabis indica
ttttttttatattcatttttaaaattagaggtaaattacttaaagattatagtatatctatattaatttttttaagatcttttttattttaaagttatgtcgatttttttaattttttatgggttgttggtatatagattttgttgtatagtatatttttattttgttgtatgatatattattttcttagatgatatttattttttattttgctatgtataatagtgatatataatttgattagcataatacaaatattttaatatatgtgtataattttattgacatgctagatatatttaattattatttttatatattttaattgtatgatgtattatttattttaaatagtatttaattagttacttactaacgcaaattttcgttaatcaaaattaaatagccttttagtaataagtattctacaaaaattaataagtaataaaagatataataactccagatatttttacgtggttttgtagttaaaatctacacactccacgagtcctttttattagggatatttttagagtttagaatacaatatctgattttgaataataataattctctctcaaatttgtcgtccttttttccatggaatctgcctctatttatagaagtataagttggtagttatctttttgggattaattcaagtataactgttcatgaaatgtggacaatccgcacatttcatttaaattacatgggagataatactaaataactactcaactgctcttagttttatcctttagatggttattgctaacgtggaaggttatatcttctctgattcgagttatcttccttgtctgtcttgataagaaaacatgctaagtgttgagaaggtatccatctcgttgtcttttctttgtgacttttgtaatgcgaggtgatcttctcgctat

SEQ ID NO: 262714 - DNA, 547 bp, Cannabis indica
aaaaaaaataataaaataaaaatgtaatccgccaaaatcttttggtaataacaaattgatttttgcataacaactacaataattcaaggggtatgatttgatatatgttaaaatttaaaagacaaataaaataataataagaaaaattaaattagagtttgatcgatagtgcaattaaattaatataacttatttttaaaaaaaaatgaaaataaggtatatgagatggactaaaataaatacactacaaaaaatagctatatttagtgataatttttttagtcgcaacataatttttgtgactaaatgcatgtgacttttagtcacaacaaaaaattacttatgactaaaacatagtatttagatacaagttgtcactaaattatttttagccacatcaagtactgactgtgactttaaatagtcacaacaaattgtaatttttgtaactaatagttttagccgcgcggaccttttaatcacaacataaaaatgacgatttatagttagtcacaatttttgttcttttagttacaaattttattat

SEQ ID NO: 262715 - DNA, 848 bp, Cannabis indica
gaagcctactttgatgctgactgtccaacggtatggatggtagacgttccacttgaggttatgctgtatttttagattcaaatgtcatttcttgatctgccaagaaacaatatgttgctgctcaatcttccactgagttcgtgctttagctaatgctgcagcagaaatcaaatggttactctctctgcttgatgaacttcaagtcactcttgttgatgttcccatcttttgggttgacaatcagggagctgctaccttagttgccaatcctgtatttcatgctcgatgtaagcacattgagattgatcagtgttttgtccgagatcagatcctaaacaatgaagttttagttcgttatgtgccttcagtcgaccaaattgttgatgtattaactaaagcttttccaaaagaccgattccattacttgaagaccaaactcaaagtggtgtctaccccttttgtttgggagggggggggggtggataactaagttcttagttagttaggaactgtttgtcttagattaattttcattaggattctcatgattgtaaccaattctatttaacaaaattgttctctctcatgattggtttaggatttaaaaactattttatgtttttgaaaattaaaatggtgggggtccacctaagaattcttgattggttgagtgttttcaaaaacaaaatttgaatactattttgagttttaggctaaaaaatgaaaacacaatttttatattttttgtgttttcaaatcattgaatccaaaaactctccaattattctcttacttttttattttgagattcccaaccaatcacatattcaattttttaaaactcaaaa

SEQ ID NO: 262716 - DNA, 827 bp, Cannabis indica
caatgcagtaatctacaatcgtcggcagcacctcctcgaatcagtatagctcatcctctaacaaaagggcatgctttgccaaaccatgcattgtaaaattcttaatcgtgagctacatgagacaaaactacccctaaaaaactttagaacaataaaattataaaaatacttcaaatagcactcccagctcgttaaaaaaataaaattataaaatcttcaaataacacttccagctcattaaaaaatacaattcctttgttgataattgttactagagaaccaaagtttcgacttataatacagaaatactacctgaaaaaacaaccaaacaaaaaaaaaaaaaaaaaaaaaacaagtattagaaaagaaaatccttgaattaaacttaatagactaaattcaaatttaaacacctaattgaaaaactaaaactcaactacaaaacggaatcctgactaaaacctacagagaaccagccaaaagtataaccctttggctaaaagcaacaaattaagaacactcagcaaaacacgtatgattttgattatattaaaattaaacttattggcaaagtcttaataattgtaggcactccacaaaaccaagcaacaaattaaataacaataaataaaactatattacaacaacatttaataaaagttaaataatgtgaaagaaagatggcaaaacaatccatatccataatataatataaaataatccatatcaaatataaagacttaaaaaacttgaaatactaacctgtaaagtcgttgaagtagaagttatgagtacaaaatagatcacttctcttactcaataaccat

SEQ ID NO: 262717 - DNA, 593 bp, Cannabis indica
aacatttagtgtaggtaatttttaaaataggacaaattttcaaaaaaactccaaaatagccttgtcaaaaatcccaatccctttctctctcttccactcaaactctctctcggttccatctttccttcatgcccgatcccagcctagccgcctcacacaagcgactctgccttcgcccgaaccccagccacctcacacaaccactgcgccgtcaccccctcaccaccgcctacgacccgacgatctccaccgcgtacaacaaaaaaaaacccctcgggtccgattggcccaatatggtagccatcggacctcaacgaatcggaccatcggacccaacccaacgtgaccatcggacccaacccatcggaccatcggacccatgcatcgggaccatcggacccaacccgtcggacccaccccgtcggacccatcggaccccctcttctccaatggtttctcatatccgaattaccttagacatggtgcagttatcctgggtgggtctcctcctccgtctggcagtgatgacggtcagatagtgggtgtgggtctcggtcgagtcgactgggcgacggcgcagtggttgtgtgagg

SEQ ID NO: 262718 - DNA, 1039 bp, Cannabis indica
gaatccaccactcacttcagttgattcattttcggttactttttcagggagttgagactgtagactctagttattttgtcaatgaagaaaacatcgaacgactaaagcaagcaaaagaagccaacagaacgcaggtacattaacacctcctttatgagtctaagataataaaatgttgtatgaaactctatgacaaattataatcagtatcattttcatggatctacacagcttgattatacacaaccaacactgaaagacctgaatggtgagaaatggattccaaacggagatagccaagggacagttggatgtgtggttgttgacattcaggggaatttagcttcggctacttctacaggtggacttgtcaataaaatgatgggcaggattggcgacacccctatcataggtgcagggacttatgccaaccatctttgtgcaatctctgccactggaaaaggtgaggccataattcgaggcactatagcaagggacgtggcagctctcatggagttcaaaggcctttcgctcaaggatgctgcagattatgctgtggagagcattccaaaaaatactgctggccttgttgctgtatcctccaaaggagaagttgcaatgcctttcaatacattgggaatgttccgagcttgtgccactgaagatggctactcggaggttgcagtatggccttccacaaagaattgaatgaagttttatagtcagcttcatttaatttacgttttctgtatttgtataatggcacaaaataaaatacatttatatatttatatatattgttatgatcgaatcgaatcactcagccagcctaagaagaacacaaacaaaaaaatacattacaagaaacaaaaagtatagaataattaacataaaccagaaataaaaaatagtacacaaaagtaaagaatgacactaagatttaacgagtttgagacatctgcaatgttccacacctcggttgaacatcagtctcaatcatcttcataataggatgagagttcaaagattacaagtgttt

SEQ ID NO: 262719 - DNA, 531 bp, Cannabis indica
tagtttatctagaaataatatcttaaactaagagtgtttttcttcaaattaactttaaaatattaagggaatatactcatttagtaccttgtgttttcatgaaaaacatatttggtaccttgtattttcaataatacttaattagtacctcatatttttaaattgtacatatttggtaccctaaagtaaaatttaatcaattcagttttaacaacaaaatagttttcagttatttgtaatcaaataattaaatttgaatttagaattcataaaattttagactgttaattgtattgataaaattttatcaaaaaaatttgaatttagggtaccaaataggtataattttaaaatacaagataccaaataagcattattaaaaatacagggtaccaaacttgtatttagacaaaacatagggtactaaatatgtagacacccaaatattaaaatgaaaataaatttcatatcttttaaaagttaattatgttgctaatcaattttattaggttaaactaatttaattaacct

SEQ ID NO: 262720 - DNA, 3347 bp, Cannabis indica
aaaaccattatttttagtttgatttattaaataatgccatatttagtcacatttactttttataccatatttatcattatcttaataatttttcccatattttttaaaatagccctttaataaaagtgtgggtgttgtatttgtttgatctagcccaatatcagaagcacaattatagttgcagacccattgctattacccaccatctctctctctctctctcgacctttttggctttcttttctcactcatcggcggttacttgaaagattatcaacctcattcactacctgatcggagaggaggaggcattccgttgtcgaactcggcttcattaccacctgcacttgggtcataatcaggtacggttttgaggctgctaatgaggattggttccctttccctttcctacaaagataaattttgttctttaaacgctcagagtgatgagaatatcatcatcagtatcactgtgaaaaatagttcagaagaaaagcattacttagttgtttggaaatatgcttttctgttttttgttttaaaaaattgtttttagaaatgagaacaaaaaatagtttttgaagtttttaaaacacaagtcacgtttggctagtgatttttaaaaacaatattgatcaaaagtgaattggtttttaaaacagaaaacaacattttgttgttttcaaaattcttgttttttgtaactttgttttctgaaaactgttttaaaaaaataaggccaaacaagccaaattgtttttaaaaacaattttctgtttttaaaaacaaaaaacaagtttttagttatgatgccaaacatgcacttagttgtttggaaatatgctaatatactgatttgattcttttatgctatgtaataatcaaaccaagtatgtaagggagattttgtaccttttgttattctgaaattaatttcagattctaaccaattgaaaagagtttcttagtttatcattttcatgaaattgttgttaactgtgtgggatgcaacttttcagtatgtattgtttatgtaatttaacatttgttattgtgatgaaagccacactagttgcaattttttttgttcacagagttgggcccagttttatggctatacatgcataaatttattgatgaaatggaacactttcttcacttatgtattgacaatcatgatgagtttgattgtaacttgtagtctggaattggggtttatgtgtgtgtgtgtgtgtgcagattgtatgtactggacaatatatattctaagttgtcgtgaatttctacaatgtgtaaccattagggtccttttgtttgaagctaacataaaattgttggatgagcacgtctaagtttgcagataacacatgatttcagtgatcattacacaaatctccttcatgtttccaggactctgaagcctaggtgacttccatacatataaattataataattgaaattctgtatttggaattgatatatttgcttgcaatatattttagatctttagtttacctttttttagttgttgggatcaatgtgacggtatatgtatgtcatgtttattagattttttctctttctaaaaataaaaatttaaatctgattcttgctgatgatttttatgattggttatgtgtattaaggtcatgtatagcatagatcaccacacaatcctgtagcataggaatttttcagtggagaagaaaaagtaaagaatgagcaagcatagaccaccacccgaccccattgcagtgcttagaggtcaccgcgcttctgttatggacatttgtttccacccatctaaacctatcttattcactgggtaatatttcacttcattttatatttttttttccctaattgcatatcccaaccccatcattatattttttttttcaggtctgcagatggtgaattaaggatttgggacacattgcagcatcgaacaatttcatcggcatggttctctatcaatttttaaacaaagtaactatttacattctgttgagagttttgtgtttattgtgtatagtgtgtaatttcagggttcatagtgctgctcatggagttgtctccgtagctagcagttatttgattggaaccaacaaagttatcaggttattttaacttgttttacttaaatcaataaaacttagtattctgcttatagaaaaataatggacttttttttgtttagccagggaagggatggaactgtcaagtgttgggatttagaagatggaggcctatccaggtggtgatcaaattggggtttatttatttatttattttttcactatcatctatttatatatctggggattgtaaaatatggggctaaataatatacttttcaggaacccattgcttactattaagacaaatgcttaccacttttgtaagctttcgctagtgaagaaaccttatacttgttccaagcagctcaaggagaattcccaagaacagggtcaagaaaatctgacaaatcattctagcaactttcaaggtttggtttagattaacatttgatgagatattagattttgcatgtgtttcagatgtttgtgtcaatcatatatgggggttgattgatgggagtgtgaattttgatttcttgtacacatattttgttgctccaagaaatactgattttggacaactgactgaatttcattctggattcaggaggttcgcacactgaagatcttaaatatgtggctattgctggggagcagtcttctgaggtcaatagttatcttttacattattagctactttgttttcatgtataggctatgttgcgtcatttgttcgtgcttcttatctcttccatgggtttatgctcttaggttgagatttgggatctaaatactacagaaagaattatgtgtctacctcaaaactgtgttggtggctcaccaaaattttccaccaaagaaagaggtataatttaatttatttgactgttgactcaaagcctcaaggtattggtctgaaattatttattacagatttacttcatttgatttgacatctgtgtaagtttcttgtaggaatgtgtatggctattcaagcatttatcccatctgaatcacaaggagctataaatgtcctagctgggtatattcttttcttttctctttctaggccacctgaaattaactgttttatccttatcatatttagtggcctttgtagcacattgagacatcatccttgattgatttgatagagataatgatatttgattgtatatactagttgctttgttctataggcgtgaggtcaaattatgtccagttgtcagtttttaccgtcaagttactacctcttgaatcgcatc

SEQ ID NO: 262721 - DNA, 2275 bp, Cannabis indica
tgtcaaaataccataaggtttgataaaaatatgaaaaaaaaaaaaattaagtgtcaacaatacaataatcagtagactttgagttgaacatttacatattggacctaaataaatataaaaattggtatttttataatgtgcggtgcggtgcatattaacaattaaaaaccgcaaaccgcactgcaccacgtggtttaggaaaaattcaaatcgcgattgcactgcaaaatatttcaaaccgtattttttttgcggtgtgatgcggtgcgggccgtttgagcagtttgagcggtttgataaacacccctaaattccacatatgtatggggtgtggtgaaattattttactttcgagtgtttacagcgcacgtgcgagttcttaccacccgtgtcaccgtatgtgtccgtaaaaattaaaatgataagaaagatatttctgaaccttacaaaaaaacaatcctctgaaactctccttctccttctctctttcccgctctgagcttaagcttaattccagtactggaagatttttctagggtttctccattctcctaacacatatgaagctagagcttttgggaggtttctctccctcctcctcttcttcttcttattcttctcactcagctccgtattcaccattcttctctcccaaaatggtcgccttgggttctctttcgctttgtccttgtagtctgctatggcgcccaaacttcactaggcgctctgtttcctgctctattggcactcccaatgctgtaggtgcgtgattatagtggaggttatcactctttttaaatccatttgcttttttttacttattttctcttggtttcattgtttgattttaaaaatgttttatctgtttggttactgagaaatggaaaaagaaaagaaagtaagctataactttgttttgtttttattttttaactaagttaagtgattgttgtactaggctaagtaagtagtcacttgatgtatgtcatgagtagggaaatgaattttcttaagcttgagcctttttgtttattcactgaaattgtgctcgttaggataagataaaacttagatatgatagttatgtttgacgtgttctttttcttcactttaggtgcttctaaatctaatgtgtcggcccagagaagaaaagggagaaaagaaggtcctaggaaaagtatggaggactctgttcagcgcaagatggagcaattctatgaagggcgtgaaggcccacctattcgtgttcttcccattggtggccttggtgaaattgggatgaattgtatgttggttggaaattatgatcgatatattctcattgatgctggtgtcatgtttccagagtaagtttttatacaaaatatgtaaattacggtcttggtagtactagttacttttagattagtgcagtataatgaatggttttttatggagttttcttctcctcaaacatggtttggatacatttgcattttgcattgtttatgtttgttttaaacgtttcttgtattgtttatcttcttactatccataacaatgctaaaatgttttttcagctatgatgaacttggagtccaaaaaattatccctgataccacatttatcaaaagatggagtcacaaaattgaagcggttatcattacacatggtcacgaggatcacattggtgcgttgccttgggtaaagattctagctgtttcttgcagtagcattttggttgattccaaacctattaattattttactcaaaagagtctagtcccttattctttcttctgtttatttttctgttgaaagctataaatttaggcaagagtgttcaccgatttagcttgtgtcatctaataatcatatatttcctaagtttcccaataataagggctgttctttttttaaaatgcacgtgaataatggctgactatgcattcagactttggatccttcacactaaaacttcattgtctttcaaagtttattgttttggtagtttaattcttcattttattttgctacatgtatttacattttgttccacatttctcctaaacaggtgattccagctttggattccaatactccaatatttgcatcatcatttaccatggaggtacttgtcaaaattttaatttacacaatgttatttacctactgcaattcaccaaatttgctacttttgagagtatggatgtcacttgcaaatgtattttttttggccccctcttagagttaaatagtttaaaggtagcccttgaaaactctaaagagagagtga

SEQ ID NO: 262722 - DNA, 633 bp, Cannabis indica
aaattaaaaaaaaaatcattaaaaatatcaaaattatattacaattaaacataattaaaaaactaaatgacatacttaaaataaaattaaatatatttaatatattcattcaaattcatccatggctccccaacccaaaaaatttccaatcccaattcaaattcatccattgttcttccccaatatttttttactcagatcccacttcaacttgtagcaacatcaaatgcggtcgaaaacctcatcactcaccaaacatctatctagcaaaatcaaattgacaataaaaatcggaccaccaagaaaacccagaaaaacttgaataataattaaaaaaaacccagaaaaagagagctcgacggagaacctgagaacactttcaatctctagacgcagaaccttgtcgaagctctgaacatttattgggctgggcatggctacatgaccactgttgaagcaggaactgacttgtttgctgaacaagggactgtaaaatcaaagccaaacactcatcaaacccacaactttttagattaaaaacctcacattctttcaaaataaaataagaagaaggagaagaagaagacctgaagcaaaaaattggactgacccatcaacctccgacgaaggatg

SEQ ID NO: 262723 - DNA, 1035 bp, Cannabis indica
aatatagtactttttaagtgtttgttgaaataactaatagaagttataaaattgtgtaagaaatctaggctcgctcatcattgtgagatgacttcttttatttatcattgcattcacaaaagtttaattaagtactcttctatatatatacatatccaataatgttgtcatcatacatactctggtgattatagtaactactcttgtagagtaaaaagggtcctatccataaataaattaaattctaaaaaacactatatcttccctttctctcaaaaatattaatcacacaacaatccaatagcttgtttattagttaaaatcaaaaataattttgaaaaaaaaagactaaatttggaagcccctctccatccattatcttgttcttcttctgctgcagtcaattttagctttcagtattgacccaccaaacttttctgccaccaaagtttcatctcatgaataataaacaacacatacttactaatggtttagaaaatttcattacgaaaaaatagtcaaacttatagaattgataaatggttaaatactttagtgaacttgagcttagtacacaacttcacatttactcaccttgaatttagcaaaaaagcaacaacttcctcaagtgaggtttttctctttcttctgtaaattccaaatatcattagcatatagataattttatttcaaataaattaaacaagttggttaaatttaagagataaatcaagtctttgaggcatgagagaggttggtttcctcaactagaatctttctcgtcttaggagaattgagaacaagtaactcaacagactgcaattctccaaacacttgcagctcttagcaatataaccatagctgaattagtaaaccctttggagcatttttatcaagcaattgtaaaatatctttcaatcacagtagttctatgttgactatacctcattttagatttgtagcctttttagaagtaggaatttagaaaagcactatgttcatgaatgaaatgatcagtcatttgtgtgctctagt

SEQ ID NO: 262724 - DNA, 628 bp, Cannabis indica
tcagccgcatggattcagaaatagattccttgaagaaaaacaaaatatgagaatatgtagatgtacttgatgattatcattcaattggatgtaaatgggtctacaagaagaaaagaagtgctggtggagaagtcgaaacttttaaagctagatttgtagtaaagggttatacgcaaagagaaggtgtggactatgatgatacttttagtccagttgccatgctcaaatccattagaatacttctctccatagcaaccactttcgattatgaaatttagcaaatagatgtcaagacaactttctttaatggaattctcaacgagacaatctatatggagcattcagaaggttataaacttccaagacaagaagagaaagtttgcaagctaaataggtccatttatggacttaatcaggcttctcgctcttggaacaaaaggtttgatgaaataatcaaaacttacagcttttaccaaaatgaagatgaaccttgtgtttaccaactcaaggataatcaagtggtagtatttctggtcctttatgttgatgacattttgatcattggtaacaatatcaagaaaatgactgacataaataaatggttcaacacccaattcaaaatgaaaga

SEQ ID NO: 262725 - DNA, 1304 bp, Cannabis indica
atagcaaacactcgagcaggtacaagttttgcctctgacttcgactcttctttctttgcctaagggcaatctttcttgaaatgccccaccatgccgcactgaaagcatgtcttacggttggactctcccggatgatgtttcttacaacgtgaacactcagggtaagagtaaccctggcgtccacctctgccttggttcccgcagaaccgcttgctctgccccgaaccaccagatgctggggtaacttttctcttctgatcagattcggagtcaatcggggctcctgaaggaattttactgcaccctcggcttgcaaagctttctcaaccatttctgaatatgatgttgctttgttggtagtgattaccagatcatgtctaatcttcacattcgaaccggccaggtacttttctttctcactgaaatctattggcacaatacccactgtgagcttggccaatcgatcaaactgtgtagtatattcagtaattgacatccccttagtttgtactaattcagtgaactctttccgctttgcaccgtgcacagcttcattataatacttagagttgaataactctcggaactcctcccaggtcattacagtgacatcccgggtgagggacaataattcccatcgcactagggcatcttcctggaactgaaaagtggcataggtcacccgatcatttccaaccacgcccataaaatttagaattcgctcaatcaccgtgagccactgctcagccttcatcacatctggacctcctagaaacactggaggtgcttgcttacggaatctttcgtataacgggtccatacggttgccagcaacaggttgttctgctggcaccactggagctacaacgacctgagcttgttgcgaaggtacggcaggaggaccctgctgccttacctcagaatttcttcatcttgttggcggattcgatcttgcatttccgcaaacctctgctcccaatccggaggagcttgtggtagatttataggatgaccaccctgagctctgcgacggccacggccgcgaccacagggattctggggaatttgatttccctgaccgcctccagtcttaaccatattaccctgagttcttgtattttgttgggcgtccattttataagacttagcttgcgaacccataagccaggctggttagacagtgatcataaaacttaacaccgctcttatggacttaaaggcaacacactaaaaataaataatcacaatctaatatgcttcctaacatactttaatattcacatataatactaaacaagtacggg

SEQ ID NO: 262726 - DNA, 597 bp, Cannabis indica
acaaaataacaaaacttttccactttaatcccgcgtttcctaaactgtaattggaatcaaaataatcaatgggagaaatgtatcggttttaaatagaaaataatcagaaataatattttattatgatgtttactaaactgtccagaaaaaaaaccagaatcatattattttgtttacataaccagaaaaagtaatcaaaatgctttaatttgacaaaattgtcattattaaaacatgtaattattttctgtttatagatttttaagggacatatttatctttttcatttttagttaataaaattaaaattaaaataaattaagtaaggaaaaaaaaatgcattccttataaaaatgggagaaaaactttccatttattttcttcctaatttgtgtgggtcccactaatttctcactttctaaaatttcgtaaatatgagaatcaatatcataccattcattcacattccatttaactaaatatgtatgtcatacataaaaaggatttaacattctcattcccaaatgcacaaaccactaaaacaaataacgacaaagtgggtaatgaaatccctttaaaaaaatgaataaatattct

SEQ ID NO: 262727 - DNA, 568 bp, Cannabis indica
aataaatttcaaatagcgtgtactgctaccaagaaatttgactccaactccactttccaccattgttgagttttaatccaacatagcatgtgtcatgtaatgtacttaattgtaaaataaacctcacttaacatattcaaaacaaatataattatcatatggtcattagtgtgacactcacatgataatgatgcatcatctattaaagagttgcataagtatatctctaatggcgatgcatcaaataggttattcatatagcttatcttacaaaaaatttgctccacagtattttaaaagttgtgccaaaattgatacatttaaaaaattatattaaatttaatacataatataggataacctaaaatttatatcactataattatactatttgttatttatttttatgtttttaaatattttattaatatatatagctatagaccataatgttatattataaactatttacattcttctttattgttctaagtaataaattaataatagaattagtgattaaatatttttttttgtattttaatagtaagtattaattaatcataaa

SEQ ID NO: 262728 - DNA, 713 bp, Cannabis indica
ctaagcaatgccttaattgtgaaaaaaaaaagagtttttagggtttatttgttaatttagagactttgtggagtctaattaataaataatataaattattaaataaatagttttggcatttataggattaaaattggaaaatatagcatttgtgaaataaaagataaatggttgaaaaatagcaaaattataactagtgtgggccagctatatggtcgaccacttagtgtataatttgctattattttatcattttttattccatatgatttgaatcctaaccctaggtgaaatagtatgaaaggaataagatggtctcattatctaacaactcatataacctagtttacattctgtcagacaactagagttcttgagacctccttctttgtttttctattttgaatctccttcatttttttcatcaaattttgcgcctatagtgagtgagtgcatgcccacccatagtaagtctagtactcaatcctaaagtgtaagactttaaagaatctaacaacttgaaggagaatcgggctcaaatcatgataatactctacgatagaaaggaagaagggttaaaaatctaagttgaaggagtcatatattttgctacaatcaatgtaaggtttctcgactttatatgtgttaaaattttattgttatagaaatgcatatttaggattttttttcgaaaaagagaaatctttattcaa

SEQ ID NO: 262729 - DNA, 1658 bp, Cannabis indica
taaatattactccaagtgttagtacagaaaattgtatggacacagagctaagaagcgaaaccttaccgcaccaaaagtgtttgttcttggacgaagatgagctttggttctcaaaaattctttgcttaccctttcttttgaatgggaaaagagggatcacttttaccaacctataagacaggttcatatctcaatgttcagtctttacagaatcaaacttcttaagttagacacataatactctgtgttcatcttcataaaatatacaagaattcattgaaatgcaacaacaaaaggtaacatcttagagttgttgaactatgcattcgagttaagtgagatgaaaatgtgtataaaactaaaataataaacaaagccagaaagagaacaattggtagaaatactaaccacaacaatcttattaaccttcaactccaccttttgtttagatccctgacttttcaccacaatcccttgcacccatattgaggcaccagttgtaactgacccagattctacctattcatagtatgctccaaaagcttgaataatcattgaacaaaaaatcaaaacaactctgaaaaaaaaaaaagaaaaaaaaagacaatcctttgtggttcaatggattaacacatacctgatcataaccatcagcatcagaacccataacacattgcatatttgagagacaagaaccatcattaacctaaaacccaatacaaaagcttcaatctttagtttacattaattaaaagaaaaaaggaaagattttcaataaattatcacacaaatttggattgtttacatcaatgaaagtgacagagctctgaacacgaacagtccgaacccaccccttcactaccagagtttgtcccaatcgctccaacccctcatcgggtccgcctttaatatccgcaatcctcagcttcttcctgaaatctccaacgctctcggacctccagttctcagcgatttccggcttagttttctcgccgccggagactagagagcagaagcaagtccgagctggggaagatggggaaatgcgccgaaaaagtggctggaaacagagaggtcgagccctgggaagagaagagtagaatgagagaattcggagagctgaatagggtttgaacccaacagcaacacaagccgccatcgccgccaaagctcacagccaccggattgggatgacacagtactctctctctctctgctccagttattttctttcctatttttttaaaagatccattttttatgaaaaataataataactattgtaaaataattttttttttatatatattttaaggaaattctacctagaaagaaactactaatacaactatttgatctttcaaaaaaaaaaaaaaaatacaactatttgaataattccccaattctatattaaaaaataattttttattttttgaataaacttagcaactttattaactagcaattgttaataacaatagaacgcacttcgttgcaataattctccaattgaagcacacgatcgggagagaaacaagaatccctgactaaaacatgagccagcttgtttgcagatcgtttgacaaaacacaactcaacattatttaaagataacagaagagtacgaacatcatgaactaataaaccaaaaaaggatg

SEQ ID NO: 262730 - DNA, 632 bp, Cannabis indica
aagtagacgagaaaggcataaagaaagtgaagctgaaaatacctttcagtctaaaatcaatccgcggtctcaaaaaccaaaagctggagggaaaaagacataagaaaaacaaaaagaaaataacgacaagtatcctccatgtggcatttgtaaaagaaaaagtcactttgagaaagactgctggtttaaagataaaccacaatgccaaaattgtaaaaaaattggccacactgggaaaacttttcgtttaaagaaatcccatcaagctaattttgctaaagaaaaaatgatgaaagtaatctcttctatgtctgacaatctacaacagaagaaggaaaagatacttggtatcttgactgtggttgcagtaaccacatgagaaagaattcaagcatcttttgtagtcttgatagatctaagactaaattcaaaatcagtaatggtgacttcatggaagcagtcgacaaaggcaccattaccattgacactaaaaaaggtaagagatacatcaatgatgtacccttggtacccaacatcgatcaaaacctacttagtataggccaaatgattgaaaagggatactctttgtgtaacgtccccgctttaagcctccattggctccttacacccac

SEQ ID NO: 262731 - DNA, 700 bp, Cannabis indica
aaatctcggttgttacgggacggttctagactatatcgtatatatgcatacgtatataccaaagacagaaaatgatataataataataataataataagaatgatgataacaataataataagaatgataataattataataataataataatgatgatgatgataataataataataataattgtgttaaatatactctttaacactataataatatttaccaatattattatactaaaataataatcccaatactattataagttaacattcattattattattattattcccacaataataataatatgttccaaaatcaaacaaatcacacacccatataacaatatccagacatatgtatctattaggcattatgcacatgccaataaaatcaaatattatatcatcataaaaataatcccatacatatttaaatccataaatatgtaaaataaaaaaaatactctcagctaaataaaattacaaaaataccctttcggagttagcggatattacaattatccccctctaaaagaaaatttcgtcccgaaattttactcaaataattctggatattgttctcgcatatcagactctagctcccaagtagcttcctcaaccacgctgtttctccataggactttcaccaaggtaattgtcttatttctcaaaatcctatccttttgatcaagaatc

SEQ ID NO: 262732 - DNA, 582 bp, Cannabis indica
ccaagcatcaaaatcaaagagacagtagcagctaatgagcaagagcagagttggatggatccaatcatcatgtacataacacaacgagaattgcctcaagaaagggctgtatctagaaagttatagtatcaagctcatcgatacttgatggtggacaatgtcctttatcagagagggctcaacatgccgtatttaaggtgtgtgtcagaccctgaagctagacggatcatgcaggaggtccatgaggggttctatggagaccccgccggaggtccaagtctctcaaagaaaatattgagacaaggatatttttggccaacgatgaagaaagattgtgtagactatgtcctaaagtgtgattcatgccaaaggttcgcaaacataccaagagacccgcccaatgaaattactttgatgactagcccctagccctttgcggtttcggggatatacctcattgggtccttacccacgggaaaaggtggggtaaagtatgccatagtggccgtggattacttcacaaagtggacagaggtagagcccatgaagaccataaccgccaagaaatccttagactttgtt

SEQ ID NO: 262733 - DNA, 740 bp, Cannabis indica
ttggggtccgttggaatttatcgccctcaagtattcgaggattggccgcctccagtcttcgaccgcatccgccgggatttctgcacatttaatttcttcctccgctgaaatactaggttccgggatgaagtcaaatggtattgttctcgtaatgtggaggggggaagaggatcccaagccggccaaagcgtcggcgtgcatattcgcttcacgggggatttggctaatttggaagtagtcgaaagtcgcgatcaatttctttacttcggataagtacctggccatcttcagttctttggcttcaaaatctcctttgacctgctgaactatcaactgagaatctgactggactagtaccctctcggctcccatttcctttaccagttttatcccgtggattagagcttcgtactcagtgtcgttgttggtagctcggaagcctaactttagagactgctctatcatttccccgtcgggtgattgcaatactattcccactccgcttcctctgacatttgaggatccgtctaccctcagtagccagtcctttccggcgaattccttctcgggcgggataggctccggggttatctcgaccaaaaaattcgccagcgcctgccccttaatagccgtccggggcaagtactgtatatcaaactcgcttaattctaccgcccacttcattagtcttccggatacctctgtcttgtacaagaccagctttagtgggaaagacgttc

SEQ ID NO: 262734 - DNA, 526 bp, Cannabis indica
tgtgagacacggggatagggttatggttgggtgtataagagcctgattaatattatcatgttttatgttatgcttttcttaccgagtctgtcaactcgcagtgttatttccatgtgtaggtaagggcaaggctaaggctgagtaaccatgagggcaagcagatgaagattgtacatgttggggcagttaggcccggagcataccatctttgggacatcaaggcttttgctgtatcgtcgctaggcgaaaaacttttgtatatgaatattaaacttttgtaaatgtattttgtaaacaggatctcgaaatttttataagtatgttactttatgttttcaattaaataagaaaatttttaattaatcttaatttttgataacttcgttgattagcaatgagctgtacaatatgttaaaaatcacgctaacatgcttaagttagttagggtgttacacccttaaccgatcaatttcaagatctgaaggcttcgagccagctatgccttggatcatgtccctgagttggt

SEQ ID NO: 262735 - DNA, 555 bp, Cannabis indica
aataaaaaaattatagttgtttgatcccttctgcgtcaaaaagatttgatcagagtgctataacaatttgacccctctctcgtcaaaaggtttggtcaggaagttataacagtttgactcctctttcgtaaaagaagtttagttgagaacctttaaattttttaaaaaaaattgaaatggtgggttagcattataccatgtatttccagatgaattctagttaatcatacataaatgccacttaagtaattttaaagagtaagactttataattacttaaataatataaatgattttctttattcataagtgaagttaaaattttacataagtaatgcgagttacatcatttatttattggtagtagggttgtaaatgttccacgttccagtagttctttattagcgagccattgagtcgagctaatttgtaaactccaatatcaactactgctttgatgacatatggaccgtcccagtttgggttgaacactcctgtagatgcatttctcatatttacaaaatactcgccttagcaccaagtctccaacattga

SEQ ID NO: 262736 - DNA, 483 bp, Cannabis indica
tataaaaatagaacaaattgaagatttatacaatactgtaatttgaactcttaggttaaaaatacggtaattaaggaaaatctagaaccttatttttttttagatttaatgggatttattttattatatataaataaaaagtgacccatgaatttctcataaattattttattttaaataataaattattttatttttaatataaataaaaagtcacccataaatttctcataaaccaagaattctgttacataagcacactttatatagaatagatattggatacattttttttcaaaatcctagcagccatatatttatcgtatccttttttttctctaaaagtatcaccttctttatgtcaccaaataaatagttctaatcttaaatgttttggaatcaacaatcaaccacccatatctgaacaccagtattttatgtcttctgaactaagcaactcgaaatcttgaagtaatttatttg

SEQ ID NO: 262737 - DNA, 880 bp, Cannabis indica
gcctcagtcataccaaggataccgcacagtctcgaccgagtagccataggagtgtttgtgctaaaaaagatggacgacttcaagaagttaactttctgccccgacgccatttcaaagatgttcaacaagctcaacacactagtagcctctctctcatttgcacgacaatatatgtagctgtcgtctgcaaaaaacatatgtgaaatagtaggagctccatttgctactttgcaacctttcaaccggccttgtctttcaaattgtcttattaaagaagtaaggccctctgaacacagaagaaataggtacggtgacaaaggatcaccttgacgaagaccacgagttggaacaattggtcccatctctcgtccactattgaccaccatataattcacattagttaccgtggccaacacaagatccacaaatttatcatgaaatccaagcttaagcatcatagcacgtaaaaaaccccattctacccgatcataagccttgctaaggtctaactttagagccatatagccttctttgccgactctctttcttttaaggtaatgcatcacttcaaaggataccattatgttatccgaaattaggcggccaggaacgaaagcactttgagaatcagagattatctgaggtagaatagtcttcaaccgattagcaagtaccttagatatgatcttgtaaacaacattgcataaagagatgggacgtaaatcactcattgttgtaggattttcttcttaggaatgagcacaacattagtattacatagcgaatcaggcaaagtgcagctttggaaaaaatcatgaacaagagcgacaacatcacctttaacctcatgccaatatttctgaaaaaatcccggagtcat

SEQ ID NO: 262738 - DNA, 754 bp, Cannabis indica
tgaggtgtcaaaatttgagtggagggacaggaattgggacagagtaaagggacagacgatttggctccgtggtctacagtgtttcactaaatttggtgggacactgtagacaaagtcatttatgaggataggtttagtgtcccattgaagtaaatagtaaaattacactatatatttagtgttttagtgtctcattggagatggccttaagaaagtaagcttttataaccaaacttgcaacgctttttaaggtcaccatagcttatgtaatgaacactatataatgaaaatgaaatgattatttgaattttattttctacattataaattatttaaaaattttaaaaacaaaaaaaaatggaaaaaagatatataaatataatgtacatcattatattaaacaaaattttttataatttctctgtgtattagaaaaaatactcttatcatcttatgattaaaacaaaagtaatactcgtacttgaaaattataattataatataaatcaaggtatactaaaacgtctaaagtattactttttgcactgagtttgcaaataattgtttgattgtgattaaatatattaaattgggtaactaatttattgtgttataaattagtaagaaaaatagtacttactaaaaggttattctttattaaatagtatatatattaataatttattatatatatatatatatatatatattagtatgtaagtatgaattatatttcactaaaacagaaaaatta

SEQ ID NO: 262739 - DNA, 1225 bp, Cannabis indica
ttctttttttttttgagagatatgttcattttttataacgtgtcggataaaacttgtatgtgttttgtgttgtttgttcatagaattgaggcatttggaggaccaaatgaggttggagaaactatagttagaaccatcacaggatctgggaaacgacccgaagtgaaaggaactttggtaaagtcgaatttgagagaggattcgttaagaaatatagcttactatgagctggaattcagggtcgagagtccttcgtttcgcaggcataatgttgcggtttgttgcgttcggaatggtagattgtttactctgaatgctcaggcaccagaatctgcttggccagaagtgaagttagactttcagagaattgctcaatcctttagtctgacctcttgatacttcgaagaactttgctttgctttaatactgttctgccattttgcctacaaacaatggtctctaggtccccaataatttttcattattgcttgtttaagactgaaaaggctatcctatgtaaacaagaacaaaaaaacaaaaaagaagcacattctagtatataaattgatttgacagattgtttttcttgagatgactatgaggtaccaacacctaactttgtgagtgcaaaaaattagatttatacatgactaaatttacatattgaatataaatccgagcctcatggccatcagggtgacttgaatcttcctatatttttaagtgtgtgattaggtacatatatagactaattcaagcacaagttatctgtcttcgcttgatcattttctctaagttatcagaaactgcggctgtcaaattaggatcttcgaatcccagctctaagccaagcctgcaaagaggcacaaagcaagattttcccagttaatagattaaagtgttttaagaaatcagcaacagaatgttaaaaaaattcttactttggatcaagcaccagtttctggacttctttaatagctgcactagcagcataaagtgatatcttccctacctgaattaaaaagctcagtaatcagacatacatcttatccagacacaaaattaaaggagcgtcaaaaaaaaaaaagaaaaagaaaaaaaaacggaaagaagagcatatgaaaaataaggacaccgtccaaactaacttgaaaagttttgcttcgtgcgtcattcggaacgacagcgaatttcttctagctaattttacagccgtccccacggc

SEQ ID NO: 262740 - DNA, 533 bp, Cannabis indica
aaaatatttgaactatgggctcacgtgcgaagcacgttaaacccaactagtattgtattaaaagtgtcaaattcataattaaataaaatagtacaaaattttgttatgttataaactgttatggacaaaatatgttgattatccataaactattatatttatttacatataaataggggcggagctactgccaactcaaggaatacctgtatatttataaaataaaatacagatataaataaaaaaataataataagtaaacatttaaaatatctattactaattaatatatatagtattaattaagtgtttaatttattaaaaataatatatattaaattttaataaaaataaaatagaaactgattttttttaaaaatgaattgacttttcaaattaaatttatacgagtagaaggtaaataaaataaggcaattgcttattacttatttttctatttttctactatttcttgttagataaattaacaattatcccaagatctatttgtatataacatagaacacaatagt

SEQ ID NO: 262741 - DNA, 520 bp, Cannabis indica
cattgtaacaatcaaaactatacgttctatatacttggataattatgggtcatactcatgattgttactatcctatttatttaatttgttttatttcagaatctaagctatctaagttgtatcctattttgatcgttacaataagagcaaataaaaaagatatatgttactttgtaccacttgtacacaaagtttttatctttaaggacgcactaaattctgaaaaataataaaacaaaaagtataaggaaaaaaaaaagatataactgctatcataaatacaatccataaggaaataggaaaacgtaaaataaagtgtgcttaggcggaatgaaattgaaaacataaaaagagtaatgagaatatttcaagtaaaaatgaaatagaataaaacttaaaatgtatggaaaaaatttaatataaaaattattagttttttttttataatgtcttggaatagaatttattttcatttcaaaatgaaataatcaatttatcaaaatattagaaaggtcatttt

SEQ ID NO: 262742 - DNA, 931 bp, Cannabis indica
acttagttgatagtattgtactatcaaattgttaaaattatcatggatcaatcaggtacgcatacctaattattattattattattattattattattattatgtgttctacattgtatacaattttgtatcttgagattattaatttttctaataaatggtagagtctacatgatttgtgtatttagttcatgattaactactcctcaagcttgatttttaatttttttgtacgaaaattgaatcatcatatttgttaatatttagaaagatgaatgcatgtttgattgctgatatttaatctcgatcactctagaattgtttaaaaatcatttgagacaaaattaataaacttcacataattttgagatatgatataggcaatttctttggatcaattgagattttcaagcctaacctatttgttgattccctagttactaaattggagcttaaatattgaaattttaatcttatacatgagccttttgaggttagaaaaaaatatatgttattcatcatttttcacactatagtatattaatgttttatatttttaaacgtgcgagacttatgttgagggaaaaatattgatggttatgtattagggatgataaaaaaaattactattcccttagaatgaatgtttgtaagttctaagtatttcattaagaaaagataaaaaattcgatgagaaatatatgaatacttgcaacaatttaagtgtgggggaatagtaagtttatgcatacaaaaaaagatacaagattgaattgttgagggaagttacgggaaatacaaatgggaattatttgagacaatattgtatatgtatggtatgatgtgatttgagcctaaaatttaactttatcatatacttttcaccctagccttacattataagtctataaagccctattgatttttagat

SEQ ID NO: 262743 - DNA, 723 bp, Cannabis indica
ggccgatcgagaaaagagctgggtagccagcagccggagctctgtcgtcgtcagagagagagaggaaacgagagagaagtccagatctaaacagtgagaagaaattagaatttgggattttttttagggatttaggtttttttctttaatatttgaaacccggccgggccgggctcaacccgaaataatttgtaccgggccgggccgggccagaagctcgataagagcccgaataattcgggccacatttggcccgtcaggctgggggcccggctcggcccgcgaaaatggcccagattgacattcctagttcgacctgcaggtaaaagagggagaggctatacttgtgtggatagacatcgtgttacgatttttatatttactacgcaagtatatgcaatcaagtagtatctcacacaagtgaggtcgaaccacagggaatttgattaagtactactaaactatacttatgattctattcggtaaaattataaatttgcaatttgaaaggaaattactcagaaaataaaagagaaagtaaacgacgattaatcaagatgagagattagggaggtgaatcttgttgataagttaccaatgttaatacctaattgctatccttatctcaatgtgaatgacagattataaattaacctaactcttttcagaagttttaggttctaaacaatatgttctctaattaacttcttaattaaatcaaca

SEQ ID NO: 262744 - DNA, 955 bp, Cannabis indica
gggctggtgggtctcctccgtgcttgtgtggtcgacgtttgggatgatttggggtttcggctggggttgagacggctgggttgggatgaacatagagaatagagggaaggagagagaatgagtgtgggattttgagaggggtagttttgagatttaggtaaagtggggttattctaacaattacctgtaatttaagtttttctaatcaattaacctttaaatcatgcatacaaaatcaagttttccattccaataacaaaaatataagaatacaacaaaatacaaataatattgataatgtatgtaggattaaaaaaaaagtattgaaaaaaaaaagtgagaagttatttcaaacaccaataattcaataaacaatatatcaattgatgactattatgtataataatagtcatcaatagtcatgacaaaaatatacatgtatgagtacaaccttaattcactatattcatgaatatattacgataaaataaaaagagaaaagaaattaccatgacttgactgatattaaacttctatgaataaacctttatttatcacttcaaccttctctatataaaaaattatgactactaatgtgttgatgcccctatgatcaagaaacatttatatgagtgatagaaagaatgaatatacatatacatattaatattaggaatacttcttaataagcattacccattaatgggtaataaataaatttaacaataaatattaattttaaaaatatcaaaccattaaattttggtccgatagtgaataataaaaaagaaatttgaatttctatgcttaatttagttacttaattaatgaaaatatcaaaaaatacctatttttacactatatcaaaaatatgtttatttgaaaaatatttaagtcaaatttaacattttttataacttttttgttgaaaagcttttttttattattttttttt

SEQ ID NO: 262745 - DNA, 888 bp, Cannabis indica
gtataagtatatatattcagctctaaatcctctacatttcttgtactttttcaatggccaaacagttcaaggcaattggaaagaaatttagtataacatccactactaggaaagaaaaatctaagctagaatcattaagacaaaatttctataccaaaaacattaaatctgagaaacagagctaaaatttcaagtacccataaagcacttcataaaaacaaccacgaaatgtatggaaatgaaaaaaaaatcttgaatggagtttctaatttggattatattacctgacttgtggggcgatactcgggcaatatgagatggagagaagcttccgttgagagcttcgtcagagcagagacctccaaaccaccactgttacgttagagtagaaagcttcaaaccaccaccgcgaggaagaggacgatcgaaacggaaaggggttcgagtggccagtttcgaagaggacaataggaagggtagagaggctgattttagagaggacgatcaagtagccggtttggagaaaggtgtctatcttcggagagcactggcctgattcgaaagggttcaaaggagtggttttgttctgtgtactcgaagtttaggttggatgtgaacaatactggcaataatttgttggttttagggtatttattaaatttgcatctgttaatatttctcacattttcattttgcctcagttttaaacctcacaaacacaataatccacagttaataacagacgcaaaatgaaagcaagttttcaacaattttttggcttttgtcgtcggtttatcttttaccgtcatttttagcttaattatatattatttagtgtcgttattaaaaagtatagatctaataatttgggtactattcacgtcggtc

SEQ ID NO: 262746 - DNA, 1012 bp, Cannabis indica
taccatgaggatagccaataaaatacaagccttagctcaaggagaaaacttatggcgcttagcatcaagagtagatgcataggcaaggcatccaaaaactttaagatgatcataagggggctgcctatcatgtaagagttcaaaaggagatttcatcttaagcaacctagaagtagtgtgattaataagataaacagtagtgttaacaatataactccaataaggtaaagataaatgtgattaaaaaagaagacctcgggccacatttaatatatgttgatatttccgttcaaccaccgaattttgttgggggcgatcaacacaagaatgaaaatggttgacgccattcaaagcataaaaggcagtaaggttgaactccttggcattgtcggagcaaatggccttaatattcatagaatattgagttggaacaagctaaaaaaattgaggaattagaaaggaaacatcagatttgttagtgagcatataaacccaagtaaaacgagaaaaattatccataatggtaacgatatccttcaatgttatcaatatggaaaggaccccaagtatcaatatgtatcaaatcaaaaggggcagcagtcatattgttttgagaatgaaaaggaagatgtttttgcttagcaaagtgacaaatagaataatgagagtcattcggtttcaaagaaaattgcaatattttatttattgaacgagaaatgtacatagaaggatgtccaagacggatcatcattagtacaagtattatttgctgaaatcaaatcatcagaagtaaaaaagcgaattgcttgctcaaagagaagagcttcccaactttcttagctgtcccaattgttaaattccaagaggggtcctgaatgacacagtgagattcagaaaacaacaacaagttagtgttattttctaaaaaaatcattcattgaaaataaattaaatctaaattcaagaataaagagaacatttttcagcctaatatctttgttaagctgaacca

SEQ ID NO: 262747 - DNA, 616 bp, Cannabis indica
gcaccttcataaataatctccctaccccaaacaattcctttccatatgcaagatgcgttttggggacattttgcattaagaaaggaggtgttagggtagtaactatttttcaagactcttgctaataaagagtgaggcttatgtatgaggcgccacccttgtttggctagaagagcttgattaaattcagagagactacggaaacccaagcctccctcttcctttggtttacacatcttgtcccaagtgctccaatggagttttttattttcctttgtgtctccccaccaaaaattggctgccaaagagtggagatttttgatcaacttctttggaaggcgaaagcaactcatgaagtagctaggaagagcctggatcactgcttttataagaatttctttccccgcttgggagaacattgatgctttccaccctttgagtttactccaaactttatctttgatgacctcaaacacatctttctttttccttcctaggtaacttggcagccccaaatagatggcatgattagggaccagccgaaccccaagtgtattcgcaagatgttgacccaattgcttagggatactgctgcccgtactcacttctgacttct

SEQ ID NO: 262748 - DNA, 857 bp, Cannabis indica
tatccgggtcggtatggaatacgaacaatcactccttcttactgctccgatgtacgtgaagaatcttcttctttggaaacccttcaatggcggaacacaatgcttcatcgtccgtacatggcggaaggggaaatgggttatcggaaaagcgagtttcatgagggtttggatcgtactgtgttctctgggtattctaatggtctgttaatgtcaccattgggaaaactcgatgtgggtattcagaaaaatgagagctttatcaattttgataactctttgtacggtcaaggacaagggtttcttcatccacttgataagaacaaagaagtggttcaacttcaatctcatcttggtattggtagtaggtatgtgaaagaagattctcttggatattttaatgatgtttcacaatcccatggaaatggtgaaatgggttatttgattgatgatcatgttggggaaaactttaggacccaacaacaacaaggttgtttgagtatgagacctagtaatgttgattctattattgttcataattttgataatgttgctaacaacaacaacaacaacccttttggtcaatcttcaagacaaggtagtgctgtttttagtaatgaatatgatgatgtgaaaggaggtttgtttagaagggatgaccaagatgaggaagtgttgggcttgaaaaggaggcttgttgattatgaaggttcaaactatggtggggatagtgagatttcatggttgggaagagaaaaagatgttgttggtagcttgaacaggttagtagctatgccagagagtgatgatagagttttgcatcatcagaggattgagagggatgaccaatatgaaaggat

SEQ ID NO: 262749 - DNA, 563 bp, Cannabis indica
atcatatgaggaacaaccaattcatatccttgataggaaggaaaagattcttcggaataagaccatagcgttggtcaaggtactctggaagaacagtaaggtggaggaaactacttaggagctagagtctggcatgagggcttaatatccagagttgttcaggttagtatttcgtgaacaaaatccttttaacaggaggataattgtaatgaccgcatgattaaaatatagattagtagggcaattagcattacttatctttatttataactatatatgaataattatgttgtgggccccatttttagaaataggcattaaggttattatttctcaattttggagattttattaaagtctaagtgtattattcttgctatgtatgaatttacaattttctatgttttttgtttcagtaacgataaaaaatagtgatggatggccattagagtcacatgggtgagtttagagcccttacttagtgggataaacatatcactgtgtagagtatcgagtttaggcagggtggtgatgtatgaccattttaccccttaacgccttaa

SEQ ID NO: 262750 - DNA, 555 bp, Cannabis indica
taaaaatctaacataagtatgatataggagataatctctacatatgatgttatggttttgattaatatggatgtatacgatataatttttcaataaatataattatgataattgcagggtcagttctggtatgtatactgtgaggagctatggacgagcaaacggtctaaaacgttggtagagtcttagttttgtttatagttagtaaagtaatatgagttcagtgagatgttttaaatttattttaaaaattcactcaactacttattttgtttttaagtatgaatgatcattcgcttttgtatattcattgtaaaactcgctgtgtattttcaaatagttttgagtatttgcaagtaatgcgtcaaaaatagtattttttatatatatataaaataaggcaaaacatatttcggagcgttacagttggtatcaaaaatttgtagttttgttttttttttttttggttagtccatcatgaaagaactctaaagttcagtgtgcttgactaatttgagtaaatttcaagatcagtggcctcctgtgaagttttac

SEQ ID NO: 262751 - DNA, 653 bp, Cannabis indica
atttcttcataaacgtagctgttatatcggtatgtgatatgtataaaatttgatcataaatatttacagaaattatattattaaattgatttttattatctgaacttttgaattatgttagataattagcaacaaatttgaaatagttggtataatttgagagatttttctcttatttttcgcaaaacaaaactctacaaaattatcatgatagtagattggaaattgattctttgtattaattatcataccagagttggatctattacaaggaatctaccaagtttagagctatactttggatcattttcgttgcagctttgggctagtatgttttccttattcttctctttaaatttactgagtttttacgaaaatactgaatttcagataaaaatttagaattttactgtcacacggaattttttataaaaatactgtctttttataaaaaggtgaataccattttagactgtgtattttgcaaaacttactgattgtgattggactctctattttgttaaatgacaaaatggaccctgtattttctaaaatggtataaataagactctgaactgattttttggcaaaataaaatttaataataatccgatctaaaagtgttatgagaaaactgtttatattttctatat

SEQ ID NO: 262752 - DNA, 1780 bp, Cannabis indica
ctgtactaattctggacctaggtatttcttcttccctgtctcatcccaatggatgggagatctacactttcttccatacaacagttcatagggagccatccctatcttactttgataactattattgtacgagaactctttcaacgataggtacttactccaggagccttcgaaatccataacgcaggctcgtaacatatattctagtatctgaatcgtcctttcggactgtccatctgtctgaggatggaaagctgtactgaactttagtttggtacccatagcccgttgtaaactttgtcaaaattttgaagtaaacttcgaatctctatttgaaactatggattttggcacaccatgcagtcttacaatttttttaacatacaaatctgcatactgatccattgaaaaggttgttttaactggtagaaaatgtgcagacttcgtgaatcggtctaccacaacccaaatagaatcaaacaaacctgtggttctcggtaacccagacaaaaagtccatcgtgatatcttcccacttccattcaggtaaggttaaaggctgcaacagccctgccagtctctgatgttcagccttgatctgctgacaggttaagcatctcgatacgagttctaccacattcttcttcattccgctccaccagaagtaaggtttaagatcttgatacatcttggtggtgccaggatgtagggaatatggagtagtatgagcttcttcaagaatttcattcctgaggtccgcattattaggaacacaaaccctggtcttgaacaacaacattccactgtctgacactataaaggctgtggcttgtccagctgatacctcttctctgatcttttctaactctggatcagttaactaggcagctttaattcgttctaacagattagattgcaacgtcaagttatgaattttgcctataacaaactcgatgctagatttgaccatgacttctgctaactgaggtgaaatctgaaccatactagtatctgcccgggacccttcctgctcagggcatcaaccactacattggccttcccagggtggtaaaggatctcacagttgtaatctttaactaattctaaccaaaacctctgtctcatattcaaatcattatgggtaaagaaatatttgagacttttatggtcagtataaatttcacatctttctccgtagagataatgccaccaaatcttcaaagcaaacactaccgcggcaagttctaagtcatgagtcgggtatcgctgctcataatccttcaactgacgagaggcataggcaataacccaatgagcttgcatcagctcacaccccagaccctgtctggatgcatcataataaaccacagatttttccttgtcagaaggcagagttaacactggagctgtaattaatctttgcttcagctcttggaagctagcctcacacttgtctgaccacacaaaacgctgattcttcttagtaagctcgattaagggtgttgaaattttagaaaacccttccacaaatcgacgataataaccagccaaacccaagaaacttctaacttctgtcactatttttggtcttagccaatccctgacggattctattttccctggatccaccttgattccatctttgctaacaatgtgcccaaggaaggacaactgagatagccaaaattcacatttcttgaatttggtgtacaacttatgttctcgaagtcgttgcagaaccatccacagatgttgctcatgctcctcttctgattgagagt

SEQ ID NO: 262753 - DNA, 1004 bp, Cannabis indica
tactagtacccaagccgaacaaaaaatggcaagtatgtattgacttcaccgacctcaataaggcgtgccccaaggactgctttccacttccaagaatagatcaacttgtggatgcaatagcaggacatgagatactaagcttcatggacgcctattcggggtacaatcaaatcaagatgcatccaccagaccaagaacatacaagtttctgaatagatatgggtctgtactattataaagtcatgccatttggtcttaagaatgcaaaggctacataccaaagattggtaaatgaaatgttcaaagaccaaatcggatgaaatatggaagtatatgtggatgacatgctcgtcaaatctaggaaggttgggggcatatagatgacctggacgaatgcttcaaagtcctcaggaagtacaacatgaaactcaatcccctaaagtgctcctttggagtcagctcgggtaagtttctaggctttatcgttaacgcccgaggaattgaagccaatctagagaaaattcaagccctcctggatatgaaatctcctacaaaaactaacgaagttcaaagtttgactggttggattgccgcactcagtagatttgtttcaaagtcaacagacaagtgtgttccgttcttcaacatcctgcgagaaaataatcaatttgaatggacgggggaatggaaaaaagcctttcaagagctaaaaatgcaactcgcaaagcctcctatactctcaaaacctttggacggagaagaattaggaatatacttggctgtcatggaatatgatgtaagtgccgtactcattagggaagagaacaatgtccaacacccggtctactacatcaccaaaagactcattgaagctaaaggccataacccattgatagaaaagctcatctattgcctaatcatagcaataaggaagctaagaccctactttcaagctcatcttgttcaggtatacactgaccaaccattacgtcaagtattgcaaa

SEQ ID NO: 262754 - DNA, 859 bp, Cannabis indica
gtgcttgaaaataaccgagttattacctcagaagggtgtgtagagattcctttattggttacaatttttttcacttttgaaaatctgatcctttcaaatttcgcaggcacgagatgaactttgccgtgaatgtattaggtacttatgccatgactgaactgctgctgccatctctagagaaagcggttcctgatgcacgggttattactgttgcttctggtggaatgtacactgcacctttgacaaaagatctacaagtaactttcctcatgaaccattctgttttactaaattgatttgaacacgacgatactaataacattttccattaaattttgctcttgcagtttagtgatggaaactttaatggcgtggagcagtatgctcgaaacaagcgtgttcaggtttgatgaactaaacatagaatttcagtttggtactctttagctatttggttgtgcttgaagtatttattttggttaaaacaaatggaaatttcgatcagtagataattataggacgaatgtgtttcgagttaaggataaagccagatctctcaatagtttgtgttcctatacagtatgcatattgtgtcaacaattaaacttctcatgatgtaaagggggtgtgaagatgaaactgtcattgtcttctcaaccgaaaagtcaagagagtagtaaagaatctgtgctggtgttttgtatgggaacaaagacaaactgaccatgtgaatttcggttatgacattttgaaaaacaaactcttctttggccatgaatgttagttttactcattcgagtccaacctgtaacttcaatagcaatcgttatagttttctttaatgtaatactatttcttt

SEQ ID NO: 262755 - DNA, 778 bp, Cannabis indica
tttatagtttgttttttagttgttcgactattattttaattgttctcttttgttgttttagagctgttttataaaaatatagtacttttgtaaacaaattttgtaaaattataaaaaatttcccaaaattcagtattttttttgtaaaaacctctttttctttttctaatttataatgggcttctaatacattgggccaatttccttttaataaaattttattagcccaataaaaatttgtaggctgttcgtacgtttgtgtaatatatacacacattcttattcgttttcaatgagtgaagagacctatgtagatgtagttaaaaaaatggggcattttataaaaatactggatttggggtaatacttttcaattttactaccatacggcagaaattacatttatactgtcttctcccttttttttttccttttatactgtaaataccaaaacaaaaatatgaggcctccgtctttcacaactacagacaaaaccaccacaacaacatcaggacaaccggaaaacaactattaattccgacaaaattgaacaaaagtagtgaaatcgacgtcaaataaataatcatgacaaaacaactgtaaaacaacactaaaacaatccaacaaaacaaaagaaaaaaatgattaaaaaaaacaatctgttggacaacctcaacagcagatgcaaaatcaattatatttgcaagtctctattcctagaaaatcataattaaaaaaactactaaaacaacactgaaacaacacaaaaacaaatgaa

SEQ ID NO: 262756 - DNA, 1925 bp, Cannabis indica
aataaataaaatcatgatttcttatggtaattaagtaatattttaaattaagtttaattttaattaattacctccgttgagccaaatgacgagaggtttagacaagggtttatgaagagcctcagtgagccagtaaaagagtgctctaccagccacttgattaactgtaacataccctgaaaattggtcaaaagtgacctttggctgaccaggaagtgccttaatccgatcaccttcttcattttcctcttctatgcctttgtttggctctatatctactccaccattactactaacaggtgtcccacacagaaaaaagctgaccaaacaaacggccaagatctgtactaccactactcttgctgccataaccataagctacctgtaataattagccccttaaaaataaaaatcaaaagaaagaagaagaagaagagaagaaactaaacaaagaaagaaagagaagaagtgtctttcttcctagttgtgtgtgtgtgatgggaagtaacgagtgtattattattcagaattggattaaataggagagagagtagttgtgatatgtcatcactatttactgatcagtactagtaagtagtaacataaatttggattgagaaatgatattgttattgatttaattaagtattgggtctcgtataatttatcattagtcatttataagatgatatgtctaaaggtgctaagcactactagtatccaataacaatgctcatctggattttggttttggcacctctctcccaaaattaataagttgctaaattgagcagccttcacctgtgatatgacaatactacccccgtgaccataattaacatatatatgtaagtaactctatctagggtggggggtggtcttaattggtattaaaaatagggggcaatggggatcacatgccatccgcgtgcccatgaaacaatgtccctttaatcctccattaattcctcttgtattcatataccagactttgactaacttttatctttgttggctttattattctctccgatcctactactaccacccaatgtttatttttattaatttgtctaattcaattctttttgtttttctctttgattttcttctttctgtttttttgtttggataagatacaatgaacactgtgtttttattagatataataattaattttaattcagaatataaatatgagaattttgtcattatataaatatgtatatttatggtagttgagagcatatttaattttgggataattactactatatatatttatgtagtgatgatcttaatatgcggtttctggccattattgtttatgggaaagagggtattggacaggtatgtatccaaaaaagtagctagctaggatgctaacctgggatttttttaattcttgaaattgaaatgggtattcaatatcaattgtcaaatgctagcttgctgtaatcttcattctatatatatactcttaaactgcatttggtatatatatgcatgtgctagtacactcatcaatatattaatattatatatatggtatatgctgacttttcaagcactgatattgttattatatgtatgaatgaattagcttcaaggataatttaaattgtaccctttacttctaaaagttgtttaattacacttattccacatcacagcctcatttgagattttcacacatcaaaatcttggaactatgtacaactattactccttcctatttaatatgtaacccttaattatgtgcacatatgtgatgccatattaaatatgtacatattattagtctattaatctcttatttatgtcatttaatatgtgcatatatgtgattttatttcaactctcattttaatttattccctcaattttttaatttttaatttgctctctctttctcgctttctctc

SEQ ID NO: 262757 - DNA, 428 bp, Cannabis indica
acttaatcttttattatttttttgtggcaatacccctctaactttatttctctttgcaaatccaatacttctatcaaatttggccaataaatgccaacatgaattttgttaaataattatttacggttatttcgctcttttattttattttagtcttttatgttacttgcctatataagactttcttattagttatatttctttacttttgactttgtaattaaatgaaatcctaatttctctgcatctcttttatttttattagttatttttctcttctcaaataattatcatggtatgagagctaaatttatgagagggtaattacttaagcgtaatcatagtttcgcagatctaacttttcaagcgtctatacaatcattgtccgtacaacattagcacagttcaactattcctaattttcagta

SEQ ID NO: 262758 - DNA, 872 bp, Cannabis indica
aatcctcttgtaagtgtactttttgataagagaggtatcaagcatggatgacttacgaaaagtaccatagaatgtatttaaaatagcttctcaaagtatatcaaaatggagaaattagtctaaatatgtagccagaatagtaaggaaacccgacgactcaccaataataccgaatttgtaaggtgtatctggattgatcgctggaggtgtttcgaaccaaaattctctggctgtatcatcactcccaattttgtagtggtatttggtgttatactgaacttgcacaagtcattacatatatgttaaaatgaactatattagtgtgtggtgctcaacagcatcgatatgttaaaatgagctgtattattacctcaaggttgtcaacaaggcagtgatggatataacctgacttatatttgtagaaagtgtagttgctgactgtcccctctgctgtgaactcatatttattctcagattttccatattgtactttacttgatcctggttcattgggtgaaacccatgagattattacagctctaccatcataatcaccttgagtgatgtgaacctacaacccagaaatatgaggttcatgaaatacaaatagatatgggaaagaaatgaaatgaaacatatgatagaatagataatgcaattatgatcaactaaagtactctaaaaaaaattattacttgttgcggtgcattataccatttggaactgcaaatgcttcatcatcaagagggatatcagctgctggccacactgaccgtcgaatgtgcttgtatccccgcattcgccttgtctagatgcttgtaaagagaaaaaatgtgactatgatttgaaacaacaggattgcctcgtagcaa

SEQ ID NO: 262759 - DNA, 3341 bp, Cannabis indica
aaacacagtaaaaaagtaaaaaatttcgcctgacagtatttttgtaaaaaaataacaaaagttagtataccatgtaaatttcccttatctaattataatataacatacatatttcaaatgatcaaaaatattgctttacaaaaaaaaaaaaatcaaaaatattttagtaaactatatatactaatattagggggtagtgtccaatattataataagaggtacgcgttataagtacttatatattaaattaacaaattataacaataataataataataatatagtatctctgttattaataatatatattagattatatacaagctagccgtacaataatgatcaggacaataccgtggccataaatcatatataatattatatatatatattaatatttatcgataaatatatttaattcaatattaatgcttttattggtgtagtattacatgtacaatataaattttatatatatatttggtggaaataattatgtctttttctcaattctaactatcacagtactaatgaatgtgtaaagaagattccgaaagtaatgacttatcttatttccattaaccatacataatatatttggtattttattttatttttttctttctggcctcgtatacactaaatactaataatgtaatcttaattttttttttacattaatatattttttgaagatgaattatttagtttatttatgggtggtaaacatctgtacgttcccagttattattttgtggttgatattcattgataaaataaagcttaatttaatattatggagccaagtactataagagtattatatatatgtactgttattattgatatactttaatatacattataatttaacaaatatataacatatgaaaccattaattatttacaatatacatagcattggagatcttaaagtgtctactaataatgctcatttattttaaaaggcaaattacaaaacaattatatatatatatattaattatatataaatatacatttttttgagagggctatatgtacagccccttggtcaatgtgaaaaactatgtatatatatataaataagttgatgttagtgtaatgcacattattaagtttaattaggtgatgttaaataaaaaatcacttgaagttaactcaagtgaccatagaaaggtgtgtgtgttggaagttctgggttcaaattctaaattatgcattgtgtaatatataaacgcttaaattaaaaaaaaatgttaaaatatatgtatgtttaattttttgttagttagataatgtattcttttttaatttttgaaataaggtttgaaattttgatctttgaagatttttttagtttgcggctacattagtgtgccatttaaatgtgattatatatatacctattttatatgtacaataaaatattgtggtgaatcattatgtacgcccaattaattgagcgaaattatctcttattttaattcaaagttaaatcaacaaatttaaaaatatggttataaaaatatctacattaatatttttaatattttaaattaaaattgaaatttccttgtataaagtatttacctaatttttatttttaaatatatataataaaattataaaattaatgaagaatattctgttaagtaatagtatattttgttaaagttaacatagaaaattaaaaaatagtaccgttaaaccaaaaatttcgttacatagacacatttttatatagaatagatatttagttgaagatattaatatttcatcttacaattatatatggtggttggtttcgtaacttaaaattattttcaatttttaaaaatagattgtagatttaaaaattaatagggtgtgtttggctaatatttttaaaaatagttttctaaaaattgagttacaaaaattagaaatagaaaacattaaaatgctgtttctattttataaaataatttttattttttttatctaacacattcttctttaccttttcactcacattgaaccgaacccaggcccaaactctaaacccaaacttggaccctgtacctggacacggacccaaacccgaacctcgaacctagacgtgcgacctaaacccgaacctggacctggactcggacacagacctagctagctctagctctgggatcgacccgacctcggacttggacatggcctagggaccgactcgaccctaccttggatcccgaacctcaaggccgaacccaaacctcagacacgggttgggtctggggtccaggtccgagtttgggttcgagtctacgattcgggtttgggtctaggtctagggttaggtctgaggtgggctaggttcatatcatcatagtatggtgtagaatattaaaatttttttgagtaaaagtaaatttaaaataattttaaaaaacataagccaaacaccattaaatttttaatataacaaagaaattatttttatttctactactactagttttttgaaaactgaagtcaaacatcctcttgatttcttatttttctaataaagagtttttaatttattaaaataatattcttgaaattaagtaaactatagaacataaatgatgacatttaattcaaatggaggtacattgcaaaatgaaatggccctagctatatagcctgctggctcagactaacaatattcaattgcccacccaccaattcatgacctcccatatattagcaaatttatatataataaactaaaaaaattattattatagcaaaacacagcaattatgtactttcataaataattaaaggatgtaaatcatggtccaacaataatattaattagacagaatgataattaaactaatataccattattatatacatgacataattaaaattaattattatatattcaagtaattatacatagtagaaccaagtcatgattacatgatgtttatatatataaaaaagaaaacaagctagtgctacatatatatatataaataataataataaaataaaaaaataatagaatacattatcttatgtcacccttgaaacttgaaactctaatttgtataaaataataattataattaaaccatataattatccaaataattagcctaaaacctctaaaaatatacattctatgtagtgctcacaaggtgtttgctcatttgtctgagagagaattgtagttgaattttttgtgaacaaaactgataatcttcattggggttttgtttagtactcatcctttggtgatttttactacccaaacgagaagtgagagtgaggaagatatgttctgagcaaggaatggtgagtcctcccatggg

SEQ ID NO: 262760 - DNA, 631 bp, Cannabis indica
attgagtacttgacttgctatgggttggcatgtactctttcattataggctcgaaaaatatgaagaaaaagagagaaggggattcgaattctatagaaggagactctcaaattctagttgtttggctaagttagaaaactaggttattaggttggataagaatgagagccatcttattccttatatatgatttctcctagggttagatttaaattatatgaaaattaaaaaaaaaaaagataaaaattagctaaaattctccttaagtggccgaccatacaatgggccccactagttataattttgtcattttattcaacaatttatattttctttcactaatagtcatattttcaaatttaatcctttaaatgtcaaaactatttatttaataattataattaattatcaaataaaattgtcatttaacttatttattaattagacttaataaagtctcttagttaacaaataaatcataaaacctcttttcttcacaattaagctattgtttagtgaaaattcataaataagatatagtctaacgtatgaggacctcctttccttctgcccactcttcgttcacacggttctcaaagcagagaagaaagggtgggcagctggtaccacg

SEQ ID NO: 262761 - DNA, 1875 bp, Cannabis indica
gtttaggtgaattgtaattcctttggaatgggctttcaagttctaataaagaaaccaaacacttgattgagctttcttaaggaatagcaagtccattccaatgttcattcatgtgaaccaaacaccaccttagtgtttttggttactaaatattacaaaattttgaataatttataataaatgttaatggctattgttattaatattttaacacgaccaacatcatagaaaatgatcctttatatgtagacttgttgttatataagagttttctatattaaactaaaatatatgaattattaaattgtaacaataaaatataagctaattaagatttttgtctctgaattttgacatgtactaaatcatgttctctaaatttttttttcattaaaaattctcttcaactattgagattattggatttatggaaatttattcaattttattcaatttttctaattttcgattgtccatgtactaaatcatactctttagatttgatatttatcaaatcatgcccctcaaatattgatatgtactaaatcaagtcaactgaactttcatctatgttagattttctttattaattaaaattagaaaaaaaatcattaaatccaacaatgttaattagcctaaaaatataagggacagcttggtactcctctttcaaggaaaaagtttccccagttgtgtaacattaagaagagaaaatacaaaatatggttaacagaacatatataataagatgtagaaatcttacttaggatatcgccagcaaagaatttgttaggattggcccaagtggaatactctgaggggttttgtgggacggtccagcccatgctatctccaaccacatgcactgttgttgattgtgcaaacatgccttccacaaatactgctaccatgacaccaacaacaactataacacatttttccatttttcaacatacacactcttctaatattgaaggtagatgattatgtgagatgcttgttaagtggatggaatggtatggaacctataaataatatcaagggagtaatgtaaaaagaaagacttctcacgtttctgttgaagggtctaaaccacggcgttgacgtggaattaattggcacatacaagtaaaatagaggaaaatgacaaggaaactcaatcaatgttttggtaacttgggaaataattggtatccatttttcaaagttccatggtctaggaaagtcaatacttaataatcatttggttttctccatatacgatcaaagtagttttatggaagatgatttattattataattgagaattttatttcattccacttgtaatactacgatttgtacataattttgttttgtcatctcaaactcattaataagatttagttaatgtataagtataaccctttttctcaatcgactattaattattaagttgccaaagtttttggactttgaatctttctcctcgagaaatgagactttattcattaatttcttcatcatcgtaattatgaattgttgagtaaaatccacttataaccagtccctttacaatatatatccacatcagcaaagcaaaaataaaaacaagtaaacaaaacagtcctagggtggcttcgcctctagtggatcaaatcttagcagttagttacaactgaaagtgtaactaactcctaagatcttgatcaaccgactttactactctataaaagaacagaatcaaagcaaataacctaagatctaacacagaaaatcagatcagaaattacagagagagagaaagtaagagaaaaccctagttttgaagacttcagctccaagatccaacctcgagaatgcagatctcatggtgaggaggcagaagggatgagt

SEQ ID NO: 262762 - DNA, 1108 bp, Cannabis indica
  modified_base (656)..(656): a, c, t, g, unknown or other
gtcgagcttgaggttttggccattagtctaccatgccatgaaaacgttgtcatcaaagtgcttagtgcaatgcttgcagatgacaggggctaggagctcatctcttttagccttcttcagggcctgatttttaaaatccctgagctccttcacctcaacagtcaaattggttgtcgactgcaagtccgcctaatgcagctcctccatagacttcagcctgacatcagatccttgacctcttccttggcctccctcagctcgcgcctcgccttggccacgacctcatctcgggtcttcagctcatctgccttggcctgtaacacctcctgatgcctcctctctgcttgtgcctccctctattgggcttcctcccaaaacactttcctttaagccgctaggtctctcagactcttcatggcctcgtccatgcccccaaactccgacataacgtacccactgatctattaaaacgtctttgagaggcgtcctgtctctgcagcaatctagtagaaaaacgagttaagtatgagagatcaggtgccacagggtagagcacaaacgaaaaagaaaaaccaataacaaagacttaccgcggccatagcagcgctgatatcctgaacttgataaatggcatttgtgaagcgcaggctgcgtancttttgcctcaggcggaatccccgagtctaagctaacggccggagtatcctttctttgaggcttcttagaagactcagcctccaccatttttcccttgcgcttccggtccagcggggccacgatcttgccttcctcctcctcctctccctccccatcctcgtcgatcaagacgatcgtgcctaagggagcgctggaagatgacctccccgaggtcaccatctgggcaggcgccggaggaagggaagggttcgggttgtaggtttcggcaagagtcgccaagaggtcttccattgccctggctgcttcaaaaagaaataaatgaagtgtcagaatggctataggaaagtatgcacatgaaaacaaaacagtaaagctagtcctaccctgactatctaactcagccctagcaaagtcttgaactacaatgctggcctcatcatccccaagaaag

SEQ ID NO: 262763 - DNA, 883 bp, Cannabis indica
atttcaagttggctcatggaaagtttagctcatgcaaaactgtctcttcggaattccatgcgcaattctcctcctcgcgccagcttccattgcatttgggagattttgtccaggttaagcaacgactaggcgagctagtccgggcctacatcagcagattcatgacggaagcaaccaaagttttgcaggtaatcaaggatggaaagttatccgcaatactgggaggcattgaagtcctcggtgaactttggaaagatataaggaagaacgggctggtagactgaatgattgatttccttgaccgatccgaaggcttcatcaagctcgaagaagccattcaacgagcgaaaggtgaataaaacccgggcaagtcaaaggctccttccactgggaaatccgcccaacttcccaactattcaaataattcaagctcatgtggaaagcattcaagcaacaaccacaagcaaggaaacgggaagaaaggaaagtttagtgataaatccggacagactcctcgagagaatcacgccaaatacactgcattcacaattctgactgaagatatagaaagtgtatatatggcaactcaatttttgatcccgtacaagaagcccgggcccatgaataaatataccaacaaaagggacatgacaaagttttgtcggttccacggagactacggccacgacactaacgaatgttacaacctgaagcgggaaattgaattcctaataaggaaaaataatccgcacatacaaaagtatgtcaagaccaaccgaggtcaaaacaacaaagatttgatacctccaccagtagatggacattacaagtcattattggaggcccacacattgctcgatatttgggcaaagctcgggagagg

SEQ ID NO: 262764 - DNA, 1039 bp, Cannabis indica
ctttctccatagtctacgccaccacacgaagccgttcctcagcctccaccgtcacctccatagcctacaacgagcaaggtaagattttaaatttgattttaggttttaggttcaattgttatgttattgagaatgaaattccagattttttttttctattttgtgtgattttggatgtgggatgtggaactcggcggagaacgttttcgtgtgatcgtcatcgttcagagagaatggggaagacgaggaggcgctccgatgggcggcgctggagaggcttccgacatacaagcgtgtccggcgtggaatttttaaggatgtcgttggagataccaaggaggtcgacgtcagcgagcttgagtctccggagcagaagcttcttttggaacggttggtcaatgccgttgaagatgatcctggccgtttttttgatcgaatgagaagaagatttgatgcgtaagtttgagctgaacattttttaagtgactctgttcggctgctgagaaaattatttctaaaaagaaaaatttgattatacaaggtttagccacttattcagatttgacttgttagtatgcttagctcaagtctaatggtagcgtatgagtgtttttatcatcaattgagtagtaactcctctcttatttataattttgttctgaaaatggtggctttgcagagtagatttagagtttcccaaggttgaggttcgatatcagaatttgaaggtcgtttgtccacgtgggaagcagagcgcttccaatcattcccaacttcatatcaaatattaaagccatagatcaattgttatttaggttttgttttatttatttttatttattatttagttcgccattttgggattttaataattgtcacattcacatattcggtggccaaccttagatgctacgtgtggatgcataaaaaatttaaaaattaaatatctatgtactccttttcttattataaaatcaaatacacatactattatagctacacattttacaaaaaaattaaatttttgtatactatattt

SEQ ID NO: 262765 - DNA, 940 bp, Cannabis indica
caaaactaaaagtttcactgtcaataaacggtgtggaaatatcctaattattgaggaaacacaaaaaataaggcttcaggaaaaaaatccccaaaaaatggtaggccgcttctctaaaaatggtaagtcattttttcgggacactgctagaggaaatagtagaccgtttttcagaaaatagtctgtcattttctgttgcagaaaaccaaaacctcatttctaacctcaagactatcccaaatcacgcaaagctctaaaactcctgttttgatccaataaacataattgaacaaccaaacgcaatcacaagcccttaaaatcaatttcaccattaaaggaccaagtttgagcttgaaagctcaaaccttgatcaaccaacaaaaccagcatataacaacataaataactttaaatcaactccagaaaataatctcaaaccaaccccaactcgtacaacaccaaacccccaaaacatgcatgaaaaactaaattttttaagaaaatcaaagagaaaaggcttaccttagcttagctactagaatccttgaatttctatgcttaaactctctgaaattggtctgaaggaagaaaatcagtttttggttgggatttccttgtggccgactagagagaaagagaatgtgatggaagtggtttttttaatttttagtttagtataatatgacttaattaattttatttctactcaataacgtaaaataaaacttagaaattactaaaaattccacttaaataaaataaaagtcaaaatgacaaatttctccatttacttcactaagaagtaacataaccccttagggataaaatggtctaaacccatagccccaaataatgctgacattctaaatgtttaactaccttgcctcactaattctaagatactccactggatctaagtgactcaaacagtcaagtcgtc

SEQ ID NO: 262766 - DNA, 1209 bp, Cannabis indica
tacaccgtggacggtcgtcggtggcgttgacgccggagatgaagagagaaggtggcgtcggctgtgagagtgggtttgggatgggttagtttggctgagagagaggaagagagagagatggtttgaaatgtgaggggtagtttaggaaaatcattaaagtggtcatatatgaccaatttttaatgattatacatttaggggaaaaattatagggtatttaaagcatggaatttcaaatttcccatataaatatatattatgcatctcattgatatttaaaaattatcaaatggtacgtaactccaagtagccagatttgacaatatatgctctctttttaattttaacaagttttttcacattggacacagtagtgtccaaaatagtagtggtgaaggctgcttggttaattagacatatatttttcacaataatgatgttgggatcgatcactctttagtccacaaatatatgatatgatcccctttcggaatatggaatgttgacacttgaggctgcccaaatgattaactttttgttacagaaaatattgaaaacaggttcaaagaaaatagattttttttagtataattttttatattgtaaattattttcaattttttcaaaattttagtaaacgtgcatgcaataaactatttaaatactctattactatttaagttttggttttaaaatattagtagaattataaaataaaatgataataatataacctttagacttcaggaagaaaagctaagcatataatgaaatttcttttcgtacttaatattgtcttttaccaaattagatgtattcaatttcaatataaatacttcatcataattttcttcatagaaaaaacttcatcatgatttgaatgaaattgtaaagagatgatgtaatttcctcctactgatcttatatatcttcctattttaatttaatgattatgatccttatatacctaatacctatttgttttattacaatatatttaatatagagaagaagaagtaaaaagtacaagcaaaagtgatatgaatcacaaaaagataaatgtatacagattaaatttacagaaaagaatgacttatatatataagacaaaattacaccaaaattttgaaaacctacaaaataataaaattataaaatataaggtacttgattagcactaaacaaacaaaatgttaaaaaaaaaattat

SEQ ID NO: 262767 - DNA, 521 bp, Cannabis indica
tttttattttattctcattatgtctcgattaaattattttctttttttattcttatttaatttattatattgcattctttgtatttattatatttttcatacttattgttctacatttttaaagtgacaacttagattgtacttaggatatttggtgggcaagttaattttgagtcataataagataaatttttgttactttgattaatgtaaatatataacatttttgaattttatatgtgtgtatcatttttttcttctctctcaatatgtaacatctttcactcataccatattgttcctttagtattttcttatgtccttcaataatagatttttgaatcttatttttcagtgttatctaattagtcaatcgtgtgtaactttacattattgtggttaattttggttgttgatagttcaagtctacgtaataaatttttggaccatagtatatattttatttttaacaagtaaatacaagtaagatttatattgttatcttaatcactttatattaa

SEQ ID NO: 262768 - DNA, 1579 bp, Cannabis indica
ttagaatggttcatctcggttcttattaccgagtctaacctggtaatgccttgaccgcataacccttgaatctcaatacacttagcatggcatagcatttacacaactcatatcactagggtaataaccctaggctcttaaaccgctcatgttaaggtaatcactctaatcccagttatcatttactcatatatattatttccaatataggtgccaccatgcataactctatgtgctaactactgtctgacctgatgtcccacaattaaagagattccaagtccctgggtgctcttgaccagatgccggtaatcctagtcacaaattctgggattttcacacatagggttaacccctgatttcatattcataaaatgtattcatggcatttaaaattcagataattacatagatctcggaatgagctttccaacgatatatagaactcccaaatcggagttcggaataaaaagttatgcactttaaaagtttgaactcaaatctgcccaaaaattccatggcgggccgcaacatgcaaaagccatgccatgacacttgggaccaactcccagttccagaaaggaggcgcaccgtggcattcaaaataccatgccgcgacacccgaattcaaaacccaaaaaccagcagcaaaaacacgagaatcaacccccaaaactgaactaaaccatcccaaatcacaaccaaactttcaaatcatcaagtagggttgctaacaaatattagacggtcaaaataacatatttcatgtatcaattccagtagttaacctctaaaatcagattactcaacaagcatgaaatcaagatcaaaattaacaaaactcaagcttttaaactagaacttcaaaaccatatatctcaattaattttcagcagcaacataccaaaaataacatggcttccaacctagagaatgccctaaaattccatccaaagctcaacaacataactcataacaagatcatgtaatttacactttaatctatcaatatcaacaccatttttccatacatgcataaacaagaacatctcaataatatcatgctttttccacaatcataaccagcaagaattccattaaattcagtagagaaacaacctcaactttaatccaaaagcaagcttaagattccacaaacacaaagcttcaaatccaagcctaaccaagcaattcttcaagattttccccaatttagaaaataggtttaaagagagagagaggggttcgggtttgggaaaacaaaaccagaaaaatatcattcctttttcctcaaaattcatttcttttattgaatgtaaatcaagggttaaaatgaccaatttgcccctatggctaaaatgcacatctacacacaaccaaggttatttaggtcaattcacacacacataaatccaattaattttcagattaatcattatcaaataaaattccaatattctaatccaaaatgcatttcgggcccaaacccggttcggcccgaaatacccagttgtgactataccgcgccaacctgttagaacacacctaaaaaagataacacatgcatactatataataa

SEQ ID NO: 262769 - DNA, 648 bp, Cannabis indica
tggtgcaccccaaggagaggtactcggcctcgtgaatcgtagatcaagtaggttctgtaattggactttcaattctttcaattctaccggtgccattctatatggagccttagaaactggctcagccccaggtactaattcaatttcgaagtcaatctctctttttggtggtaatcccggtaactcttccgggaatacatctggaaattcacatactactcgaaccttttccgacccctcaggtgtatcttttgtggtatccaacacactagccaggtatcccatacatccttctcgtaataattccctggtcctaagtgccgatatcaaaggaatccgagatccctgcacctttcccataaaaacaaatggaatctcaccctctggttcaaaagtcaccatttttctcttacaatctatagtagcattgtacttagtcaaccaatccattcccaggattgcatcaaaatcttctaagtctaattcaatcagatccactgacaattctctcccttctactaacactgggagagaccttacccacctcctggagattaccacttctccagtaggtaacaaggtaccaaatccactagacatgatatcacatggcctactaaatttctcaatgattctactagaaatata

SEQ ID NO: 262770 - DNA, 948 bp, Cannabis indica
ggtttagctacgttaaatgtgtgaaagccgctttgatcctatgttagtataatcaatggacgagattgttttgaaatacctataattatgatatcaaaattttaaacgcttataaggttacacactatcagaaaacatatgtggcccaagtgggagattgttggattaaaatccgcaatatggctcatatgtatattagtgtattgctatttgaactttggcccaaaataaagtgatcattttagtaattgtgggtcatttggtattaaagtgtcatgggctaaatgtgtagataccgatatttctaatttaattgaggggctaaattagaaatacttaaaattaataacctagctatgaggttataaatttgtagtggtccccaagaaataagagccaatttatattctcatcttcccccatcaagagagaaaattagaaaaccctaagttttgttttcttggaagatcattacccaaaatcaccacaaagatcatctctacaagatggattaagatcatcactttgtatggattaaggcacgctttcgctatttggcttcttctttttgaatcaacaaatgtattctttagatctatctatgtttttcatactaataatatgtaatatgtttatctatagaattaaatcatgatattacatatttaatgagtgataaagaattctaacatgagtaccccaaaataacctggtatttcttaaatcaatttatcttaataatcccatcaatatttctaactaaaactgttgtgatatttttggcctccaatcgggtcttcaggatcactgaacctaaaaatattttttgtttcacaaataactcatattatatccacgcatttcaaataaatctctgcaattaacaaattatgcttatttatccacttatcgggtcttctgggtcacaaacctaaaaatatttttatt

SEQ ID NO: 262771 - DNA, 529 bp, Cannabis indica
tatccatatgaatggttagatttactttcgtagttttattctagagttcctattatgatcataataaattaggctatcattagtgtcatccaaataataatgggctaaaagtttaaaattttcctactaagataaggtactttgatactatgtctaagaatttcattggtatcattctctattactccagtaacatgttaattgaaatacttacaggatcaagaataagttctattaatttgctagttcctttattatattatatccatgtctaatcaaaatatgtgtgccatagaggtattgcggtgtattgagtattagtctagagttaaaaaggtttgaactacatatatcaataattcttcaacccctaagtgttatagatatcatgtggagttatgaatatagtctagagtttaaaagatataaaacatctttgaactgcatacattgtttcttaacttcttccacccctatcagatgaaaagatatttttattaaacaaaatcttaatgattgcttaagaaat

SEQ ID NO: 262772 - DNA, 511 bp, Cannabis indica
attatattgaaatgagttttttttagggcataaaacccaacataacctccatggatgttatggactcaataaagagatgtaactcatgcacaccataactcctatagagttaagaatttcaaattaagatgtgtaacatcattttacactcttaatggtggtgataatggtggaggttactcatagtaacaagtaactctcctatatgttacaaaataatgacaaataatataaattgtcatatgttacatattattagtttattacacatatttaatatatattatattatttaataataatataacaatcccccactagattaaatattctctttagtaacaaacttgtaacttttgtaacatttatttaatcaatcaaaaaatattatatcaaaatataacaataagtgtatactttgtagttggtcattattgtgtcatttttaagttaatgtgacaacttgaaaataattcatttaataaacgaaatagaggagtcaatctaaaaa

SEQ ID NO: 262773 - DNA, 527 bp, Cannabis indica
tctgggatggtgtttactcttggggtcgagcagtggtttacagaagttataaaaaaaccgcgatttcagactctaccatggaggcagaatacatagctggtgtagaggctacaaaagaacttgtctggctgagaaagttattcactggactcggtgtcgtccctgaaatggaaaaaccacttgttttgcttcgtgataacactggagccatagccaacagtatagagcctcaaagccacaagagaagcaagcatatcaaaaggaagtatcacatcataaaataatatgtggcaagaggggatgtactggtggaaaaagtggacacagacgacaacctagctaatccattcaccaaggtcttggcaggaactgaatttgagaagcatccagaatttagggttaattgaaatgtacttattagttttatattagtgcaagtgggagtttgttcagttttatgccctaaataaaaatccatttcaatgtaatcgctattattcaatatcaataaagaaacataagtattt

SEQ ID NO: 262774 - DNA, 762 bp, Cannabis indica
cttctatgtttgaaaatgtaaccaaatgtaaaagatttttttttttataaacaggggatccctatattacaacagtatttaaaatgaaagtctttattttgaatttaattaaagatttaaattaaaccacacttttccaaaatttatagattagtgataataagtttataaaagcacacacatggcgtccctgagggtcagggcgttacagtgccggtcaacctgagtggaacaatctgctcggcgaattacaggctcctaaaccacattaatcacaacactgataagcgacacgctatatcacttctcggggacttaaacttgaaactaaaagttttcctatcgataaaaaatattgtaataccctaaataacacaaaaatgggaaaaactagggttcccaaatttgccccaaccggtagaccggttccccaaccggaattccggttctgggaaaaattcctggaagccaaccggtagaccggttcctacaggcctccctgaaccgaaattccggttcagtgcaggaatttttcaaaaaaacataactcgaccaattcaaccccaaaccaattcaaactttccagacctgctaattagaccgcaaagatcatttctaaagcaataaaacaaagcttcatgcacaaataccaaaaccaccattgatgagtcaagcttgagttcaaaactcaaagcttgctcatcccacaaacaagccaccaaaacctgcttaaatcaccttaaataaacataatataacatc

SEQ ID NO: 262775 - DNA, 1070 bp, Cannabis indica
tttcgtttttattttcgggttttatacagtaattttccagtagtaggagtactaaaggtggtttttggttaagaggaatgaagatataagaataagaatgagaataggaatgaaataaaatttaaaatacataaaaaaaattaccaaatttttttctcattatgtattagaatggtatttccttccattttaaaatggaatagtcattctaccattatgatggaaaattctaccattatgatggaaatgtcattctattgaaataacattctaatactttaatatgcaactaaataaagaaatgaaatgaaaattgtttattttctattctattttaatttattacctccaactaaacgctaactaaacggttaagaaataagcaagaaaaatgaagatgaattcttttaggtcttgtatattggttgaactgagtattaagaatttgtgtgtaggctagcaagctggataaaatattgtaccgaataagttgtctatttattagggaagaaaaaaagacaggtaggagtaccgtacggaatcatcttgggaaggagtgtatgtcactgtttggatcttttcttttttataataacacaacaatattgggcatatattcagcaaaaaaaaaaaacaatattgggcatatatattttttattctcaagaaaaccgaacatatatctgtactgtgagagtatttttttttttttaataaactgtgagagtatatatactttcaaaattgggcatatatttttatattgtttttgaataataaaatatttaaattaaatatgtgtaaaaacaaataatatataataatattattgagttgtcaatattttgtaatatagagttgagttatttgttagtatctataatttttataattatcacttatattaagtgcgtaaaaatattatacattttaatttaaaattattaatgctatacaaattatggtatgtttatgatttacatttctttaatttactcatactcaatattgggtgcataatatctatgaaaggttatcagtttaagtttcaaattgtgatatcaaaaaaa

SEQ ID NO: 262776 - DNA, 1161 bp, Cannabis indica
ctatttagttataacctcccaattaaaatataatttacttggtcccaagtgtattcttggatagagattctaatgtattaagaatatttatttagaaaaaattatattgtatatttattttactttaattgtttaaatttttacttttattttcatattgtttaaaatatatctatttttattaatgatatttacattatacccttaagttaatgtaaattatgtgctagagttaagtggatggtaaaagtatattggacaatccattaacaaaaaataaaaatattcctctaacttatccttttatttaaggaagattgtattacttttgaacaaatttacagactccaatcaaggacccaaggccctttaaaacatcactggataatcaatctatttaatctttatctttgttactcactttttctgtacatgtaagattctataataaagctctttttaaatattattataagtataagcaagttttggacaaacatgctcccataaaattctatttttagctttctaaatatggtaaaatacaacattaatagcagcaaccatcacccctcttcaaaaccaattttgcttagatctccttaaccccattcatgtacctgaactagtgttttcttcctacaattgcagttgctccaagcaaacatttaataacagacaagccaagctaaatggacagaggaagaacaaatgatcatagttctcctctgagcctccaaaaagaagacaattcttctccaaaacaatgccaaaaagaagcaatctatctcttatttggagtctaccccacacagcaacgcaagagatgaatttgtgctttggaacactcaacttatgccaaaccctcttaaaaattctaatattattcacggattgagagaatttagaacttagggcccgtttggttggaggtaatgaaagcaatgtaataggaataggaataagaataggattggtaatggaatggaataagaataggaataggattaggttgtttggttagatttatggaatcaataattgaatacaattcttatgtttggttgactatataatggaatggaatggaataaattaattttgaacaaaatactattattttaaaaacaaaaaaaataaattaaatatattcaacttata

SEQ ID NO: 262777 - DNA, 523 bp, Cannabis indica
aattatgaacaacaaaaaataatcaaaaaacaactttatgagaactataatacaactatgaataaaatatgaaataactaaaaaaaatagtttattatttttactgaaaatataattttgtaaatattaaatttgaaaatttaaaatgaattttttttcatattgatgtatttttgtatatttttaaaaattttagtttattttgtaaaaaattctaaataaaatagtaattgattggttgttattttatattattcatgataactataaaaaatttatatttctgaatatagtgataataaataaataaattaattaatgtttaattatatttaagcaatagaatatacacgttcaataaacgaattagccgtgttaactcaaaaatgacccaaactcgtttattttgtgtgaatttcgaattgtgttatcgtatctaacacagattgtaactcctacccaaactattcatagtatcataaaatggcacttctatcagattttgttacatgtaccaaagaga

SEQ ID NO: 262778 - DNA, 2027 bp, Cannabis indica
tcacttaaacaaatcagatttaagtttcttcatatttaccattaatcattttcatattctttacatactaaattgttattctcaaaacataagaaatgaaaatgtaaattttttatctaaatcaacaataatatattttagttggattaatatttaattaatttttttaagaaaaggcataatttagtagtggtcaatgttcatgagaaaattaattaatttataatgacacatgaactgtgaaacgataaaaaagaacaaaagtactatatttctataaataaaaaagttcacaaaaatttgtcaacatgatgtatattttagaggatacaatttaatagtgttataaatttcgtagataaaatattaattattctttttatatagttgtgcttaaatatttttacgagccacacgtgcgtagcacgtgagactccactagtacaatacataatacgaacgagtctcaaaatgtaatattttaacactatatgttttacattccaattacaacactaaaacgtattactaattattatattattttattaatataatataagttttgattataaataaattatttaattattagttttattgtataaagtggttattaaattattgaaaagtaaaaaaaaaaaatagcagtgtagagtgttccactattattaatgggacattgtactcccacatatgtagggtagtatttagtatttatttagagtaatattatgtcaaaactctactgttttcataattttacaatctcatttgagaagctcttagcactaaaaaaagtttcaaatctaacctcagtattataaattatactaaaaagtattccttattattatattaatttatttaattattttttgctttaaaaaaatatttaattattttagcactaaattttttctaattataacccaaaaggtattacttaattattaaaaagtagaaaaacaaaaagaaaagaaatgtagcgctctaccgttcccattattattagtaggacagtgtagattctcatgaaaatgggataagttttgcactttggtaagagcattttgtgaaaaaaaatcacattggatataacatttgcagttgagttggagatggcgtcttttaacaccactattcccctacatggttaatgtgagtaatttgtgtcgtttatattatacttagaacgtttggtataaggtttagacttgatgagaatgataaacttaaattaaattgtaataactaaagtggcgtttgttataaggatagtgttgggatgtgaggacatttgaaatgaatcccttatttggtacattttttatgtggaaatgtggtgggccacagatttttagtagataatataaatatttttatacacttgagtttcatattctccacaagtgattcttttacccacaatgtgagagattttatgtttctaagtgggtttcactttttaaattaaaataatggtaatgttaatttcctccaacacctccaagtctactcccttcaactttactctcttcaactcaaactcatataaactctttaaaaaaaaaaaaacctcaaactcacataacaaacactctcaataggtatcattgagaacccttcaaaaaaaaaatcaaagaccatcgttgtttgacaacatatgtaatccatcacaccgtatgatgatgctcttgttcatataactcgtatttctttaggaaaaagcagttaatatgcataagttgatccttagacaaactttcttctattttaaaatcgcttgaatatcttgttctcaatttcttgtactatcaaattatttttattatctattttaaatacgctataaactgatacattaagatataatctaagattaactagtaaagaatacttgctaaagccaaatgattaaaccattggttatatgacattacttctcttcttaacaaaaattgaacaaaacctttgcttttttgacacaaggttaggtaaacttatgtaaaagaagtaaattttgt

SEQ ID NO: 262779 - DNA, 622 bp, Cannabis indica
gaggtggctactgaagctgctagaaaagaaaagtttattcgagggttggatgaacatatcgcacaggatgtgattcttgcttctaaacaacttggggttgctcggacttatgcccaggtagttgaactggccctagtttctgtgggtgcagaagatcagatatgaaagaaaaatattggtagaagatattcgtggaagcaaacatcaaatgttgattcttgtaggcgtactgatctcggtgaacgcaagaaaaggcctagttaatcatcagctgcaggcccaaacaaaaggttctagggtaaccaaggctttcgtcgtggtgggaacgaaaattggcggacttttcctgaatgcccgagatgtaaaaggtgccaccagggcgagtgtcaggccagggcctgtttccactgtgggatagtggatcacatgaagaggaattgcccacaactactccgaccagagaaaaagaaggatgatacacttgctcctgcctgggatttgcactaactcaagctaaggctgatggtggttcttccactgtgacaggtcaactttctgttggtggtactttattgacttttctgattgattttggtgcgacgcattcttatatttcaagtag

SEQ ID NO: 262780 - DNA, 1523 bp, Cannabis indica
tttctaagtatagaaaatcaaatttcccattagaatttttacttcctgaactttgacatgtactaaattatgccccttttaattattctaactgttaaaaattctctcaaactttaaaaattgttggatttaaagacttttgtcaaatttcatttaattttactaattctgtgattgttcatatactaatttatgctctccaaactttaatatctaccaagttattctctttgaatttcgataagtgtcaaatcatgtctcttaaactttcattaatattagactttccttactaaaatttgataaaggtttttaaatctaacaatctaaataattcaaaatttttttttaacaaccttcaaaatttaagaaggatattttaatataaattaaagtttgaaaactagaaattgtaattagcttaaaatctactaataaattgtaaaataatacattatcccacaaagaatattatattgcacactttttcatcaatgatttcatttgaaaaaagaaatatataaggataacaataataaattctgcaatgattttgtcttctgttcttgaactctatcatctttatcttttttattatgtaagacctgttttttattatgtaaaattatagtaaatccattatcgtgacttttattattgtatcttctgattcaactttaaaaaagtgaattagcaaaatcttttagaggtgtatataacattgcagagtattgcatatatcattgaactgttttctatacgcaatggactctgcagtcaattcagatttgcataatctttcaaaatttctaatagtaaaaaaacatagatatatagttaatagattttttattggaaaccaatggattaattaagagctaaaggttcaatgtgtaattaatacagtgtttcagtgttttgtgaattctgtagtgttgatatctgtgacactcattaattacttagcatacaaaactgaaaacggtgatgagataatgatgtgagtcaggaagctcattactttgattgagatttatcattgaaaagttcatccatttccattttgactactcactcacttacttaaattaccaaagcattcactattttaaacacattttaaaatgttatttgtgctctgataaaagtcaatatttttttagtttaatacctggtaaagatcaaggttttactggagtaagtaactaagtaagctctggtgttttgaaaatttgaacctctttttttcttctttacaagaaactcggattctgataattaaataacagctttattaagaatgaagaacggacttgattgacccagtattgttcgtacaacttcagataatttttgttaaagagtgcaagagaaagagagagagaaaaaggacttttgaaatcataatgactttcaaagcttttaagtgtgtgtatatatataggagtgtgtgtctcttttacctcattctttttgttaagtgaaaccagaagaagaaccagtctgtctgaaaaagcaatatc

SEQ ID NO: 262781 - DNA, 4518 bp, Cannabis indica
tatagttgttttattttaatttagataaaattataaaattattgaaagaaaaaatagggaaaaattcaaatttttctggcagaaaaatctatatatatattttttttacattctcgacggttttaaaccgtcgagaagtcctcattagcgacggttttaaccgttgccaatttttcctatttgctattgtcgtataggcgagggttatagaaattgacgggaatactttaaacaactatttaaaaatgtgtggaaaaactatttttatagtagtatagtgagtacttatgagaaaattatataagttgatttttttttattttacaaaatcttatatttcaaaaatattatatgagtaaggaggaacggtgccaaaactttaaagttggaaacctatgcatgtgtacaaattcaagttggaaaacatatagctaaaaattattgtggtttaatttgagtgttcttttttaccttgtaatattttagtttattggtatacactatttgagttgtaattttataaaaaattagtgtttaatgtgtatttgttattataactttttggtatgactataatttaattagacatataattaataatgagtatatttttttatgttttggtgaactagcaatattttattactccaaattaatatcatttacaatcaaacaacatcttccaataatatacctaaactagaattttttttttacaagctatgatcttgtgccatttacagtgacacaaaccaatccgtatcttttgggttacatgtttttcccaaatacaagtaattctatttttaatggatcctcatacttttaaagcagccaacttcagtctttcaattgtagaagaccacaaattttcatttcggccacaccaaatatgatacacaaaggctactatgggtgccgtatacacccacttcttgaacctttttttgtttggctctttctatccatctaaccagactttgaagggaagtgcaacaagctctccatcccagccaagatagcatctgttggaggcaatcgttgctaaaataacatcccaagaataggttgtctactctttattcatgcaaattacaaagcaaacaagtatcatcacctattatattgaaacaatgcaacctttcttttgttctcagtttgttttgaatggccatctaaagagtaaaattttatttgggagtattgagtctaccccaaacttctttgctccaattcactctattctgtgttggacaaaaaactttgcaaccttgagcaaattgaaatttctccattgaaaatttggatagatcaaaaagatttctcaccttatccttgatctctacaaccttttttcaatatcgggagctttgtgtcgagacttaatattcgcattaattctcatcttttaaatacacattgtgtacctatttaactcataaattatcttctttagctgcagctgcccattaccatggcagcagtattctattcaaacatatatttttaagccaataccataatcactcttcgacctacacacagagtccaaagatatactacccgagcctgtaaaatcttcttgacttttctataaaatcttttgaagaatggcaccagtaggagtgatgagctagatgattagaaccgctcggcttgcaaaagacatatttctcaaactccaatgtctaattctcactaacatttgcactaatatactgcattctttaggtgagattctcttggcacaaatggggattcataaatatttgaaaggaactgactttctgctgaatcccgaagcatcaaggatgcactggatctctcgttcttctactcttcttcaatatataaaaaaacataagtagttaagcatcaactcaccacatctaccatgaagctgaatactttcttttccctaattccttgcataattcaggaaatgtattccatacccattacaaaaagtataggttacattagatctccttaactcaagcctcgctttaccttaaaaaatccatgcattcccattgtacataagagaaatacatggagttttgaaacagttcatgaccaagttgataaagttattcagaaatcagaaagcatggagcatttcttgaataaattcccattctatagtgtcatatgatttttgtaagttcaacttgatcataatcatacgattggcctttgttgatttcctcccataatgtctaatgagatcttgacaaattaggatactatgagcaatgaatctacatttgatgaatcctctttgattcttagccactaaattaggtagtatgctttttagccaagaacaaatgatctttctgtggctgccttgtaaagcacattccagcatgctataggtcggtagtcacccacagtccccaattaagtctcaattatcttaaaaaaaaaaactaccatagccatctgggccaaaagctttgacaccagggatttcaaaaacaacctcttttacttcatttcaagagaactcaacaagaaataaattagcatgttaattagtaataagaggccactgaataacaaattctgtcaaaacacttcatccattttccattttactactaagtagattttgatagtaagatagaaaagtttcagtgacttttgaaacatcatcaattctttctccaattggatccacattgtaacaaattctgttttgcctcctttctctcatggtagagtgaaatagagctaagtattcatcttcctctttggcccaatccaacttagctttttgctatgaaaatgaacgatatgctttgtgaacaaaacagaataatgtgtatattaagagctcaaaaatgtaaaaaaataataataaataatggaaaaattgaaaaatattaaatagatcaattatatgttggtttaccaaattattaattttggaaattaacacaacttagatgatcaatattctctacgtctcattgtttatatcatatatttgtctccccaatcaaataagatgtaaaaatttgatattgtataatttaaccagttaattaatatgtaaattaatttatagcattttaaatttgtttttatcaggaggagcatgttgatatggaggagatgtagggcaaccaccattctcttcattcatttcagcaggaggcccttctttgtacagatcgcataaaggttgtggagtgtgctatgaggtgaaatgcacatcaaatgtgaacagagcttgttcaggaaatccggtgaatgtggtcataaccgatgagtgccctggttgtaacaatcaagctgttcattttgatttgagtggtactgcttttggcgcaatggcaatttctggccaggcagatcaactacgaaatgttggagtccttcaaattcaatacaataggttctattaataactataaaaattaaattacaaaacatatattacatattatttctcagtatagtactacaacatattttaatgtataatgattgattaaagttgttttcgactgctatatgtacctatagggttcaatgtaggtttggtgagaagagcataacctttaaagtggatttagggtcgaacgaccattatttttcttctttgatcgaattcattaatggagaaggtgaactggagggtgttgaactgaaacaaagcgaaggctcgtgggttcccatgcaacgatcttggggtgctgtttggaagcttaactcttcctccaccctaaagcctccattttctattcgtctcacttcaatgggccagaccattgtagccaacaatgttattcccgttggctggattcctggccagacttatagatcaacagttaatttcgctacttgaaattcaaataatgttggcaattaatcaaatatatatggagcaactatacatatgtatacattacacatatatatataataataattaccctaagtcaacttgtaatggaagttggaggtttaattatccatgtacacgaatatcattaccaatatttataataattatctcttctcaatctttcctactcttaattagttttaaacttgtcattatttattagcaatattgaaggttgtaatgaagcttttgatcagtacactccaattaattcacttgactatgtttcagctgtcctaacagctttgggtaacaaattcagttatggactgcttaagtgaaataatttcagttatttatttaatatttatggagaggaattcaatttgcttggattgcttttcctaaattttctattgggattaaacttatttaacttgtcaagtgagtagtgttggaatttattttaccaggaccttagatctactcacaagtatgttgtttaacatcctaaatatgaacttctaaaacgataataaacacatataaagagagaggaaacgagagaatgagagggtcggatatagagagaaagtggatggctcaatattctgaaaggcaatctcttgaattactgaataattctttttttttttgtgtga

SEQ ID NO: 262782 - DNA, 1177 bp, Cannabis indica
caaattgaggaatagccaagaggaaagaatgaatgagaaagtggaggaagaaaagaaagttacttgagaggaagaccggagagctgaaaagggaaagataaagatctgaagcagtgagtctgattaggtaccaaatcggccaggagaaaaccagaacgagccacgactgaagagcaactctgaactgaattagccattcgagatgacaatgccagtggcagccttgaagttttggccaattcaatttggtttggttgggtgactttaaaatataaaaactaggctaaaggtacaaacattttataaagagcaaaaaggaagagaagggagaagttaggtgggttggtgggtaggaactaggaaggagaaataaaaaagagcttgtataactctattgattgttaggcatttggtcttgatcaacggtccagattagaggaagcaaattatgatgagagtagatttctctttttgaaagaaaaatcaacgatgagagtagctgaattcaccgtttttggtaatgagatgatgttgactacattggacaatgctcggaatatattcaatccactattatcattagacttcttctctgacttgtaaatattgaaaatttgcaatatttagaccatttattatttttaataaatgtgcacgtgtcttatatgatatttaattagacatgttaaaaggttttagttttagtagtgtttaacatctttgtcattctaataaagttattctaataaagtttaccattttacctttaaaaaaaaaaacatatttgtcatgttatattaatattggtaaaattaaaaataattttatacataaacttaataattatttatacaaaatttaaatcaatatgtgttaaaacttaaatcaaaatttacttcataaatatatgagttattgtataaatttacgaaaattggtacattgtgatttgaactgcaaatacaatattaattgtattagaacacattattcgagttagtgtcaaactctaataagaataatcctaattttcattcattattgattttgtatttgtgtaatagtattaaatatttatactaactaggcaatactgctaattattaattagtttatatattatttcatgtaacactctccaacccttcaaaatcgtcttctcctcaaagtggtaaca

SEQ ID NO: 262783 - DNA, 618 bp, Cannabis indica
aacacgactgttttgcctggaaccaacgcccagactaccattggagacgccactgaattacaaaatctctatgacgctctcgaactcatgtagggtcataacaataccctacatcatgatcaggatgaactacgcgctgcagtaaatctcgcgttcgacgaataaaggcgtatgatcgtcgaatgaagagatagagagatggaggcattaagggctcaccatgcagagattgaaaatcgtagtcggtaggctaccgtgctgatacaaaattcctacaaaactgtaggtcagcaaccgccgaacatcattcccctgggtgaaaacagacgaagatccagcgatgaatgctttttcagaccgcaaatggtcagccgccgaatccccggtcacgagttccactcgtgggccaagcagtaggcgggcaaaccttgtctagtaattcattaggatagtcttacctgatggttccaactagataaatggtgccattccaccgtcaacaaagtgaatcaatccctgaggcagcaagtcacctctgtatttgaaaggttgggtgcaacccatgacctaaggaatgatctgaacaaaaggatgggagtagtgttggaaattatttta

SEQ ID NO: 262784 - DNA, 608 bp, Cannabis indica
ttttgtaagtattaggggtaaattggtatgattgaaaaaagaggtaaacataagagattttgaaaaaaatgggaaaaattaaagaaatcaaattaaaagagatatgtagtgtaattttgtcaactttattttattttgtttgaaaaaattataacccgtgcattatatggaggaaattatactctataccttttttatattgtcctcttttatttttaccctcttttttaaagtctatcatttttacctcatttttataacattatactaattttgcccctgtcacttcaagatactctccatgtaactctcttatgtcagggtattttgggtataatacatctaaaaagaggtatttttcaattaaatataaaattagaggtaaaattgattagtagattatataagtggtatttttcaacttaccccctgcattatgggtggcctggacaaattatagcccaacaaacccaacccgatgggccgactaacccagtcctgttagtatgggctttatgatattgggctgctactttcactctttctctaaccctaaccctaaccctaacacgactgccttctctgaccacaccagacgaggtcaccgc

SEQ ID NO: 262785 - DNA, 902 bp, Cannabis indica
caagttcatacactattgcgattaaaatccacacaatagggctctgaacatccgtctgtggctatatccaacgccctgacctcaggcctgcttaccaacatccaatggctatgttataatggttcaaaacatagcccgaatgggacgcactcctcacacaagagtgggaaaaagttcgcaataagagactcgtgggactcaattgcccagcactgaaaacatggcaaacccattgtgctactttacaatcttgctactcaggctacatgtcaatccagacttatcatttacggcaagtgtcaaaatacataagtcaagtgaacactcacatgtcgtgataggaagctcagtagcaagacagttggaaaatcacctatttgccattaacatggtgattccagatgccatatggccaaacccgaagagacgcaccatgggaatatgattcgcccgagtatctccaaaaactagaagaagatatgaatcattataaaaaaaacactatgttgaggaaaacgatgttgactataatgatccaatcttccaacattcgcaatacccaaacactgcttgtaattgcccgttctcactcaatgaccttgatgaagaaatatgtaagggactttctatatctccacatgtcaacaacaaacatactgcatcaacaagtgacaacaagagagcaagtccttcatcagcaaggcaagaagacaataataacacagattagtatatgaatctcagccctcacatgaacccattaacaaaaaatggtaaaaactcctaaaccctgcaaagatacccatttgtgcttatgtcatgtttgttttatgtcaataacaaggtggacatgtgactcctgaaaaattcagtccattgttttgtgtgccaagacttgtgac

SEQ ID NO: 262786 - DNA, 1491 bp, Cannabis indica
atatatgtttctcacgtattaaaatgattattttattatatatgtataaaattctgaaataaaatttttaatgaaaaagtaactaattaatattttattcacaacaaaagtaactaaatggttactttttttaaaactctcaaaaagcgaaaatttctggaaacgcgatttttctagttttttttccattttcggtaattattttaaatttcggtatgtatgctgacgtgacacaacggtatttgtgcaaataattttcttaaaggtatttttataaataaaatcaattttaagtatattattgaaaaaccccccataaaaaatgtgataattttttagtcaccataaaaaattatttatgactaaaatataatatttaggtacaagttatcactaatttatttttagtcataacaagtattataattaaaaatacaataaattgtgattgttgtgactaatacctttagtcacgaactttttaatcacaatatcggaattattaattataattagtcacaatttcttttagttttagtcataaattttattgtagccagtgacagacccaaaatttttattttgtaggggcttatttattattaaaaaaatttatacatgcattataatgacttttactagattaatttaattttgtggggatttttttactattttaatttataattatcaaattaaaaaaattatttaattttttaaaagataatatttttgttagtgggggctatagccctacataggtccgtccctaattgtagctaagtaaaattttttatagtactgtatatacacacgtccaaaacatttacgtacaacaacaaaatatttgaactttttattttggccacgtaaataatttaaacaatacgacatcatacaaaaacaattgcttttatgatattgcattaataatgtaacatattagcatctctaatgacacttttaagggtgtcaaaaatctcaacgagccctagaaaaaaaccctgacaactctatatagaaacaccccgcctttttactctctcttactcttctctttctttgtttggctcaccatgccatgaaatgtatttttcttctatttcttcttacctctacgtgtctcttagcccaaccaccaccagggcgccgcctcaacgaagatctcacaaacgtcggtgaaaaaactctctctctagcatcgacgacacccaaccccgacagcccaaccagcaccgaaggtcccatctctctttcttttattttttcttgccatgtttttcattttgtgttttcttttaccattttaatattgttgtttgcaggtatactttacttagatttgtggtgcatataaatacttaccaattttaaatctacacattcactctgatcagtagtatttatataaggtataattcttccctgtttagtccaattgtcccgattaataattagttaactaatacttatgacatctacactaaaccc

SEQ ID NO: 262787 - DNA, 1011 bp, Cannabis indica
actagtttttcaatgacggggtatcgcgtctccgcccctatcatgcgcttgctggcgtagtacacgggatgctgagtcttctcttcttaccggactaaggtcgcgctgaccgagtgctcggagatggccaagtacagaaacaagtcctctccgagaacgggctttgacaagattggaggcttggccatgtgctcttttagttttttgaatgccttctcgcactcgtcagaccattcaaacttctgacacttttttaagatgttgaagaaaggaatgcacttatctgtggaccgggagataaaacgactcagtgcagcaacctttcaggttaggctctacacgtctttgtgtttctttggggatggcatgctcaggagagcttgaattttttccggatttgcctcaatccctctatgactgacaatgaagcccacaaacttccctgacttaaccccgaaagtgcatttctttgggttgagcttcattccgtatctacggaccacttcaaaacattcttctaagtcgtctgcgtggctattgcacgcctttgacttgaccagcatgtcatccccgtatacctccatatttcgccccaaaaggactttgaacatctggttaaccattctttgataagttgcgccaactttttcagtccgaaaggcatgactaggtagtagtatacccccttatcggtcctaaagctagtgcactcttgatttgctacgtacttttttatctggttgtaaccgacgtacgcgtccatgaaggacaatagtttgaatccagaggtggcgtctaccatctggtcgatcctgggcagagggaaacaatcctttgggcaagctttgtttagatgagtgatgtctatacaaactcgccaggtcccattaggcttcggcaccaggaccggattggctagccattctgggtagtagacatctcgaatcatgccactcgttaatagcttgtccacctctttctctaaggcttcgaccttcactgagtcgaggg

SEQ ID NO: 262788 - DNA, 576 bp, Cannabis indica
gggaccggggtgagcacgatgtcgtgcggcacggtatactcctctgctttagaaggaatcctggagtcagtgctaacagccggagtgtccctcctccggggccgcttggaaggctcggtctcaaccattttacccttccgcttgcgctcaagggcggccgcaatctcgccctcatcctcctcgacttccccttcctcgtctatcaagactatcgtgcctgaaggggcactagatgaggacctcctgggggtcaccatttgggatgaggccggaggcaaagaagcgtcagggctataggcctcggcaagggtagccagaagatcttccattggcttggctgttgcaacaaagaaataaacgaagtattagaataaccataagaaaggcgtgcgcccaacaagaaagcaataaaactaatcctaccctgactctctaattcagccatagcaaaggcttgaactacaatgttggcttcgtcatcccaaggaaagctgtccgaggggagaaaccagctggaggacaagtgggttgaatggtctaggggaatgggcggcggaggtccagagcccatctggg

SEQ ID NO: 262789 - DNA, 2505 bp, Cannabis indica
agcattattaggagagaatctatgttatgagataaacatatatcccttctatgggattttatcattaaaaaccctcaaataaatctctcaaaaacaatgtcagcgatctcatttgacatattttcttgatttgcaacatattttgtattttattattttttttatcgattggactcgacctagtcattttcttccaaaatcatctaacttttgttagtttcctcttaccatataaactcacaagagggctttagcaactgagagaatgatgaaaagaaatcgttgtttcaattttaagcttaatggaagtttaaacacaaatcattgttcaaaagtaataaaggttgaaacacaaatcattgtttaaattatgtactcttaacttagaaaataatggcataatggtacatgagaaggtacaaatatatataaataaggcatcgtaaaacttgtgaagccactaattatgttacttttctttatgcccacgtagctgaatttccaaatgaacagaagaaagaaaaaaaactcatgtaactgatgaaaaagaaaaagaatgattatctcgataaatatttctacaaaattgttttactttcattaagtaaaaatcagagggctgagtttttggaacaacaatcacaatgcaaactaactatcgaaaaagacgccggccgggttgggggatgagaaagctccaaacctaaatcttgatgttgaagtaatctggatcaaaatgatgtatacgtacataaccatcttcacctccacttgagaaactgtaaaatcatgaataaaaggttaaataactcaatcttcaatatgtgcaacttcaaagttaagaatacatttttcttgtctctaaaacttgcatgactgccacaaattatctcaattagaaagaaaaggttattattaatgatttcaagtatactgtctataaaataagggtatactagtagtcagatgagtcaaaactaatacaaaaaatagagttgtatatagttatctactatagatgaacaggcctgcagcggcaatacagaatctgagtgaaggaggactaagtatatgattatccattatcccaacaagaatctatttttttaaggataaccatctcaaaatagaacagggttcaacttttataacttaagaagtttgagttcaaactcattttagcatcagcagaaaattaaccaaacttcccctcaaccactgctgcatcagaaacagcatgggaaacaacaccagtactacatccacttccgccataattaatcgccaattaacttatttgcgaacccaacagtttaagcaagtaaatatacacaagaataaacaataactaggaaacgattatgtcgggtcttcatgcgcaaattaaatcatgaactatataaaataaagtttaactttaaaaatcacatacaaaactatctatttaagagttatctaaaaattaaaccttgcaaaacctttaattttgtaatagtgtttaacttaaatttcacatacaaaactatctatgtaagagttacctaaaaattaaacttgcaaaacccttaattttgtaatagaaattgagatattaaaaccaagcaaagtaaccaacatccacaatgacctaaccagctgttaatataaagattttgaaccaagtaaacatttcaaattaaatagattgcattactgactagaaatataccttttaccatcggggttgaaagccagagcatttattggcccaaaatgccctttcactcctccaatctcttcttggagtatctaaatagatgaacaataggaatatatgatgtaaaaactaaggaaaaaaaacccaattacacaagaaagtaatcagttggtcaaacaatcaaatcactaaccttatcaaaaaattttgcctcgaacttcccggcacgatgatcagttgtagtgacagctgatgcatcctgaccacctccaagtaccacctatggagcacaaaacacattcaaataaatcttaaacacatcccaaaccactgaaccttatacaatacataactcttattttctaaaaatagatagatacatacatgatcaagcaatggagacatagtgactgcattcaccgggcgctctgtaacgtaggtcttgataagagtcaaggtccttgtatcccaaagctaacaaattgacaattcaaagaaagcaaaaagatcaactacagccccagaaagaaaatatattaaatgaaaacaaatgagaataaaacatgacgagtattagcaaagaaccttggcagatttatcgagcgaaccggtaataaagtgcgaaccgtccgctgattttgtaagtgaagtaatgggttttttgtggccaacttccttctccgactcaataagcagctttccggtctatgagtttgatggatacaagtaacataaatttacacaatcaaaataaaaagaaccattggcaaaaaaactctaatttaagtttaaccattcaaattaaaacc

SEQ ID NO: 262790 - DNA, 1723 bp, Cannabis indica
ctaacaactcaaagcctacttgtcaagtttgtggcaagtatggccactcagctgcaatttgttacaaccgattcgatgaacactacatggggacagatccgaacaatacaactcagaacaagaacaacaatccctcggcctttgtcgctgcaccagaaatcttggagagtgatgcttggtttgccgatagtggagctagcaaccacatcacagccgatccaacttcaatgacacacaaacaagagtatggtggtaaggagaaagtcaccattggtaatggctcacaactttttatttctcatcttggcaatggaaatttaattaccaatactggaaaatctcttctgttaaaagaaatgctccttgttccagaaatttctaaaaatttgctaagtgtgtcaaaactcactcatgacaacaatattctcattgaatttcactctgattattgtgttgtgaaggacaagcaaacaaggagggttcttcttcgagggatgcttaaggatggtctctaccaacttcaaacaccaagctacaagtcagcctctcagtcacaaagttcagtcgagtcaaataaaaccagaaatcaagtgtttagtggtgttgctgtcaaatctagtgttaatcgtcctaagtctgctagttcttctatttccaaaagtgatgtttggcacatgagattaggccatccatcacaaaaagtattgagtcaagtgttgagtctttgtcaagttaaaattcctaaaaatgaaatgaatcatttttgcgatgcttgccaatttggtaaatcccatgcactcccatttaaagtttcaaacagtaaggctgcaaatattcttgatttagtgcacagtgatttatggggaccttccccaatcatgtcacacaatggctacaaatattacatacacttcattgatgattgcactaggttcacatggatttatccattaaaaaccaaggcagaagccagtaatgccttcctacagtttaaagtgtatgctgaaaatcaatttgagagaaaataaaacggcttaggacagatgggggaggagagtatcaagccttacatgacacagccatcacatttggaattgatttccatcatccatgtccacacacctcagcccaaaatgggagagccgagcgaaagcacagacacattgtggaaatgggtcttacgcttcttgctcaagcaaaaatgccattaaaattctggtgggaggcattccaaacctctgtctatctcatcaatagactcccaacacctattctagatcacaagtctccatttgaagccttatactctagaaaaccagattatactttcctcaaaatatttggtgttgcgtgtttcccgtgcataagaccatatcaagctcacaaattccaatttcactcacttaagtgtgttaatttgggatatagtgagtcacataaaggctacaaatgccttacccccacgggaaaaatctacatctctcgaaatgtggttttcaatgaactagaatttccctttaggctcgggtttctcaacaattacacaccagaaaaatctgtcatcatacaaagttcctcatggtctgttcttccctcctttactctgtctacaggcaccacgcaaccagcagcaccatcaaatccctctccttccttaagcataccaggagaagatccctctacaccaacacatactcaggtaaattctcatgctcctctaaat

SEQ ID NO: 262791 - DNA, 809 bp, Cannabis indica
caggtccgggtctcagttcctttttgggtacacgactatgtcggggcctgagttcgtgtctcggtttgggtctgaagctaggtcagggtccgggtcctagtcacggtcgtagtcttggtctgtggtccaggttcaacagttcttcttctggttctaattttgggtccaaggtctagttctgggttcaagtttggttcttcgtctgggttctagtcctagtatgagtcccaaatctagacaccggccactggtctgttccaggacccgttacccaaatctcgactcaagatttggatcactgtcacgagtctcggtcttgttctagttcaggtcccaggtcccatttctgagtttgggttcgggatcgagactgggtgcggttctaggtcctgacacttgttttgtgtccctagtctggttacatgtttgggtctgagttcaggttcgggttcgggtctcgagtctaggtcctagtcaagttacgggtctggatctaagtccaatttcatttatgattcaaagtccaagtcctagttccagtcctggtcaacttcttgtttttgttccatttttgggtcacagcgtacgggttctggtccactttttggtttgggactaggttcaggtccgagtgtgggttcgggtccttgtcagggttcagatccactgttgggtcccaaatccaaacaacgactacgggtttcgtcctagccctaggtccagataaggatcaaaatcttgggtaccagtctggttccatctctggtgccaggtcacgagctgggtcctaggttcaagttcgggtctgg

SEQ ID NO: 262792 - DNA, 507 bp, Cannabis indica
tttatgaaacggttatgtaattcaaatttaaatgtaaaaaaatttccaaacttataggacctataaatatagggcagattctatagaaaaaagaacgaaaaacttgaagagaaaaagattacaaattgtaatattgtatcaaatactcataaatatcttgaataagatagactcgtggagtatgcagatttaactgcaaaaccacgtaaaatgcctagtgttattattatacttttttaatcttcatattatcagtgtgaaatttattacgaaaaagactcattattggttaacgaaaatctgcgttaacgcatattatttattaaattaaaatttatgaaacccgatattcaaatgaactaattacggtatgtcacttcttgttgtgtttgacactacctttagtatttttcatattaatatatatatatatatttttattcacttaaattagaatttgcacttattatttaattatatataattttgtatgtttatttttttgtt

SEQ ID NO: 262793 - DNA, 1230 bp, Cannabis indica
cagacatgaataatgacattgctgagtacgttgctaagtgttttacctgtcagcaagtaaaggctgaacatcagaggcttgcagggttactgcagccattgaacattccaaaatggaaatgggaagatattgctatgggcttcgtggtaggtttgtttagaaccaccagacagtttgactctgtgtgggtcatagtgaacaggtttacaaagtcagtgcccttcctactgttcggacgaacttctccattgatcggtatgctgagttatatgttagagaaattatttgccttcatggagtcccaaagtccattgtttcagatagagatacgaaatttacatcaagattctaggagagtttacatcgagctatggtacttagttaaagtttagcacattatttcatcctcagacggatggacaatcagagaggactattcagattttagaagacatgctacgggcatgtgtgcttgactttgaaggatcatgggtaaagtaccttcccctgatcgagttctcttataacaacagctatcagacaacaatcgggatggccccttatgatcttttatatggaaggaaatgtagatcacctattcaccgggatgaagtaggtgaaagaaaatacttggtccccgaagctgttcagagaacaagtgaggcagttgacaaaatcagagcgtgaatgctcgcaactcagagcagacagaagagttatgctgatccaaagcgtcgggatattgattttcagatcgaggacatggtgtttctccaaatatcgccaatgaaaggcattaaacgctttggtaagaaaggaaagcttagcccgaggttcattggacctttaaaaatcctcgagaggatagggcaagtagcgtataggttggctatgcccccagcactggcagttgtacatgatgtgttccatgtctcaatgctttggaaatatgtctcagatccttcccatattctgagttataaagcgttagaagttcagccggatttatcatatgaggaacgaccggtgtagaaacttgatagaagagagaaagtcttgagaaacaagacgattgcactggtaaaagtattatggaggaacattaaaatagaagaggcaacctgggaactcaagacagatgtgcagcagaaatattaggagttgttcaggtaaattttgggacaaaatttctataaggagggggtaattgtaataccctaggtttatgaa

SEQ ID NO: 262794 - DNA, 632 bp, Cannabis indica
ttttttgtgactaaatataataaattagtcacaacaaaatgttacttgtgactaaaacaagtatttagatacaagtcgtcactaatttagttttagtcacaacaagtattgtaactaaaaatatatttagtaaaaaaaaattgtaatatttgtaactaatacctttagccacgaactttttaatcacaacatataggaatgatgatttataattagttacaatttttttcacttttagtcacaagttttattgtaactaaaagtaaaaatttttgtagtgttagaaacctcatgatactacgatagtttcaagatatatattataatctcatacatcattatttaatatatttttatttttatacaatttaaatatatatatttatatatatatatatactagtagaatgattatatatatattaagttttatgctaaatgtgttttgctttatttaaaaataatacaataaataattaaagaaaaaatattattaattattgtttgatattattaatatgtatattcaattaataatacaatatataaatgtttaagaaatcttgataatctaactgcaatttgttcttaagttaattcaaaaataaaccaaaaattaatgttcgaaaaat

SEQ ID NO: 262795 - DNA, 967 bp, Cannabis indica
tcgtgtgatcaatgttgaatggatggatcccacgctgaatacactgatagtgggatcgtgtgtatgccacacccacgtaagttgatccctgagttatagggattgagctggtgactcatgatgcgttaagctgaattcgctaagtgttgctcattctgcacggctcgttgagtattccattatggacatgccagcgaggcatcctgctcggcatgttgatctgaacagatgctctaagtagagtccacgtgtcaccattctcgtgatgccacgtcagagtgccaaatttgggataacatttgccccccaagtctgtacgggaccttcgaggttgcgtgtagacttattctgagctggctctacctttgtatggggacacgtgtcgagcatgaccatttgagactcgatgtgaagctaactgggcgtcccttcagttttcggctaattaatgctctaacaattaatattttgaaaatccaaatttctctctccacggctgacggttgcactcgattacttttgatttcccatattcgcttttaaggcgggaagccgaggcgtctaaggttcctttacgtacagttaccctgctgcctataaatacttggagtattggcacattatctcatttcatcaccctttaagtaaactttcagagcgaaaagagaaaattttctagcttcagagttgctaaagtgcctacagacgattgctggcttgcttgaacccggacattcgaatctttgagtaagtttctgatcctctttatgcttttcctttgcatgcttacgctttgaatgtaacttcgttgtagaaagaacactttaggaaaccctagggtttgaaacttttgcgattcttcttttccatatccttgtgttagctttcagccgtaaggcttattttagagcagcattgcgtctgttttccattttgctttttccaagcttcatgaacttctttgccc

SEQ ID NO: 262796 - DNA, 669 bp, Cannabis indica
taaaataatttccaacagtgtcttctgtttctctttaaatacccataatcaaatacctaaaatccttttttcaataggcccgtttctccgaaaaacgattctgatagatggtgccacccttaaacacatgtgagcttaccaatagcaaagtcgacaagtgtaatggccgaggccttatcgacggcctgcacatcattcttcttctttttccctttctctcatcaacattgtaaaatcaaaatttgggtttcaaaattaaatccaatacatcaaacagaactctgattcaattatattcactactatttcttcgtcgtcgtcttcttcccctctacttattaggaaaggagaataagtaagaaaaacctgagtggggattgggggactgtcaatttgatttgcaaaatctgccatttttggtcgattatctttttgggtagcttcgatttgaatttcttctttcccatttcatattatccttcagtttcacaatcactctcattctaggcggcttcaattcttccttcctttgagtttcacgattattgtttcaagaaaagggacaatcgttcttcgatttcctttgaagcaacaatcgttcttcaatttcctttgattattttagaactcaacattaatcgattattaatttccttcaatcattttttt

SEQ ID NO: 262797 - DNA, 666 bp, Cannabis indica
atgttgaattgtgccaatcaaggcaacctcataagcagtttctctcccgagcaaatttgatatctgccaaatgaagtgtgttacgaaaggtttacacatagctttactttccttccaaaacagagtagataccactcacagtgtagctgtaaaactcaagggtattgttgagtttatacgatattataagactaggttgagactgaagaacttgtttgcaaaatcattatgcatgataacaaattccctttctgatgctaaggcctctaaagagattaacagcaagtaataagcataatacataaaactaaaatctataatgactctactatacacttccagttgagtgtatcttacaaaatttgacataagggattattgctcttattaacatggaatgttctaatagttaacttaaaatacttgttttgttgttaatatcagggatgcgatctaacagagataggtgaacgaggagtaaatattagcggtggacaaaagcaaagaattttaatagctagagccgtgtactcacttattcagctaataagttaatcattgttactatttcagtcatatatttatactgatattcaaacactatagtaatcagcctaagtaatatggtaattttttgtaagtaaaatgtatgtgtagaattagtat

SEQ ID NO: 262798 - DNA, 505 bp, Cannabis indica
tcatactattcctgttgcttccaatctttttgttaggcatattcttgattccccactttgttctttttgtaagagtagtccggaaacggttcatcatgctctgctagggtgttccagattgagaaaggcttggaaatcatcaaggtttgtggatcattatcataaatataaacatcttgatattactgattttttgctgagttcttttgaggctctggataaggattatattagtattttgttttgctttttgtgggccttgtggaatcaaagaaataattatatacatcatcatactgttatgcctgctgctgatatctttgattggagtgttaattattttttccagtacattgatgcacagaaaaatattcagacttgtagtgttgcagcacaggctcctagcatggtctcggatggtgtttctggatcttctttgcaggtgtatacggatgctgccattgacattcgtggtcaaaggtatagctttggtattgtggttgtt

SEQ ID NO: 262799 - DNA, 602 bp, Cannabis indica
atttcggcagcataacggttgtaattgaatgcccccaaaaattttaaacatgcctgtataatgacaaattacacagatataacagtagtttattcatccatcccatcggagcacatatattcgcagaacctacttcactatggttgaatattaaagatattcaaactccactaatcattagtaattaatttataagtgaagttacctcgatgttacaattaagtgtttgggccaaggaaagaacatgtttggtacgtccctaacatatctgtacccttcaatttagattgggatttcagcatcctcttgcaacatttctgaaattagaacccagacatgtgaatcatcgtagcccgtgcagtgaacaatgattttaccaacatgctcttacagatatgcttgggccataatgttgtcgatgttgtcagaacataggtatacttgttgatcaagggccgaatggtcattgaaattgtataggagagctggcttgttgagggaaacatactcctcagcataggtttgtggttgaacatcaacctcacgagcctatggtagtggaacacacgcctcaccagccacctctccttcttcctcttgtt

SEQ ID NO: 262800 - DNA, 899 bp, Cannabis indica
tgcccgaagcggtagaccggttctccaaccaaaattccggttctgcggggtttcttggggaccaaccggaattccggttcctacaggtccctctgaactggaatttcggttcagtgcatgaaaatttcaaaaatttactacaacttcaaatcaaccccaaacaccaccataacctccagacctgctatatagaccacatagaacatattcaaggcaataaaacacaactacaagctcagaaacaagtttcaccattaaagctccatgtttgagttctaaaactcaaaacttggttaaatcttctatcaacaactaaaacatgttcaaataaacattaaacaacatatttaacctccaaaaagtaacatcaaaccctgacagcagctacaacaaaataaaccacaacatcatgcatatcaatttttttaaaattcaagaaactcaaaaggataaagtcaaaagcttacctagagctaaagcactcctaatcttgcagaagcttgcttgaattgagagaaaaaggaagcaaaccccagctggtctaggggtttcaaaaatgagagagagagttgagagtgaaatgaaatttttggcataacttgatattttgtaaaatcaaatgagacaatgttgtttttattcaaataatatcagcctaaaacaatgattggcaaaatgacaattttgccctttaatactaataaccactaaaggtcaccaaggggtacttttggaaaattctaaaatcccaaccaatcttgacattcccaatgtctaactatatcgcctcactatactaaaatactaggatgtgattctaatagccacactataaataggctctttgaggtatttttaaagagtacttttttggaaaaaaagatcaatagaaaagtgat

SEQ ID NO: 262801 - DNA, 334 bp, Cannabis indica
ccaactggtagcagctgagttaggacaaaacagtaaaaataactactataattaactacatataacaataacagactataacaacctctatacataaccaaactaatatctctaagacatgctctaagcaaactaaaaatgtaaagttggagaacgcctcactcctggagctggaggtcctcgaggtggcggtggagggctcttaaaatctgcacattgttttggctcttagttaattgataatttacaaaacaactattaataatttatgacaaattaaattataatagagacaccactttcaatgacagatgtagaatacatacactagggc

SEQ ID NO: 262802 - DNA, 1770 bp, Cannabis indica
aacattaaatgttatttctgatcttttttaataagtaaatctgattatattgaaatgagttttatttagggcataaaacccaacatatccatgcttcttgtgtatgcttctatatggtctttgtgatgcctgtttgttgcctttgttgggccactgtgtgccatttgtctatatgtttgcttgtgggttgtgtgagattggtccttagggacgctttgtgtttgcttgcttatgcttcttgtttgcactcaacatgtgtgagacatgtatcgtgcctaacctttgaacttgtttgcctgcaagcgcatttaggctgacttgctagctcgttgtgttagcaagtgccgcacgttctgcctatttgggggtgtccaaatagtcggctcgtgacactaagcactactggtgtcttataacatttctcgtaaatgataaagtaaaactatttgggagtgctcttagattgtagagtaatgatatatgcacatacaaacatgttatgtgttaaataattgcaaccaatcatccttctttaagatgagtttcacttatcaaaagtaatttgtcacataattgttatgtttgtatgtaatttatatgtggaaattatggatggaaattaggtaggtaatatgcgggtaatgcacctcccaaccctatccttgttttccgtttatgaccccatgcccgccctcgccccgcttaatccccgatggattcggggtaggggaattcctattggattcccattaagattaaaacaataataataaaaagaaaataatgtaatgtaatttaaaatgaaaataaaaaataagatattgactttaaaataaataaacactctaccttttaaaaagcctttattactcagtaaattaaggaaaatttatagtaacctttataagtatagttaataattttaatacgtaataattaaaacactatatatttgagtccaatatggggtgactagtatcaccctcgatcctgccccgcccccactttgaacccttccaagaatataaaattacactctacagcctagaattatagtgggccataagaaacaaaatatttttagacccttattttttttaaaaaaaaaaaaatttgatatttttcaaaatcaataaaacaaaaatgtataattttaaagggaattttttttcttttttggcccctgggttacgtggaccctaggcatagacatagcccgcgtatattcagggccgaccccgtacacattttcatcactaattgaagagaaatgctaaaaagtattattagtgtctaacacactcttgcgtgtcaatgtcgttattgatccaactaagtatcaggtctcatatagtttaatataattatttttaaagagtgttactagctaatcgtaaagcgacacgtctaaaaagtattaggcacccgtgactaataacagtgctcctaataaaaatattttaaggcatagtttttcaaatgaagaaaacattataagctcatttggtatgccgcataagagttgtattttaaataataaataacactatatttggataaaataatgtattgtattaattattctgaccaattttttaatacaatatatgttgtattatttaatacataacaaattgtacatattagtttgtataataatatttacaaaggattcggagtcaataccaatctccaacctagatccggacgtgaacctagacccacgacccaatccgtaattggtgttgagtcgagtgtattaaaaatata

SEQ ID NO: 262803 - DNA, 2182 bp, Cannabis indica
tttttttttttatttaaatgtaattttttatgtaattattcctaaaattaaacccaccatcattatatataatgttgtatattataattgagagctcaacccactttattttaaattatactatttactttttgtttgttatttattttagttctattttttttttaaatctacggctgagacaatttatgcttttctttttattatagattatttttcgcttaattattggaattggttttggatttggtggtccactgtacactatgtttggcaagagagcttttattgggaataataaatagagaaagtgggaagaacgcgcctaaatcatttcatttgtttagattagacagggtaaagaagggatgaggtttttcctccaaatctaaataataaatcatgcaaacatgagaaaaagaggagaaaaaaaaacaaattacataaatcttctttaaataattaaaacacaatcttttacaataattagtttaataattttgatattcaattttgagagatatgattttgtcctgtgattgtacttttacggaatgtattccgtgatatacgacagccgttagatgagagagttatttgatctgagagctgaggttgatctaaaggtaattagggttaaaaaatagtaacgtaccctgacaatcatctaatgtaccctgagacccatctaatataccacggaatacattccgcgaaagtacatcacgggacaaaatcgtgtccctaaactttgaatacattcttctcactttttctttaatatatatatatatatagggacacgattttgtcccgtgagggtgcgtgtgtgttggaggtcttgggttcgagtctcaggttatgcatgattgtaatatataaacgcttaaataacaaaaaaaaaaaaaaaaaaaacctaaattacccctagatcaatctcagccctcagatcaaatagctctctcatccaacggatgacgtacatcacgaaatacattccgtgaaaatacaatcacgggacaaaattatgtccttatatatatatatatatatattaatttttaataaaatatatgattttataaaattttccttaaaatatacgtaatttttaccgttaaaaattaaaatattttatcctttaaattttgaccaatacaaaatttgtccatttttattaaaaaattaactttaaaaaatataatcttttttattaattctttaaaaattattaaaaaacctgataaaagaataaattaataaaaaaaaaataattaaatttattttttaagattttaactaaaaaaaatgttgaatctttcttaatttttattttgaagaggtgccatatgatagtttttaaagtttaggatgcaaatttagttactaatttataaagacatgttagcatttaaacagaaaagtatgacataacctaataggattaagaatctgtaaatgtaaaaagttgaggcagaatttttaacaagccttatattttaggatgtagaatcaagtagtatcgaaatttaagggcgaaatgtttaattattcttatgtttttatctattcaaaatttctattctttttcaaatctttctctatccaaattttctttccttcaaccaaacatagtcttaaactttaaaggtccaactacacgaacatattgttttgttattactgcatatgttaaatgttggtattttcttatattgtcacgcaccaaagatatgtttaattaataacacaattaatatatgttatggtcaatctcatttgaatatttttcattagtttcagttcagttgtatatttaaagttgctaattattcttaaaaaaaaaaaaaaagatggtaattattgtgaaggaaaaagaacaaataaaaggactgggaatgggataagctaaaataatgaatatagatagcttattttgtaaggaatacgtctacctcaactaaacattgaatattgttcattattgtcatttatattgtacaggaaaccaatgctccatgctgtcgcttgttgagaaattaacattggcttgttgaggaggatagtatatttaaaagtcagtatcatactttttttctggcttctagaatatattaatgcataacagatatctagatattataatcaagtgtaggtttattttcttttcttacacggggaa

SEQ ID NO: 262804 - DNA, 501 bp, Cannabis indica
taaacacactttttgcagaacttttaggaaaaatccctgtaagtgacaaactgaaaacattagtaatttatgaaacttttattagactttgtcacactttttttttaaataattaacaactttaatcttggaagaaacatattttgaatggagaagttgaaaaatatccatttttttttaatatattttaatgtaacagtttttacgttaatatatatatatatatatgtatatatatttattttaggattaagattagggtttgtgggatatatataggatatttatgagatacttttagggttgtgaccgcagaaagaaattgaaaaggagaggccgtgcgtagcaagcgataccgagagagagaaaagtgagattttaagtttttgtattttgagagtttatgggctgctctagatagtttctttgattctaaatcctgtcatagagcttttagaatgtgattaataggtctggaatcaaacctattcgaagtcacca

SEQ ID NO: 262805 - DNA, 1125 bp, Cannabis indica
gtaatgggttttatttagggcacaaaacccaacagtgaggcccacatgtgtggcttgtcacttaatgtatttttgcccattattttatttctttaatccatataattaaatcctaaaccctagttgaaatactataaaaagatcatgatgctctcattctcatccaacctttcaaccaatgtaaacctagttttttaactctatcagacaacgaatagatgagagactcctttcataatgatttcgtaccccttctattgttcttcatcaatttctaagcctttagggatagagtaccatgcccactcatagcaagtcaattactcaatcatagtgtggaagacggtggttaaccaaactgaagaagaaggagatacaagctcagatcttgttattactctgtgatagaaaggaacaagggttatagatctgagcggaaggagtcatattattcctttgccatcaatgtaaggttttctaaactttatatgtgtttatttcattgtataaggaaattcatatttagggtgttagattatgtgttagattatagattataatcaacatacatgttaataaatctagatctttgcaaaataaattgcaaaaagtgacctcaaagccatggtaataccttactttcataaaatatggatttacaacaatgattgtaatgattttaatgtgttcatgatggtttatgtgcttaattgatgattctatgttcattacaaacttttgacaaaaaatatttttattttcgtacttaaagtattgtttttagaaagtagataaaaaattaataaatttaggcttttacagaacttaatttggatttttattgaattagttatgatttattgaagtttgaaaaaaattatcgagctagggttactagcctccgcgcgcaaggaggggacacgaggtgccttgctcggacaaaatactttcagacaagggcatatccgaagttcacccacctctgaccaagtttccactctcatgaaggctgcgtgcatcctctttctcagccaacagtcccacttccgtgtgcggtagtttttaccattttggccatttttcaacttttaaaaatcatttttcaatgaaataaaatttaaattt

SEQ ID NO: 262806 - DNA, 552 bp, Cannabis indica
ttataattaattgattctaaaaaaaaaagaattttacctattggtaacctgctattataggtaaaagaaaaatgtaaccatgatggttacaataaaaatgtaaccaatagtcacccttacatagatcaattataattaaaataaaacacaaatccttaaagaatatataaataagaactatatatcctaacaagtaccctatacatatttttaaatcctataccgaagtagaaacaataagtaaatatttacatgtgtaattaaaaaacttttccaatatatgtagatactaatgtaagccccctatgaaacatgtatggattggtatattagaaatattttcgttattaaatcagttgttccttccgaataaattttgaggggatttatcgttcgatccacctcttttgttattcttatctttgttgtccttgctcttcttctctttcttttccctctctttcctgtctttctcatcgtcacccttctttcgatcgtcactcttctttggatgtaagaggtcctgaggactaaaatgagaatatggggaag

SEQ ID NO: 262807 - DNA, 454 bp, Cannabis indica
ttctcataaagcaacaagaagttatatgtgatctaaataaataatggctcacatatgattatagcatgtattctaaacgagatacaaatgtgtcttcagaagtaatacgcaggctaaagtttgaatagaagattaactattcatacaagcaatcaaaaagtattcaaaatagttcttaatagaagtattcaaaatatttgaagtttgctttaaacatagcaagctactaactgcttgtgaaagatgtagcatattactaactgcttgcaaaaatatatatatagcagaatattaactactcgcctattgagtaacaagataatgacaacagtatgcatgtaaccctaaaatgtcctaagttaaatcgaagaaaatattttgttgtgaataaaaacacaatagacaaacattaataactcaaaaatagcaggataaaaagctatataaatatata

SEQ ID NO: 262808 - DNA, 520 bp, Cannabis indica
gttgttggtaacttgtggaagtaaaccgtgacttgtggtgccattttttcctgaaaacagtaaacatgattagcaccataaagttaaagttgaataatagtcatcatatttggagatgaaaaggagaatgggtcccaccgggcgtgccaaaaattatgttaagcaaaaatttcacatttagaatattaaaaataaatgcaaaacacaatttcacctatgccaaaattatagcataagagtttattaatttaagttcgacccatccaagattataaaaataatctcttaattacaatccttttatttaaaggaaataccctttgattccaattacaatgacattaaataattaaaataaatttgggaaatttggggtaaatttggaattgcagctgaactcagtccatttaattaactgagctgcctacataccttctttgtgaaggatcaagccacttgtagttcagaatacggtattttagaatttggatataaggattccggtagatgaccactttca

SEQ ID NO: 262809 - DNA, 560 bp, Cannabis indica
ttcttaacatagtcctttgaatctcaattatcgtaggccagaaataaacttgccttagaattttcttagatatacttttcccggcagcataatttccacaaaatccgtcatgcacctcagataggagtcgtgcagcttcttcttgagtaacacatctgagcaatggcattgagaatcctcttctgtacataattccctctacttgatatactgtgcaaccttcattctcatttttcgagcttcattctgattatctgggagtttcctggtgttgaggtaggcggctattggtgtcatccagtttggggaagtatcaatcatttcgatttcttctgtgccagtgatgctaggctcttcgaggatttggataggaaccaagtttgccttgtcacttacattactactggccaatcgagctaacgcgtctgcagttgtgttttcttcccttggaatttgtctgagaccgtagcttttgaattgtgcaagcagatcatgtattttgctcagatatgctatcatcgtttctccccgagtctcgtattctccgagtacatgattta

SEQ ID NO: 262810 - DNA, 576 bp, Cannabis indica
gaaacacttggtggatagattctggtgctactactcacataagtgtttctatgcagggttgcctgagctaccgaaagccaagtgatggtgaaagatacatctttgtgggcgatggacaatcggtggaagtggaagcaattgggcatttcagattgttattaggaactggtttttatttggatttgaaagacacttttgttgtgccgtcttttagacggaatttagtttctgtttctttgttggacaaatttggatattgttgttcatttggaaacaatcagtttactttgtctttaaattcaaatattattggaactggttatttgaatacttatgacaatctttatttgttagaaacaattgcatcctataatgaaaccttgcatgtggaatcacgaggtactaaacgcaaattaaataaagaaaattcagcgtcattatggcataaacgcttaggtcatatctcaagaggtagaattgagcgtcttgtgtctgatgacattttagagtctcttgacttcacagatttcaatgtctgtgtagattgtatcaagggaaaacagaccaaaactaaga

SEQ ID NO: 262811 - DNA, 594 bp, Cannabis indica
taagatcaactagtgatattgtcttggaaagatacaacggtaagtattataatatcttaactcagatcaatatcaatccattccaatgtatactccatacattcaaagctagtatactttgccaatattctagaaagaacataacacttatgcaaagtgtaagtacacttcctcgctgattatcacatcagtgtaaatccaaagcactgatgaaacatggacttagtctttcgaatcatataatcacaatcacattccactgtgttgacatcactgtaattgtgaatgactatatgttctggacttaacacattttgtacatatattaaaccataatcatgaaaacaacatgtaaacataagtgacttctaatctcttattgataacaaatcagattagattgtaataggttttatttaggacataaaatcccaacagtaattccatttgggtcgtaagaggcatttgggcctgtgcaattttttggccattataggcatcttcatgagttggtcagtgctagacttgggtggaggaatcaccattgttggggagctgatatccgattgtcgtggctcgtggtggacgaggaac

SEQ ID NO: 262812 - DNA, 684 bp, Cannabis indica
aaccataacatccctgttccacagatgaatcgacattttcaaaatcttttaatgggaaatatgatgccttatgtcctatgatgttgcaatcgaaacaatactccagtagtcttttgtattggaaaagaagagagacctcattcctcaagtcatccactgccactcgtaatcctctcataagcgattctgttatgttaattaggacacaggccttcatggctccgttttgaatcttaatgtcttctaatttaccaatttgttcaccctaatcccttgcaaaatgttctttcatacatgacaaagggacgttattgatcgaaatccaaaaggaggcaaagtcaaaattcatattcaaaatttctcttaatccagttggcttcacaaggaagattttaattgttgatcgatcgtccatggtccacccccgaatactccctatcgatcttccttgctaccaaagtaaaatcaaaaaacattttagactttaattcctcgacctgaaaccgatgattaatcttccacacccctttcatagaattctcctttcccaccttactggcagacctagcccccaatactttcctcactagacacaagtccaattttttctttccttgttccacacctttattaaaagagataacagggccatctccaccttcttaagaaaacacatccgtaagt

SEQ ID NO: 262813 - DNA, 776 bp, Cannabis indica
tttttgttaaaaaataattggttcaattgctaatctagttttcacttaagtggattctgaaacctaatatttttcccaaatatcactgaaaatatctgttactgttatttttaccgttaaacactttattttattttgttgctaaaaatctcactatttttgtaggttagagttttaataacttaaattaaataagaattttcttcgatctcacgcaattctcatgagttcgacctcgttcttcacaatttcgacaccacaataaaaatttgtacatttgcgagttgataaatataaaacgtactacttttggtactaacactacgtccataggttgaggaaaacatcagcccacaacattgctcaactttcactcaagataaataacattaagatttagaatggaagtgaaccctttttttcttctttgcagtttgttaatgggttattttcctctaaaaaaatatatcataaaatcattttctactaaaagtaatataatttttatattttgaattggagatcgtctatagtaacaaggtaaccatgattattataaaaaaaataatagagctaccaaataaatatgtagtatctacccgtacataattgtgtttaaaatgttaggcagcaaactctagaaagcaagaaattttagtttattcttttaaataataaaatagaaaagaaaaaaaaaataagaagggagagaagaggtgcacagataaacatggtgtaccctcgtgtcggaaagtatatctctctctctctctctc

SEQ ID NO: 262814 - DNA, 1616 bp, Cannabis indica
tccagcgttttttagaccaaatggctggtcgttgctttactacgaccaaatctctcaagtgcaatgggagcttgcgcgaggaggagaattgcgcatggaatttcgaagataaggttttccatgaacttaactttccaggagccaacttgaaataccattgctgtgcggcttccgacaaagtggtggggaagattctgcagcatacatcacctcgtactccttgtaaatccatttgcatctcaaagtacttgagatgggaaagaggatcttctctcccagtatacatcttccacgttggcattttgaacttgttaggcagtggcaggagattgatctctggtgagaagggagtcccgcgagctcagtctaactcaagatcattattgtgctgtccagccatgccatgaaacatatttttcaattcgtcaagctaggcctgtacggctgggctgacctacttggcattctagtcgatttggattacgtcagcatctttctgagcggggatttgagtatgggctccaggctgcacgatcgttgtagtattctgctcgtctattccccttcttctgtttagatcgttccttaggtcgtgagttgctcccaaccttttcaacacagaagagcctggttgccttagcgatttattcgcttggttgctgggtggaatagcaccattagtctggttggaaccatcaggtatgactcctcctgatgaattaccgcacaaaatctgctcgcctaccgcttggcccacgagcggaactcgtaaccagggatcgggcggctgaccattagtagcctaggaagtattcatcgttgggtcctcttctgtttctcccaggggaatgacgtttggcgattgttgacctatagtttggtaggctcttcgtaacagcacggtggctttccgactacgatcttcaatttctgcatggtgagcccttaatgcctccatctctttatctctctattcagcgaacatacgcctttgttcgtcaaatgtgagatttactgcagcacgcagttcgtcctgatcatgatgcagagtgttgttatgaccatgcatgagtccgagcgcgtctgggcgttggttccaggcggaacagccgtattatgaatgccctggttgggtacagaactgttattcccagtctcttgcacaccaagcgcaattccagtaataggagctgttccaccattcaccacgcttcccgtctgtccgagattaacaacagacggaacccttgaactccctgggtcctgtgatgcaggatccagcgtctgtgaatttgttgggtcagacaggcatctacgagtttgcaccatcgtgttggcgattgagtgtcgaataaagagcgatttgtgatccttctctcaatgaaagtaccaaaatattgacttcgcttttagccaacaataatgagtctattttataagcgataaacgatatgtagtaacagatatataataaagcaataattagacacaggaattttatagaggttcagccccgagcagttcggtaatagcctaatcctcattatttgtattgacttaagatcaaggaagaagattcctttttaaaaactaaatatataattgttagataataa

SEQ ID NO: 262815 - DNA, 817 bp, Cannabis indica
attactataatactaaataaatatatagaaaaagcatgactaagtctatatatatatttagtatataatagcatgtatattagtatatatggaagaagaacataaaaataaaagtggaataaaaacttacattactcaatgaatattacaacaagtaaatcaaagatacaaaataacctcactttgcatatgaaatcatccctaactttccaagaaagattatgccattatactcatcattcccataaaaattctagaaagaaatatgagaagaaaaatgagaggaatttttgctatagtttctagtataaaaattacacaccaaaataataaaaaatgagctccaatttatagggtcttcaaaaaatgtaataaataaatagattaagggttaagaaataaaataataatgagaacaatgagaataataataataatagatgtaatggtttaagataccacacgttattactatcattagaatatattattatttctcattataactttttggttgattgttactttttgatttttgtttttgatgttatgcttcatttgattggcaggtacaagagtgtatgggtatggacttggagtaaataagaaaagaatgttgattgatgggtgaagctccatgtgctggagcagaagagagaaaggggaagagagagagccaatgggaaggcaacttgtgtgcaagctgctagaagaggagaatggcgccacgtaagcgttaacagagtagaagggacccacgttggggctgggccgagggaaggaacttctgttggaattattttatcaggatcttaga

SEQ ID NO: 262816 - DNA, 510 bp, Cannabis indica
cattacaaaaagtcaatggtggaattggaaatgtacaaatgactaagaatttattcaaagatgttattagggtggccaagcttttatgccaaagatttacaacagagaaatctttattacaagcattttaatgagagctagtagcactcggctgtgtcatgaagacttgagctgaaggggaaggcttggatctgcaagaagcattttggacagtaggctgattttggaggtggtataggccatctttaagagtgccctgaagaagatgcttcttcgaatccttgtccttgacaaaacaaagattaggtgtaaattaaatggttacatcattgtccttggtaattgagaaatgctaataaggttcttggaaatggcaggcacatgtaaaatattttttagataaagaactctatcaacagtgaatgaactatgaccaatgttagaaatatgaagtttagaaccattacctaataccatcttttctttgcctttgtaagatgttctctgcag

SEQ ID NO: 262817 - DNA, 1409 bp, Cannabis indica
ggcatcgagtagttatcagcggacggaggcagcggagataatggtagggatttttatgccaaaattgcaggtgcaacctgaaatagatgaatttgttggcataaaagaagctttaagctggattgaccgttatttgtggggacaattgattttggaaactgatagccaaattacttaatttgtcatcctcttttggtctattagttcatgatgttcgtactcttctcttatctttaaataatgttgagttgtgttttgttaaacgatctgcaaacaagctgactcatgttttagccagggattcttgtttctctctaggtcgtgtgtgcttcaattggagaattgttccaacgaagtacgttctattgttattaacgattgctagttaataaagttgctaattattcaaaaaaaaaaaactaattagtgacaacttgtatatctaaattatatgttttagtcacaagtaactttttgttttttgttgtgaccaaagtcacatttagtcacaaaaaatttatgttgtgactaaaaggttgtcactaaaggtaattttttattttgtcagtgaatacaactataaataaattataaagaaaaaaaataagtttattattttactgatgaggtatttttataaataaaaaagttcaaagagaaaaataatttttattttcgtgtttacgcaattttgtaatttttttaaaaaatttttggtgtattatataaatttttctaaattattcgaatattaattttaacatactaaatcaaattaaatactaaattacttaaaggcaacaattatcactaaactagaattaaatacgtatttatatatttatatatttatatatgagtaaaagacgtccaaacttcaaatcctatgatcatacacaaaatgatgatgcatgtatgtactattaaggaattttcagttaatgtaaaactaaacgttcatgcatcagtcttatttatggagatgaagatgttttattaatttatttatttaatattattgtaaatatgaagatgtacgtttgaacatgaagtatatcatcctattcatctttaagagaaaaagaaactagaacacttgttaaaattattacagaatatatatataaatgataatttttagtatatattaaatatattcaaacctgatcagatatatattagcactaattatccccagaactttgtatatattatcagtctctgcccaggactaccatatccatatcgacttctctttatgttaaatccaaacgcatagtgtgattttcgttatatatattctttaatttatatgctacttacattagtttaattatgttacgccatcattttccctccacttctatgtcttttttgtctatttattatatacatattattatatatat

SEQ ID NO: 262818 - DNA, 488 bp, Cannabis indica
ttactaacaacacaaatatataattaaacatacgagattctaatacacgtgtttttttttttttttatatatgtgctatatgttttaacattgttttcaatattacaaattattctaaatttcttaaaaataaataaaatatttatcaaaattacaatatataatatagttttttttttagttttaactaacaaagtaacaatattacaaaaatacttccagctggccaaataaataaatatacaacccaaataaaaaaattacacaaataccgcttacacgcaccttcaatccaggatccatgctttttggcaaccattgcgcaaccacgcagtaacccaacgcatccgaaatgaaaatttaaccaaaaagagaattaccattaattccgacgacttcacctgaaaagacgattagaatcaatcaaaacatgggctgtttcgaattcataaaaaaaaagtgtagaaaaacttctacgaaactaaaat

SEQ ID NO: 262819 - DNA, 598 bp, Cannabis indica
tttttatttgtctgttggtctccaagttaactgattcgttaaatccaattcaaatgccacgtgtcgaaatattattggtgggtgttattattttaatttaaaaaaatatataaataaataaataattaaaaaaaattctttttttctttttctttttcttttctttttttttctttttctttttctttattttcttcttcgtcttctcagatcccaaccacaaccacatcactctcatttctctctctcttctcagatcgaatcagagttcggatcagatctgaaaacatgtctctctctcgagaaaaccaccgtcggccgtgaatacaaggtcaaggacctttctcaggccgatttcgctcgtctcgagatcgaactcgcggaggtcgaaatgtcaggtctcgtctcatgccgtactgaattcggtccatctcaaccatttaagggagccagaatcactggttctcttcacatgactattcagaccgatgttcttatcgaaaccctaaccgcattcggtgctgaggtgatatggtgctcctgcaacattttctcaactcaggatcaagctgcgaccgccatagctcgtgattcggct

SEQ ID NO: 262820 - DNA, 927 bp, Cannabis indica
gtcaaatcaaattaaatttttttttttttaaaaaaaaaaacgtggcaaaaccctatcgtgacaagtggcatggtaaatcccttacacggctaaagtttaaaaggcagtaaactgccaaaaaaaaaaaacagtataaatgttgtttccagcgtggcacagtataaatgtaataaaatgggaaaaatcagtagtgggtgtaaatttcccttaatagacccgattcggtcatatcttgtaccattaattgggttttttttttttatttttttaagagtaatttgcggcaaaattttttaactatcaatttacttgtaaaaaattatctaacctcatattttgttaagaaaactctccaaagtactgttccgtttacatttttaaggtgacgtctgtccagcatcgttaagttctaattttgcccacgtggcaatgataggtcactaaaaaattagcctacgttgccatattttacaaaataaaaattacaatgagtaattaaaataaaaataaaaactttaagaataatttgcagcaaaaccccccaactatcaatttacttgcaaaaaactattcaatcttaaagttttttggatggattttgcaagtaaattgatagttggaggggttttgccgcaaattactctaaatattttgaagaataaaattaaataacttaataaaaatagtacaattatttaaaaaatatgaataataatttattttactaaaaccgtagtttcgaaccaaaccaaaccgttcttaatggtttagtttggtatggtttggtttttttttttttttttgtagagagaggtctggtttggtttttaatattcaaataaccgttatactggtttggttcaaaaactataaaaatcgagaccaacccaatccgtgaacacccctatcgttacccatattaatgct

SEQ ID NO: 262821 - DNA, 716 bp, Cannabis indica
acccacatcacaaaaccctatttctcctgagtctatgtctgctacatctagcagagttccccttgttcatgtgccttatactgttgaatcattatttcctaatgacattgatatgtcccaagctcacacacatgttgctggtgtttctgatccacacgtgcttgcaagtggtgaagatcataattcacaaggtacctaatctacttcatcaccacaactgcttgtcccaatggttccactagctccacaaccaagtcacctaccaatgtcatctcttgatcctgagcctcctcaagaacctgttgacaaccaaggtcaacttcctacacattgtgatgcaacaccagtgactcagaccccattcatgcttgtttctgcaccagcacctcaacctaccactgttgttgttactgctctaccaacacacacaacatgcaaactcgtgccaaaaatggaatcaaaaagctaaaagcctatagtgttaatgagattcctactacccttaagaatgccctacaacaattacactggaacaaagcaatggcagatgaggttcttgccttgaaaagaaacagaagatacacccttgtcaagcttcctcctggaaggactgatattggttgcaaatgagtgtataggaaaaataaaaatccagatgggagtgtccaaaagtttaaagctagacttgttgtaaaaggctttcatcaacagcctgg

SEQ ID NO: 262822 - DNA, 559 bp, Cannabis indica
cgggagatcaaacctaatcgttaaatttaacagaatattcttttaaaaatttaagtatattctgttaaaccaagaaataccgttagatagacacttttaatatataaagatatattttttttttctcaaagtttatatttaataagaaaatttttacgatttaaaatttttatatctttttttttattatttttattgttttttaattattaaagctttaaaaaaaaaaatcccctttttcttttatcatttttagttgtctttttttttttcttgaatcaattgttgatttttttttcttctctatttctcctttttttttctactcaaactaactttttttaatctttgtatatatatatggaacacttcttaatgggtattacctattgatagaaactaaataaattaactataaaaattaattttaaaaatattatacattagattttgatcgaataacgaataataaaagaaaaatttaatttctaatgcttaatttagctacttaattaaaaaaaaaattaaaaataatctctttttacattatatcaaaaat

SEQ ID NO: 262823 - DNA, 533 bp, Cannabis indica
ttattttaatttaagtttttttttctaaaagaaaataaataaaatagtccagtctattcttaaaccaaacacaagattatttttatcataatctaatcttgtccagtctagtccaatcctgtgtactaaacgggctctaaaagtaatcaaaaagttgatattaaatattattatgggtattttttaatatttttcttaattatttagtttttttttttattatttttgccttatttatctaaatgttttttttattggtatatatgctgtttcttggaactatgaataccaattctatcatttataacaccctaaaatgagagcatgtgcaccttcctaaaaagtcatatatatatatatatatatatatagatttcaaagggaggataaagtcgaaaaaggtactatattttgtgttggaccaagatgcaaaatgaccctaaatctaacaattaagttaataaatgtccatttttttaaaaaattaacaaaatgtccttttagttaaaaatttgatgataaaattacaatta

SEQ ID NO: 262824 - DNA, 840 bp, Cannabis indica
ttgtagatgaacccaggtgagtcatgggaactcgggcatcagatcgaccaggatttgcttcaacttctgcacgaggttcatcctcgtcttcgtgctagtcctccttctagtaaaggaaactcttctgaccttgtacccagccataggatgatggctcgtacaaagaaaaccacgcgtctggtcgatgcttctgatcctcaagtggctcggcttggcactctaccttacgccgaataggatttggccgtcccgatggaggaggatcgtgagggggatgctgaggtccaggaggttggggagttagacgaggtgcgtccgggcagtccttctgaggcggagggagaggaagaggttgaaccccctaacttcggggagtacaacgaggctgggcagccagtcgatgctgacggagacgtcttggttgagggcgtggactacgtcagtgaggagcttgttgaggaagttcatcataggaggtagggtgccttgagcgccaggcgggtaagtcctccgtcaaagatttcggaggcatctccttcaaactctcgaccaatacgggtacctgggcgagctggactgctacattcttgcccacgacaatcgtgccacaaatcctgataagggaatgtgcgcccggtcgggggctcacggccaacaacgggtgctgatgcctttgcacaagtacttcagggatgtggcagacttcttcggtctctgccctacccaaactactccaaaggacattaagtatttgtcagctcttttcgtcctctacgcttcgcaatgatgggatgctccttccccccacaaggtcgcctggttcttcgacctaaagtctac

SEQ ID NO: 262825 - DNA, 1512 bp, Cannabis indica
tagggtgacatataaaggcccatgataatttagtttgataattatattatttaaataaaaataattaaattaattaattatattttaattattgaattaaatatattattaattaaattaaataattatattttaattattgaattaaatatattatttagataatattaaaataaaaggatataactgatttctgttaatcagttatatgatatttatgtttgaatttgaatataattaaatattactttattttaaataattaaataaaaggttcgtttataactttatatatatgtgatatatatcagtataactaacaatgtaagtttgtttcaaaaaaaaactaacaatgtaagaaaataagtgaattgagtgatactttcggagaaaaaatttctttaaaaataaaattagttttttactctctatctcttcatctcacacactcaatcttactttctctctcatctcacacgatcactctttccctctcttcctctcacactcaacacacacaacagtgtgttgtgagatttgtgttctttccttaatcacagttgctcgatcatgatgagttgagaatatactgcgattataaatttatactcatccaattgaatctaatagaccactctattctaagtaatgagactggctttgaagattgtggtgctgaactctttaacaagtttttagattggatgttcgatagtaatacgaaaagatagcgaggatttcctgataggttacaagaggtattgtttctcttttcattagtctagattaatctatatattatgttgagatccttggtattatagttcatattagattaaattattttttaatcgaatatgcttccacttttctaactctgatatacactataaaaactaacacataatacctattttgggttgcccaaaatcattggaaggaaaaagttagtgatcctaggttatctttaagacaagatacaataatgtgtccaaagtttagaagggaagcttttgttaaaaagagggaaggagatttcattaaaaataatggcacaagctctttctaactatgccatgaatgtgttcttgcttccactaaaaatatgtaaggatatgaaaacgatgatgtgtagtgttcttgatcttcaaaaagagagaggtatttattggatgagttgagagaggatgtgtcaaccaaaaacaaaggttggattagattttagttttgtaagatttcaatgttgctcttttgggaaacaaggatgaaatttattgttgaaacatgatattttagtgagcatagtttataaagtcaagtactacccaaatagctcttttctaaaaatgttgttcttggggactttccaaggtttatttggagtaatatttttgaatcttaagatcttataaaaaaaaaaaaaaaaaaaagggtttactgttcgaattgggtgttaaaattagatcccccctgaatcacttgttttacagttttacagaaaagataaaatac

SEQ ID NO: 262826 - DNA, 886 bp, Cannabis indica
aaacgtcgagctgcaattccactcaggttgaccagcacacctgagcacgggaacgaggtaaaatagcataaagcatatatatgtgaatgaatgtatgttattatttgtttgcactactaacactagtaatgatgtagtttaagggtgttagtacagtgtaggattttagattagttacagtgttaccaacacgggtacagaattggtactttagtgcatgtggtacaacactcggtaactcctgggagtacaaattggccctaccaacacgagtacgaagttggtactctagtgcatatggtacagtggttggccctaccaacacgagtatagagtcggtgctttagtgcatatggtatagtggtcgtacttccattaagaacattcttaaccatttggtgggctcgattattgagcttaggacggcttaagcataaagccggtgcagcattattgttatatatatattatgcatatcttactaagtctgttgactcatcagttatgtgtaggtaagggaagggctaagctggaggagcagtgagtttgagcttggcaaggattgtacatatcgcagcagtgcaacctggaggattttgattttataacattttgagctgccctgtattttgtgtaggaaaaaaattattaaattattacctaactatatattgtaaaagtaaatttttcaactatgtttaaactcgagatcccgacctatgcggttatataattataatatgataagattaattttgttctagtaagttttcaaatgcgggcgttacactggcactagcctccgtctcgttacattctacaatgaagtctgccaatgcctggcccttgatcaaggtgtgtgggatgtactgtatgtcgaactggc

SEQ ID NO: 262827 - DNA, 5824 bp, Cannabis indica
agctctcaccagcttcatggctaatcatagaggtatatctctccaaatctcttaaagttcaagagaaaagcaggagctagtgaagaagcaagagcaaaataactcaacccaagaggtgcattgactacctgcccaatccaggaatggtcctcagagcacctgatgcacgaggcaataaggtcagtctcaaaggttctaacaatgaggctgaagctccaaattctggccttgggctagcacacgaagcatgagctaaccacctagacatacaccacgactctcaactagtcgtaggttatgtcctaggcgaatacacatctcaatacaagaagatgatggcctacttgagctgttaagtcagctcaaaggctggactaaaaggcaagcccccaaagatgacacaacatcaaacgtactcactcgactacccagctattccttgacaaccacgaaaaacttggtacccgcttagttcctcaaagaactaagcatctctatttaaaaaaaatagatttgttagacaatcaacatggatacacctacagcagcatacctccaaataaaaaccttgccagaaagtagggactagggggatggttgtagggtgtccaaccctaacatagcataacacacaaaagttgtatcccaacaccacctctaaggagcgttaccaagaaagaagctgaatagctatggacagaagtgcacaaaggctctacggcagttacaccagaggcaaagccaacgattgtagatgggatcaaattgcagcatggacctagccttcaaaaggttggctaaccctggcctgcatggtttcttggggagcacccatatcgtacaatgcatcgaactagcacaaagaacttatgtagagaaattttaacgcttagaataagctactaaacctgcttctaagtcttgcaggcatactttggcttgacaaagtaaatccggacccttacatgtcaaggacataagaagatagccaggacaatcatatgtccgtcataaaaggctttaaggctaagtaatagtagtatttgaaaatagagggcctacaggccaaagcaagaacatgaaatccttgaggctggatatgaaatcggttcacatgcatgaggccaaggccctgcaagaaccatatagctagaaaagaaccagataaagctcctataggggccatgtaccaagctacagctaaggcaaagttccttacaggttccaagccatgttgagcttaagttgaacatttgactataatagacccaccattaaatttcatacaagttttcaaggaaaccacgtatgagaccaaggttgtatatgcctacagagccagattcttgccaaagttaagaggacagaaaattggctacccgcttggaaccaaggcccatgtcggccaaggttcttaagcatcgaaagggtcagccagggtcccatgacttagccaagaactggctacggtcacctacactaggcatgaacatgatagctttatagggtaaaacccaaaagctggccaactcccataattaagcattagggccagccaggtctcaagcaagacctcctaggccggccaaggtaagttttgaatcccaatgtgtgttttcctttcaaaactcgaatatgtgcctcatattattgatgactcagagagtcaagcatcacaacaaaggccaaaatcgaatctttttcatcaaaaagtcacacactacacattccaaaactatcatgaggatcaatataccaaagagattacaaactaatatgagaatcaaaaagtttccaaaagcttaaaaagcttgaaacttatggcaggtacaaagaagagatatctaagaggagaagatgagagtatatagagagagcagatcaaagatccaaatcatgccatgcaaaaagccaacacttggctagacaaggctgctcaatagagactactacagataagacaagagctagaaaatccctatccgaacagctgtttgaatagggacttggggagcaaatgttattccaaaatttgtccacctgatgttgcatgtccacgtaagtcaaagacagagtataggcggagtacaaccctgccagtagtagaatagggtctccatgcaagatataccaaaaccgtcaagcagcaaccgaatggagtgaagcaagccctcaaggagctgtactaacatccctcgccgatcaagagaagcctataggcgggtcagggtgagcatataggcctgccaggatctgagcatatgctagccagctaaaaagtgacttttggaccaagggagctttcgttcgataaagggaacctgacatctataaggaaatggtgtacaaagctatcttccacttgcaaaaggctggcctccacatccaaaattcagcctcctcttgataaagctacagtgacatagaggatcctggcagacacatgacctgccaggtcctggcaggagcatggccagccaaacctcaacctgcagaccttggccggctagacctcaacctgcacgccttgggtggccagacctcccctgtaggtctatgggtagctagaattgacctggcatgactctatgtatagcctaaaatgtggacagtaagctacctgtgaattgggcccttaatagcctaacaaatttatggaaaatatctacattaaaggggcaatttaatcttgtatatttaataaatttaatatgtaaatatctaagggtttcattataaattagggttttacatatacaaaggccttaactctaaccttgaaaacctaagtcactaagcctaattctagcctccaaactactctaaatctgaaaccctaatctcttccccctctctggaaagatcacttagttttaacttggaaattagcagataattacagtttaataatgaaattggaatattagttatgatttagcattttatggagatttatttgaatccaggatgcattatttatgtcatacaagaaattttatgtttttgcatattttgtgcccaacaatattggaacacaacatttggccattagaatcacgatttggtgttttagtagtaatgggacaacttagttagacattgggaatgtcgggagttattcaagatttagaaatgaccaaaatacccctaagtgacttagaagatttttggatttagtggtgggcaaaatggtctttttgaccatttagttctttgtcctttagtgagttttcgttaagttttatttaaatgagaaaaaccattagaattattcatttatccaaagtaagaaaaatcaagaagaaaatcaacttttcctctcaagtctctctctttctctctctagctccatagaagccagctagggcttgtggttcctcagtttacttctggaagtttagcaagtttcttagtgaatcaatccaaggtaaacacctaacaccttttctttgtaattccttaagtttcaagtaaggtttatgcatgattttggacttagggttgttatagttgtgttttgcttttattggagtgttctagagttattttgatgttggttgagctgctttgaagttagtttagggcttgttgtggttgttcgacaaagtttgtgttttagaactcaaacttttgtcttcaattgtaatttttgattctgagcatgttaagttgttttgttgcatgaaatatgtctattgtggtatcttaagcaggtctggaaggtttggtaaagttttgggttgaattgagggtatagtgaatttttgagtgtttcctgcaatgaaccggtcgaccgattcagggggacccattggaaccggtccaccggttggtccctaggaaacccacagaaccagaattctagttggggaatcgttgtactggttggggcattttgggaaccctagtttttcccctttttgcaatatttagggtatttccatgttattcatcgattgggaaacttttagtttcaagtttaagtctccgaaaagtggtttagcatgtcactcaccagtattacgaataatgtgatttaggggtcagtaattcgtcgagcagttattccacttaggttggtcggcacacctaaatttggaaatgaggtaagattagtataaagttatggatatgtatttacatgtttagcgtgcatgtttattacgccagttagattacattgataacagtatcagtatacgtagagttatattgagtattgatagatgtatgtttggctcaaataatgatcgatgttgtcacatcagtatggctggagtatgaccaacatactgagtataggcggacattatggtcgatagtattgttgtacaaacattcttcactcagcacggtgttggacacgtggacagggttatgattgggtgtatgggtgcctgattataatctgggttaatgctatgttattgtttatgcagttcttactgagtctgtcgactcacagatattgtttgcatgtgtaggtaagggcaaggctaaggttaagtagccgtgagagcgagcagatggagattgtacatgtcggggtagttaggcctggagcgtacggtctttgggactgctgggctcattttgtatagtcgctgggtgacaaacttttgtaatattcactgtaaaacttttataaatatttttgtaactgggatcccagtttaattcaagtatgatattttggtaaatataattagtaaaatatagttttaatttatcacgatttttaataaactcgttgatttagcaacgagctgcacaattaagttaaaaatcacgttaacacgcctaaactagtagggtgagaaaatttggtatcaaagctgccaggttgtctttcgaagattgtcacgacatgtacaatcatcatcactgatcagctcgactcatggtttagtaagccttaattgcgttagtagtttatatttatagtatgttttaagaaaagcttgttaggaagcttgttagtagcctgatagttgaataggcacatgttttaaatttccaaaataagcggtaattagtaagttattcttgatcgcgacctgactaggttagctctttgttacgcaggctgttctaatagtatggatgccaggcaaaacaccaggagtcagggtaactcggtcgggtctagtggcagttagggagttcaatttctcccaaatgtttgtggcccaggtagaggctttagagccagggcatgcggttgaggtgatgttaacccaccgcagactgcacaagaatgagaaaataggtttgctgcaatgtaagccagaatcaacgagcaagaggaaaaaattagacgcctcaagcagcagggtgctcttgcaatgcttgctccataaatgcaggtggctccttcccttgctatgcaggcaggactggttgctgcagtaaaccgaattaaaccattgtataagaggttccgtaagcaggcacctccaatttttctaggaggtcccgatgtgatgaaagtcgagcagttgctgatggttattacaagaatcttaaattttatggacgtcaccggaaatgacagagtggcttgtgccacattccaattccaggaggatgccctggtttggtgggacatggtgtcccagacctgtgatgttactactatgagctgggaaaagttttaggagttgtttaatgcaaagtactacaatgaagagatcaaaagtgcaaaaagaaaagaatttacccagctaacccagaaagagaatatgagtgttactgaatagacaacgcagtttgattgattggctaggttggcctcgaggattgtgccaacctatttcagcaagaa

SEQ ID NO: 262828 - DNA, 688 bp, Cannabis indica
cgactgttatacttagtttgtacattatacactaagtgcttctgcagtcgatatgtgtcgcttttgtcttcctaaatgtaacgtacttgatccctcgctattcacattcagcgatatatggtttcttgttaatatactaagtaacagtttgtatattgactcctcgcataagaccttaaagtcagcagatgcaaatatactcttatactaacctaattaatgagttattccataaaaaagcaattgcatcgattcatattccttttatcttgacacgtgtcccccactgagagggttgtcgaatttcgggtataacaattttcccttaaaaaactcttctttttagtaaaaagtgttttttaataattacagagggcatcttcgtcataatccctttttggaaagatgtatcctttgatgctgatggctgtacagttttgagggtatgaatcgtctcttaatattctggcctactcccaaccgttagatttcccaatctttggccttcttgtcactcgactttgtgtataaaagggcgacttaagcttgccatatttcacaaacttctaattttttggtgcgatccatcttgagaatggattttctctttcttgctaaaatgtcacatctgagtttgaaagttcaccccccaattcataacaacgggatgcaccaaccatttttcttc

SEQ ID NO: 262829 - DNA, 1091 bp, Cannabis indica
gataaataacatggcaataccttaaacaacacaaaaatgggaaaaactagggttcccaaaattcccccaatcggtagaccggttccccaaccggaattccggttctggaaaaattcctgggagccaaccagaattctggttcctacaggcccctctgaaccgaaattccgattcagtgcagaaatgaccaaaaattctataactcaaccaaaacaaccccaatccacatgaaaccttcgagacatgttctaagcatcctaaagatcaatttacaagcaacaataccagtaccgaaactcagaaacaagaaatgccattgatgagccaagcttgagttcaaaaactcaaagcttgctcatccaacaaactaaccaacaaaacctgctcaaaccactctataataccataatatagctacagaaaacataatctaacaacaacaacaagaacagcaagtaaaacaatatttcaagcaaaactccattttcttacaattcaagcaactaaaaagattgaagctaagaacttaccttggcttggatacacttgaatttagctaaagatcacttagaattgatgaagaaaactcaaaccctagcagcccaaggaattttcgagagagagagctttgagagaaatgtgatttttgcttcttttcttaattttttgtaaaatgaaaattataaaattggttttatttgcattaaatcagctactaatagaaattaaaatctgatttaaaaataaactaaaaacctcacaaaaggacaaaatacactatgggcaaaaagactaaaatgcccttgtcctcacaaaaacattctaaaatcactaagggatattttgggaaattctaaattcccaactaatctcgacattccgaatatctatatgacatataaaatgcattctgaattcaaataaatcactataaattataatttagagttaaaaataatttatataattaaaccctaattatctgctaattttcaaatttaagctaagcggtctttacaactatcctccccttaaaaggattttgtcctcgaaatctaacgtgaataactggttgcagctcaagattctca

SEQ ID NO: 262830 - DNA, 701 bp, Cannabis indica
tgtttactttatggcgggataaaccacaagtcggacaataatccatgtctgtgtattacttacgatataaagtgcaatcgttcggatatgcatgaattttttcatacttcaatcatatgtaatttaaagtctttctcactttatatgtagattctgagaagcaattatcaaacggaaagatatctttgaaaagcagctaaaaattgagtaaaatatttatcgctcactctattttctgctttaattaatgttgtaaaactttaccattgttggtaatcttatttttatacaaccatcgagcaagggtttatctgcaccacttaaaaaattatcaaatttttcagaatcattaaaaaattcctcttgtgctttgtcaagcaagtccaatggatgatcatcgaaaatattaccctcaatagcatctacccctgcatccgtaatggatatggatcatcagctaaatgttcaccatgccaataccaagtactataacttctattgaaatctcgtaaattcacatagtccttaatcatcgtaatatttcctttagatctattaaaacaatctacacacggacaatgaatacgtttggaatttcaagaattctttaaggcaaactctataaatgcatcgaaccctacttgaaattacagtgtgtttctctcctcatgcttccatgatttatccataacaaaaatcct

SEQ ID NO: 262831 - DNA, 584 bp, Cannabis indica
aaagaaaagaaaaataaactaaataaattgatgaaaaaaatgaaatactaatgaatgtaattaattataaattttatcaataaaacaaaagtaaaagaaaaaaaaactaaataaaaaaagcttagagcatttttaatagatatataaattaataagccatataaaattaaaatataattcatttagtaaatatttaacactacaaaaaatgttatttttgtcagcatatttttgtgttagtaaaagcttagtattgtgctgctaaaatgaaatctacttttgatgtaatggcaaaaggagttggcaaatcaacactagtattagaacttttgctggcgcaaaatgaaaagtactaacaaaaatgacttttccagtacataaatgcactggtaaaagttagaattttatcactgtaaatttgcgctagtaaaactttaaaagttacttctaatagtacaataacaaactgcgttgacgaaagtgacattttttatagtataaataaaacttagaataattacataagacaccattttttgtaaaatatttatattttacgttcaaagaatgtttttttacatttt

SEQ ID NO: 262832 - DNA, 651 bp, Cannabis indica
tgaacagtttctactcactaaatacaacaacgtatgcgacttctaatgtgcgagttggctgttcatattcttgcgtaagctcgtggacttagaatacacctaacacgatgtctgcgttcttgtataatcaaatttacggacatcgtataacgagctgatagaaccaagacatgcgaatctatattgttttattgaggcaattgggtcatcgagactagctcgattatagaatcaatctatatgtttttagtcaggaggatcgagaggatactcgcatatatcttggtacatgcgagctaaatctgttccttggtcctacataatgtgagtcacacagatgagattagacttggtcatatcaacttcatctcgttgagtctagctcaggcgaggtttaaactcgaggagtctctcatcgacatctcagctttccttggggaaatcgagtacacgtttccttcaaataggggtcttgtctcgagtttctaggtgagaaaaatctcactataacacatgcccctagtttcacgaattgacaggtgcggtcatgagggaaactatacgcgagagacaggtgaaaggttgtcacgaggtggtgacctttgattgtcccatcgagggtttcaaaaaaactgacggctgtaattattt

SEQ ID NO: 262833 - DNA, 1247 bp, Cannabis indica
cttcttattattctccaaagcttatttttctctttttttaattattttattctcttttttttgttgttgaaattattaatgtatgtatttttacaaatgtttcagttcaaaaatatgtaacctatatacgttaacttaatccttattaatattctaactttaaaaaaaacccataaaaatcattaatgtatatcctatgaaaagttataccaaatgttaacttatacgttaacttattaattattacattaataccaaaatttatattcatgagttattttatattatgtcttattacatcactttaagttaaaatattagaattatatatgcattgattttgatattttgaccgacattttttatttattccaactttaatgttgcatacataaataaaagagagttaaagttgaaaggtgtaagatagtcttggagctatatatatgcttcattagttgtctttgttattgatatacttgcatttttttttccaagaagccgaacaaaggcaatttaggattcaatattattaatccactaacttatgtttgaagatcattccaatccttaccaagtagtctgttcaatatagatggcctaagtattcacactcaaagtacgtataatgctaatttatttatctagatactaatattactggtataattagatttctcccaataatgtttatatatttatgtattctctgtaattttatgtctcccattattattgttttccacaaaatataaaaggaagcaatgaaatttttttggagttgatattatatattttggagattcatttcactaattgcagtttatttatatatataaatatatatattaatcactttattctccatatatatttttaatttaaaaaataaaaattcttcatatatatatatatattattttttttgaagatttgtttcagtaactacagtatgtatatatattaataattgaatggagctaggctctaattagcacaaaaatgaaggataaattaatgaaagatttaggctctatgcttgccattaaaatatatatattgttaattgatttttatagtgctaaataaatactatttaatgataatttgttcaagaataaaaatttgaccataagtcgttgaacaaaacttgatactttttttaagctaccatgattagtttgtataacttttttgtagggattgatgtaggtttggacaatataattagtgttatgtgtataaca

SEQ ID NO: 262834 - DNA, 615 bp, Cannabis indica
agattcgaaaaggaaaaaagaaacgccaggaatgaaaaattgaggaagaattacctgaaaaaatggaaaggtttgaagaaggaggaggagaaagtattgtgttaagagaaccgacagatctgtgttgatactcttcttcactgtaagcagctcactcataaagaaacgaaaacgaaagctgtatgaaattacttaattaatagcttttaaaaatctttatttattttctttatttaaaattaaataatctagctcgcgtgtgtactaagctattattttcaacagcggatcaatcttcaatttggttgagaattggtaatatttttattttttaattttgtttttgaaaaataaaaatatgttctgtaattatttttagttttttaattttaaaactgtaaataaaagtgtgttctgtaatgtttatttttatttttaattaagtcgggtctaggtctgaggtaagatttggattcgagtcagatgttggttttagcactaaggtcgtagggagatttgagtctggatctggtcctagtccaaaatattaactaagaataaaaactgtttaaaaaaagagcaatttgcggcgaaacccccttatgttttgatttt

SEQ ID NO: 262835 - DNA, 710 bp, Cannabis indica
atctctaccggaaggcccaggagaaggcttattccaaggcagcttccgggaggccccttcgcgtggggagcccggtcgagaggagaagccaggcgattgctgggaggtcccttcgcattgggagcccggctgagaggagggctcccaggccaaagccttcggttcaggtgccgaacaccggggctcctgatgccagtacttccggctccggtaagtctcctttagcagtacattacgttccttccgttagcgaatatgccagccttaggcctgtagggttcgatgagcgtctccataggtttaggatgccctcgacccggtggggagaccatatgaaggattattatttttccaacttaggagatttcctaggtcggtcccggatgggttctggtcctccggagcccgttcccttggacccttcggcctacatttcttccagctggttccggccttcggacagctatctcggggatgatgcagccagcgttaagattcagaactttgctagggccgaattagagagtcagggtaggactagcttgattgctttattcgagtgtttactgtttccatggatattctaacacttgcctcttttcttttgttgtagcaggtaattccatggatgccattttggccgaacttgccggagctcacactcctgacgctccccttcctttaacttcctcccaggtggctactccctt

SEQ ID NO: 262836 - DNA, 526 bp, Cannabis indica
cgaactagtgagattgttggattcaaaaatttctgtaaaattttattcaattttactaaggcaatgtgttatattcaaaatttgactatgtaccaaaagctgacacatgtcctacaaaaagaatatgaattagctcaaagaatatagtaattaaattgtattattaaatgtgtcaagaccgcttaattttaatatgggaattaatagataattagggcttaattatgaaactagattattaattatgatttatgaatttatgaaaatttatgtgaatttagggtgtattatttatgctatatatgaagtttcatgtttttcttgttttgtgttctacaacattagaacgcggcgattagccaatagaattacattttagtacttttgtaatagcgggacgacttagttagatattggaaatgtcaaaattatttgaggatttggaaatgaccaaaatacccctaagtggtaagttacaatatcaacctctcgtgacaaaggaaaagatgatgatccttggatattt

SEQ ID NO: 262837 - DNA, 796 bp, Cannabis indica
attaatttcgaattttttgtgtagttttgtattttgatttttatttttcatatttcaaatctaattatcacaattaaattaattaatttaagatattagtgatatttgaaccttgaaaataggtaaaaatctatctttttgcttagtttgttatcttcttttttaaaatttgattattttatcttatttttaaatttaaggtcagacattttatttttaaaattatttaattaatttttataaaatgaccttatttgaaatttaaaataagattattttaatcaagaaattttaaattgtaacaagatattttgctaacttttaaaattttgttattttatttaaattaaattataaaattagataaataatatttatttatcattttttattttattggatatctaattttatttttaaaataacattaaatttgaaaagttattagcattttttgaatagatatttaggtttgttgaaaacctaatttttcaaatttacatatttaattttgaaattaatatttcaattaattttttttttaaataatatatatttttgtaatttgaaattatttaaatgtttaattaatttaaattaaataaatcctatatccaactatctaacttgttacatgtatgtatcttttatattgtttattattaaaacaagtttataaaacctattactgcttgatctaaattgccatggttaacttaatgacagatccaatgatatgattttaaccaatgattcaattgtcaataggtcaaataaataatttgtaactggtaaa

SEQ ID NO: 262838 - DNA, 827 bp, Cannabis indica
tatataatttttaaaaaaatttagttaaaataaattttttttgagctgacattattaaaactaatttagttaaaagttggagattttctattattaaaaggtggattggtttgtgacccaaataataataagcacaaagtgatgttagtatttatcatatatagtagccttaatatactttgtcatgaatattgtgttatgacctttcatttttaatttatgtgtttgttatatttatagttaatagctacacaaaataaagaattggctcgttatttttaatatattttactaacattttttatttaattttattttttgtaagaaatatttatttttttttcaaattattattatatttttttatttttatagtcctttatattaaatatttttctctataaaaatattatttatttaattaaattatatataacattatttattataacatttgaaaatatatatataacatagggtgactatttaatggttacatttttattgtaaccatatggttacatttttctttgacctgtaatagcaggttactaataggtagacattccttttttagaattaattaattatagttaactattttcttaaaataattaattaaatatttaacaagacatcttttaacaattaatattatttaaatctctactctaattattttaataattaagccatttaattataatatttacaataaaatttattttttacaaaaattaaactttttggacacaaattaaaattctctccctaaaaaaaaattttaaataattaattattttgttacaattagatgaactaagtat

SEQ ID NO: 262839 - DNA, 646 bp, Cannabis indica
acttggctcgctcagcatttctatcggaaccaaatataattcatccaggccattctgctaggccagccttgctaaggcatcggcgttggagttttgttctctcagaatttgttcgattttaaaataatcgaatctttccaagttcttccaaactttctctaaatacttcaccgttttcaagcatttggcctggtattcctcgaggacttggttcacgatcagtattagacttccaactgctgaagcataagcaacatttttcatatcttctatctcttggggataagtgggacattgttccttagatagacagatatcaggtctacaaggtaaaactgcccctttggtgtcgctcattaaaaatttctctagcaccttatgaatgtaagctgcttgcgagagagcaagtgatctattcatccagtttctaatgatttgaataccaagaacataactagcttcacccaaatctttcattttgaacggagtattaagtcattccttaatgtcagtcattttcttgatattattatcaatgatcaaaatgtcattaacataaagaacaaggaatactaccacttgattatttttgagttggtaaacacaagattcatctttatttgtgtgaaagccgtaggttttgatt

SEQ ID NO: 262840 - DNA, 644 bp, Cannabis indica
ctaaatcacaaccggggacttagattttaaaccaaaaacatatctacagcaacttaacatggcaataccctaaactagcagggaattaaccaattaaagctctaaaactaacacgaatcgataacacaaatttttcggggaacccagcaacaaatctaggtaaccggttttacaggtgtaaaaccaattagccggtttacaccagaaaacccaaacaaatccaaaacttaaccaaatcgactccaatccttaccaaaccttccagacctgcatattataccccaatagacatattccaagcaaaaaaataactacccaagctcagaatcaaatttcaccatgaaaaagccaagctttgaattctaaaactcaaagcttgctcaaacctactaacagccaccaaaacaagcttaattcaacaaatctaaacacaatcaagctccagaaaataaccacaaacaacaacagcagctacagaactaaatttctcaaaatcatgcaaaaactataacttaaaactcaagaaactaaagagggagttgcatagagaattaccttagcttggactcacttaaaacctgctataatctgcttgcaatgctgaagaacaacccaaccctagctggacttaaatagaattcata

SEQ ID NO: 262841 - DNA, 3519 bp, Cannabis indica
acttcacaaaatagtccaaattatgtaaatcaatgtaatctcctcattagatggaaaaaaaaaaagaactaagtgtaattctcttaacactataaataccaatgaatccttcggattaaggattgaattctcttgcaacattttcttaagagacatagagaacttacactcattgtattcccaaaagcttttctaacttaagttacataataacatcaactcatagactaaggctcattaacgccccaaccacgtaaaattgttggtgttgttcttactttttctattttaattatttatttcttcagttctaattaattacaattaggtttttaaaaatctcgaaaaatattttggtactttcattaagagatgaatgaagcagtggtaccatctgaagattacattcagtaatcatggtactcacttgtaacaaatttggtcttcactttattgaacttaatgccaagacaagtgatgcaaaagatcagaatgagacaactagccatcacaaagattaagttggcaaagacacaaatcaggacgctcttgtattcagagatgataattcataatagaacaattttgatgatgctgacggcaatcttcaagagacctcgaaatatgatcctcaagacacaccaaaggacgatcatcatgataagattattgaagacggtgttggagacaagaacactcccgacgagtcagatctcatggttgccatggccaaaaaatccaattaattgaaaatagactatctcgttaggaccaatttaacaagatactgccttggaagatgacaagaatggaggcggtgatgatagccctgaccaaagggacccctaatatgcaaatacctccaataactgatgctcccgaaagagttgatccaaaagatcctagagcctcaaatcctatcaaggataaagggaaaaggatagtaggtgaaacttcaaagaagactcctttgactaaacaacaaaagaaatctaaaactgttgaccaacctcaacagaaaaagaaagggaaccatgcttcagagcaaggtgacaagactaattctagaggcagagtcccgccgaaagataagactgatgtcggaggcaagaagtctacttcctagaaggacaagcatcatcacaacaactccagtagtcaacacattgatgttgacgaagtgtatccgatctcagatggcatcaatggaagtctctccacaaataatattcgaagaagattaaatgaaaaaacaagagaaaataagaacggaaaaagccagacctcgcgggaatgatttgagaaattatattaatgatcgtgttcgcggaagggaatctttagtgacaaaaatcaatgcttagaacacaaagtcgaagagttgatgaagttcacaaagaagatctctagaaagcagaatggtacaacgtcagatttcgaggaagaagacacataaccatgtgtgaaaagaatcatagatgaaccattaccggagtgcttaagaatgccacaaatagaattgtttcaaggaaacacaaaccacagggaccacctgtccaaatacaattgcatgatgcaagtcgctaaggcttgtgatgatgcaaaatgtcattgcttttcattgactttgagcaagtctgcagaagactagtggaagaggttatctctgggatcgatccataattggagggatctacaagcaatgtttaaaaagcaatttgtagtagcaaaggcctttgacctgaaagctagttccatgtccagtgtgaaacaacaattaagagaaagcctaaagaaatacatccaatgcttgatggatgttgttgctttaaccaaggttactgatgatatgaagatggtgactttgacatcaggattaaccacagaatccttgctatggaagatatacaacgcaaaagaccagataccttgattgatttcttaataagagctcaaagattcataaacttagaaggagcttatgctcaagctcatagagtacttccatcaccttccacagacatagcaacaacccaaacttcccagatgactactccatcaattttccattcgataacttactttacaaattttaccattttacagaccaggtgctttcgcccagccagctatacaggcgtagtttttttttttttttggagcaatacaaactggctttagtgtcgctgttgaacaaacaaaccaaaaagtagaagctccatagtccaatgtaagccaatcatgcccaggttgacatattgtcaacctaggccatttccaatcaatttctcgaaaaagtattcctggcattatttccgtcatcagaaataacaaaaatacaagcaaactcggggagaaaactacaaccatagggacatgaaagttgagcccagtgcctaggttgacaattaacctgacgcactagtttcgattatttaaatgtcaattctactccgagcattctctttgaaacgataaaaaatggggtaaaagatctcgtcctcaaggtttagaaccttggaagtatcaaaacgacatcccagaagccccgaaataggcacccaatacccaggttaaaattttgtcaacttggatcatttctgaggatttttttattctccgtttacagtagagattaagattcaactatttccagggaccaaacagaaattctagatgacttgatgctggacccagtgcccaggttgacacctggtgttgggcccatcgctcaggttgacatattgtcaacttgggcaatttccaatcagtttctcgaaaaagtgtgtcgagcattttttccatcataaaaaataacgaagatacaagtaaacttgaggagaaaaccacaaccatagggacatgaaaattgagcccagcgcccaaggtgacaatcaacctggtgcactagtttcgatcattcaaatttcaattctgctctgagaattctcttcgaaatggtaaaaaacaaggtaggggactttgtccgcaagttctaaaatcttcgaagtatcaaaacaacatctcaaacactccaaaataagcacccaacgcctaggttaacttattgcctggtgccctgggttctgcttattcgattctgatttcgtctcgaccgttcatctagtttttcacaataattgagagccataagtcagaaaagtcaatttcacaacttcatattttcacaattccgacaatgtgatctactcggaaaccgagtagttttgagtcttccgtttccatagaacaataacatctccaagaattcgtgaccagcttcgccataacacaaaaatagactaagtcatgtcaaaatgtcacttacgcatcaaaaaatacatccccaacatgatttttcactctcataatgaccaagttgacatgttatgtcaaccctcaacggtaggatatcaatctggtcattggccttgaacaactttcagtaaaatagtcataattttttagagttattgtatatcattatacagtagaacctctatttaagaatactctatt

SEQ ID NO: 262842 - DNA, 294 bp, Cannabis indica
tttttttaaattataaaaaatatatttcattaattttgtgaaaatattaatttaaacttaatttatttttatacttttaagatcaagaaatgtgtacttttcaccaattatcactagcgtaccaagaataggctgatattatagtcgatagggctgtactacttgacagtattacatcggtacgactagaatattactagcgcaccgagtatagactatattatggtcaatagtattgccgtacgaacgttcttgactcagtaccgtgtcagacacaaggataagattatggtt

SEQ ID NO: 262843 - DNA, 871 bp, Cannabis indica
tattatattacttgtatatagtataaaatatatataaaatgtacgtatcttataacacatatttaatcaatttttaattttaatctttattaatatattttaattttcttttattataataaattctctaacacaagactgccaaaactcatattattgatggctgatatctcaaagttttctgcttaacattgcgaatatatatagtgaaacggtggaggtataaatgtatatatttgttgaccaaacatcacacgtactcaactaataactataaacactacatgtacattatatatgtataaatatatatacacataaggcactaataaattagtgtataacttgtatatattatagaagactcgggtgttatatatgtatatatctcaatcaagaacagtgattattttacagagacgagagacagcatatatttgatctagtgatggtgtatgtaataatgtgaaatacacttccacgtgtgatcctttctatgtctttaggtgcattatatatatgtttatatgcaaccccactgtgatatgatatctgcatatcactttttctaatttatgttgtggagttgtttgtctttatgtcttcaataatatgatcataatcgataacaattgatttcggaatcactttattatatagggtcatgatcaagtggagggaacaaagtgcatgtatagaagccatacatgaaatattttgctgccactattaataaatagagaaccttatttctcctttttgtcggtcaagtaataaacttgtggtcattttccctactcacatttgcatggttctcaattcccgtcaattcgtacaattttattatatatcccatgtgcacatggtacta

SEQ ID NO: 262844 - DNA, 529 bp, Cannabis indica
attaatacaattaaaataataataaagacaataattgaattatttaaggtaacatgatttaatcgaaacatataaattttatataataagagaataataagaataatatttgaaataaataaataagatttattaatttaacaaaatgtagtacttttacactaaaaaaaaaaaaaaaaaaaaatgtagtaaattatatataaaaaataattgttgaaaaaatacacttaaatattgtcttggctagttcagtgatagagatatgcttttactaacattttttttttgtttgggtcaagttcgaatcccactacagccttttacgaaagtaattatacttggtcatttgggagactagtttgatgtggcagcaccatttttgatgggatatgaatttttgaagtatataccgataacctaattaaaagagaatgaggtataagaaccctataactaacacgtaatctccaaaatcgtctaaaaaagtaggaaaaaaaacactacataatttcctaatattaagaaaaaa

SEQ ID NO: 262845 - DNA, 1207 bp, Cannabis indica
aaaaatactattaatattttttttttttgtaataatttattgttgattgtaaatatcaaaatcacaatcataccattttaagtatagttttacctttttgatttctccattattaatgtaaataaatttgtagttatctacattatatattaaactgaaaaaaaaggaaatatttgttttaccaaagactaaataacgtaaactagtattaattattaaatatttattcattttaattaattttcaatggacctacataataattcattctctatataaactcaattatccaattcatccattgaaaactctctcatagtatattattaagctacgtattaacatcatataagtatttcatatataattaatttaaacattaactcatgaaaaatacaaaaacaatcaaaaataaaatcatcagtttattagaacagtttagaatctattataagccacataaaattagtttcaaattttctgaccaacctaagtatcttttataattaatttaaaaaataatacagataatttaaataattgctagaaaaatcgcaaacttcatcacaggcctaatgacatctaaaatagatcaaacacgcaaagaaaatagaaaccaaatagtggtgcctcgttagagttttgacacattacaccgacaaaataaaaaactctttttcgattgctttcagtgcatcttttagattgggaaagctctccgcggtgtccagtacctcaacacgatccaaaacaacccaaaaaatcccaaagtgtcaaattactactatcttctccaactctggtgtaccataataatggtatcaaatgtgcactcatcaataactatactcataaatattattgaacttacattttattgattataatattctaataatctttccttacacattttttaagcaaattatttttagtttacccactttttgaagcaaatatctttaatgtgttttcttttatatttctaaaaacaaatatcatcaaatccttggagttaggttaaaattttaatactttggtttattaaaatagtttcttttttatgttactaagctctctttcgggtttgacctcatacttagatgaacattgtattttcaaaagtatcactcctacacttggaagtataatacttaaaacgtaacttttggtccaacattatatttacaaaacaccctaaaatgaa

SEQ ID NO: 262846 - DNA, 745 bp, Cannabis indica
cctaaaattatagatgaaaaattccaaacttgtaaagaaattttacagacaaactatacctgcgagctcgttctcggacttttcgatcaaaggtgggtcctttaagatccgttcgaacttggtacggctaaagggctcgagctttggaatgtaagaatggtttctggaagaacaagttacagtcgaagcaaatttcgtggatgacgacggtcgtgttcgattaacatctttggcttcaagaaccaaagggggtgaacaagaacgaagtacggtcgacgactttatcatattttgtccaaacacaccttaattctccttttcttcttcttcgaattcttctgtaatttcaaaaggctaaaggtaatttacgatgactaatgatgatgagctctagagtaaaatggattaggatcagatattatcttttcgggcaaaattgattttcaaagatattttattatttttctttcaaaaaaagatattttattatttattctgtttcggtcgcaatgaaaatgacagagatgagttgtagccgtagattggttcacatatacagaagtagacggtggatctgatccgacgtggtaccctttggggtagtggcaaattgcctagagtcgagtgtgggacccgactactgtaggaatgtgaaatcagtgggcgtattgggataagatcaggtgcatactatttttcttttgggatatttgttggaaaactaactaaaaataccaaaaaaaaa

SEQ ID NO: 262847 - DNA, 602 bp, Cannabis indica
caagcgagacataatgaggtctcaagtgaattctagcaaagatctgtgagtcatcaccgatttatattaaaggaatagtggttcaatgttacgacaactaaaatttcaataaactttgtggtaactaccctaaggtaaaattcaagtcgaaagacattttactctatgcatctaagcaagatctctataaaagtgtttgattgattaaatagtgttacaatggtgtgttcacaagttttaatctagtgggggaatgtcatattatattgttataatataagacagattaaaatattaaaataatacatattatttattaatatgagattaatgtatataatgtgattgagagttacatacatctaatattcacataaattgtaacataagaggtggagttactcatattttgtacttccacatgatcactaattaagtgtgtaaagagtggttacacaatttaattttttgaaatttaaaactataattcaaatatagttgttggggattgaattttgtcatttataaagtatataagtgatataaaataaagtgggaatggtttggagagttgtttgcaaaagctgaaaaatttggtaact

SEQ ID NO: 262848 - DNA, 556 bp, Cannabis indica
ggagaatcgatgacaggcaacctcagcttgataaagttggtcaattaattactagtatagtttatcataagaatgcaaacaaccagttacactggcaataatggttatccataggaaataacaaagctgctaagtagtgagctaacaagaagaaaccttacatcacagcaccctagaggatcacctcttgcagcatcaaagcctgctgatatgatggttaaatcaggagaaaactcagaagctgtaatagcagaggttcagaacacagatgggttagccaacactcaatataaatatgcataaacagtgaatccacacccaactaaggatgcaaaacaaagacaatgcaagctaataccaaacactataaacagatcaagcacaggccaattatgaataatataaagtactgattttctggcagctgtttttgcttgaaaagattatgacatatcaatcaaacttctcagcgaacacccaagtgttaaatggaatggtgatcactaccagcatcaatttactttttctttttgaaaaagaggagaggtcgatgtca

SEQ ID NO: 262849 - DNA, 562 bp, Cannabis indica
taactaaattttaaatttaaatattgaaagtaaaaatctaattgcaaaaaaaaaaaaatgaaattaattaattgaaaatataaattattttaacaaaaatctgtttaagaaaaaaaaaatcttaaaactatgccttgcctattttgaaaatatatataagtttgttaaacttattttgttccatactatctaaaatctaaaaggatgtgagtacattaaaaataaggcacgtatatataacttaactaaaacattaagtaattgaaaaatccttgatatattaactaattgggaaaaaaaaaattctttcatataccttaaataatttatatcttaatttgaattgtacacatttaagtgtagcaattttattttaatcaatctatatttatgcatagaaaggtggtcacttttttttagagttatacggagattgatattggtaattttaactaatttttaatagacttatattttgaacaaatttaaataactttggcaaaatagtgtgaattattttagtataataatttaaatcaaaatataaatttatgttacataa

SEQ ID NO: 262850 - DNA, 568 bp, Cannabis indica
gcgtcgtggaccttcaggaactgggctgctaccgacgccgaggcggccaccaccacatccacgaagcccaatcggaggtacattaatgggccgtatttccgagccagagccgctgtggcatggtgcggtacggggcccatgtgagggaggtttccgatgatgggccatggtcgtgggcctggaggcagggggagtgaggatcctctgctttgcagcctcttgatgagactgtacactccgacagccaagagtgtggagaggaaaattacggcgattgtcggcatttggtgcgtgagttgagttgtggtgggaaaatgatatgctacttggaccgtaggaatcacttgtaatatatatataggatatggatagtaatttataattaatttaatctaacagcacaaattaaattttgaaaattacactataattaatatatttatttatttataattaattatgaatattattaattataaatttaactaacaaaactccaaaccataatctctactaaaaatttaattttaattatatataatttttaatttttaatttataatatttt

SEQ ID NO: 262851 - DNA, 1428 bp, Cannabis indica
actaatataaatttttaatttttttaacagtttgggggtaagaagcaatacgatccaaaaacagaattgttaccactacagcgaaagtggatcgaacaattgatggcggtgattcacggtgacgattgaggttgaaaggtcgaagaatttttcttcattatgtaatttttatagattaacttgtagttagatttattaacttattaatatttttaactaattttacattagtgtttgtgtaatatttaattacttttatgaaattaaattatgtattttacccaaatttaaataatatttaatttacattttaaaaaataaatatgtaatttaaattaaataaaataatatataaattaataaatatataattaaaatgtaattaaaattatataattaaattaaaaaaaataaaaaaactagaaattcgcgtactacgccacatatggcgtcggttattggctaggaaccgacgccataggtacccctatggcgtcggttcccagctaataaccgacgccataggggtacgtatggcgtcggttcatataaaccctttagcgtcgccctgatcagcgtcggtagcgaatttcgcgaaaccgacgctgaaaaggcttaaaaaccgcctctaaagggggtttttgtcgtagtgataacaataaaaaatctcatgtatatgcacttttaatagaaaaatatactcctcaatggatactatttacttaaaaatgtttgagtttttaaactgtaattttcttatttaattaaaaatatatatttttatactacatgagctagatttgttccattaactgaaaaaataattaagaaaaaaattgacaacaaagagaaataaaaaaagttcaattttacttaaatattttgtgtgcaaatatatttttgatataatctaaaataagatattttttattttttttaattaagtagcaaaatagaaattaaaatttttcttttattattcattatttgatcaaaatttaaaaattaaaatttttacaattaatatttataatttgatttatttaataattattaatgggtaatgctcattaaaaaaatgtttcatatatgtatatatatatatccaattaaataagactgattatagttataccatatcacatgataagagtgttcgcggtgtgggcggtgtgagtttagattatcatatggtattttcaacagccatcgaagccatataagcatcacagtaccacaagcccagtattaatatcaatcaaccaatttagcttgcatattgatgctaaaaatcctattgaataaatataagtgaaaattacatgaaataagggatttcataacaaagttagaaaaatatggcatttttaggtttgccactcttctatggcattttttcacatttaagattttttatggtatttgata

SEQ ID NO: 262852 - DNA, 2047 bp, Cannabis indica
ttttaaaattacacgttttttttatcaattttgaaaaatataacatttttttttctaaataaggactcaaaaatattttttttcctatgacccactaaacttcaaggccagccctaaagaggatatataagtaactttcaagtatttaaacatacatctgaatttaatttaaattaaattttaatcaaataacttcattttgatttattgtttagttatgttttggttaaattttaagaaaaacctaaattcactaatttaagatgtttttttttaatggaattaagatgtatattaagaagttattgcgaaaataaaattgtattttttttgtaaggaagtaatttaaaactttgttaacgtgtgttgttgagttatattaccaactcttaactaatccccaacaaaagaaaaaacttggtttgtaatataaagtgaaattatgagagtatagatatgtttttggaaagatccaagacaggatagcagcagctcataataatttagaattccaaattattatacgttttagagttgtggtcagatgttatcaggcgcatattaagtatcctgggccccaaacaatctacaccgttgaagatctcatcgaaaggctcagactctggtcctatagtagaatctccgggaacaatgacagggacgaagaggaacacagaattatgaaaagggaaagacgaagaaaatgtaatgtaaacaaaaaacaaaagaaaaaacccaaaggcctctcttctcttcgatctctttgattggaagttcccatagccactctgcaacgaggccctagagcgattaagacagagaaccgaaagagatctgtgcctccgcttcgatatatttacattggaattgcattaaagggtaagttttgaaatcgaatgtcaaagtcttagattagtgaattccaatgaaactcagcaaaccctgtttagagatagatacacttggctttgttcatgttgttgctgtttcgctttcgccatttcgatatttgggctgtcattaaataaaaatttcttttgttgggctgtcaatatagcgattcccactacacctaataaagttttggaactttgcttagagttcaagagcttgtgtttgtgcatatgggtcctatagatatttgtgttgccatgatggtagatttgtgttcaaatgtatgctcgtgtatgcttctgcagacatggttgaggatttttctttattaatgtatatctataatgctgtttcagattggtatttgaagcatatgcatggatttgtggaaatacatttcgggtgtctgaatgggaggtggctttcgtagaattccggggctggagtttattctttgttgtggcactctttgctgaccgatattttgtgagccaagggtgtgagtagcagtttctttgtgcataaaatggctgatgtagctggtttggctgaggctgcaggatcaagatttggttcattagaactaattgggagaggatcgtttggtgatgtctacaaaggtaagtgattaattattacggattgttattacacttgcatgtgattaattatctgttgctaaatgatgctgtattttcacatattgctttaacttggcacttaattccatgtccccacgcatacacattttgttcctgttggaacttttaagaataggaaactcaatgaaaaggtgcttttactgacacatcacacatacatgcacaaaaagtgggaatggtactcattttcatgagtttccagtgaggtaatcaatgaaaaaaatgagagatttgaatgaggttatgtaggcatcaattggacctttgtttaggtctttgcatggatggaaatagttagtttggagctgttttttggacagtgtgtaggatttttatcaaaaagaatgttgcaagttattggatttcattaagttttgcccagtaaataagagctgttattggatttgaagttggttgttgctcagtagataagagcttgttggtcacagagtgcttcatgaagttggttgttttaatacactttgagttcg

SEQ ID NO: 262853 - DNA, 548 bp, Cannabis indica
ctgcttagtgcagtagtgcgtcctatttggctttgtacttcattggttgttgtgggcgacttcatgttcaaaagggcttagatcttgtgtgggtttaagcttcttcatgttgtagctgcggaggattttgaatttgtgaaggtcctccaaatgccccaagcccttttggacttgttgagcataccatccacgcacaccttcatgttgcggctgatacgaccattgaacatcatgtagcttgtgtactcatgatttgatgaatgcatcttctatttcttggctttggacaaggccaagttgcaatagtgacatgaaaattgctaatctccttttgacatcctacctcatgccttattgggaatttcaagcaaaggtggtagatggatgttattgccttcaggttgtataggtctagtcagcctatcatggcgttaaaaactgagggaacgttgattaggacaaattgtgccatcagagttggatcttctccaacatagaggggtaatctgatataccaaatgagcatgatgcttcggccagagaggcca

SEQ ID NO: 262854 - DNA, 914 bp, Cannabis indica
tttttttttttgtaaaatgactattaatggtaacatacttcaataagttctctttaatttctctttgcagagaaattcataggccaaatctgcattctagtaataactagtaataactggattacaaagaaattatagagaaaattgtccctggaacacaatcgagttgcaagactttaggaacaaagcttctctcaagtttataaaattgaaccatatatagtaaaccagccaataacgacattaactgtcttgacattctgcattaccaagccttgaacaagacactagttacttgtaaccaattaccacaacatattaatgtgtaacaaaccaaaagagaaagctagtcagtgttgtttgctttgctatttttttttctttttattatttgtttggagcatgtggtagacattcacacttaattggttaaagagataagcttccttaatttctctttgtaaagaaattcataggccaaatctgcatgccagccagactttgtaacattatgtagaagttatttcatgtctaaagaaaatgcaggtaaattaattaaaacatgtcatgatcatctacacttgattagttatgcatcagtttgaacatttttggtgaaattttatgtgtacataaagccttaagtaatttggatagcaatacaattacaaactatttcaacacttcaaaacaatacatagtttaatattgaaaaaaaacaaaagtctagtattgacttattataatcaagcaaaggttcaacattcacttttatcctcataattagcacattataggagaaccattacaaaattctgacatagattcaaattactacatatatgatatatgtgttgggttttatgctctaaataaaactccatctcaatgtaatctattttattcaacatcaa

SEQ ID NO: 262855 - DNA, 715 bp, Cannabis indica
gattggatggatccagtccaatccaatacatactggacctaaaatattggatggatccgatctgattcaaaaaatactagatctaaaatattggataaacacaaattaaatcaataaatatatatgaaatacattcaattgatagaatcgatccaatctaacatttaatagatgttggattgattggataactgaaattaattagatcagatccaatggtaaaatctagagtaaatacttatttggtaccttatgttttgtaaaaatacaaacttggtaccttatgtttttaataatgatcaattagtaccttttatttacaaattctacacatgtggtaccctctttcttaatttattgaacttaaattttttagtatgtctaaattacccctaattttaatacttatgaattttaaatgattttaaacattatttgttttaattataaaaaaaatttattttacacataaaacaatgatattataagttgagggaaacgaatagtttctctcatttcgtcttatacacgctaaaggagcacaaccgtcacctttgacggagaagatgattggagttccacctgagaagacaagcgaagagccaaactgagaagtcaagactgtgtatattgccaaaaatctaagttgtaaaggttagcttggatctttttcttttattgttattactctatttttcaatagagaatatatata

SEQ ID NO: 262856 - DNA, 3096 bp, Cannabis indica
tctctttctttttctctttccctcttttatattctatattttatgagtttcttaaagatttgaacttttatcactcatacttgagatccaagtttgatcattagtggggtttgaattttacgttggtttgtataatcaaaattggcgtaagtgatgacatttgaatatcaaagtacaaattgttgggggagtttttaacatttctgaattcccattcttgagggctgtttccctttattctctaatttttcattttattcttcttacccatattgattataggtcttaaaatgggaagatgtggaaataggagagccaaaagagggggaaattcgtgtgaaaaacaaggccattgggctgaatttcattgatgtatactttcgcaaaggggtttataaggctgctacattgcccttcactccaggttttgtttcacttctttaagccttcaaaacacatttggtttctactatagtggttaccattttaacattcatataacgttttgtaaattggtttttctgttctgtacaggaatggaggcatgtggtgttgtgacagcagttgggcctggactaaccggcagacaagtaggtgatcttgtagcttatgctggagttccaatgggctcttattctgaagagcagattcttcctgcagacaaagttgttcctgttcccgaatctattgatcccgtcattgcagcgtctgtcatgcttaagggtatgacagctcagtttctactccgccgttgtttcaaggtacattcaaagtaaattagggaagagaagaagaactatgggagttatctttacatgtgtatcactgtgaatagatagcaagattaataacaattgttacttgatttttcttaattgtttgtttacaggttgagcctggacaaaccattcttgttcatgctgcagctggtggagttggatctctattatgccagtggggtaatgctcttggtgctactgtcattggaactgtatcaaccaaggaaaaagctgctcaagccaaggaagatggagctcaccatgtcatattgtacaaggaagaggattttgttgctcgtgtgaatgagattacatcaggcaatggggtccatgttgtgtatgactctgtggggaaggatacgtttgaggtaattttcattcactttatcgttcaagagccggataagtttttattgttgttctcttttatgtatgttgttgtatagatgcatattaaaataataaaattcattatgccagattcaattatcacaagttctgcttagcaaagtttgtagatcagagaaatttgtcaaactaaactcatgaaagtgtgatcgcatagtgtaaatttaggatggtacaatgtcaaagtcgttttaaggttgcacagtgtaaatttagagtagctgctatgaccaatgtgtttattttgcaaataatatgttttgaaatatgagttccctaggaaaaaaatttcatgaattttattttcagatcatgatactgagaaaaaaaattgtgaaaaaattataatcttacagggctcattggcatgcctaaaacttcgaggatgtatggtaagttttggacagtcatcagggacaccagatccattaccattatcagctattgcggcaaaatctttgttcttgacaagaccaactttgatgcattacaatgtgactcgagatgagttattggcagctgcaggcgaggtattcgctaacatttcctcaggtgttctgcgagttcgagtaaatcacacataccctctgtctgaagcaccccgggcacatgccgaccttgaagatcgcagaacaactggttcagttgttttgataccataactagtaagagctaaactcttaccattgtgatacccgtatggaaggagcttgttcatttgaaaagacatgaatgtgtatgaaaattatgtgacaaaaactagtacataataaaatggattgcatctagttctttgccaaaatctcaagtgtttaacgttttgaacttttttagttcaaaattactggagagtagttttgtgacttaaagcctcgtatatagaaacgttgcccagctatgtatgcaagtggcatagtgagttccatgcgaaccttagaaacataaagatggtccaagagccattcagtgattctaatttgtaattactactgaacactggtgttaatttcgagcttgaataatgacaatttgtattatttaggttttacttttagaaacttaaataatcagctttggtcaaactaaactattggaagacaatgaaatcactcaacaaaaataaaaccttccatttgttagttattgtcgaaggacatatccaactgttaaaaagatttttcaatggtgattaattaatgtttatatcacaccattgcatatttctctcaattttttttaacttaataaagtatactaataagtgagtgatcaatttctgtaaccataaccatatacgcattgtgttagtgttaagactaggaaaacattttaatatctatatttgcacttttctgatttataaaattttactatccaacggtggttgtttgacaatccgaaattcgtcagaaaaataatctcaactcaaaattacaaaatgaagtgcatcatatgtactcatattatatctatactagcagaacatacaactgtaaatacatgttagacagttagagagtggcggatcagccagtctgaatgcacaggtggcaccatgtaatttatttattttttgcttaagtataattttcatttcatcatgcgagaaatctcagttacatctctctctatatacagaaagctttgtataataatttcggtcaatattattaaatttattttaagggtttaaaattatggcgttattatagcatcattaacatttatcatgtttagtaatgattttatagacaagtataattatttagcaaaaaataaccttacatctttggttagttttgtgagtatttttacatataatcaagggcggaaccacaactaagggaacagccaaaaaagagtggtcactggccatgccccaaaaaattttaatatccctttctatata

SEQ ID NO: 262857 - DNA, 1453 bp, Cannabis indica
gatactttttgggtagcctcctttagtataccgcccacgagtaactccatggacatatattctgccccagccagttggtcgttcacctcgggcagcacacggtcctgatagaacatgagcgtctcctttcccttctctgtctctggattcaataagaaggagtgccttgaggctttggtagtccgagcccttcagtgttcacccctttagaacccttggtctgggcagctactgcttaagatttggagttcttcttggccaaagcggcagaattaagggccaccacctcaagtgcatctgaggatgaaatagcataactccttttagaaatcacctgaggggtcttggtcctcgtaactatgctcttcgacatcatgtcgtccaccttaggacattttattggagatttctggtcagaggcatcacccgacctcttctttagtgcacacagtatcctttgagacataactgcacacaaataaaggaaatatatgtcaaaaaagcataaaccaagtaaggataaacaaaactaagagaaaatagtctaccctgcacatgcataggggcaccctccaaaaaaagtaaggacaaagcatcctcatcagaagagtcctcttcttctttgactaccattgcctttccctttccttccacttgggcagaaggacgagtagcttcttcaggaccatctctgatcttgataggccgctcaataggtacttggtcatcttggaaagccttctcctatttctttttctttggtgcttcttgattgggtgcaacttcctcctcatgatcatacataaccccctctataacctacttgatcctatgactatcattagatgggtaaagtttatacttaatgaagttggcctcaatagccaaaagtgaaatattctgagcctttgaaggacttcagagtatatcttgagccctcttcttgagttcctgtgtaaaaggaggccggtagaacgaagggatgtgctaaaaattggtgtgattggtccacatgcccttgacaaaatagtaatcctctacataaccaccaattttggacacgtcagtatccgtggtgtcgctcaaccatttttcttcgatttgagaaaagtcgaaatactaggggtgttcattggatcacatccaatgtttttaggcctatccagatccgatccaatcatatattggatgttagattttaccatccgatccgatccaattaatttcatcatccaatcgatccaacatccattggatgttggattggatcggttctatccattggatgtatttcatatatatttatttatttaatttgggtttatccaatattttaaacctaatattttttggatcggattggatccatccaatattttagatccagtatgtattggatcagactggatccatccaatccaagaaaaaagagtaaaactttaatgttaatttt

SEQ ID NO: 262858 - DNA, 1178 bp, Cannabis indica
ccacatttaagatacaactttttaaatattttttcagctaattcacattttttgtatttatttttgaaaggaaaaaaaaatgatgtttttatgagtagtagttatggtgatagtaatccctcgtaaattttttattttgtgtagtcttaatttagtggtcattaaaaggtaataatgaaaacaacgttttagtacaacaattgggtccaaatcgttcgtactctattgctgtgaagttgttgggcccagaaattgttgtgaataaggctgcttgatgcccaccaagtcatatttcacatacgtggaatccatgtttactggacgacacgacgttttgcctctgcagattcaaacaaaataaattcgagtaaaacaaatatatgtactgtagggtaatagtttcccaatgatttcacatgttatatataaatatgttcttgtttagttgaagaaaaaaacaagtatgtctactctaacagcatttcaaaaaaatatagtgtagggattctatctagctaattggtacaataatttcattgtgaaatttgatttttcatgctcaaaattcaacaagataataataataataataaaaaaaatctctaaattgaaaaaattataatattattgcattttaacttctatcattctctttcatttttcagtcgcacatatcccaaacctaaaaacactcggccctgacctctctcgtcaatgctcccacttgaattcgatcggctccactcgctctaatcctctctcacttgcgctctcttttgtcttccatccaccccaacaataaataatatttttttaattaatattttattttgaaaattaaaaaaataaaaatattttataaaattactttttataaaattatttttaatttttaatttttaattgaaatcaattttttttaaaaaaaattacttataaaatctttttaaacagtttttttcttgatcaatattttaagactttgaacacaatttagacttttgaatccagactcgaaccacgacttaggacccaaacctcaacccgaacctcaaacctggatcttgacctggacgcgaacccgaatcccgatctagactcgaacctcgacttgaatcccggacccagacctcagacttagactcctaacccggacccaaagcttgaacacgaccgga

SEQ ID NO: 262859 - DNA, 667 bp, Cannabis indica
attcatattttctaattctttcagtattggaatggaatcatagtgtatgattaagatacatattcaggttgcaaagaaattaaacaacaagagaaaaggttggtttcggagaagtttatgcatacgattagaggagcttcagtcaacggttggttgtctgcaacagcactttgttggtactgaggatcctttccaacagtataaattacctgttatgagcagcaccatagaaaaataaaacaacactgacagagttagtgtatggaattcaattaaaatttcgatgttatgttttgcaagaggaaagcaagcattatacattcgaaaggggaaaaggggtagtttcaatatttgattaatgaatttactcgttaaatgaaagacccgaaaaaccaggaaaagtataaagaaacaaactacatgaacttacagtatcgccttgatttagaaagagtttggcaatttctattccagcctgaaatattccaagatatagaatcagacagaataaattacacattccattaacatgcagaggtaattgagtttcgtacatcattttccccagagatgattcaaatttcttcataaaattttagtaaatggtctcttctgacattatttaatcatgtcagttactgagcttttaaacctgagattaacaaaa

SEQ ID NO: 262860 - DNA, 1308 bp, Cannabis indica
aggtctttatagtaaacagcatgttaataaaaatagttttattcatatcggtccttgtcatatataatctctattatatataataccttcactttgatgtcatactacatccgtaatccgaatcaagattacttgtaccgaagaatagacattagtgaaccgtactagcaaccattaattaaagattccatactttaatatattgttgacttttttattcatagctaagtggttttagttctctgtacaactacaagccacaacctcatatattaataaagaaatttttgaaatttaacattcatgcatatatcaaaatattcaactctttattaataatcaaaaatatctttacaggcttttcagggcataaaccctaatagaagccccaaatatttaatatttccatctgactcattaataccaaggaactctcttatccctcttttcatctcttccaaagtattcttgctgaaaaaaatgaaggtttgagcttgtttacttgttgtcctaactaggagcaaaaaattctccaaataaggccactaatctttagcttctgctaaattggctcctcctacaaggataaggtcatctgcaaaaaaagatatgagaatagatcgaacctcccttgctaaatctaataccttttatggctccaatatcgagggctttctctaaaagtctagaaaaaatttctacagcccatataaaaagataaggtgataggggatcacccttgcagatgccacaagaggggttagttctctctacatggcctccattgagacaaacattaagagtggtagtggagatacactgtgtgatccatttgtgaaagatctttggggccccaaaactatttaaaacaaaatcaatgaatctccaactcatcttatcatacgccttcacaagatcgatcttaatggaaaagaaatcttctttaccttttttcctcttgaaggagtgaataacttcttggacaatcacattgttatcttgtatgttttggccaggaacaaaagctgcttgagtgaggcaaatcattctaggtaagattggcttgattctatttgcaatgatcttagagatgacattgtagagagaaataggcctaaattgactaaccctcttgtgcatagatccagtaatgcttgaaaaacgactgacatcccatccggtccaggggctttattgcttcccatggtaaaaagagtctttcttatttcatcatcattcagagcttgacaaggtcttcttactcctccatagaaagacggtcttaatcttgaatgaggccatcaaagt

SEQ ID NO: 262861 - DNA, 621 bp, Cannabis indica
aaaaactaattaattattataactaaatatagtactaaatatgatatatatatatatatattttagactataaaagtagtgaattaactctactattagatatcaataatgtttagtactatttaaaatgtcatattattatgtagtgaacttacatattaggttctatataatttaataattattatgaaaaattactagtcatttgtaaaggttcacctcgtaatagttcttgacaacactatttctactatctaataacagtcctcaatttaaataggcatgtcaaaaagattcatttagttggagcgagttggagttccgatccgaaacattcagatacttattggatcttggatcagatccgctccgccccgcctaatttttttctggattggatctgatccaacccgatttcaatttatttaaaaaaaatataattcaagactcggaccccaaactcagatcccttgggacttggacccagacccgaaccctaacccggacccagacccgagactcggacccgaacctagactagcgacccagacccggaccaggatcgggattgggacccgaacctggtctgggccccgaccccggacctagaccgggacccaa

SEQ ID NO: 262862 - DNA, 1220 bp, Cannabis indica
tttagtttttattatatataacataaatcattaaatatataataatataaagttatatacttaattgttagttttaaagtcatatatcttgtgttgtactttggtttaatgtgatatttttaatttatattttttaatttttattgattttgactttaaaaacaaaaaaaacaaaaagagtttggccgaccaaaccgcccaaactgttggttggtttacagatttttttttttaaattgggcgggttacacttaaattttagcaactcgaactttagattgggttagaaaatatataggataaaccgcccaaaccgaccgatgtacagccctagcataagtgttatgcaataataaaattggatatgagtaaagcgtatgatcgggtagagtgggactatttggagttgttgatgttgaagttggggtttgcatcttcttgggtaacattgataatgagatgtgttagatcagttcattattctttcaatataaatggtgaagtagttggaaaagtgattcctactcaaggattacgtcagggtgatcctctttctccaaatttttttcttttttgcgcaaaaggtttttcttcattgctttgtcaagcgaaataatgtaatcaattacctggttataaagtggctaggggtgctctagtgatctcacatttgttcctcgctgatgatagtcttcttttttgtcggggctccacacagtcttgtcatactttggaatttttttttgaactatattcaaaagcttctggtcaggtatgatgctcaaatgtattgactagctatctattgtattaactagattttatgccagtattattttattggtttatttaattcttttattatccatttatatatttacatatttcttgttatctagattttacttggcaaatacctgatatatattttttattctatctattaactgataatattttggtgttacagattatcaatttcaacaaatctctgttgtattttttcccaacactccagatgatatcaaagaactttttatttcaacctttcacatgccgaaaactactgcaatagaaaaatatttaggtcttccgatgcttagtggacaaaataaacgaagaattttttcttatattaaagaaaaggtgtgggttaagcttagctcttggaattcaaaattatttttttggaggtcatgaagttttacttaaagcagtaa

SEQ ID NO: 262863 - DNA, 541 bp, Cannabis indica
tttaggctatattatgttattttattgtttaagatacctcgtaggtttacgttttttttttttttttaaaagcaactcatatgatgtttcagatactattgaatttatttacaaactaggaaacatgccgcgcttcgcgagcggctaatttaaaaataatttttagttttttaccgataacattaataaaaattcaataatgaacaataaatgaaatacattaatatatcatcaataactattcagttattatttttattatcaattcattataatctttattagttttttttcttacttttgaattttgtaaagaatatattgttgaacgaaaaaaaaaaagagaggaataaataaatttattattatttcattattggtttttaaaataataataataataaaaaataaataaatatcagtcaaatagagagaaaataggatctcaactccccactcccctatttttactcatcctttacgttacaggataaaaaaaaataataattttattggaaaaaatgaaaaaatagggtctata

SEQ ID NO: 262864 - DNA, 4757 bp, Cannabis indica
gttttctatattgtaaattattctgaatttttcaaaattttgtaggatattttaaatagatataacgtacatgaatatgaaaaaaaaaattagactaaaaaattcttttaggtatcgaaacaagttaaggatgcatgagtacattcattttaaaggtgtgcattatagaatcacccaaaaatatatatataaattctcataaatacatggcaaagcaagtaactatcgtataattcttacgtgaaaagaaaaaatcattaattataaaccaattaagaaaaccctaataaaaaaaaaaattgaacgcgctcatggaaggtggagccgaccaggcagtgcagcagcccaccgggcaacgttgacctttcttcataggaaaaccctaaccaaaattgcgtcttttccacacatttctttcttctgcaagcccaagacgaaagaaaaacccatatttatgtccagttcaagtctttctcacctcatcctgtagcctatcctatcatatcattgtaaatttttattcaaatccgaacaagagcaacggacgagttaagtttttgaggggagactaattaagcaacgcagtcacagaacaagagtgggtttttctttttctaattctattttaggcttttcttattatcattttggggattgtcctttaattttgtgaagttggtttttgttataatcgtttgatattttcgatttagtcattttattgtttgttaaaagtgtgtgtgtgtgttttcttttgaattctgatgaattttgtttctacgaactctgattggacttttatgatgaattggtaaataggtttttctcttttctctgattaagctaaaaaaaattagagctaatattagtcttgaactatgggaaaaccaactgggaagaagaaggaattggagccacaaaaggctggaaatgctaacagtaaaccaatcaaagcctgtgaacgaagctccaaagctttcgatgaggacactgcaatcttcattaacatgtctcaagagcttaaagaagaaggtaacaagctgttccaaaaacgtgaccatgaaggagcaatgttgaaatacgaaaaggcacttaaactcctccccagaacacatattgatgttgctcatcttcatagcaatatggctgcttgttatatgcaaatgggtcttggtgaatacccacgagctatcaatgaatgtaatttagctcttgaggtatcaccaagatacagtaaagctttgttgaaaagagccaagtgttataaggcgctgaatcggttggatttggcatttagagatgtcaatattgtattgtgtatggaacccaataatcttaatgcgttagagatattggaagaggtgaagaaagtgatgagtgagaagggtattgctattgatgagaaggaaataggtgttgctattgtagaacagtctagttcttctcgattgcgtaaggtggtaagggagaagttaaagaagaagaagactaagaaggttgaggaaacggcagaggttaagttggttgtagaaaataaagccagttctgctaaaaataaagccagttctgttaaagataaagctagttctgtcaaagataaacaagtgatcacaaagaccatcgttgaggaagctaaggttgccaaaaaacctatcaaagaagagaagaaagtggttacaaagaccgttaagttggtgttgggggaagatataaggtgggcacagttaccctctaattgcagcatgaaatcagtaagggagattgttaaggaccggtttcctggcttgaagggtgttcttgtaaagtacaaggatcaagagggtgatttggttacaataactactacagatgagctgaggttggctgaatcttcagataatctgcagggttcgctaaaattatatattgctgaagccaatcctgatcaagagccggtttatgaaggaataagtgatgaggagcttgaagatagcacaaaatccagtattggttttgagaatggagatattggaaaagataaagatgtggaaaaaggggttacttgtgttgaggactggattctccagttcgcacgactgttcaaaaaccatgttggttttgattctgattcctacttggatcttcatgaacttggtctgaaattacactcagaggcaatggaggatacagtgacaagtgatgatgctcaagaggtttttaacattgctgcagataaattccaagagatgactgccttggctttgtttaattggggaaatgttcacatgtccaaggcaaggaagcgagtaacctatgcagaagatgcttcaagggatcaaattgttgagcagattaaggttgcatatgattgggctcgaaaggagtatatgaaggcagagaagaagtatgaagaagctgtgaagatgaaaccagatttctatgaaggttaccttgcacttggacagcagcagtttgagcaagcaaaactctgctggtactactcagttgggagcaatgttgaattagaaactgaaccttcttccgaggttcttcagctttataacaaggctgaagatagtatggagaggggaatgctgatgtgggaggagatggaggagcagcgtctgaatgaactatccaaagctgataaatacaaagctcagttgcagaagatgggattggacggttttgttaaagatgttgtgcccgatgtagcagcagaacaggctgcaaacatgaaatcacaaatataccttttatggggtaccttgttgtatgagcgttctgttgtcgaatataagcttggcctgccaacttgggaggaatgtttagaggtttctgttgagaaatttgaacttgcaggagcctctccaacagatatagctgttatgattaagaatcactgctccaatgaaaatgcactggaaggtaaagaacagaaaagaagaagaaaggctcttgggattgttgtttttttttttatcttacctcatgtctttcagaaaaatatagaacgtattttcactttgcattggttttcaggtcttggtttcaagattgacgagattgtacaagcatggaatgagatgtatgatgctcagaggtggcagtttggtgctccatcattcaggcttgaaccattgtttcgccgacgggttccaaaactacattccatgttggagcatgcttgagttctgttgattggatttttttacagttaccaaacaaatttttcagttttttcgttgctcaacttttggaagccacgaagttgcatgttaagataggtaatttttctatcatttgttctcttttattttttaatccccttttgcttttcatatatataataacttggttataacatgaattaagttgacttgctatttaatttgtaaaacaaattgactatttaggggtaatgttgcataggcacgtgagaactcgtgcatttgtttctgtactctgtatttctgtgtaaatgcatgggcaactacatctacatatgcatgtagatatagatattgatacaaacatgaaatccagcaccatagaaataatctctgctgtcatgtttgccatgctatcagtacatagctttttgaacctttaagaaggagcgccattccttatttacactcttgagtataaaaatgctaataatctattttctatccaagtaataatctattttggttccatcagaaaaagaaaaaagtaatgtgattttgattgggagttgggataactcaataacaatcttattacataagaactcaatggtctgcaagaaaaaattatggcatagtggcaactaagttaatttgttattttgtattggctctgtacattttaattttaacataaatgaactctttggttgttcatcagtatttcagttgtgattttcttgagcttttaatgttaaggtggaatgaagcataataattttttgttgatgcttttcttttgcttgattacaggtctttttattctatggactgttgtgtctattgtttgctgtggaagcaaagatttgcttagtgttgattttgacagtgaaacttgggtgattggatttttttttttattgagattttctttttggggccagagtgattttttccacaatttgattatagtataagattgaatttattttagttttctccaacaaataagcaagtattattttgttggaaggtttgttgattgttgttgtagattctcattgagtcatttgtaatttgttaccaattgttgggatttgttgtatgtcacaccataaattcttctatataataccacttttcctttttcttcattctttcaatattttcctagacatggggttggtgatgcctctttccaatattttggagtgctattatgaaatgtttaatgttgattttttagtcatctaagtcatctactcatacattattgataagtatgaaactagttatttattgttttaattttactatttgttatataaatatggccttatgctttctaaacaaaaaagttccctctcacatcatgttcttcctttttctctctcattctcttcccacccacccaccctcctccacatatgccatcaacaccattacctaattccttctctgtataaccacatcctccattaacgccgtcaatatttttatcttcatatttttaatgatttcaaaacttaaactcaagaaatatttacttaattagtacattcattcatgaattttgaggacttcggtataagattttttggtttatta

SEQ ID NO: 262865 - DNA, 563 bp, Cannabis indica
ataagatattaataagattagacgtgttatttctgttaagataaatactatttaagaatttgtgttttgcaaaagttatcaattaaacctctgttttattaaatgacaaaatgaatcctataattttttaaaatagtaaaaatagaaccctgagctcaattttcaacaattttatgacaatttctaatacgaacagatacaaaaaaaatataagctttgtcataacatctctagatcagattattattaagttttatcttgacaaaaaattagttcaagatcctatttatacgattttggaaaatacagggtccattttatcatttaacaaaataaaaaattcaaattggtaacttttacaaaatatatggttcaaaataatatttacccttttaattatcttatctttttactgatcaaattgaaaaaagaaccaatggtatttaaccatgtgatgttatttgtgagtgttacaaaattggttgaatattttaacgtgtggatatcatcttagctttactctattatttttgtggtgttgattgataaggaaattaataaga

SEQ ID NO: 262866 - DNA, 449 bp, Cannabis indica
ttaggagcttaccacaaattccaagctccaatcaccaaaccaactctaaatttccttccaacttcaagtacaactcatacaatcaagaacatcttttatatttcaaagagaaagaaaggaagaaaaggggggtcgattataggttgaaggaatcagaaaattggttttctaacttgtaaaaattcattttgttggaaataatgcaaaatggtcaaatgaccaaaatacccatatggcaattatatcacatatgcataaatcaagggtaaagttatcatttcatcacataccatgctgatataaatttcagattattcaattatttataaatgccaaaataaaatctcaaaatgtatttcaggccccgaacccggttcgacccaaaataccctgttctgactataccacgccaacttgtaagaaaatacctacggaaggaaaaaaaacaa

SEQ ID NO: 262867 - DNA, 1889 bp, Cannabis indica
aaagtagtactttatatgctaatattttttgcagggatatatgtatgtatattaaccacaaaattagctggagatcattttcaactagaaatttacataatgtaaaggagaaaaatggccaaacttttgtattgttattatttcaaagtatacataatgtaaattttctttgcatagatcattggaataatgagaaaaacttgattaaaatgatcaattatgtcacatgagatgagaaaagattacttcatcaaagtttttacacaaaaagaagaaaaagatttaaacttgagtatcacagaagaaaagttgtaataagataaagatttataaccagtcatgttggaactagaatcaccttattttgaccagaacttctgattatgaaaatggcaaaaataacagatacaagagcaaagcatctcattatggccactaatgatcttttcttattgacattattagcccttttctcttcatgaacaagacccttgttcaatttctctccttccttaatcttttctttctcaacacaaacagagcaattgttgttttcttcatcaaacgacaacactgatctctcttcttcatgatcactttcttgaacattattactaccaatactgttccaacaatcattaccaccaccaccaccgagccccgtctcaaaaagacggcgcctaccctttaaggcgccgcccttaatggcctctcttcgctctctaatcttgtctctcacagccgaatcagagctactcttgatcaccttcaccattgctacatctgatggatttggtccactctgaagtgaagacatgagatttttgggagaggtttccataagagtgagagttttgatcataaattttgaattatttgttgaatcaacatgaacatgattatgatgatatctcttactagttcttctacaatgtttgtagaagagccattcttgttgaagttgataaaatttctggtgcaatttgtctttggtttctactaattttgagctttgcatggtggggtaccaaagatgatatgattatttatttaacattttcttttttgtttgagatttttgaataaggtggtggtgatagagaatttggtggggttggttagttgaggattcttaaatttttaaaaagatagtcaaaaaattgccttttaatgggacaatattaactccccacgttcttatgatccctaccaattcaaattttgatataatttttttttgaatgaaaatatctacaccattaaaattagatttatggtatatgactttgatatgattctttttttatttatttttttgaaggatgatatgattatttatttactttgatttggtggttttttttgataacttggtgtatagtttgttattcccatattacaattttttcaaaagaagaaaaagttgaatttgtgggatttttttttaaggaggcctatctagtttgtgcttatctaaaagataaaatccaacccttttttttctttatttaaactaacctttaaaaaaaatatgtaataaaaaaattgccttaactaaatgatgagagtgaagatttaggattaaaaaatatatatatgtaataattttttggattttttttttggaaaaattatattttgagacattatttttctttcttttaattatctctttggtaggagcaaccgaccatggctattggctatcatggaaaaaaaaatttctaactaatgttaaaaatttctccaattgatacaatatcaataaattttaaaatgctcaaatttaagctacaaaaatggcttccaacaaatttctaaacgtgaatagacatatcacatagcaataatgaaaatcataatcatttgaatgaggaaaatctttcttt

SEQ ID NO: 262868 - DNA, 1186 bp, Cannabis indica
ttttactgtttcagtgattgtttatgtactaaaatatgctccccagactttgatatctaccaaatcattcccctcaaactttgatatgtattaaatcatgccccatgaactttcatccatgttagaatttttttactaaaattagataaaagtccttaaatctaacaatcttaatagttacgggggaatttttaacgaccaaaaaagttcaggaggcatgatttagtacatgtcaaagttcgaagagaaaaattactaattagccataaacaaatatatctatttttttaaaaaaatcaataaactaataaaaatattcaataaataaaaatgagcatttctatgcacatcaaggtgcctaatatcactataagatgaaatcttataattagttaatagattttttaatagcgaaattacatctcataaaagcgtgaaattacatctcacaataataaatgagacccgatattaaattacacaaagagtgatattacatttaacaaaagtactaaacaagtagacactattaaataccctttagcatttttcaataaaaatacatcatataacatgtcaccaaataataataatgtaacgaataaactaaacgaaacatatagtatgacaataaatatacaatccaattattagattgacacatatcaaacttctctaagaaaaagaaggataatgaccttgagaggcatggatggagtcattatttttaaaatatttagctttaagaagcttgacaataagagaatcaaggtcagtgaaaatctaccaagtttgtttagcaagcatatcttgcttgtggtgaacaatagctcaaaactcaagacccccaaagaatttagagttacaaaaaatagaccatttttttccaatgaattttcataaggttatttattgattcccaccgaaaattagccataagttttctaaatatttacaagtagatgaaggaaggctatagcacattgcaaatgaaggactagcttggataacagctttaagaagaatctttttaccaactatagaaaataatttactgttccaaacattgagcttataactagctttttggagaagatagtgaaaggaaactttcttagaatgagtgaaacattgtggcacattaatgtatttattgatggaaggtttatctgttggaattatttta

SEQ ID NO: 262869 - DNA, 1879 bp, Cannabis indica
gatgatagtgtaaatcgctcaaaactgcattgcaccaaattaaaactgtattttcgcagtgtgatttttgcggttttaaaatctcatggtgcggttgcagtttgagaaattacaaaaaatgcatatgcagtttagtttaaaaaattaaagactaaaacctcactatccgcaccacgaacaccaatgttatttaatttgtttttatatgatatcttgatgtgatgagctaatcataatagagtttgtcatgaagatggtgcaaaatgcaaatgaccccaaatttgaagcaccatcaaaccaagttcgaaactacaaaattaaaaaggaacgaaatgaacacattattacatatttaacaaaacattaatacggattaaacaaaaaagactattattgtgtgaaaaaacatgaactactactatataacacaacaagatctaattaagtaaaaatagagaattgagaatcaatctctctagtgcacactattcatgacatcctttattagtttgggctctcgttttctttttcttcatcttcttattccaaaagtcatcgctaaccagttttgctttcttccagaaacaattctttcgatgaaaaatccaattaagaatccacatccatatcctactgccacgactttccaaccaaattgaaaaattgagcttgaatcttcttcttcttcttcatcagatgatggtagttccaacggcttcgattgtccacatgagctttgcaatggaataccacataatcccaagttgccttcgtaacaactgttatcaaatgtgttgagatgggattgtggtataggtcctgagaggttgttgtgagaaacattaaagtattgaaggaaagagagttgatccaattcacttgggatgtgtcctgaaatctcattttgagaaaggtctaaggattcaagcttttttagattccttagcgatgaaggtatgccacctttgagacgattgtttgataaatcaagagaatagagccctttcaagtttccaatgatttcaggaatttctccatcaaatttgtattggaaaagtttatgactgcaataatattttggatctccttatagtagatagacttgcctttgattggtattgtaatgtggtaaaaataaagcacattcaaagtagcaccatttgatgattttattttgaaaggtattgaccttaagtaataaaaatcttcaatgtttgtacttctcatggccttccaactttggatgtatttcaaaggcaatttcccaataaaattattgtaagaaagattgattattcttaattttgggaaatggaggctacttctataaggatcaccaataactccatgcaattcattattttgcaactcaagaacttccaactcttgaagaaaccctaaccaataagggaaaacatcattgagcttattactttccatgttcaagtaaccaagcatgctacaatttgtaagtgattttgataatttcccttcaaacatattgtaacccaaatcgatggatctcaattcgattccttctctaaactcaggaatatcgcctgagaaagtgttgtttcgaagacttaatatcgataatgacttactaaactcaccgaaacaaggaggaagcttaccacctaacttattatcagaaaaatctagaatttgaagagaactaagattgcatattgttggtggaacctcccccatcaaagagttttcggaaaggtacaatatggacaaagtgtctctacttatgctcaacatccaatccggtatttgaccactaatatggttaccagtaagcttcaactccacaatttggttttgatacctaagaaaatcaggaaattttcttagattacaatgggacaattca

SEQ ID NO: 262870 - DNA, 3655 bp, Cannabis indica
atttgtaccagctgtatagactggccttcgaacccgggtcacctaagggccattctcatttgaattccctttctcctagcagttggatttcttagcttagtgcacaaggacacgcatgcttcgcatgatagcgtgtcatgggagacaacctctaacattgtacatgaaatagcatggctcctggtttgtagcctgacatgcgtgcacagagcttccgtgggctaaaggcgtaccctagactagtgcatcctggtttgagaagatccatattctttgcgtgagcaaatggtctcatcttttggaatggaatgaggctttagctcacgatattctttgcgtggacaaccttcggggaaacttctttcatggagacctttcccgcaaagtcaatgccttcattctcccggagtgctaggtgaagtgtttgggtggcttaattactccttgtttgtcttttattaatatccatgtggcatgcttgcagaaatatagataacatttatcccccaagcttctggggcatcccatggtctaggagcttgaaacatcttttcttgagagattttgtgcacttgggacttatgacaagtcctttaatgcactaggtcatcagctgccaatctagggtatgtttgctcaataagcatgattacttcaattcttttgtcagtgccttaaaatctgacttttgaatttcacccacgtggtgggcgcgtattccgtgggatgctcaaaacagcggtgattggatttgtgctttcttctcattcgttgggtgccttttgcaatgcatgcaatgatgggggccgactattgggaagcgagatatcccctcagcttcttgttcatccaaccgttaaacacctcttgggcgagcgagttgaatcgttggcctcttgtgatatgtgccttttccaggtacccaataaataccttcagcaaccattccactttcactttccttgcccattaaactagaactctttgagttttaagtcttctcctgttgcgcaagacttcatcaccattacagtcagacacagtctccttcactatggacgttgcaccaaaaccatcaaccaccacattctcttataaactggtaagttttctcttttgttgatttgttgtagaattttgaggagattgtgaggatgccttggcttttggaacattggttccacgttcatcatcgaaggttctaggatcatgccatgcgttgacccgttttgttattttattgacttctcgtaggtacataagtctgccatggaaggagcgggtccttctgtagctatgagcaacagttctaccaggaaaaggcagaagcttgtggtatctgcccccgagatgggagccttcccccaatgtcgcgatcctcagttaaggttgggccagccttagtcttcttaccccttagcccttttaagggtctcttcagtgggcttcaccttcccatgaaggtgattccttttgactcgctcgatatgcagaaggagagggaggtgaacaaggccttgaagtgacacttggaggctgcaaggctgcaagtctacaggacggaaaatgtactgtcagcagtctgtaaagctgaaatctcggagaatgtgcatactctaccccctatggggtcaattgtggaggtctaggccttggagaagaggcttgcatacaaggtgggcagagaggttgcaccttttgcccccgaactcctagactaggtagccagaagggcctctgaacttcccatggagacctgggcgtcctgtagtagcgtaaacattttcgtgctagcccattttgccaagcggtaggcggttggggtcaggcctcgagataatgcctccactttgttttggtttttttgctttgccccctaatctgacacttcaaccttttttttaacttggcctgttttgacaggcagctttgctggcagagagggttggtgcggaggcaggcgtgctagtaacagagttggagcaaatcaaggcagcaaaccgtgacttgcatgccaccaatgagaccctccgggccaaacttacgaatgccacgatccaaattgggggtttgcaagaggcgaaccagcagctggaggaggagaatgcccactaggcccacttcatacggagcatgaagggtgttcaggatctatgcacagagaacgtggggtggatatccagtgcaggctcttcctcccagtcaggtggtgtctaaccttgaaccttcgacaggccttccagattaatgttgtttcttctttttttatatatcctcctttgactatacttctttagtcacggagacaattaaatttttgcatggccacggagggctgtaatagtaaatagggtccttttttgcaatttttcttacttggagatttgttgtggtagacttttaagggctggttgtgttattgaagcacctggttccaacggccagtgtttcaacccttttccgttagtcttaattatctcttggccgattcaataaccattttttgacttgaccctttatttatttggtccgtgatcctttatggcccaccactaaaatagttactcatttggagttgccgagatatggcgtctttccgtgaaaatagatcttttgcaatttttcacatctccttcagggtctagttttttcacaaggtcgagttccgggagtgacgtctaggagtgccttaaacttaagcatttttcccttttttttccttgctagccttacattttagccaatcatgcaatctgatgggataaacctatacgaagtccacggagaattgtaagaaggatttcaggcgtattttctttttctttttaaagaatttttgctgaatacgcatcttatctgcgggttcgtgcttgggtttagcctttgtggaaagaattcaagtgcatttctcttagggacacttagttgagaatgtttcctattttttggttggatgcgtgcactgaggctagtcgactttggatgtaacgagttataattgtcagtaataggacacatagtatccccaaagtagctgggaatcttggactcaaattctcggtcatttgcttggagtctaacttatgtcttttcacaattttcgaggatgagtgttgagtgtagttctacctttattcggaaagcatacaatccttccgagggagtttcttgaaatgtacaaccactctcaggcttccatgagaaggaaccatggggtaacgaacaaaaacccagctgtacgattgatcccaaaaaatccctccgtgacataaacctcgtaagtgaacgcatgggcctcttgcagtgccaggggctttcggtttccccacaaggaaagctgggcctgtatccgtgcgcgggccattccctttatgctgaggttttgcttacaaacatcgaagggcaaggcatcattgggtgtgcgagagtcatgttgattttttataaaacaagcttcaacttccgggaagggaggctgatgttgtataaaaatttaagcccagactttccttgaaaagatcgaagggaaagcatcccagggagtatgacatacttcaagcagtccttccattttgggaaggagggttgaagatgtatcgtaccccagtgacctttattgcacgaaaaataaatgtgcatgcaagagtcacattga

SEQ ID NO: 262871 - DNA, 635 bp, Cannabis indica
cttttgaatattgaaacttcaacatcagaccataatcctatcttccttgagtttgtgatccctgaacattttactcctaatcggcgctttcgctttgaaaacgcctggcttaaggagccaatgtgtttggaaattgtggctgaatgctggaatgatgctagccgtgtgtctgtggttgaaaaaattgcttcttgtgctgagagtttatctaaatggggacctagtgttactggaaatttcaagaagagaataaataaatgccgtgctgagttgaagaaattgaaaaacaatagagatactcttgctgtccaacgttatatggaggtaaaaaaagagcttttcttagttcttgatcagaaggaagcgttttggaagcagagagcaaagcaattctggttgaaggaaggtgatcaaaatagcaaatactttcatagagctgccagcaatcgccgaagcttcaatcaaatctcaaagctcagagattctagtggtaattggacggattgggatcatggccttgctgatgtagtggtagactatttttcttctctatttagtgcatcaaacttgagtagtgatgaagtggttcagtgtattcaaaggaaagtcaccactcagattaatgaagatctcca

SEQ ID NO: 262872 - DNA, 694 bp, Cannabis indica
ctaaacctgaaaatattaataaactaaatcgtaaaataggacaaaatgaaactaaaactaattaaaaacactctgaaaacgaacctataaataacaaaatctaaaacctaacagacctcaacacaagctcctagggcctggttgacaagttaacagatgcattacttgactggcgttttgtgaattctaaggttgatatctccctttttgtctacattaataacttaaatatcatttatcttcttgtttatgtaaatgatattttagttacagggaacaacataagcctcctcaacaagctgattaatgacttaaatgggaagttttctctaaaatgacttggttctctccactattttcttgggatagaagcctaccgaaattctataggttttcttctatcccaaaccaagtatatcaaagacttgctcaatcgtgttcatatggagggtgcaaagggttgagataccttaaggaaaccataacttatgggatttgtgtagaaagtcaaagaatatggtattgcaagcttttactgatgcagattgggctagcttccctgattacaggaagtcaatgagtgcttattgtgtttttcttggtccatgcttagtgtaacgccctaatgctaaagaacgctacagtgctttttcaattatagtgcaatctttgctaatcaaagaattttctcgaa

SEQ ID NO: 262873 - DNA, 659 bp, Cannabis indica
agtttatcaacccctcttgtattctttgtttaggaagatgacttaatggtttgcccctagtggcatttttgtaaagatagatttgtaaaccaacttgggttttctcttatcttaaatgccttgtactcttttcaatcaaacttaatataattgtgttttcttgcattttattgacaatgtaaacaactttattttgatcaaatgtaaggtacttttgggtttttcaattgctcgcaatcttcctgtttaagtagttaattatctaccaaactttttgaatttcgagcaattaacaattcttcctcgctatgatagttataatctaccttgagcaaacttgaatataattttaattattttatcactttgtatattttagatttgcttgcatgaatagttaggttatctatccattttctagacttaagtacttttatcaagacgtgttgatatctcgtttagcactttcctagctcgcgtgaaccgttaatattcagctttatacgcgagttataacttttgattttcctttcccgtcatataggtttttaatcaaaaattatagttgtttgatcccttcttcgtcaaaaaggtttgatcaagatgctataacaattcaaccctctttgtcaaaacggtttggtcaggaagttataaca

SEQ ID NO: 262874 - DNA, 528 bp, Cannabis indica
atatagataatcattatcatatagaaaaattagacttaaaaaaaataaagaaacattatttatttagaaaatatgcttattgtagacaaaaaaagaaaaaaaaaatataagacaaaatgatcaatttttacaaatatttcacataaactacaatattaattggagggcaagcttagcttaatgaaagaagtagttcaattgccttagtttaattttttttgtaattaaatatatagtgaagactaattgtgtaattcaattagtaaagatccaaagacattcacacttttatataggttataaatctttcttggggtatagcttttctttgcgtagcataaactagctaattagaggtagcaatttaagtcagatacgataatacaatttaaaatgacataatttaaaatggctagctcatttattaagtaagttattgagttgacaaacttaatcaaaaaatatcacgataatatatttttttaaaacatgaaatatcaacttcattgaaataaagcattcaaatta

SEQ ID NO: 262875 - DNA, 1752 bp, Cannabis indica
tgtagagataactattcattgagttaaaaatattttattattatttgcttaacatttttatgtatatatatatatgtgtgtgtgtgtgtgtgtgtgtgttaataatatattttgttggcgttaaaaagtcaccaataccaactcgctagattggcgagataaataatgagtataagtaaatcatttagagaggcacaagttgtatagtagttcactctccatgtcacaatggtaatgaagctacgtctactccgattttttatttctcatgagattacaagaaaattggctaagtgtgaaagatctaatttctagtaagagaaattagagagagatggtgtgaccttataggtacttttctaaatgaaaaaaatgagctagaagaactctccttttatagggaaagaggtcctattaaaataataataataatattccaaaaatattgaaaaatacatgtaagctattttcgatcgttgatgatctaacagtgaaattggctccaaaggccaatcgtcaatttttggagcttgagttgcgtccacgggacccacttcgagtaagttgtagcttaaatttataactcccttgaggtgaaatttggagtcgataacttcataattacaattagagtgtgagacatgacttgatagagcactgaaagagcttcaaatacaagttgaatcgcatcaatcgaatcaatattgagtgattatggccattttactaaaagctgttctcagcccagttcccaagttgacatgtgccgtcaacctggacgttgggtgactaggaaaacgtgatgaggatgtattttttgatgcctaggtgatatttggacatcacttagccagtttttatgttttggtaaagctggtcaccagtgttagattttatgccctaaataaaatccaatttcattataatcttatttactttcaataaagattagaactcatatcttgagcttgtcatatactttgttcacatattttatacataattataagtttaatgtataagttctattaaatcccaaacatatagttatttacaattatagtgttttaatcacagtggaaagtaattgtgattatatgcttcaaattatttagtcacatgatttatcagtgcactagatttacactggcgtgttaattaacgatggggtttgcttacacttggataagtggaatgtcttttccagggcattagtaaagtaaactagcatcaaatgtatcaactatacatcggactagaccgatattaacagaaaaaaagatatcataaacttactgttatatcttttctaactcaatgtgacttaggttatcatagatcatttgatcttaatccagagatagttacggtctagcttaaatgtattgcacgagttctttgacttatctgttaccaacttactgtagaactagctcaatacttacatcttacgaactcgatagtgaaattgagtgggaataatatagatatggacatctataactttcatgtctattagaagtgaaacgatggttttcttagagcttggcttaatgagataaataatagagcgctcatttcagtaattatattagtttctcgaaatatcatttgcaagtaagtattttaaggataaaatatattggagggtaaaactgtaattttgtttctactcaatgtaaaccatctatagaggatcaatgattgttgtgattgaaacaatggataatttatagtgtatctatatttggt

SEQ ID NO: 262876 - DNA, 574 bp, Cannabis indica
aataatataatattattaaaaaaaattgtatataccatattaacaaaattatatacaatcataaaataattataccatacttacaaaattatatatcacatttttatatataataaaataaaaattaaagatctaaaataaatgtatatactatataataaaatttatataccatataagaaaaattatataccttacaatcgaaatatatataataacaacaaataaaaataaaaaaaataaaatgctaataaaattatatatcatgtcaacaaaagtacaatataaaataaaacataaatattatttaccaaaatatatatactaacaataataataataaaaaaaatattactagcatatatgtatgctatactaaccaaattatatatcacaattaaaatatatataacatgacaataaaattatataccagcactgcatataataaaatagaaactaattaaatattatttaaaataaatatatatatcataaaatatataaaaataatatttagatatatatagtttgccaataaaattatatatatacattaaaatatttgtattat

SEQ ID NO: 262877 - DNA, 1233 bp, Cannabis indica
tatatatttaggtgtccataaaagttaataccacatatagttttacataaaaatattgcataaaatacaattaaatacaatacaatacaatacgacctaatacgttccaaacgagcccttatactaattctttagcgctacatgtgtcatttaaaataaaaattttaaaaaaattattaaactaaaagttaattaataattttaaaaaaattaagtaaaaataaattgaaacattttttttttcaaattaattacaaatgtggccaaattgtcaaaggtttaaataaaattttactgaataatcactttacatgaatgaacatcatatttttacccaaaatacattaaaattaattagtaacttttcctcccgaactttgacatgtactaaatcgtgtcccttgaactttttttgccgttaaaaattctctcctaactattgagattgttaaatttaaggacttttatctaatttcacttcttgaattttcattcatgttagattttttttactaaaattaaatgaaagttcttaaatttaataatctcaataatttgtgaggaatttttaatggttaaaaaaattgaggggtcacgatttagtaccttgaaaccttaaagttaacaaaaattactaattaacttatattaaatgatgatgtggttgctgggctgggcttcgagtgaaaccaatccgagatacaactcctcttcagttcacctgtaactgtaaacaaagaggccaaaatttgcagagtggtgacaatggtgagtgaatgagagcgagactcaaaatataggttgaggcgcatcaagcagagagctttttagttaatctttccataatacttcaagtactaatacttcaggtatattcttattcatcatattgaaaaagaaactaaatgattcgtttaatatgcaaaaagactctgtcttgcagtatccatggcttgtgtttcactagtattttctcagacccatctcagaaatgtctagttttactgactcacgatctcatacggtttcatatctccaaaattcatgtgggttgtccctggattctgccatttctgtttctgagaagcttttaattgtagacactgaaaagactgatacaatcctacagttggtgagaactcaggggttaactcaagcccagattgcaaacattatcacaactcgtcctacattgcttttagctagctttgaagataaacttaggcctaatat

SEQ ID NO: 262878 - DNA, 566 bp, Cannabis indica
gctcccaaaactcctcaacaaaatggagttgttgagagaaagaatcgaaccttgcaggagatggcaagagtgatgttaaatagcaagaagctgacaaaacgattgtgggaagaagctataaacacaacttgttatacaataaacagagtgtttattcgttcaagtactttcaaaacatcctatgaaatttggaaaggtaagcgtccaaatgtaagtcattttcatgtttttggatgtgtttgctatgtttctagagaccgtgagcatattggaaagtttgatgctaaaagtgatgttggtgttttcattggatattccacaaatagtagagcctatcgtgtttacaacatgagaactcaaactattttagaatcagctaatgtggttgttgatgattttaaagatttttcagaatttttcacaaaaactgagatagatagttttctggatactccactagaagtagcaaatgtagattctgatgtaggagaattgaattctgaagacccaaatgacgaatctgccgccgcaactgaagctggtgaaccagaacagcctatcttgac

SEQ ID NO: 262879 - DNA, 995 bp, Cannabis indica
ttatcagtagttgatcagttgatatatattagtaaactgaataatcattaattacgtacatatataaacacacatatatatagataaatatacatattcaaacaattgtattatataatatagatatgaagttaacacacattgaatataggtattattcagccaataatataatatatatttttaactataatttacaattttatatatttatttatatataactgtttatatgtgtgaacacttttacgtactattgatcgatttatacatatacaacattaaaccaccactaagaccaacacgctaaaaattaacacgctaaaaaatagtattttaaaatagtctggtgaacatacaagacttttttattttatatatgtacgtgtgaaattaacggttgaatattggatttatcttataaattatttcaatttttttcttaaaatttcatagaatattttagtgataataacatacacgattataaaaaatattgaacaaaaaaatttttctaaatatcaaattaattaaaaattacactatatatattttaatggagtgcatcctataatatatatgtgaaaaaaagaaatccaaaaaataatgatgatgatatgtatgaaaaaaggtaaggaatctttaggatattggtgtggaggaacagctaataatggctgtgtacaaaaacttatcttatcttcatcatattattatatagtcatatatataatatataatatttcaaataataataagatagtgatcatatgtctcatataatcatattagtcatatatatgtacttattattgtaattacgtatagagaattcaataaattttaatttaacaactttgtaaaaaaaaatatattgtttggggaaaggttgatattttttttagtttattactattttaaaaaacatacatatcttaaaagatataaatttatatttattatagagtaaatagcggcataagtactcaaagttt

SEQ ID NO: 262880 - DNA, 1851 bp, Cannabis indica
aacgtcaaaatcttggcacttttattatttgaccggcacagaaatttctgctcgttattcttattagtttctaaatatgcttaatttttttttaattaacctttgaatctcaaaagctgaatccactattttttttttaaaaaagtgatttttaaattccttgccaatttagtgttgttgtgtgaacactttaaaaaaaaaaatgaaaaaaaatacttatagtaaatttctcaatttataattcatttaagaaagaacaaattatatgtatttactatttagtaatgaacgtgacaagttttaggttttagctcatgaagtgtgaaaagaggtttgccgccaattccgattacatgtgtgatgtgttaaagaaaaaacaatggtagggaggtccatgatggcaaattgtcattttgttttttgtcgactaattaattgtaattgtggggtttttttttttcttcgttgggtttaataaatgcacagtatatatagttctcagaaccgatgactggagagtttggtaaggtaaaagaagggtgtaataaaggtatgagtcaattgtggcataattccaaaattttcattttgtttctatttaaaaaccctcaaatcataataatgttagcaatttagctattctatccattattagttattaattatcatattgtactgacaccttaaacataaagtattctaatacaatgtataaataacacaatttaattgagccacaaaataaatattaaaataaaataaaaaatttaaattattatttttttgaaagcaaaaattttaaattattaatttggtaaaaaataatttttttaaaaccctaatatcatgaaccatatctctctccatttctctgcctaccaccatcaccatctttcccggtcttcctctcttcctcccatctccggccatcattcacaaaaattacactatctatcaaataaattttttgcaatttttactatgttttagattagatagatagtcattcacaacctcatacagcaacggatcgaccaacaatgatctctcatagcaaatcctctcaatgcacttgggccttggcccatacatattggttccggtatttattggaccacatctaattttttttaggactattcaaatctgatctaattatatattgaatgttaaatttaccatccgatccgatcgatccaattaattttagtcatttaatcgatccaacatccattaaatgttagattggatcgtttctatctattgaatgtatttcatttattattttaatttgagtttatccaatatttcagatttaataaatagggatgtgcataaatcaatccaatctaatgttaactggttgatccaattacaaccgaccaccaaccattaaatatctaattgtgattggatcaaattggatgttattttttaatatccaattagatcagatcgaatgttagatgtgatacctaaaaatctaatacatctaattaaactaattagtattttcatttagttttaataattagattttatattattatagataaaatatatatgcttatattgtatatttttttttaaggaaaaggaagaatctattcaaactggacaaaatttgtttatattaaaattaacattaatttttttttgattggatgaattgaattcaatccaatctaacatatattgaatctaaaatattatatgaattcattttgatctgaaaaatatcaagcttaaaatattagataaattcaaattaaaccaatagatatacatggaatacatccaatggataacaccgatccaatccaacatagatattgaatcgattggatgact

SEQ ID NO: 262881 - DNA, 685 bp, Cannabis indica
tcaaatcaatctattctcacgtctcaggtatatatgtatttattcctgacagatttgtctgctgacgttttaattttatccttttctcaaatattcttcttgctccactataaatagaagtttagccaggcatactttcttatagcgacatgtcttcctctatgagttcaggaaagaaaattatggctgataatacacttgccacaattcctttaacaaagattcgttcttgtcctgcacatgatgctgacaagaagaatctggaggagcttcgcgttgagattgcaaaaatatctgaagaactgtcgggagccaaaggaactatagagtacttatgctccctggtgaatctctttcaagctgatgtctcagcatggcgtagcagacttgtcctctctgagaaatggaaagatgatcgtgttgctgatgacttgaagaatattctcgctcatattcagggagagcatcgggaggcttagttttctccctttttttcttttgttttgttactgtattaggtttttttttttgtttgtttagattcaattttatattggatagtttgtatgaagatttgcacactatgacctttgataattaccccgtagcatcctagaatgatgccaatatcctttttttgagtaggtaattatcatgtaatatcgatcttcatcaaaatgcttat

SEQ ID NO: 262882 - DNA, 609 bp, Cannabis indica
gattgatgctgaatacactgatcatgggatcgtgcgtatgccatatccctggagtctgatacccaagttatagggatttcgttgatgactcacaatgcgaaagctgaattcgttaagtgatggttgctctacgcaaattgctaaaagctttgctctgggcatgctagcgagacatcctgctcggactatgctccccgagcagatgctccaagtggattccacgtagtcaccattcatgtgaagccacgtcagagtgaaaaaattggaataacattttcctcccatgtctgtacaggacttgcgaagttgcgtgtagactttatccgagctgcttctagctttggatggggacactgttggaaatattttaccaggatctagatttactaccaagtatgtttcattaacatcctaacatgaattctaaaacaatgaaacaaacacatataaagtttagtaaaccttacattgggtgcagcggaatataataactccttccattcagatctctagcccttgattcctttctatagcagagaaaaatcaaggtctgaatttggatctctttctctccttcctttgatggtgattctcctccttgttgtttgg

SEQ ID NO: 262883 - DNA, 637 bp, Cannabis indica
tttttttttttttgtagaataatttattttgtaatgttactttcacctataacatattttcctacttatacaaggtatttaaattatatcagatcatcagatttatataaattagatacatgtgtaagatattaattagttacaaacataatttatcacaaacaaatccaacgtactacttacttatattcaaaatcactgctagatatgtgattttattttcctcaatgaataaattgttatgttgtgttatgatgaagtgtaaagaccattttcaatgataaaaatggaccgttttcaatgataattgtacaataatgttaatatttattatgttataaccttacaaaatttaatttgtctatggtaataaataaacatacctgatctcaatgtaaatactaaataataaattattgataatattcttaattatttttgaaaatgtaaatttaaaaagtgaattatttgattttttccgcttagtaaaagggaaatttgacaatatatgcttaaaaatagcatatattgttttaatatactatgtaaaaaaaaaattaaaaaaatactctccaattaattataatcccaactttaccctccccatttcaaactttcactctccctctaactctca

SEQ ID NO: 262884 - DNA, 1464 bp, Cannabis indica
ttttaaataaaaaacacagtaatttttttttaaaaaaaactttataaatatctaattatctattttctatttttttaattataatttttttatttttcaaattttttaaagaaaaaacaaagtaaatttttttttaaaactttataaatatctaacaactaagtttcaaaaaaattaaaattaaaaaatctatctatctatatatctatatacaattaaaaatcactcaacatagtcttatctaattttcttaattaaaatttataaaaaaaaaattatatacaattttaaatcaaaaattaaaactaacactaaatttaattgtatctcaaattaaggacttattaatcgtgtaatttaagaatttaaaaaaaataatataaaatctaaaatatctatataaaaatcaattaagaaaatatcaatatatagtctcttataaatttattgcctactattttaaaagttttggtactatattctcatagtttttttcgtttataattatatggtgagttttattcaattttatcaattattttataaatctctactttaaggtactatattctcacagttctttccctttataataatacagtgagttttattcaattttatcaattatttttgtagatctctattttaatttagtcttttattacccaatattatttgtcaataattcttttttctctttctattttagattacaaattacatgatgagttttttttttttatagatttattaattttttttttcgtagatctctattctcggtgagaattttttcaatttttaatatttgttaatctctattttggttttggtttagtctttcattatataatatctcttatttccttttcttttttagaccactaattatataatgagttttttttttttcactgtcaattttttttcgaaatctttattcttgatgagaattttttaatttttaatcttttttatctctattttggttttagtttagtcttttattaccttatttttttataatattatttttaatattatttttaggtaagagtgataactacaaataagatatgataatgatagtgactttggatgtagtgacgactacaagtaagatacggtgatgacatcggctttgaatgcaacagttttaaaattatatgatgagtttttctatagatttatcaattaattttttagatctctattttgtgtgaggattttccaacctttatttattttttattttactataacgtttgaaaatatctttttgttgttttcttttttaaataaagaaattgtatgataaatttgtttaccgtattaatttaatttctgtataaaaattataaaaaaaatttaatagaataattactcatactattaaaaaaatatcaactttatgttataaaataatataaaataatataaagtagatgagaagaaagaagaaga

SEQ ID NO: 262885 - DNA, 621 bp, Cannabis indica
caactttcttttctttttctgggctagttctactgtgcttttcgtttatcctttctgcattatgtcttccctactcaaaaaccagataccttactcaaaagagccttcctcctccaacattttctcaggattgcagccattggatcctgcctttctttctttgaaccctttttgtagtttttgtgatttcgagcccactacacttcctccattgcatttttcagaggtctgcagctgtccctgttttgagcaagctgcattgggccttggaacttatgctgcttctcgcgtcgatgttgcgccacctctggctatgtgtcttttcgctatttttccttccacattgacaccagttgaagcggctaaggaggagcctgaagtattagagggaagctcgactcagacgacaacggcttattaccccgagatcgagtctactgcccaatccgagaacttcgaggaagtccctgttcctacagatgcttccccctcggctttctgtatatctgcttcttcctttcctcaagagtcacctcgggtggtatctgagatcatacgccctccttctttttccaaccgtcgggggtggcttgcaatgcggaggacgtttcagcagaggga

SEQ ID NO: 262886 - DNA, 283 bp, Cannabis indica
gatcaaccgagtaatgacgtgaacaaaaagagaaaaaaagaagaaagagttaaagataaaaagagagacagtgaaagtttgctaaatattaggcaaacataaaaaaaagaaggcaaatgcataattctaaattagatccaattaaaattgttagatgtcaaatgcccaaaatattaggacctcttacatttgacactttttaatttacatctaatttacaaaataactttgtcatctaatttacttttctgttaacttttaataatatgttttcttttgtttc

SEQ ID NO: 262887 - DNA, 1038 bp, Cannabis indica
atatcatacaatatattaataaaaaactaattgtatgcttaaataacatattagacaacaataatagcagcaaactctaaaggaataaagcatataataccttttatataatgaaaaaatagttgacaaaaatttagtagagagattttgatcaagctctgcatcgtttttataatttctattaaagaaataaaacatataatatattttatataatgaaaggtattttaggtattaaaaagtaaaaaatgatatttgctttattattttaaaaaaaggacattaactatcaataaagttaaaaataaggtcatttacttgcatttctcaaaaaaaaaaaatggataacacatagagattgtcatttaaggcattttcactataattgttaggatatatattatgaacttatgataatacttgttgcgtaattatagtcaaatataaatattaatctttattagtcactttggtatttaaggaaatttttcatatttttcaaggacgttattaggtttgaataggagaaaaattgtgagatagttacttccataataaggtactatacacaaaagatttatttttttatttttatagttgatagatagattaaatttgtttgtgattcttacttctaattagaataggtcatcatatggtagttttcttatatgattattaggtaactagtttaatgtttaattttttattttgttcttttacatcaatttttttatttggttgctgcatgtaattagtttctttgtgttaatttttaatttatttgtattacataatcagtttatttgtgtcaaatttttaaatatttgggtgatttgattttgtaaaccactagttaagaattcttatgtgatatgtttgttttagttatctttttattgtttggctatcttattatgtccttgttttagtatttcagttggttttattatgtaatttgtatttgcgtttaaatgttgattttgttgttttactttattgatttctaagtgttaatttttgattgagttattctaa

SEQ ID NO: 262888 - DNA, 1883 bp, Cannabis indica
ctggacatatgatttcaggcatggagtgctaagaggttgtaataggaaatagtaattagtacctaccccaataaaaaagtggtggtgacttaatttttctttcaatcattgttgtatatatttatgaatattagtatttttgctctctaaattttcgacactatttgattttgtattttaaaatatacggtttattaaaaattctcttaaaatacaataattacataattatgtcatttctattaggttttgtttcttttattgttaaaaattagtatttttacccattgaacttttacaaatataacaattttgtcccctaatattaaaagaaaaaaatacttattttaaaaattataatattcttttaattttgaagaaaaaaataataattattattaaaaaactaataagaatattaaattaattaaaaaatattaagtttacttaaaaattttaaattattcttaaaaaatatttttaaattttatttatttgtaaacacttatcttaaaaaatcaaacaaatattttttgaaaaaaaaaaaatcaaacttatttatttttataaactcatatcttaaaaaataaagaaaaataattaaaaattaaataaaaatataaattgttttaaaagttagaattaaattaagaagtgtaaataccattttggaccctgtattttacaaaagttatcaattggaccatctgttttgtaaaatgaaaaaatagacccagtatttttcaaaattgtaccaataggaccttaaactgattttttatcaaaataaattttaataataatctgatctagagatgttatgacgaatctgattacattttctgtatttgttagtgttagaaattttcttaaagtttattatattaaaaaataaaattgttgaaaattgaacttagggtcttatttttaccattttagaaaatataaggtctattttgtcatttaacaagacagaaagtctaattagtaacttttgcaaaacacagggaccaaaatagaatttacccaattaagaaagtggtatgtttgctcaaacaaatttagatttttagagaaaaaaaataaactcaaacttgttaagaaaatatttaaatatttaaatgtttacaaatatttaaattttcatatattttttatatttaaatggatttttttaataaaaaataattttttaattcacacataggacattgcctcgaatttataggcactcttttgttaagaaatgattgttactagcttgtaagagaattttgttgtaaatcttactaatttaaaatttcccaccttttcctagttaaacaaaaaatttcccaccttttccagcttctaagatatcattacattacaggtaaatttgagttttaaatgaacaaactttctcctatatcaactcacatccaacttcaattcataagcccaaaaatcttaatcttttaagtaaatggaactaatccattttagccaaagcaactcttgtttggtggagtgcccaaacatagtgtgctaaggaacccttattccatttccatcagtgccctctctaaaaccaactcctccataaatttttggtttacacactagctctcaagaggccaaatactttactatgtatactcttttttctctccaaagaaaatttctactaagcttgtatatataggtctattcactttgttgtcgcttgttcgctctttttgaaaataatttgacattttaatttacgcgtttataaaatttggtcatacccttgaaaaaaaaatgttttgtttgcttactaaactagttttgtaacatcgtattaaattatattgtattatattgaattaaattatatagcatatttttatataatactatgt

SEQ ID NO: 262889 - DNA, 1312 bp, Cannabis indica
atatcaagtggtcaaagttctcgactctggagcatacaaataaggtaagtatgacgaaaaaatgcaactcattctagtaccacggtacttgaatggagaacatttaagaaaatactaccaatagagtaccaggtcaggtgaccactttaagtactaaatgaacatttactcttaagtgaatggccttcttgacggactacgcccaaaggtttcaataaaagaaacaaagtactcaggtcgggtgaccacgctaaagtacagtttcttatgtctgcaatttgttttatttcatgttaagctaaaagatcagattagatcaaatagctctgatgtaagttactacggtaacaaatacacttttcgatcaataaatgaataaagatagtatttcaaaattcaattgagtcgaaaaaatcagcatgtttataatttaccatacaatgcgtacaaaaggtttggtcaaacccaaaacactaaacaaataagcaatatatttgtaaaagacaagtgaccaagagtcatacatccgcttagtcacttgggggaacctatacctgtacaaagcatttggtaaaaataaaacaatcacaattgcatgacaattacaaatagagaatgaaattcattaaggatgacaaaagcacgtaataccgggattaaaagctgcccgatcatcccattgtccaaaaaatgaaaaataattccaagtttaaagaccacttggtcggtcgtgatgtcttagaaaaggccctgaggccgagtaagatatataaaaaaaaagaagataaaaaagaagtggttacacaggtggagtcccaggctcttggttcggttcttctgggccaactggagcaggaggatatgttgttcgaacatgaggagcatcagcagcccaatcggaggttgaaacagcctcctcggtttgggtcgcgcagtactcaaggtacatgtccttagcatcacccaagtagttgaagtcggcccggggattaggcttccaaaattcaaagaagagctcaagaccggctgtctccacggcattgaccttctccttcaacctgtccacctcggccgaaagctctccctccttggcatccttctcgtccttcatccgatgaagaactgctcgtagagaagtcctgtcatcttgaagactgtttacctcagcaaataagatctccatggtttcctcaaaacggtcagcaacctcgagattcttagttagcacggtgattttcttctcagcggcaaacatcttcttgttggcttcgcccaactccaaccgaacagctccagcttcccccttagcttc

SEQ ID NO: 262890 - DNA, 514 bp, Cannabis indica
ggcacaaaaaccctaacagaagatcctcctcccgactacaataagtcccaaatccatattttctagggttttttgagtttttcaaaaaatgttaggtgttgtttgggaaaatctgagtagaatgagttaatgagagttttatactaaattttctatcgatagtcagctttaatggtttagaggggtttagggacttgtagtctatatcttgtacagtggttggatatgatattaaagtggaaggtttgaaattattggtaaaaatagattagtcaaaggctgttgggaatctttgggttgttgtttactttaatggtaaacattttcacatatttttctctatatttatatattattcctttgtttggttttgttggtcatttggggagattaattgctattgggtgttaatttgcaatgtggttaattcaaaatgttgggaaagtttaattggtttttgcttaagtcacatgtcagtataactgtgtgcttatacttatatattaactttaca

SEQ ID NO: 262891 - DNA, 593 bp, Cannabis indica
gcggtcattacaaagtattatatcgggcaaagaggaaagaggcacggagccaaacctctgatgggaaaaagcccacttagccacattatgggccatgaaattacattgtctactaacatattgaaacatacaactaataaaaaagggggaggtgtttttacaaaatgagacgtagttatcaagctcccaacgggattccatcccattaagagcgttgatcaccaccctcgaatcactctccaaaataagaaactcaacaccacgagctttagcctcctctagggccaaacagcaagctgccgcttccccacagagagaatcagaaaattccaacttcgaagtagaaacccagaccaccttgccaacgtgatcccttgcaaccactgcagcgcacatgctatccaaccccactctgatgtcacagttaagcttcaaccaatattgcggggcaggacaccaagaaactgacggatgcgggatgggacaagggagcaagaaagcatgatgctctgcaaaagaaaaccgaatagtgtcaatgcatttaaaaatatccacagggcaattatgtaaagtaagttgtatattgataaaaa

SEQ ID NO: 262892 - DNA, 1545 bp, Cannabis indica
gagtgtgggtctgggtctgggtatgtgtgcgggtcttggtttgagttcgagtttggttcgggttctattctaattcccagatccaaacacttactatgggtcaagtccaagcatcgagtcccggatcccaagtcccgaggtggatcctaggtcatgatttgggcctgggtcgggtccttgatcctgatccaagttctgaggcccaagttttggtcccagtttggggtcccaattttgggtttgggtcccccatctatgtccaggtcctaggtctcgatccgggtccaagtttgtgtttcggttcgggttatggtcttgagtcctggtctgagttcaggtcccagtttgcgtttgggtcccactcctagtgtgggtccgagtttcagatcccaggtccgagtcaagttcttaggtcctgcgtccagcccctgtttttcggtctgggtctgagtctcgctccgggtcccggtctttgtttaggtccaaagtcacaggtcccgatccaagtcctagtctgggtatgggttctagtctgagtttgggtttaggtttgggtcctgctacttcctaggtctgggttctagtcctaaacctggtgtgattcctattccgggtttgagatcgtgtttggatgccagtctgggtccaggtccgggtctgggtacagatctgggtccgggtcttggattcaaacacttactatgggttaggccgaaacctcaagtctagattcggatctcggtcttattccagtttaggtccaaggtcttgggtcgcgtcatatgaaagtatttaggtccaggtttggggttgtgtcccggtacttaggtcttgcgtttcgggtccaaggttgtgtcctgtgtctcgagtttggggtcgagttttggatctcgatcccggttttgaggcgcagtttcgggttaaagtcccccatctatgttcggatccttagtccaagtttggttccaggatcgagtttggggcctaggtcccccttctaggttcagatcctaggtcccggtctaggtccaagtttaggtttgggtttggatcccgagtttgggtccaagtctaggtcactgtatgggttcaggttttagtttggttccaggtcctggtctgagtccgagtcccttctcgagtttgagtctagattgtgctcgggttctaatcaaattctaggtcccaaaggaggttctggtgtgggttccggtccgagtttaggtcctgagtctaggtgtaggttcgggtctgtatccgagtctgggttttgggcctgggatctaatctcgttatgggtatttttttgtacccgtgtcaaggttagggtttaggatttagggttttgggtttagtgtttagggatttaggggtatgtgtaaaaatataaggatttagggtttaaggtttagggtttagggtttaagggaccgcttcaagtctcggcttcaatttcgggtcacatgctatgatttaaggtttgggtgttggtctggtccaagtccttgtctgggtctaggtccgtgtttgggttcaggtccgagt

SEQ ID NO: 262893 - DNA, 1900 bp, Cannabis indica
gaaaactggtcaaaactctccttcaggccctgccgagccccactctctatcatacctctcatcattgtgctttgaagaaagttaattccccatgatattacaagatgagaggattcttcctctggtccaggcattatcttgtaaagcaattcaaccttgaatgcattcccatatggaacctcaggtgtactaacacttacaaaaacagcaaactcctttccacatgctcttacataagtttgctcctcaatggctttacaagccttcaccaacttcgatgcagctttagtggaagagacaactcgtgtcaaacacgacgtatctcctgagctccacgtccaaggctcctcgtgtaaatccgtagttccattaagctcggctagttctttcctaaactgtgaatttggagcaaaaaggaatgtgttaagatcatttggtgaaactgcataagcttggtcaactagtacacccccttgcaagttctcaggcatttcttgttcattctcctttgacttcattatctcaagagcttcttcaaagctacaatcagaaaaaaattcctctaccgaataatcattttcggaaattatactggaatactccgaagaagaatcaatagttttaaaagcatcttcattcttgtgaaacaacttctctagacggttagtaaaagatttaatcaactgttttccttctgttttcttcctgcccctagatttggtagagccaccaccattgttaggtaacacacaaaaaagttcttgaggttcctcattggtgaaatctgacattggttcaatgaaggaataggattgagactcctggagttttccgtgcagagaaacagtgagaagaatttttcctgcattaataggggaaaactccaataaacttgtaaactaaaatgtctaaccatgtattgacatacagattaagctttaagcaccattgattcttctccaagacacccaatatttggatattgaatatttgactttaaattctaagagataacaaaaaaagattcagctgaaaacagtttcaatagcctcagctctctatccactgtttaaaaatccaaatccattgcactaatttagtcaaataatcttttacaaaaagtttttcttaatcccaaatgagcttaaccaataatctatctctacttgtgacagtttccttattaagacgtgaagcaacacattcacataaaggaaactccttttctaagctaatacacgtaaactaaagcatataaacttatctagtttaaactaatgtaattgtattttggtaagattaaaaaggaaaagaaacaaagaacagaagattaagaataatgggaaactaaccgctgtctctgtcaatatgttttcccttatttctctttggcttttcaagagagagccatgtaggggccaaggtgtgattatcctcagcaacaacagaccaaataggcaaacgaatccgacccattaacccacccgatccatggaagaaacccggatcaatatcatgatcatagacagagacaataagctcctcatccatatcatggactctgaaaacaaactcctcattccatattaagattattggtggggttccgtcaaaatcttagtcttggatttttgcttccctacctgaagcttcacgtaacagtttttcacatgcaagtcttgaccttccaatacatacacatataacttcataatgtaaaaatagttgaaaaaaccaatgcttaaacgctcactcatttgcaaaggctacaacttttaacagtggtttgtaatagatttgaaatggaaaggggtttcttgttcttggtttcgtttatgatttttggagaatgagagagagagagagagagagagagagagagagagagagagacgacgaa

SEQ ID NO: 262894 - DNA, 599 bp, Cannabis indica
tttttgttgtatatttatgaaaaaagcccattaaactaataatagtaaattaaaacaaaaatctgaaacggaggacgtcgttgagccgaaccgaaccactctcaggcgatagaatgaagaatacttcgaagccgctctccgtctcttccttgctctctctctctaatttgtagctactctaatagttttaatgcaataatcttaattattaggaatatttacataaatatggaaaagataaagttagtttacataaatatggtaaggaaacttaataagaaaaaatatgatatttaaaataaaaacttaacatatatgagatataccattttgaattcccataaaaaagaaaataaatgaaactacagtgatcgtcggagttgtcaccggtgccataaaactcgtcggagtttactatcgtcgccaaaaaagtcgtcggaattggcattgtcgcaaaaaaaaatcactagaaaaattaccaagaaactggtttcttgatgaagaaactggtttcttgataaagaaaccggtttcttgatgaaaactggtttcttgatgaagaaacaaatttcttgctaatttttctggtgatttttcca

SEQ ID NO: 262895 - DNA, 522 bp, Cannabis indica
tgatattttttatgcattctgaattggggatttatagttggatgttaatgcttgagtatgtgttttaaatccctagtgattgttagtaactttgaattatgatttggaagttgtggctatggatttgtatgagtttggttgggtttgggagctgaaattcgagtaggagcttgttggtttctgggttctcggcatgctctggagcatgccgcggcccgctcctctgagtggacctgggaattggttccaggtgtcgcggcatggtctgggcatgccgcggccttccctcgtgtttttgggcagtttgagttgtttttcgaaagttcgtaactttggattccgaactccgatttgggagttctttatatcgttggaaagctcgttttgagctctatatgattatcttaattgtaaatgccatgcttgaattttagggttaccggcacctgatcaggagcacccggcgattcggaatctccttctattgttggacaacaggtaagacagtgattagcacataga

SEQ ID NO: 262896 - DNA, 779 bp, Cannabis indica
aatgaattcagaatgattattgcttgattttcatcacttagtgcttcattctcccctgaatttgccaattcaatgtgcatccttagaaattcatctaagttttgatctagggtttttgtatgactcatctttaacccaaagattctctcctttaggtagatcttattagtcaaggacttttgttgaaattgttcttcaagcttcttccagatcttggcaggagtctcttctttatcaaccaatctgatgatggcatcagaaaggttgaaaataataatcccagtagctgtttccaacagctcttcttgctgtattttttaagtattttctggccattcaatagggtcttcaagaaccctaagtaatttctattgagccaatagggatctaatctttctcctccgaatcctgtaatcaccagatccatcaaaacgatcaatgtcaactttgatattgctcatattagtaaaatcaaaattaaactgagttgagttttgagaaattgattgattatcaattagtggaaattccacagctttcccaatgtccacaactgcttgttgtgattcttcttcttcttcttccagcctttgttaatattcttgattccatttcttgagttgaattatgctcgaaccagagctctgataccactgtaggattttcttgtgaatttccaagaattccctacaccaactcaagctttaatcaaaacgacagggacaaaattgtcccaaaaaaatcaattaaagaaatgattcaaacgacaaagaaacttg

SEQ ID NO: 262897 - DNA, 891 bp, Cannabis indica
ctttctaccacatcgttttaaacgaagttttatcataacattctttagtttgaaagctataaattataatattttactaatttcgtctcttttaaagaagatactaattgtacgaaaaatagatttttcacaataaaagcaaatccctttgatatcatttgacgaaaaaaaaattaaccatcgataatcctttgttttaaattataccgattttcaagaccagagctatcaaccactcgaccatctctctgaaaatgcctctaaaaagtgataccttttatcattttcaattttgttaatattatctgccaagtaatataattatgaaacaagaatgtcactgataatgatccctaaacttaattagttaaacaactcattgtttgtgttttattgtattgaaatttctatatttataaagtgatctttatacaacaaatgacaataattttaaaaaatatctcattgtattatttgtaccacaaaacatttaaccacgtcttatgaattgataacttttttcactaaatttaccacgaaacagaaccttccctttacttgtgtgtgtgttttgttttttttttttttttttttagtgaaattaaactcttattaacaacaaccaagaatttaatacatatcaataagaaaagaagaataatcatcaatctaagctaattcatcatccattctaagtgcatgcacaactaattcatgagaaacgaacatgaactagggatgccttaggaaaactggaaagcaaactagcaaaaaaaatctataaaatcctagctcatttcaaaagaaagagcactattgaataatagaaagaggaaattacattatatacccactttactttacttgttttaatttttacctctattttca

SEQ ID NO: 262898 - DNA, 580 bp, Cannabis indica
atggtgcggtacactgccttcttttcttgtgaggacatcactcacaacgttctttgtgactactagatactcgtctgtctcttcattgtctagggctttagacaacaccagtgtctaggccaattgcttcttcagctcctagaatgcattttcacattcctctatccactcgaatggtttattaactttgagaatgtggaacaagggtacgcatttgtcggtagacttggacacaaatctgcttagtgctgtaatgcgtcctattaggctttgtacttccttgatatttatgggcgacttcatgtccaaaagggcttggatcttgtctagatttacttctattgccttggcattgacatgaagccaaggaattttctttagcttacgccaaaagagcaattgtgggagttgagcttcatgttgtagcagtaaaagattttgaagcactcgcctaggtcctccacatgcccctaacgtttttggacttgacgagcatgttgtccacataaacctttatgtcgcggctgatgatatctggtgtaaagcccgcttagttaatttggaaattagcagttgttta

SEQ ID NO: 262899 - DNA, 1062 bp, Cannabis indica
caattgtttggataaaaaaacaattgctcgaatattaacttttagtctgtggtatatacattttgcattatggtatatacattttgtgtactacagtataacatttagaaaataaaataataaaatttaaattgtataaaaatatacccttatcctaacctaatataccattgtgaaaaatatatatatatatataagtacaatcttaaatatggaaacaacatacccccaatcaaatatatctatatctcaaacttacactaatattttacgcttttttatttcacccaatatatactatatcacataaaaattatatatcttacaacaatatgaatataccacaaaactaatattaatgatgcacttaatttttttcgtttcgttcatgatatactaaatcacgtaaaataaatataccaatcttttaaattaatataccagttaataaatttatattttactatttccctcaatattcataaaatacatatactaatttttattttttattttttttacattaaaaatatataccactcttatataccacagttttaaagtagatatatcacatttaaaaattaatataatatcacagtgggaaataaaaatactaaaaatttaatttaatattccactaagttttttttcctttccttttccattatatcatataaaataaaaagaacacccccaatgaaataaatctatacctcaaacttaaactactattccacatttttttccctctttcattcttcatatactaatatactcgaatatgtatattgtaatatactttatctttcgttcttcatataccacctcacataaaaataatataccacattattgaagtaatatactcgaatatgaatatactataatatactttagttttcgttcttcgtataatatcctatataaaaatcatataccacattattaaaataatatacttgaatatgcatatattgtaatatactttctcattttgttctttgtatatcaccccacataaaaataatataccacactattaaagtaatatactggaat

SEQ ID NO: 262900 - DNA, 700 bp, Cannabis indica
tttctactatatatataataaaaaaaaagaaatatatatatatatacatatgtttatcgttgtacttttctattttagtagttagttttttggctcttattttgtaagtgtttcacataaatcccaaaggttatatgtcatttaatttttaatggtttgatgtgtctattttgtgatcaattcttgttcaaattatttgtcctaagaaaaatatttaccccctctcatttgtgcgttaattgctacatttctaactccaaaagagtgtcacccgcccaatacgaataatttcaatacccgtgagaaaattggagttgagacctttacacttttgagatttttcaatactatttgtgttaatgcttaataaaataaataaataaaagtttggtgcacacacacacaactttagaattacaactgaaataacattgatagaaaattttgactctctaccaatatttttaaaatgcttggatggtttgcttggtttagcttgtttattcaactcgattattatttttctctgcttgaattgctagggactagcaataagctagttgggggttgtgattaatggtgaaaaatatacatttagtaagcttaaagtataagataaattaaaaataagttaatattttcatgaaaataatgagatatatttttatgttaaaaattttaatttagatttaatttattg

SEQ ID NO: 262901 - DNA, 1434 bp, Cannabis indica
aatacatggtatagtgcaaacccgcaactttaaaaaaatttgatttttttttttaagtttttgatcaaacctttctgactagaaagggatcaaaccatcgtaagcttttgattcattacctatttgacgagaaagaaaaaccaaaagttataaatgagatataactcataactcgcgtgtgaagctgaatattaatggctcgcacagtataagaaagtattaaatgagacatcaaaatgtcttgataaaagtacttaaacctagtatatgaatagacgatctaactattcatataagcaatcaagaatatacaaagtgacaaattattcaaggtgataaatcattaatagtatattcaagtttgcttaagacagattataactgtcattgcaaggcagaattgataactgtttgcaaattaaaagcttagcaaataaaaaactgctcgcgcacatattaaattactaactacttaaattagaaaaatacgagcaatggaaagaccaagagtattctgcattttatcaaaatataattgtttacattgtgaatgaaaacgcaaacaaacataaatatattaagctcgaatgtaaaggtacgaggcatttaagataaatgaaagctaagttggcctaacttctcaaacttgtctttacaaaaataccacaagggacaaaccattgggtcattttcctaaacaaagaaaaaataaatatatatacaagaccaagtctacattattataggggacttggcaggattttcttgttcttcgtcacctcttcttccttgcaaaattcttccttccgagtcttctcgcaataggcaagcatggtttcggccttatcatccaaaaaactaaagtccaactcggggttggctgaccaaatctgatagatggtcctcctaccaatattgttgaccctctgtttggatccagcctccaactctttgaccttttgatcatgatcaacttattttttaacaagatcagcttgaagaaatttaagagaattctcaagctctttaattttttgttggtcgtcttggtgttgtttttctgcttcatccttagtgcgagaaacctcagcttcagaatcgctccacttcttggctacccctatgttccttaatttggcgaagctcagtctctagcatctcgacccgttgagatggccggtgatgtgtagcgtaaacaaaaaaagaagcctgagaagaaagaacaaactgaagttagtaaggagggcagagtagggaagagtaagaataaaaaaagtacgaatattgacttaatgcagaagctcttgacttcttttggtcagaaactcggtattgctgcaaataatgagatcccaatcgcaagaccctgttgggttttatgccctaaataaaactccatttcaatgtaatctggattattcaatatcaataaag

SEQ ID NO: 262902 - DNA, 892 bp, Cannabis indica
aggcttcatacttttgttttgttattgacagtataaaaggaaaaaaaagggggaggacagtataaatgtaaattctgccgtgtggcagtaaaattgaaaagtattaccccaaatccaatatttttgtaaaatgcccttcattttttagctagccattttcattcttgttcttattattttagagtttttaataacgtaatttttagttaattatatttttactattatcaaaataagtaatattatgtttataaatattaccttttataataaatatatgttatataactaattaaaatatatatatatatattttctaatttttataggagcaaccgttccacttggtttctatctaggtccacctttcatgtatacacataacattactcttgtttaaaatctccctaaattgttaaacaataagtattatcttaactgatttttcaactgctcctttctggttgttagagacttggataattttagctgatttttctgttacagttggttattttccaactgctcctttcttgttgaaccgagctatataagctcctctcttcatttgtaaaatcaagttgagccataataaaatttctgctctgatttttgctttgtttcctctcttttctcatatggtatcagacgttatatagcccacagcttcaatggcacggccttcgactcgatctcaggatggtgctcctccatcgtcgatcgacaaccaagctgctgaggtcacttccgatcctgttccagctccaaatccctcagcaattcctcctcacaatccacaaattcgggttcaaactcagaacacagatcctcttcctcaagatcattccaccattgttgatgacaacacaaatcaggcactcacttctcgatc

SEQ ID NO: 262903 - DNA, 1185 bp, Cannabis indica
aaataattcaaactaaaattatggaaaaaaaaaaataaaatgataataaaatgttcaaatgaaaaaaaatcaatttattaaaatactgtattatatatttcaaaattgaaataataaaaaactaacaaaaattaaaataataaaaaacataattgaaaaagcttgtcatgtgtcatgtatgataaagtctacaacttcatagacaaatatttttcgatcttttctcttttatccgattactttgtacaaataaaataaaaaaaaatttgcagccaaactctagggaattttcagtttagtatgatctaaacctcatattagaaaatttattggtgacatacaatgggaataagatattggggacaatagatttttttttttttttcttcatttgttagagcatctctaaggtcacgttaaatttagtgttacactatcattaaatttagtgtcaaaaaatattttcactccaaccacaatactaaaaaatattctttattattatattaatttttaaaaaaataaaaaacaaatgacctattataccaatttatactacttattttttatttttacgttttttttatctttacagttcaataaaactttatttacattaatacgaatttattaattttttagattcactgttacgttttatttgttaaacttaatatctgtcaaaaaaaaaaagctccggcttcttctaagacttcggctatctgtacattcaattttctcaaagctattattagtcatccaaacacttttacctttgaaggaacacaacttttatataaacctctaggctctggcccaatctaaattattgcaacttttcttggaatttttttcagacatttcacataaaaattggcagtattaattttatgagtcatgagtatatggagaatagtcttttgttagtatgctcattaggcatgacattcattcattccaaagtcatgaataagacttctgctcatatatgccaaacaacaatgttacatgtttttattttacaaacaatgttttttccatttcgtgattaacgtgtttttatttttttgtgagatttaaatgacagttgtttctattttacaaactatactttctattacgaagttaaatagtttctatttcttgagattaaatgctagctgtttttattttacaaactatagt

SEQ ID NO: 262904 - DNA, 960 bp, Cannabis indica
atacacgacaaaacatcatcaacacccacaataataaaaaattaaaaagaatacctttcttagctcttacaatctcctgtcccaaaccaaatgttccctgaaaaagggaaaagaaattacaatttggtataaagaaactcataaattaacaaagagaatccatagtagtgcctccttcacctgaaatgatttttcaatatattcaatccctacaattccatttcatttagcgcacacatatatatgagtcagcattagaatacttttttggggagattataagcacatgatgaactagctaccaagtaacatgcatctacaatattacatatgcccacaccacaccacacacgaagatatatagctaatattattaaatagttagctagatatatttttttcctataataaaattattaagaatatgcccatgccttttgtcaatttctaagagataacaaaaattcagaagaaaaatatatatctaagagataaaaatcatatgagatggatatcgcctcctcatagctatttgcactagactatatatatgcatataaaagctaaagaattagaaaaatcatttcagatgattggcatgttataattacttatagcaaacacaatatttttcggaacccattcgttcctggcgtcagaacagaaaagcaatttctttttctggtttctttttccaaaaacaaaaaatgaaaaattcaacaataaatcatagaaaaagcaatttctggtttcttgtccctatttctctctgtctttgctcactccctacaaacctgaaatcaacctctcaaacacccctaacctacacagagagactgagagagagagaacgcaagagaaaaagagagggaaagagagagacttacggaggtgggaaaatcgcaagagagaaagagaggggaaagagagagaccttcagttcttcaatacgcaagagag

SEQ ID NO: 262905 - DNA, 575 bp, Cannabis indica
aaaaaaaaaaaaaatcaaacataccttcctaggacgaacagcgacaaaatcatcctcattatcatttctcttccttttagctttcctagcatcaccagatgaaggctcacccacatgaacaacaactttggatttctgattaagaggttttgaagtagttttagcaactaatttgggtttagattgttcaatagtctttttttgggtttcgtaggagaaggggacaaagaactcgaacgagatcgagtaacagccattactcaaaaacaaagaaaaaacgcatacacaacaatcagaaaaaaaagagaaaaaaaaaaagatgaacagatgaagaagaagaacaaaatgaaaatgatgaagaaagggaaatttaaaaaatattgatattaacgagggagtgggatagtgtgtggtaactgacattagaagtgattgaaaattagaagtttggagggaaacgtgtaggcagttgggtgatgtaagcaaaaccgtatatgatgtaaaaagttttaaagaaaccgtataaaagtttaaacaaaatggtaaaattaaaaaatgaaactatggaaccgtat

SEQ ID NO: 262906 - DNA, 526 bp, Cannabis indica
aattctaatgattgaagagtttagattttcttggaattataaaggaatgtacaatttttgaaactacaattatttttcataaagaccgatttgtttaagtattattcattttatcattaacttactcaaggacgagcaagagtcaagtgtgggggaattcgatgcgtccatatttgtcttataaatatgatcattttatgtattaatattcttaaattgattctttaaattattgattagtgtgattttaatttgttaggctattttaaagactattcatgcatttagagtcttttggagggattttagcatattttggtggaaatagtggaagttggcaagctcgattttataaggtggaacttaattgtaaatttggatgaccttagaggcagaactggacttggagcttaacataaaatttttagatctcgttcttatctttccagaacatcgtgaatcgtccgattctgagcaatatcgagagagttatggctaaaatactatcagtcatcgcagtaggaaa

SEQ ID NO: 262907 - DNA, 127 bp, Cannabis indica
aacaatgaagggatagagagagagagagtggcgactcagaatgcatgtggccggccaagacttaggagaaaggcctcacttttgtttctcaaaaattaccaattttcacattcaaccttataaatgt

SEQ ID NO: 262908 - DNA, 926 bp, Cannabis indica
agagcaaacctagacgtttttgcctagtcacaagaggatatggtcggaattgacccttctatcattttgcacatcctaaatattgatcccaacttccaaccagttaacaaaaatgaaggctattggagaaagagcgagcattagccctaaaagaagaagtagaaaagctacacaacagcaatttcataattgaagctttctacccaacttgggtcgcgaatcccgtactagtacccaagccgaccaagaaatggcgagtgtgtattgatttcatagacctcaacaaagcatgccccaaagactgttgtccactcccgagaattgatcagctcgtggatgcaacagcagggcatgaaatcttaagcttcatagctgcttactcggggtacaatcaaatcaaaatacatccaccagaccaagaacatacaagtttccaaacagatataggtctatattgctacaaagtaatgtcgtttggtcttaaaaatgcaggagcgacataccaaaggttggtaaacaaaatgtttaaagaccagatcggccaaaacatggaagtgtatgtggatgacatgctcgtcaaatgcaagaaggctggggggcacatagacgacttggtcgaatgcttcaatgtcctcaggaaatacaacatgaaactaaatcccttaaagtgctcctttggagtaagctcgggaaagtgtctgggcttcatcgtcaacacccgaggaattgaagccaatccaaagagattcaagccctcctggatatgaagtcgccaacaaaaaccaggaagtgcaaagtttgacttgtcggatcgccacgatctgaatatttgtttcaaaatcaacagacaagtgtgtcccattcttcaacatcctacgaggaaacaagcaaattcaagtggacgaggaatgtgaaaaagcttttca

SEQ ID NO: 262909 - DNA, 799 bp, Cannabis indica
tatagctaggtactatttttttttagattaagaaaaaagccctagatttaatgtacattaaataccttctaattcctttttaataaacaaataccttttaattataatactggtcttgtatagtgagagctatattatatatgtatcgaatgtgccaactaatttatcgattaattatatagaaaaaaactaatttattaattttcataattttaacgtacaattaacattttcaatttctgtaaatgaactttaattttataaaaaagttttttattttttttttatttttagacttcaaagcaagttttttttttttttacatttttacgaaaaatttacgtagtaacttatataacaattagcagagtaacataacactacagaaaatcttatttttaattacaacaaaatttatgactaaaagtaaaaaaaattgtaactaattataaatcatgatttctatgtcgtataaaagtattcttcacaaaaattacaatttgttgtgattaaatgtatattttagtcacaacttgtaactaaatactatattttagtcacaagtaatattttgttgtgactaaaagtcacatttagtcacaaaaaaataatgttgtgactaaaaagttgtcactaaaagtactagctgttttttgtagtgtaaattgaaactcaaattcatatagcaactcaaaaccgtaaaaataaaaaaaataatatatgaagtaattcctcttttataaattaatattttttattttgagaatattaaatagtatatattagcatttaaaaaaaa

SEQ ID NO: 262910 - DNA, 685 bp, Cannabis indica
ggaaagtggagagtatgtgtagatttcactgatttaaagaaagcttgtccaaaggacagtttcccgctgccacacatcgatatgataatcgacgccaccgcaggacacgaactaatgagcttcatggacgccttctcaggatataatcaaataatgatgcaccctcccgaccgagataaaacatcattcatcactgagagggggacatactgctacaaagtgatgcctttcggactcaaaaacaccgaggcaacgtaccaacgaatggtgaacaaaatgttcgcccagcagttaggacttactatggaagcctacatcgacgacatgttagtaaaatccaaagatggcgccaaccacgtcaaccatttacgagaatgttttcagatcctcctcgcccactcgatgaaacttaacccagccaaatgcgcctttgttgtcggatctgggaagttcctaggccatctagtaacgcgacgaggggtagaagtgaacccggatcaaatcgaagcctttcaagcgacatgacaaccccgcaccataagagacatccaaaagttgacagggaagatagccactttaagccgcttcatctcaaaactctcggacaaaagccttccattctacgacttattaagggggaaccgcaaattcaattgggatgaaaaatgccagctggccttggagg

SEQ ID NO: 262911 - DNA, 492 bp, Cannabis indica
ccgccatgattctggcgccactctgaagaactcggtcaacgtccggctgtatgatgaaaaagacagcgctattgggaggcaaccaaaattttcttgatgttttagttgaactttcgtattttgtttttagttgtttttattatttctgttctttttagtttatgtttagtgaaatggtgaaccaaattttgttttttttttattttcttgtactgtttagaaaaaaaaaattcggggttagacccagtggccccggcgagaagtactgtggccacggccataaaagaactacagaagcaacattttttcgagattatctcgccgcggcgaggaggagtgtcgccgcggcataaaacctgggcagagaggctatttttccacacctatctcgccgcggcgagcccattcgtggttgcggcgagaacagtctgatgtgaataaagggggaaaatcacttacattcaaaaacatatcctcttctaaaccctaaca

SEQ ID NO: 262912 - DNA, 700 bp, Cannabis indica
aatggctgtatatcttcgagttcttagatcactagagagagagagagagaatacgctcgagttcttagatcaatagaaagagagagagagagtgcagacgaaggcgatgaagtgaatggctcttgtagaatttcttgatgttcctcgatttcttatatatattaatgatatatatggcttcggctacacatttttttttgctagcccgatggggcccgatgtttcttagttttttaaggatggggaagatggcccgattaggcctgatgggggcatgataattaggttaggcccgatagggcccgattgttggcccgatgagtgaccccaaatagaatatggcccgatggggcctgattgcagattcgatgagtgaaccaggatgggggatgacccaatgggcccgatggggcctgattgcagacccgatgagtgaaccgggatgggggatgacccaatgggctcgatggggcccgatggtcctgatgatttgggcccaatttgggccgattggtaaagccgaatagggttgggcccgatttcattgtccataaagtcatactagctctagctttggctgatcctcgtgcaccactattacactcttagcattcttgaacaagaagtaaagtatcatttgactaatgcaaagaaaaaaccccaatacatttggaagttgtgtataatataagacaaaaaa

SEQ ID NO: 262913 - DNA, 2897 bp, Cannabis indica
acattacataattttcacttatacaattttagagaagagaattaccaggtaggttgtgtatagatttatatatatatggagagaaattaattagacatatggcttggatcttggatccacttagatctaaggagcttaagtaacattcttgccttagttttggttcttccactacactggctttgaagtagtaataataactgagtcaaaactccatctgcaatggcttcttcccttgcctgaaaagaaccataacatactgtcatgagtgatccgactgcgttttcactctcctcatgattggataccctgaaaactttcttcacaagagtggtgatcccattggggttcctcaacagtgcctctcttgcactgtcaagtgctaaaagcttctcaagaatgtccatagcaaatggtactgcaagacttttattactttgcctcctttcgctgctagaaatgtacgatattagtccatcaacaacgccttctgtgatcaaagtttcttgattcagtttggaagaagatagtagtgtccacaaggctttgattccagcatctgaagcttcacaattctggtggactaactgaacaatctcatgcaatagctctctctttttaccaagcatggagcaaagttgattagtctctgaagaagctgatgtggtctctatcaattgacaaaggttcattttcaccaatgaactaccatgcttaagcaagaataagactgattctaatttggattcttgtagaagaatattgagagactccaattcacaaaagggcagaagttttaaaacacagaacaatgcttgttctacaaacttcgcatactcttctgatgatatcatggcctccttttgagttctaccaaaaactagctccagcagaaaaggcaagaagcctaagtggatcaaacaagatctcgacgacgattcttgggacaaaactcgaattgtctcgagcatgttaacctttgtttcaaaggcagtgtcatgagattccaagctatgtttgattgcagccacagagtcaactattgccaagtcttcatgatcaaattggtgtcccatttgaagccaatgatcgatcaaatggcgaagcgtgtgatttggaaccatggttggatcatgaagcttctgcattgtgactggacaagtcagattacctgcagccagccatttttctatgcttgatctatcataagtttggcctgttgaaagagtgactggatctttgaacaagtctagagtaattggacatctgaacaagtaaggaacagtcatttcagcttcattcatggaagaaaaccaagaaataaagtctcaaaagaagcaacaaattagagttttttctttgtttcttttggtgtagttgtaggaatatacaaatttggctgaaccaaagaagagtgaaggctaaaaatatcctacaaatagtatataagatgctgaaagactgaatatcttactacaatacaacatgtgggcagatctcttttggtgtaaattaaaataaacgcaaacgttattttgtgaaattggattatgatatttcatatcagacttgttgaaaagactcgtgaaccaactaaaaacatgtgttttataatatgtaaagagtataacaaaaaaaaaaagagttaagagtttgtaattgaagaagggaaaagtgttaaaggcctaggatttagaaagcataaaatctaaagagatggggtatattagtgagagagttttggtgatgactgagttgcaattttccctggcagacaaactgtagtagagagagattgtgagatagagagaggaagaaaaggaggcaaaagtgcagtcttagttggagaaataatgaagaagagaattaacatcaaacatagaaacactctagccaaaataatcttatcctagctagtgatagggaagaggttggaactattagtaataatatagaataaactttttttttgagaaaaaaaatggtcccccccacctcaccctctctctttctatatgtatgtttattaatccagtcaaaactgacccaccatagaaaaatacttattgttaatgtctttgaagtttgaatccacccaataatatttgttttgaaacaaattaaattgagagagaaagggagagagagagtaatggtagtcacagggctcatgaggatagttagaaaaataaataaataaatactatgggactccattactggtgggatcaaataaatgtaactccccatccctgatgtgttattaatgtgatagaatatggcaaatatgttgtttttaccaatgatactttggttttttcataattttaatttttgtcaccttatattggtttggtcaagatattaatattaaaattaagataggtttttttgatgaatatattaaaataggtacttgcggttaaccaactataaccctctcttgttttttttaataaaaaacaactctttctcgatcttggtcttttcctttgaatatgatgctcaattaaattttatttttatctagaaatagtgatgatatttatttagtgagcaagaattggaacttcctttccaataataataaaaaaaattggatctttaaaaataacatttcacgttaggaatataaatatgtatagtatgataatcctaatgataatgggtgactatttaatagttacatttttaatataaccataatggttacattttctcttacctttaataataagttattaatatgtaaacattctttttatagaattaaattaattataattaaccatatacttaaaaaaattaacattaatatatggctaattaataatttttccccctgaattttgacatgtactaaatcgtacccccctgaatttttttggccgttaaaa

SEQ ID NO: 262914 - DNA, 4816 bp, Cannabis indica
cataactctctcgatattgttcaaaattagaagactcaagatgttccgaaaagctgaaagagagatctagaacttttaagttttgaatttttctaaaatttgatcagaacatagtctaatttaggcttgaagtttcaactttattttcttacaaaatttcctctattttatagatcgcctttttttaaaatttgactaatttatatattccaagtgttgaaatctgaaattaaagaaaacaagtgtaattttattccaaaaggtgacaatgaagaagaaaagtaattctaaaaatgacacaaataataagctaaaaaatagcctaacaatgtcataattgggcttacaagtcgataaaggaggagattcatctgtgcttgtaataatcatttttgtttctttactgatccattaggtaaagcttctttttacatttcatattttaggccaagaaacaaaagaggagcaaattatacacaaaacagaggactttgcagccttagcatggcaagtttgattatcacaacacttaatagattattgcaaccccttcatcaatattttaatatgatagagatgcctatttctcttttgaagtctaaataaccaaagttttttttattacctaaataaccaagttagctgggaaaacttaaataaatttactaagactttaattacccaataatgttaaatttaattaaagggattattagattatagtattttctttgctacaaaaagtacagatgtgttaagtagtggaaggaagattaaaccgatggtatgcaccgtgcctggtaaaactgaaaaccaagtcatgaatgattctcatgaatacatattaaaattgtaggatgacataaaggaatttgtgttgctattgtttaaggttatatatgtattataacgtatcaataaagggcctagccaagcttttaaatacctattacatacatcatcgatcaccaatgtaatttgacccacccatcagttacattttcaaaacaccaactttcgatttttttttaaatgccaaaatacgatttcaaaatttacactgtgaagtgcccatgttgcatgttgccaacttcacaacacacgtgtttcaaaacttgctcaaaaaatagcaaaagatttggagtttaacttcagcagtcttctttctacatattactaggaaaagaagtatcaagtttccatgtactgaattgtctagctcagctttcatcatctgaatctggtataacaatagcgtccatagatgagttacgggtcggcctttgtcttaatatgttcttcattccaaagtttctgttttccattgagggatgggcagtgtctccagctattctagtactccgacgggaaccaaaattcttggcaggatggttctccttcgcgccttcttcagaagtggctgagtctctagagccactatcatcatcatcaacatcaacatcctctttgccactataattgtcatcactaccaccatcctcaagcataacaatatccacatcagaatcttgagcactatcatccttggagcagacccttttaggggaagggtcatttgggtttgtctcgctaccctctctttctttcctttgttctttgggacttgtcctctttctggaccacatgaatttaacaatagtaaaactttgttataccgaggaagtaaataagcagtaagcagattcatttaataacacaaagcagattcctttgaaatatatttctagagaaacatgctgaacttccaaaagcagcaaacagggaagaaaaatgccgtggcacaaactacagactgtacaaccaatatcatctagacatgatgtaaagtttagctctgaaataaaatactaatgaattgaatttcgtaacactggctatcatattttcccatttattatcgtggcacatttctcaacactatccatggtatctctatcatataatatgcccaataaaaaaaaaaaaaacaagagtgatcctatggatgattaatgagacggaaaaaattattgttaataacaaaagtcttacatcgtttgttgtatagcttccttcatcatttgatcatagtcatctgcacatttgagacaagggtatcatatataacactaagaaaactttcaaataaacaagaataaatagcactgaccaatcaatttatcatgtattgtatacattatatttatgcaaatgtcataagaaaggaagatgaaggaatgtcatccaaaggactaaacaattgggcaattaaattcttgtgcacgacaaatttctccatctggttaaagaaaggaattcaaggcacaatattctttctctctcgttctcccaagtaaatggattgcgacagtactggaaatggtttattgagcttctatgagttaagaacatgctaacagatcaattcactatagttggaatgtgaatttggattttgtttctagcttattcattcatgcgtagtgttaattccctaaatattgaaaatccgaatatgtagaaactacactagcaccaacaatggctacaaggccagaatctgcactgcaccctagccaaataaagagtacacaaggaaccttaatctatttgattccatcagaactccagaacaatatcaagtaaatacgaaggcctataaatagatccaccaacatttagcatatatcaggagctaaggaaaaatgggaatattatgcggctcaccaaatgtgtaattgacaggcctaagggtgcgacatgagcgagtaactctagcacgggcaccagtattagcatggaaacttctttgatcattcaaaagcatatttttcctttgtttccttcttatcgcctgttctttattctgtagagccaaaactaaattgtcagtgtacacattgataattaattaagaggaaggctgctctttccatatttatcttgtccaatttttgtatgttcacttatttgttgattcaatttactctttgatatgaactgaactgctaacattttcacagtaaagaatgaaagtagaaaactagtaagtttaccttctgaattttctcaagaacaggaatagcatcagtgttgagagtcctaccaacagaagccaatgctacaactttgctcgatgagaattcatcctgcaagttttccagcaaagaaaataaatggccaggttctagcctaacatttgaaagaaaatttggactcactgccactttgcgaaattcctctagattggttgccagcgtttcccactctttacaggttgggagcgaagactctcttccaatagattttttctttgtttcaaatgtagttacttctctgtataatctgtatccaacaattttattcccatcatacctatcatgacaagcacgaatcattagaatcggatcatgtgccaacaatataatacaaaggttaattaaccaacacaaataaaaattaccaaaaggaagtgctattcccatttactcctatcttatctttacggaaagaagaaatttgggtcccttgtttcagagcatcattaagataagccactgcatcatcttgctgcaaaccaaaccagccacttaatcaataaaacagaaaaacacagaataaaaaagaaaaagaaaggtggggaagtataatatgaaataatacatcagcccgtatttcacaaagcgctttcaacatcagtaaacgcttaacaggattgagttctttgtatctggggatctcctctctgcacaccacagacaacagtgttcacaagatggtaatcactatcactccacagataagaaattgcatatatacacacgtgaaaagaaagttcatgcataccctttagctaccacaattggcatatccccttcagcaacctaaaaagaaaatacagattgaaagttgttaaacattcacaccatgaaagtaaagttagtaactttatactgaacaataatgaaacatacccacggccaccacggagaaagcttcttacaaagcacagtcacccaagcatcagaaccatccaatgctttactcacaggcggtataccctgttaatgagaatccaagttatgtaacaaatacactaaacaatcaattacttttgaagttttaggcaagcaaagatggaaagaacatatgtacgagaacaaagcacatgtatattataagaaatatatttaaatgaagatctcaaaccttcaaaagtgtaatatggagcttaataagcgaactatcagggtttatcaaacccgcctcaatctcttccgccgatatctgcgattccttaccgattactggctcaaaaacctgaaaagtaaaatcgtaacaagctcacattcccgaagactgcctccaccgctgattcgatagtccatccatcaaaaaaaaaaagtaagtcgcaaatttaaggccttgaaggacaaacgaaggaaagaacaaaagaaactcgtacggttaagaagttgagaacggaagcaaactcccatcgtccacgcagctccgcaacctcaggtttgggaacacacttttcgcgtttttcttcgtcatcaaacacgaccgcgttctctttcttcaccggtcggtcgtctcctgctccagttggatcactggccagccgttcgtcgacccgtacctgaccacagatagccatggctcgctcgctctcgcgtgaactgttaagaaaaaaaccgtaaaagtcgggtcggagaagttgggagtagaaagatgaagtttttagttttttggttttatttaggggttttcccgcctaaatgatttttacctgagacagtgaagagtttta

SEQ ID NO: 262915 - DNA, 1811 bp, Cannabis indica
atcaagacctacggctttcttcagaatgaagatgaaccttgtgtttaccaactcaaggaagaccaagtggtagtattcctggtcctttatgttgacgacattttgatcattggcaacaatgtcaagaaaatgactgacatcaaggaatggctagacactcaattcgaaatgaaagatttgggtgaggctgcctatgttctcggtattcagattatcagaaaccggaagaacagatcccttgctctctctcaaacaacttacattgataaggttttagagagattctcaatgacaaacaccaaaggggcgactatgccctctagatatggtatccgtctatctaaggaacagtgtcccactgatcctcaagagatagaggacatgagaagagttccttatgcttctgcagttgggagtctaatgtatgcaatgttatgcactagacctgacatctgttatgcagtaggaatcgtgagcaggtatcagacaaatccaggacaggaacattggagtgctgttaagcatatcttgaagtacttgaagagtacaagacaatttgtgttagtctacaagggtggtgctttaaatcctgtaggctataccgattcagatttccaggcatgtcttgatgacaggaaatctacatctgggatggtgtttactcttggggatggagcagtggtttggagaagtgctaaacaaaccgcgatttcagactctaccatggaggcagaatacatagctgctgcagaggctgcaaaagaaccagtctggctgagaaagttcttcactggtctcggtgtcgttcttggaatggaaaaacctctggttttgctttgtgacaacactagagccatagccaacagtaaggagcctcaaagccacaagaggagcaagcatatcgaaagaaagtatcacatcatcagagaatatgtggcaagaggggatgtactagtggagaaagtggacacagaggacaacttagctgatccattcaccaaggtttggcaagaactgcattcaaaaagcactgtcagaatttagaattaattgatatgtactgattagttttacaatagtgcaagtgggagtttgttgggttttatgccctaaataaaactccatttcaatgtaatctctatcattcaatatcaataaagaaacagaagtatttttcactcttttatgtgtcatttggttcatgttgtcaattacttgtctatttgatttataaattcatccaagaccttatcacatttatgttcttgtttattttgttgtcagcacagtggaaagtaatcaagattatgtaattaaagatatattactagatttatcagcacacagggtttaactgatatgaaaatctacaacatagtttacttgtaccttggataagtgttatgttctttccagagcattggtcaaagtaaaggttgggttggatgcatggcgtatgcatcgaaagggaccgatattgaactttgattcagatatattaaacttaccctaatatctatctagcaaatagtaagtgaaatgatgatttccttcgagcttggctaaacagagataaatggttgagtactcatttcagttcgttaaaatatcatttatgcggggctaagtgttttaaagataaaatacattaaagggtgtaacggtaatttaatccttatacaatgtaaatcatctatagaggatcattgatcaaattgggattataacaatcgataattgatagcgtatctatatggtggaacatatatagcgttctatattattgatagtgaaattctaagttctatgcg

SEQ ID NO: 262916 - DNA, 853 bp, Cannabis indica
tcatagcctcagcaacttctaggttcatgctcaaattgctctatgtttagagcatagtgaatgatgtcagcaaagccaaatctttgaggagctttgtgaggcctcttgtctctatctcttgtcagttggtagtcatggatggcagtgtcttcttgatccatttcatcttctagttcctcttgtagtgcctgtgtgccatctgtttgtgcaggtactccctgttctggtgttgaattgtctgacaattccacctcaaactgcatactctcttctctgctgtcagtagcattgttatgttgtgttttgagtgtgtctttgtacactttgtcttcctcaaagatcacatctctgttgacaatgaatcagtttggtccctggttcaaggctccaaagcttgtaccctttaactccatctggatagcctatgaatacacacttcaaggctcttggatccaacttcccttttctgtcatggacataagcaacacaaccaaaagttttcagattttggtagtttgcatgatgtccagaccacctttccataggagtttggaaatttgtagctgaagaggggcatctgtttattaggtggcatgctgtaagaacagcttctgcccaaaagttcttgggcaatcctgaatgaatgagcatgcacctaaccctctccatgatagttctattcatcctttctgcaagtccattctgttggggagtcttcaccacagtattgtgtctcataatcccaacttgtttgtagaaatttttgaactgatcatcacagaattccaagccattgtcagtcctcaatttcttaacctttttttctagtttgagtttccactagagtcttcca

SEQ ID NO: 262917 - DNA, 1129 bp, Cannabis indica
gttcagaaataaatccataaccattcctataacaatattcaacataaagaaattaaagaggaatagagaaagaaactgttggtggaattcttcgggatcttcactttgatttcctctgctcttcctgccgctttctgctgagttttagggttccaaatcgcttcctttgacttccaatcacagttttctatttataactaatttttaggattttttggacaaaaatacccctgactgtactgacgctcgccgcggccaaaagtggtctcgccgcggccagaagtgcatcaaaaaaacacgtttctgcccagactttatggccgcggccatggaaatctcgccgcggcgagatggaattttctgcttcgatctcttttagtaaaatggacataactttctcatacaaactccaaatgagctgattcaagatgcgttggaaagataaaaaagagatctaaaacttttatgtttcgactttttccaaaatatgatcagaacatagtcgaatttaggcttaaagtttcagctttattctctttcaaaattttctctattttatagatcactgttttccgaaatttgtccaatttatacattccaagtgtagaaacctgaaatcaaagaaaacaaacgtaattatattccaaaaattataataaagaagaaaaataactataaaatgtggcccgaaacttaggctaaaaatagcctaacagtgttctgccggttttcctcctccaggcggcacctgagttggcagttttccaactcgacaatcagcacgtatcttgttggatcgtaggcgccatcctcactagttggcctgggatgggctctaccaattttcatttcaggttcctcataccttgttcctagattctgggtcctccttgaacgtatggtccgtgtacttaggccaccctcaggttgggttctccttgaacgagtggtccatttagatcgtgaatcgggaggcctctgggagcccattggctcttttccaggacggtgagtggtttcttcatgaggagtgtcgatgttttctctgttgacagccatggagaaagttgtttttatatatataaggagggttttttctgagcttttttcacgaaggctctcaatgaaa

SEQ ID NO: 262918 - DNA, 568 bp, Cannabis indica
ccctacatcaacatcccaacccatcttaatgcagtacatcatccatgcacgatctctgctgacagtggaatcatgtgaggtggggcatagggcggtttgcatgaatgtgtaaagacacttcagatcgtgctccaagtcagtgcgccgaaatcgaaggtttccataattatcgtggtcccactcggactctggcttggtgatcacaggcatcatgtcattcaatgtctcgtcgccacttgacctttgagggaggaatactggcattcgattgatggtaacccaaacaagttgttgaatgcttcaactgagaatgacatcggtacttcacgcacaatcacttcagtaggccattcttgggacaaaaaattggcgtagaattctttgacaacttccattaccgcctgtcctcgctgcttgacaaaaagtccccaattcctcttatgaaccatttcactaacccattcaggtaactcgtcaatgtcctctatatctaccactaatcctcgctccatataaaattcccgattgtccaccttaccgtaatactttgtctcggctgcctagcaat

SEQ ID NO: 262919 - DNA, 610 bp, Cannabis indica
gattttatcaactgcctcacttgtaatctaagcaacttcacgacctaggaacttcctttcacccacttcaccccagtgaataggtgatctgcactttcttccatataaaagttcataaggggccatcccgattgttccctggtagctgttgttgtacgagaactcagccaggggaaggtactttacccatgatccttcaaagtcaagcacacatgcctgaagcatgtcttcaaagatctgaatagtcctctcggactgtccatccatctgagaatgaaatgctgcgctaaatttcaactgagtacccatagctcgatgtagaatctccaaaaatcttgatgtaaacttcggatctctttccaaaataatgcactttcgaacaccatgaagacaaacaatttctctaacatataactcagcatactgatcaatggagaaattcgcccaaacaggtaagaaatgcattgactttgtaaaccagtcaactatgacccacagagagtcattgtaatgccctgactctcagggacgccacgtgtgtgcttttataatcttattgtcattaatctattagtttgggaaaagtatggtttaattaaaatctttaatt

SEQ ID NO: 262920 - DNA, 1594 bp, Cannabis indica
tccgacccgacccattgacactcctagggtgagagagttagagagattttttttttgaaaggtaagagtatttttaggaggaaaagatattaaaatgataaatattctatttttaatttggtaatatattaaaagatcatgcgataaataagggtactaagaaaaaaaataaaaaaatgtacataccaaagtaaattacttcctttccttccggcttccatacttacttaccttattagtttttccaaagcctctgtatagaaaagaatcatttatttgattaaatcaaatatgatacgcccacctttcctttccttttctcataattctttctatttgttttttaataattacgaaaagaattaactatagaaaaggtattaaatggtgactcaaaagatgaataggccggtcctcatataaaaacaaaatacaatcacgtggttagtaatactaaatacatatatatattatattgtagttagcctgaatttcttgcccattttgtggttttgtggtgaaaaagatggagcctccaccagcacaagccatagacacttccaccaagaattttcagcctggagaagatgaacaggaaaaagctcttaatgaatggtattttttataattctattggatattgaactaatactgtatactctattttcctaatctgtttatgttttttattttttttttctttttctttaattttgcagttgttcttgtttctatgactgcacagagacatgttttaactacttatgctgctacaacttctgttgaaagactatgaatgaagattattagtattactattattattatatgcctttcatgtttggaaaggagagtcaagaatataaaataatgtaattgttaactagtagtttgtgtttttatttacttttaacaattaatattattatgtcatttgtctaactttggtgatcttcattactttttatatagatgggctttttattttggcaaatatgtaatttaattttggtgccaaagtagaagaaatcaaggtgaatctggtgttctgttgaagatgatctgtgagtgtcacagtgatgtgattataaaaccaatttcaagttaattatttgtttttaaatgtgtgccactttctggttccaaatgatatcatattaacaacatcatttatctctaaattactatataatttccttgtgaatggtggtctaataataacaataagaaactttgattttggaataattattggtcaaatatactgtctttacacaatcaaataattcaaatatcaaaacatgctcattttcttaaatagaaccgtatttatggggtgcctatttccacaactattttcaaatgattacaaaacaaagaaaaataacatctttagaataaaaaaactgccattttttccacacttttttttagggatattttctaattacattttaaacaagtctcatcacatcaaagaaacatgaaactattgggagaacaagaatagcttttatttttatacattcactaaatttacttctaaataaaatttaattcaaatatatttctttttataagtattgcactcaaa

SEQ ID NO: 262921 - DNA, 3159 bp, Cannabis indica
gggacttcaaaagcatgatcaaaactaagacctaatctaagtttgtcaaatgcatggataggaagtcgagtttccatcaaaaaaaggagagaaggtttgtgatctttcaccaaaagggagagtgtctgaatgcacgtgtactccccaaaccacgtgcattccagcttaataaactcatttttctgggcgagtgtgctccgcatcacctgcctattcaggttctgaagttgtagcagaagagccatcttcactgtcactagcacaggctcgctttagagtagatcttaaaaagccaccaataacagcttggtgaggttgaaaatagggtcgtttaatccctgaagctgaggctagacccttgccacgaacagattgatctggctggcctacattgacaccagcttccagctccatagtatgagagccaagagctaaactcccaccatttgtggctgggatagggacttgagaagtaaagccttccatagaagactcagaacaaaccagatgagtagtagcagctaccaagacaaaatcagtagaataggatgtcaaagtagaattattcgaggataagccaaggctcgacctactaaaagatgataacatttctcccaaattaggatttacaggagtagggatcatgatggcagcaaattgttgggcttgggtaaactggaagcaagaggtgacatgatgagtaacaaataagggaaatcgaatggtggatcccagagaacccctagcagggatgttaagatcaacaggagggatatcaagcaaagtcatggcaggtgggtgtggatactgaaaaggcatgctcttatcagatatttttcccccctcaatagaatattaaaaggacataaaggttcagagagggtttcgtcacatttttgtaagaaagcatggcaatatcttttagtgtgatcaagacgaccacaataaaagcaaaaatcagggaggcgttcatatttgaaatcaagccacttaatgaactctctccccattcggataaacttgatgttcatacccctacgaatgggtaggttgacatctaagaggatcctaagcctcaaatatggtctagtatcgtccataacagtatccctataaacttcaatgagatccccaatttcaaaggcaataaatctagctaattcatgggatttacacatgaaggggatgccatacacttgcatccagaaagggacatagtgtaagttatccggagtgatagggaaggagctctcaggagcagcaaaaatggtgatactttgggcaaaatgccaaggctggccctctaggattctacccttatccccttcacgcctaaaagtgaccatgaacatgccatcaacatgtttagagacacaaatagggaacctacactgcgatgaccaaatacctgaaagggttttcataagagaagacctattaaagggtttgacagtgtgtagtttgagcagtaaactaataggggctggagaatcatttgagggattagcatcataagtgaaaatagtattttcataagaagacaagaccaaagaactcgaaacattactcataaattcatccatgataaagggaaacaagggagacagtaaaagagatgaaagagtaaaacaagtaggagatgagaaaagactgatatacatggatcttactttatagaggtaaaactagtaacccctagggaagactctcgaaaaacccttaatcataaccctaaatttaaccggagcagccccaatgatgaaaaaatcctaataagcttcacaagatccttcgtccgcctccatcctacatttccaagagccaaatagaaggtgagggatggtttttaatgcaaagatttggagaacttaaagagaaatgacaggctcaactaatgaaaggcagaaaacgaatccaaaagcaataaaatttcgaagtaagacaaacgggattggatagagaaggagcataaaactcaaataaattaatgctctcatttattatggagaagcatcgattagacataaatcgaaaggaaaaccaccacataaacaatctgggtggaccaaaacccccatatcagggaccagactcacaccaagaaaagagagggttcgcatacttaccagagggttcctgttatagtgctctatttgttaatctgagttttatagtatttccaaccactctttttgttttttagttaatatactaattgggtcacgtgagctcgtactttaaatattttttcaataaatttgtaacatgttgattctttgttttggtcttcaatgttttttttgtaaattaataagagccaaaattatatattgattttgtgtctcttaacaatatttagaatattttacactttctatttgagaaatttgattttttccatgcatattttaaggtaaaattagttagaaaaactaaaagtataggtaattggtaaagtgttcaacatttagttataccccataatatccctcacatttaaaaaaaatatcaacctcaaactatctgcattctctcttttcctctcgctcatcgtcttctcagaccccatcgacccacggcatacccacggcggatcccaatcgacccacgacaaatcccattctcgaccctacactacccatgaccctcgacgcaccgaccaccaaagtgagaccctacccacgacccacgacacacaaaccaccaaagtgagaccctacccacgacccacgacgcacggaccaccactgtgaaaaatgtcaaaggtgagttcgtgttatgtttttttagttttttattaattttgtttttgattttaccgttaaagattgaatgttgctttgtctaaagtggaatctaagttttgttagattgaactgtcggatcgtgatttgggcaagaacttggtttcaagccaggtctaatgcacgcccgatgcacatccaatgtaggtctaatgcgctctacgaatttaagaggtttcgaggttgaagatgtaggtcctatagaggtcgatggtggtctgataggtgtacgattgttcttttagttttatgattttgtttggactgatatatggtccgataatggcccgatatctttatatattaaaagtgcctatttaacggcatttcttgatttaacagaatataccttaaa

SEQ ID NO: 262922 - DNA, 498 bp, Cannabis indica
gttatgttgtttgattacatgctatgaactgtagaggaagattgatgcagctagttatagaatgcttacttgtactacccccttgtatatagagtctggtgttctgaataatggtctctattgatcgtagcgaacaaccggagtccagaagacacccaaatttccctactttgaaatcaggtgataagcatggagtttggagattacaaaactcaccttcataaaaaagagcctgtacaaatgaaaggattatggtgactagtttactgctataactctgttgcttctatgtaaagaaaatatgagaaatgcctggcactcaactcagcttttttggaacctgagtgagtagtgcaaatggcaattgtatgtacctgagcttttgctcaccttaataatattatctaaaacttggcaccttgcaacatgaggttcctcaattcagccctttcaactgtagtttcttcattcagatattaggtggcatttggttggagg

SEQ ID NO: 262923 - DNA, 513 bp, Cannabis indica
ttcttgttacatttaggaaggttggctaacaaataattaatgcaagaggctattcttttcatgcattattgccttttgtagtgttgtcatgttagttttagtgaaaaaaataaatatatatatacatattaaaagaattctgaaaccctttttagggtccaccgatgcaactcttatctatctgttttggcattaaaaaaaaaattacttcaataatttttatagtcgtctacgttataattaatttttagaacatttggtaaaattttgagaatttttaaaaaaattaacactccaaaaataagattcaaatagtttattttacacttgcaacaaattgtttaaactctatttttagcctcttaaaattttttcgaatttctcaaacatttacatgatgtcttaataattaataactacaactataaaaaaaaattgaactaaaaaaattttaacaaaaaaaaagggtaacattataaaaataaccgatatatatatatatattaattgtaa

SEQ ID NO: 262924 - DNA, 1203 bp, Cannabis indica
ctggcagcagcatagcctgagtatagcaaatacacgagcaggtgaaggtttggcttcagtcttaggttcctctttcttcaactggggacaatctttcttgaggtgccccactgatccacactaaaagcaagctctctgattacaagtcccgagatgatgtttcttacagcgcgggcactcaggataggagtaagtctgacgcccccctctattctggtttcctcgaaacctttttccttgcactgaacttctcgaagatgggaaagttctcttcttttgctcaaaagtagaatcaccactctctttcccagggccagatatagggagagtagtggttccaccgacactaggagtctctcaggtttcttgcaaaaacttaactgctccttcagctcgaagagccttgtcaaccatttcagcataggttgtagtgtcattggtagtgataaccaaatcatgtttaatcttggcattcaaccctgccaaatacttctccttcttactaaaatctgtgggtacaatcccataggctaatttagccaagcgatcaaacttggttgtatattcagtcactgacataccctcgccttgtaccaactcgacaaactctttccactttgcactacggaccgcttcattgtaatatttagcattaaataaatcacggaattcctcccaggtcattctggcaacatccttggtgagggataccatctcccaccataccaaggcatcctcttggaattgaaatgtggcacatgccactctatcatttccgaccactccccatgaaattcaatattctttcgataacggtcaaccactgttcagctttcagtacatcaggacctcccagaaacactggaggtgcttgtttcctgaatctctcatataaaggatccatacggttaccagcaacatgctgcttagctggaaccgtaggggctgcaggcaccgcagtaggcgattgcgggggaagctcgacaggagcatcccgctgcctaagtcttcgaatctcatcctcttgttgttcaattctggcttgcatttcagaaaacctttgctcccagtcaaccggagcatgaggtgggttctcctggccacctctcgggcacgaccgcggcctctaccgcgtccacgggggttttggggatttctatcaccccgaccacctccagtctcaaccaattcaccctgccttct

SEQ ID NO: 262925 - DNA, 1621 bp, Cannabis indica
attatactacattaaatattattaattttaaaattatgatattaaaaaaattaaaaactaaaataaaattaacatacgtaacttgtcacgtatcatctatctaatattgccaatcataatacttatgatattttttgtatatatattttttaaaaaaaaatactcaaaaaattatattttataaactttaaaattataaaaatgaaaatctgagtgtggccattgaaaatgctctaaggtaaaggtaaagtatacgacacgtttctgaatagagagaaaggaagaagaaaatagaagaggttttagagagagagaaacacccaatgcaaccaagtacccaattttcctattcagcaaaaaagtaaccaagtttctttttttttaatttaaatttaaattcctttttgtatttttaataatctttacccggatcggaatcgattcatggagggagttggggcccggcttgggcggtcatcgacccggtacggtccggcgacggtgtttactgggccggtcaggaggtggaagaagaaatgggtccacatagctccatcgagttctaacagtactggaacagcgtctaccaccgccgccgccaccacatcctcctcaaatcactctcagattcacgtccataacgctaccactaacggttctcatcttcttctttataagtggagtccaattacccaaagccaaaacgccgccatgaacggagatactaatggggacaaggtttctgctgaagacgagacgacggcgacaccatcggacgagcctcctaggcgaaaatttaaatacattccggtaggtctatgttcaccttttcttaaattttgggtattttttgtttttcgggtaaaaaacgatttcaattcggtcaaagaattaagcatatttttcagttcatttagaatgttaatttctgattttaaatttttagttggttaaagaactgattagagagctttggtatatgggtttcatggaggcttgatagtaaaggagatatatttttcatcctcttcagtacattggaaaagatgtaggtgccttaaggcgctatcaaaattttttagatttattttgttggaatcttctattacttttactatgtgggattgtttattaccgattctttgttgctgttgttgttgtttttttggatgatttcaaattttaaactcgtagttcatgtttggtgatgcatattataagtagtagactcattgtgacgtgcttcctctaaactctaatttattagatctggaatttggcagatcatacatagtttctatgctctaaattattgacagttttacaagagaatgatttaagtgtatttttattagcttgccaacagaatgctatcgtaattgtagtattgctttctcagaaattattttgcttgatggtataaatcaagcttgttcttatgtttcttataacatcgagctttacggaattttgctttcgtgatatggctaaagctactgaaaatagtgctcaaatggatatccgagttctatctttttttgtttccttaagactccatcagataacatttctaacaactattaagtagtagtattaaaggtaaaaggtctagcatttagtt

SEQ ID NO: 262926 - DNA, 865 bp, Cannabis indica
aaatataattttagaaatattaaaatatattaaattttgatccaataacaaataataaaagaaaaatatgagtttctatatttaatttaaatatttaaaaaaatatcaaaaaaaatatttttacactatctcaaaaaatatgtttatataaaaaaaaaaatatttaagtcaaacttaattttttttatttcaatcgatgaaacaacatcaatccatataatgttaaaacgaaagattatttaattaaatagaaaattaaacattaaaactcaaatttttcaaaagtaataccattaagagtgcaaccatatgtatatggtaaatactatttcaaaccatgtatttttataaaatagtacaaaatagacactgagcttattttgtaaaacttaataataacctgacataagtgtgctattaccagattagttatattttttttgcatatgttcatgctaaatattgtattctaggttgatcgtattgaaaaaataaattgcaaaaaactaagtgcagaatttattttgtatcattttaaaaaatacattatataaattatttaacaaactaaaaagtctaataattaagttttgcaaaccataaatagtatgtattcaaaatatttatggaagatcatatgttcaaacttcaaaatccttttaaaaaagttatgaaagtacaatggcaaacaaagcacatgctgcttaattgggtggttttcctataatgaatttctattggtaaaagtaaaataaatagagaacatacgaagggaacaaagtatgaaaaacaaataagatctcattgggattgggagggacggagggagaaaatttagagtgtgagtaaattgtgagaagaaatt

SEQ ID NO: 262927 - DNA, 578 bp, Cannabis indica
aaaaaaattaataattccttttcatttttaaccaaaactccaaacccactcgatcgcctctctcccttaccaacggacctctctctcgctccatctcacgttgctctagtgtgagacgactccggcgtccaatagcgtttagatctcgaccggcgctaccctccttgacaccagaggccagccactctgtcgtggcgtggagtcatcaaagccagccatcatcgccgacgctgtggaccgcaacggcagccatccccagtgacgttttcacctttcttgaaggttgaaagcgtgcaggtactgggtcaacgagcttcgagattgtgtccgcatagggagccaacatcgatttatcgaaacggatcaaggtcatgacaccgttttccaaccgccaatttcgaagattttaatggtcgatttggcacttgtaatgctccacgaaaaggacattcattcagtgttttcactggtcttagttgtgattttaagagttattttatacaaattaaagttttgaggtttgttatactgtgtatataaattatactgtttatggaaattatttatttttgttgtaa

SEQ ID NO: 262928 - DNA, 614 bp, Cannabis indica
gggtttgtacgtattataaaggtcatgccatttggtctcaaaaacgccgaagctacataccaaagattggtaaaaaagatgttcaaagaccagatcgaaagaaatatggacgtgtacgtggattacatgctcatcaaatctaagaaggctgggggcatatagatgacttggacaagtgcttcaaagtcctcaagaaatacaacatgaaactcaatcccctaaagtgctcttttggagtcagctcgagtaagtttctaggctttatcgtctatgcctgaggaattgaagccaatccagagaagattcaagccctcctggatatgaaatggccaacaaaaaccaaggaagtttaaagtttgactgtttggattgccatactcagtagatttgtttcaaagtcaacaaacaagtgtgtcccattcttcgacattctgcgaggaaataagcaatttgaatggacagaggattgtgaatagtgctctcaaaacttctggacggagaagaattaggaatatacctggctgtcacggaacatgctataagtgtcgttctaatcagagaagaaaacaatattcaacacccggtctactaatcagtaaaagactcattgaagc

SEQ ID NO: 262929 - DNA, 1225 bp, Cannabis indica
gttgtacacaagagagatacaatttcgaaaccctagtgaaagagtagtgcccacacacagcaaacagtacctcaatcatagtttggaagattgtgaaggatccaaatccaagagaaggacattcagactcagatcttgataatactctgcaacagaaaggatacaagggttagagatctgagtggaaggagacatattattccgctgcaaccaatgtaaggttttcttaactttatatgtgtttattatcgttttagaagttcatatttaggatgttaatcaacatacttgtgagtagatctaagatcctggtaaaataaattccaacagagacatcaaggagcttgcagcttattgactaacatacttgggagtaaaagcttgcaactcattgacgtacatatttgtacatggaaaagataactacattcatccatctcaccctttgcgcaacggagtagccacctcgcaaataactttttgatatgaaacacattacgagaagaagcattattactatacttagcatttttttctataaagatagataagaaggataactcacatttagcgagaaataaccttcttagttagcttaaccgtttaaaggataaagacaaagagaagttgggtagttattagatattatcccatgtggatataaatgaaacatggggaatgtctacatttcatgagcagttgtaaatgaatagatcctaataaaaataaccgacatcctatacacctataaataggggcgtaatccatggaaaaagggacaaaaaaaattgaggaaaaaactattatttacatttactgagaattgtattctgtatccaaatcaatatcccgaataagaaggacccgtggagtatgtagattttaattacaaaattacgtaaaatatctggagttcatttattattattattattattattattattattattattattattattattattattattattattattattagggtaatttgcggcataaatacctaatgtttccgattatatacacttaagtacctaatgtttattttggtggcaaaatactcaatgttacaattctcttacaccgttactaccacttcgttaactcatatatgcacgtgaaggttcagatgcgttacatttatttttattttattttaaacttaaatattcttaatatcagaaactaaatagctacttgtttactaaaaaaaaaa

SEQ ID NO: 262930 - DNA, 653 bp, Cannabis indica
gagcatacctcgttcattacagatagaggcctatattgttataaagtaatgccttttggtttgataaacgcaggtgcaacatatcaaagacttgtaaatatgatgttcgcagatcttattgggaacaccatggaagtatatgttgacaatatgctcgtaaaatctcaacatgcgaaagaccatgtcacacatttacaggcaatgtttgatatactgcgacgatataaaatgcgactaaaccctttaaagtgcgtctttggagttggctccgggaaattcctcggattcatggttaatcaacgaggaatagaggcaaaccccgtgaagatcagggcattggtggagatgccatcaccaactaagccaaaagaagtccaaagcctcacaggtaaagtcgccgctctaaatcgctttatatcgcgatcttctgataaatgcaaagagttttttcagattttaaaaggcaataagaagttccaatggaccgaaaaatgcgaggaggcttttcaagccttaaaaacacatttggggcagcccccaatcctatcaaagcccatgaccggcgaggtcctatccatttacctagcagtgtcagagtatgcaattagtttggtactaatacgcgaagatcaaggacgacaatacccggtgta

SEQ ID NO: 262931 - DNA, 2553 bp, Cannabis indica
acaatgcaagctccagctatagaagccccttaggacgtacaaaatgccccagtggcaagacctattattatttaaaacttggtttaccatgatcttatttactactcatgtatgttaaattaagactaatctaacatcctaacatggattcctaaaataacaaaagaaatacatcaaaggactacaaaatctttaagtggttgcaacgaaataaactttctccttccgttcagttttctaacccttcctttctgtcgcagagtattgccaataactgaacttggatcttctccttctttgattatgctcattatagtcttccacaaaggcctgagtatcaccttgagtagtgtgggatgatactcaaacacctttggaacatatttttgagaaagaatttagggaatttcaaaaattatgaagaaagaagagaagagagttgtttgacattgaattagatcagttcaatcttctcatcacttttttttaatataggcattcacttagtgtaacgccctaataataggaacaccacgtattgcgactaaacatatactaatcctgctaaaccaggatttactagagccaatagcagaaatcaaatttaaaaaaatacatgataaaaataataacttgcaattattaaactttacaaaatatccaaaagatcacattttagttcgggatctcgtaatttgttttctttagaatattacaagttattagtacacaccgacctaagcaacaaaagtgaagattacaatattttctcctggtagacccaactcctatgatctagcttggactgaacatgtataatacaccgcaaaagccctcgatctcatggttgatcaaccattgacttaacctttcctacacaatagagcacatgtgagccaaggtccaacaagacagttaaaacaacaatatgaatatcaattaaaatcacttaagtattgatgtcactgcatctattgtctatttgacatagacctacgtgttatgctcacacatctatttacaataaggccttagattggtttgtcttggttctgattgccaagtctagcctaattatgccttacgcgcataattctttatttcaatatatacaacacattattgcatttataatcacttaaattctagagtaataaccctagatcatataatcaccaaatcttaaggtaataatcataatctcagtttatcacatagcaaataaataataatgtacatgagcaccactgtgctaaactctatgttcaagtttactatctaacctggtaatccaagtatatggagattccaaatccctgagtgttcttgagcaagcaccggtaaccctagtcacacattctcgagatttcacaaataaggttaatcccaaattcattttcacatatgtacataatttgaactccaattacagattaacacatagatcccaaaacgtgtttttcaacgatataaagaacgtccaaaacagagttttgagttaaaagttatggcaaaaatgagaaaataaaaaactaggaaaacaggggtccttgccgcggcgaccaaggccctcgtcgcggcgacatgccatgaacccccaaaaatccaatttttcatatcttcaaaattcaaccaaattcaagacaagtctcatccaaaatcatgcacaaaccaatcttttaatcaatagcaaaccaatataacattggtatacaattgagcacaaccgaaagctcaagatcaaagcaaaaaacatacccaaagcatgctacacaaaaatcaaaattgcacataaattcacaagctttgaaactcaaagcttcaaagcacaacccacaaattcaaaggatttttccaaaagttttaacatcaacaactcactccaaagctcccaaaataatctaaatgcatcatacataaacctaatagcacaatcccacaataattaccataatttctccttaatctcaacaacatgcaatcatagacacaagaacatcattatgaagctttaaatatcagaatttatacaagcaaaatagattatagatcactacttcaagttcctcaagctccaagcaagatcaagcacaaaatcacacccaaaatccaagctcttcttccaaaattaatttgaaaacacaaaaatggagagagtgagagagaggcggtttgggagtgacaaaaccccaaaaaatgaaattaattttggctgaaatgttttttttgttgaaaaaaatagcttatttggtcaaatgaccaaattgcccataaggcacacatataggcataattacataaaagggtaaatttatcatttccattcacatatatatcacataaattcaaattttctcatttaacatataaaagtcataactaaatctaaaaaatatattttgggccccaaactcagttcggtctaaaatactcgattgggactatagcgtgctgacttgtcagaaatcacatgcagaaagacagaatacacgtaatatataataatatagtccataaacacaatagattataaaattacagttttacccttct

SEQ ID NO: 262932 - DNA, 810 bp, Cannabis indica
ttttccagaaattgcctcttcatagaaatttggctctgacaaacttgtagcacctaggtaagcataggcaaggacttcttcccatacatttaacatgtatttctggtttggatttggaactcttctagccatatcccttgcaagttgatagtcttcaactgcttcagtttatgtatgttgttcagtgtcaggttccacttgattagtatcaacattcagttctggatctccttgattttgagtatcaggttcagggacattgtgttccacctgattagtgccaggtgtttgagcttgactcagaacttggtaatcaacttttgtacctgcatttgtaggctgtaaagagaattctgcactagataaactgttagtaacacaaggaaattcatcttccttaaatataacatctctactgttaatagttttaagaccaggtttagattttacccacaacctgtatcccttagtgccttggatagcctaagaatatgcattttaaagctcttggctctcactttcccacactttggtgtgcatatgctggacagccaaagactctcagatttgacaaatctggaggttttcctgaccacacttcttctggtgtcttgtaatcaatagctgtaaagaccgcatatgaataatgctttggattattaaataattagggtttatgtatgagattttattattattgataataatacaattatgtgaatttatttgagttcgtatgtatttattatgctattttatgtttaattatccaatttctgtgtttgtgttcggaagcggtggaaagcggcg

SEQ ID NO: 262933 - DNA, 948 bp, Cannabis indica
cacttgtcacaaaatagtcaaaaagcctaaattgcccctagggccatataacacacaattaagcattcaagggaatttaagtcatttgcattaaatataacatattcaaataattttcaaattaatcacatattaataaaatgccaacaaataatcccaaaattgtattttggccccgaacccgattcagcccgaaatacccagttgtgaatatataataatatagtccataagcacatcatagtataaattccatagttttacccttctcatgtcaaaattacagaatggcccctggctcaccaacgtggtcttaacatatcatatatcaaattaattcacttataataaattatataataatacaattctacaataatacacatttaactagttagggtttggtaatccattttcttagtcttagggtattacaagtaccccctccttatagatatttcgttgttgtcgagcaaaattcgcaacaccaaatgtatatgatattattaatgacaagaaggaaattatatgaagaacaattgcgagtattcaacctagagtggcgagtactcgaactgggtgggaaatgcttaacagaaaactggaaataacaataagacagaggattatagtggttcagtcagatcacggtctacttagtccactgtagcaagagtttcgtaggtctcatttcacggtggatcacccctttatatacaaagcaggtgtccaattagttatacaaggattgcattcattgtcaatccgtttttacacattgaattataataactaaactaagcaacgttaacattaataaatgaatagcagttactaaattcagcaacgtatgcgcccttctaacatgcgagttgactgttcatattctaatgttaaactcgcaggcctaacacttaattacgtttaggatgtctgcgttcttagata

SEQ ID NO: 262934 - DNA, 1321 bp, Cannabis indica
ttgattaaataaattaattaattgagactacaaaacaatagtatctcagttagtgaggggaccataggcctatgtaaccaagctcccaataagtagatccaaaatttaccaagtaaattttctaacttattaactcctcctaactccactatagattcagaattgcactcctgattatatagaatgctctattcaccaagaatagagacactataaattatctattattttgatctaaataatcaaagatcctctatagatgatctacatcgagtagagacaaatttactgttctacccttcaatgtattttatccttaaaccacttatagctacttgtaaatgatattttagtaaactaatataattactgaaatgagcgctcaatcatttatcgtgttaagtcaagctcaaaggaaattattgtttcacttctaatagttatagaagctatatattccatatctatgattagcacctccactgtgatgacatcactataattgtgaaaaactatatgttttggatttaatataatttatacattaaaaatataatcatgaaagaaatcatgtgaatcatgcaacataaaataatttatgatcatttatttttttagtaaatctaattatattgaaatgagttttatttagagcataaaattccaacagttagttcatccaaatcctccaaaaatagtgtcaaaaacgagattcacacccaaagttccaccattgttgggcgaagtggtggtctcattgatgttgatgttgacattattgttgttattttgcttcgtagccactgtgatcttcctccaaaatcacagaattataatactggaactaccctccttctagcgtcaaatattatcggaggaaaatagacaacaccaaaaattatgagtattctagatgaataagaatacccgcttaaagaacaatgagtattcacctagaatggcgagtactcaaattaaaatatcgagtaataaaacaatagcgataacgtatatgaagaaagacacataactatagtggtctagttagagtttgatatgctcagtccacttttctaagagatttgtgattattttattttatgttggatcacttatttatataaaaagcgagtgatcttttggattacataatcggtcagatatgaccattacactattgattacatttagggtctgtttggaaacaactgtgtaattactatgcagtgtaattactaaggtagtaattacactgtatagtaattacattgtattttaaaatacaaggtgtgtttggataagtggtaattacatgtgaatt

SEQ ID NO: 262935 - DNA, 981 bp, Cannabis indica
cagattgtaagaatgaatggtggttataccatagtcaaatttaatgatactacaactagggattgcgttcttgaggagggtgtgatacaatttgatagaaaacctatcataattagaccatagtcccctgatctcacagcgcttagattggttaagtctgtccctctttggattaggctcaacgatctaggtttgcagtactgggggaataaatgtttaagtgttattgtaagcacaattgggaacccgttaatggttgataagatcacaaaggagaggactatgatcaaatttgcgagggtgttggtcgaaatggagattacagatcaccctcctaaggttactcacttcttgaatgagtatgggcaactcatagaacaaagaatcgagtatgaatggctgcccacaagatgtaagggttgtcaaggctatggtcactcaacagcagaatgtcggaaagcttataaaaaatcaaatcagaaggattgtgataaagtgaacaacacataagttaacaaaggggaagaacttgaaggtggaatagagaagaagacagtgaatgttgctgaaactgacaaaccaggagagaagtgtagtgctggaacaacaatagttgctaaggagaaacaaagagaagagggggagaaggatggaagacaaaaggggcaaactagtgacacaaaagggaattggataacgccaagaagggctgctcataataggaatgtgggggagaaatatttagctccggctcaacagttgaatacatttgaggtcttacaaaggcagcagggaggtgaacaaaggacagaggtcattgaatctactgtttatggattgcaataacattcttagctggaatataaggggcctcaatagtaataagaagcaagaggctgttgtggatgtttgtagaatgaggaaaattggtgtaggtgctgtgttagaaacaaaaatgaagggggataaagtagctcaagc

SEQ ID NO: 262936 - DNA, 1574 bp, Cannabis indica
tatacaaatagaaaagacaactttagaaaaagatgataatataaacatatctctggaatttaagaaagatgtctgaattttaccaaagcatgaccccagaagaagcagagagtttggtgaactcccaaaggccagagaaggcttcacctgataacccagtccaagtagagggacaaccaccgcggacggcgtagcccataagcccaaacgtcatagtccaccatgagaaattcatactaagagccgtgccgataacgcccaacttgagttggtacacaaataaccaactcacaaacaggtgcacggccaaggctgccagcgacaccaaggctatcaccctcgtcttcagctggctctgtagaaatctctgtagcgggaactgaaatgccaagctgaagtgcagcggaatcatgcacatcgccaccttacccgataactccgccacctctggtggctggcccaacaattttaagaccggcgatgcgaagaggtagagagggagtagcaaaacacaacatatagataaaacgatccacgaacgttgcatgtacacccccagcatggcgtatcgctttgccccatatgcttgaccgcatagggtttccaaggcactcgccatcccgagctgagaaataaaagacaatacaatataataaataaactaatgggaaatcctttttgactattgtaatgataatgtgaaattttattactagtagaccaaaggtgaagccaatgataaggccactgagattgcggcgagctcaaggtctccaaggtggccggcgaaggcttgtgtgataacgaaaaatgagtatgcggtgactcggctgaagatagctggaccaactatgtgccacaacttctttgattcaattttaacccttttccatagagaaagctgttggctaatataatcgatcttttcatgaacaggaacaagattatgttttgattgctgacgatgatcgtgattgtaattgagggaagctttgtgatctgctagtagtgggacctttacttcttcctctattatgtcattagagctctgcatttttaaacacttctttgaatatttctaaagatttgtttttaaggtatcataagaccaagaaccatatagaaagtacacttatatatatatggtataacttttgggagatgcatctcgtggcatcaacctagcttgctaagggaggactacggctgctagctgaatacatatttgttcatacatctttatgtaacacattttattttataaatatatttttttggaaagctgattgtatattatttttgatttaaaacaaaacagtggcagaaaataattaaacatattggctactgacatgtgaccttgcgatacggttaatataaaaatatataaatgtattgcgtgcgagtatttaaaaaccaagaacaactcaattattaactagtataaaatacggggatattatgaaaatattaggtgggtgtcttttaattttggtggtgtttagttgtgaagaataaaaatataaaaataagaatgagaatgagaattagaatagaaatagaatgaaataaaa

SEQ ID NO: 262937 - DNA, 879 bp, Cannabis indica
tattgtaattaaaactaaattagtgacaattaatttgtatctatattatattttagtccaaaattaacttttgtatactaaaacttatgttttggctaaaaattactagtaaagttaatttttttttttgcatacttattatctgccaatattatactttaataaactccttacttgttttccatgtctcatatatataaaaatatttcaccctttttttatttaccaaacaagtcttaacaataagtgaaatatatgacttcggcatatataatcttatttattattatcttgaatgataagtaacacccaaatgcctaatctggtccctaatcaactttcaaaagttatgtctttgaagaagaagaagaatggcaaagtaggattttgtgctctcaaactatatgtcaaaggcttataatagagttgggtggggtttttctctctagaattatgatcaagctgggtttttattcaagtttatgacaaatagtcatgaatttgtaatttatgattcacattttataaagatataattaagttagtaattgtatatgggagatagaaaatcaaatggagatgttttcaagagttcgatcaaactatcaaaatattcatttacatgcgttaaattagttttggaaagttgagtattaagttagctcgaaaatgagttttgaaagttaaaattggtgtgaaaaacagatccaggcaatatgtcgcctgcattactaaatgagagattttcgatgttttagtgatgtttatcgacatatgcattattaaatgaactattttctgagaaaatattggaaaacgtcagaattttataccgcaattactcaaaatgaaaaaaaatcctttttattccccacaact

SEQ ID NO: 262938 - DNA, 480 bp, Cannabis indica
taatacagtaaagctaaatgctaaaaaacaaaaatgtagaaaggactgagacaatgtcctcaaaccttatcacatgaacaatagcttcatcattgccctcaccttctacaactggcacatcaatagcaaaaggagggaattcgagatgtttggggatatagcctttaactcttgaagcctcttcgaccacttgctcaccactattcatagtgaagtctattttgcggagagtttcttcactaaaacactgctgacactgcttgataaacttcggcacctgtatgttaggaaagcccttcgaactgaatgacttcgctcctccatttgcagaccaagctctatagatggcatcaaaacataagccatcataaaggtgacatcaagaagagcctgatcctcaagatagtcacttgctccttaaagaccttaacttggtgtctaagatcagcaactattgaagtttgttcatctagtgcaaga

SEQ ID NO: 262939 - DNA, 562 bp, Cannabis indica
ttttaattccaaaattagactatgtctagtttatgaattttcactatgttatgacttgattgtgaagaaataggattttaaggttagtttatcaattaagagactttttggagtctaattaatatatattataaatgataattttatttgataattaatttaattattaaataaatagtttttgtatttatagggttgaaattgcaaaagtagtatttgtgaaatatagataaatgattgagaaaaatggcaaaaatctaactagtgttggccccactaatggcaaaagggtatttttgctccatttttatcaatttttattccaaataaatcaaccttaaccctaggtgaaattagtataaaaggaaagctattgtctctttatccaataaatgcttctaaagctaaaaacctagttttctctctaggtttatgagacttcatcttcttccttttccttttaatttcgaaatcatatagccttcttcacgaaacaaaattcagccattagtgattgagtccatgcccacacattacaagttagtcctcaatcatacttgat

SEQ ID NO: 262940 - DNA, 704 bp, Cannabis indica
aacacgtaggtctatgccacatagacatatataggcgtgtgagcgtaacacgcaggtctatagcaaatagacaaatagtgcagtggcaccattaattatgtgatatatatattgagattaagggttatgcgttcaaggcataattaggttagactcagtaaccagaaccgggatgaactattctaaggccttattgtatttagatgtgtgagcgcaacacgtaggtctacgccacatagacataaataggcatgtgagcgtaacatgcaggtctgtgacttacatgcatatgagattggcattattgtttatattaggactgtacaaaaaaaagtttaaaccgcccaaaccgaataacccgcccaaactgaaccgaaaaaactgataaaaattacaaccgaaataacccgaaaaaattacaaccagcccaatctgttaattgggcgggttgaaaataggtccaatccgtccaattaaaccgaataacccaaccaacccgactttggcttttattttatttttagtttttagtttttattatatataacataaatgattaaatatataataatataaaaaattgtatactcaattgttggtttcaaagtcatatatattgtgttgtgctttggtggaatttgatatttttaatttttattgactttgaaaccccaaaaaaaaaaaagtttggccggtttgggcgg

SEQ ID NO: 262941 - DNA, 4584 bp, Cannabis indica
ggtggccaagtgtttaaggataataaaataacacaaaaaatatgaaaaaataactttagactgatcttggtcattgatgctaatataatagctaaattgactcttgatgaatattgttaattttcagagcttgaatctcgccgttggatcattttcgggtgatctgcgaaaaaattacacttgtcataggggatgaatttcggacatgaaatcttcaaaattgaaatattgttgtgagacatcatttgaaaaagctataaaaaagcttcaaaactcaagttgaatcgtgttaatttaatcaatattgagagagttatggctattttactaaaggttgttcaaaacccaacgcccaagttgacatactgaaatcaacctagatgttgggtgagtggaaaaatgttttacacttttattttttgatgcctaagttatatgttgacattacacagtccatttcttagttttggtgaagtttttcaccagttctgggaaatgtcgcttttttgtgaaatcaggtagttaaaacttcctcattttttctatattccaccttgccaaaagggtaaaatatcaaagtgtgaattttcttgtcacaagttgtagttctcatttactacaaaaaaagtcaaatgctcaacacaaaagaaaaattagataagcagtttccagcgcaccaggccatatgtcaacctgggcgttaggtgctccttagggaggttccctgttctccaaccctatttttgacaaaactaagaagaattcccagagcagaattgtatttgaggagtggaaacatgtgaaccaggttgtatatcaacctgggcgcaaagccccatacccatgtcaacctgggcgctaggaccctgttttggctcctaaacaatcttgtttgattcaaaaaatcacttgtatctttgttatttctgaaaacataaaatatgtccaaaacacttttctgagaaaacacttggaactggcctaggtcgttaaaattattaactgggcactaggtcctaatttcacccacatgatgattccatttgattgtcgaatacacttgtatattaattcatgaagagaaaaaataatattcttagaatactttatctgagttgctactggaaatgggccatgtttaccatatgtcaacatgggcgctcactgcctaacgccaagtcaacttgggcattgggtcccatgtttgccctctaagatgatttgtttctttctcgaaagtactttttttctaattttggatggagacaaagaaaattcttgggaacatcttcaatattattgttggaagaaccttaggttcacaataggtcaacctgggcactgggtgcactagttgccctagccacctcatgcctcaggtgctgaaaacagaaagtgtcttgattctaattctaatgcctctaacatgttcgtgacatgtcatattcatgcctaagtaaaaagcttgagtcattttccctaagaaagacccaaaaactaagacctaagctgggaatgtcaacctgggcgtcaggcgaaaaccctaggcacccaggttgatttctaagatgctattttatctcttttcaatttatagggcttagacttagattctttgtgtcttctttgtttagaataatgaatgatggtgggtttgaaataacttggaaagatctaaacaaacattctaaaattcccaaagtcaacttggaggcagggcttggaacccctcttaggtcgactgctatgactcgggactactcaactctgtgaatattttccttcttaccaaatattgatgtccacatcatcaaggatagttttcgtataaacaatatataattgagtatttgtatacataatattcagaagaagagaagtgagtatactatatataatataaaagaataagatgaagaagaacacaaagtgaatgaaggcgggtcaccaatggcttgaacaaggttaatcacttttgtctaaaaagcttattgttggattacaaatatgtataatgtatatgctattataaagtatgatacaaaattaagtgaccaattacgttatggttatcaaatcgatatcaaattgtcatgaaaataatttgtagatagataaattaatctataatttgttgagcggtcaaactataaatacccaaaattgattctataacaagtctataaatagatagtggtccccaagaaatactaggcttcttgtattttctcattcactatcaaaggaaatactttaaagaaatagcgtattcttggaagatcataaccttctatgatatatccatcgattgcttgagattagtacttccactcatctcttattcatatattcttattttatttagtaaaagatctatagaaatataatttaggattttctatattaaacaacttttagaaatacgattagatctgggattgtatgtatttcttaagtgttttataaatcttaacacttatttccccctactaccaaacagttagggatttttggagttatttctaggaataaacaaacatcaaaagtctttctagcttagtgtgtgaagataaaaaagtagtgtgtctaaaagatgaaccaaagcacctatttatagtattaggagtcacatttgaattcctaatgactattacttcttagtttgggccataaaaggaagtagaacgttagtttgtgatgttggaaacgtcctcaatgaattattaacgctacagaaaatttttatttagaaaaggctccaggcaatgtcccttggagcaaaaccaatgaaccctcgagatacattgcataatgtcaaattccctcattatgaactttagaagacatgtcacccagtaataggtaggggtgttcatccaatccaatctgcactaattacagatttcatatttttcatccaatcaatccacacaataactcaaattcaatccaatccaatccataaaaatacaaattaaatcagttattttagatttgttatttttcaatattaaattatttaatatttatgataaaaataattttttttttcacataactagcaataaaataaaacaaattatttttatatataattttttaaaaaattataaatatatgtgtattgaattggattgattatttttacatgtcaatcaatattcaattcgcacaagtgcgacttttgaatttttcaatctaattcaatcagcataagtgcaaataaccgtactttgcgaattagattagatcgagtgcattgattagatcggatattttataaataatcagtggcatcaactagaacaatttgagattttaatctcctccttgaaccaaattatgtccaacccttctaacatttattcacacgaaataaatgagtgttttatcaatttctaatagctgaaaattccatttgattctatgaatctcatatgcaattactcacttaatttgcaccttatcaaatgtgaaatttgattatatatgcatattaatgagagaaattaaatttttaaacttacacatttttttttgatgaatcagccatttcattgcaaaacaatcaactttacaacctataaacacctccaaaaggcctttaatcttatttatacaatattatttacaatccttcaaaccactctctatctttttgcttaattttctttggcattacaagtgctattctattcttaacactccatttaactttttgcataatctcagaaactgccacctgttttgcattccagaattgctcattctgagctctccataagcaataaaccagagcagccataccagctgctagaacttgctttttgaagcttgaacagcttgcttttcaaacttatttcagcaaaccagtgagggcaacagttgttgtgtgccaccccaaccaatccttcacctgcttaagacattctgcagcaaaatagcagtcaaagaagagatgttttgttgattctgcaacataattgcaaaaaatacattcatcaccatcaatgtgaccatgtttgagaagcctatccctggttttgagtctgtttagcataactaaccataataggaagctatgctttggaatattcaatcttgaccaaacttcattggaccaagaaaccttctcccaattcaaattaaaccagactaacccctctgctattttatatttagtggcagagaaggtgttatgctgcacacagtctttaattctttctttgagatccaccatttttctccaataccaacttccactcataggagccttgtattcccaccaagcttgttgttttatgtacacactgtgtacccatttcacccacaaattatccttcttttttcaattgcccatacatgtttaaccatagccgcagcattccaattagggatactcaccagccctaaacctcctgatttttttggacagcataacttctcccatgcaactgccccagccccattcatgattctcttacctgtccacaaaaagcttctacaaactgcttcaatcttaatagtctgtttaggaatgaacatgatttgacaccagtaaatattaccaggaacttagatcta

SEQ ID NO: 262942 - DNA, 4715 bp, Cannabis indica
attatttattttagaataatttatatacgtataatattaatattgtttgttttaagttaattgaatttatactaattttaaattaactaaaaaaaaaaaaaaaattaatatattatttgtaatattattatttttaatatcgtgagcatgtttaattttaatattcttaaactttatatatattttactcaaattttaaaaatacacataattaacaaaaatataactaattatacgtacaattcacgtaacatgacttaaaaacattttttttttccttcttaaaataagaaaaacttgtaaaatttatatagaaagaaattaagcaagcaaaaataattaaagtttaagtcaagaataaaaataagatgaatacacatatatatatataaatatatatatatatattatgaaaatacttactagggttgagctcagagctaacaagttcaagaagaagggttttgccaagcaaatcttgaatatcatcaactcctctcttcaaaccaatattagacaaaacacctcccacagttggcttcacagtcacaacagctttgacttttgttgacttttccacaactttagtactactattactactactattataatatttattattattatctcttgaaacagctctaattactttcccaaaatttctgtggttataatttttttcataataacaagctggtaatgttattatacagactggaaatgaagaaagattattgtaattataattattccctccatggatgaataatgaggatagctttgactcttgaaaaacttgaggcttcaacatttttagggtttgatgttatattattatagaagagctttttgaatatgaatgaagtgattgatgagtagttgagaagtgtttattttataggtgaaaattaaccctagagagaatagtgagatatataacattttaaacgtgaggaatctaagcaagtagttatatgaaatagacacaaaattctactgtataggatgtactgttatatataggccttatctgggtcttgaaatttagcgggtcataaaaaaaaaagaaatatttttaaacttttatttagagaaaaatatagtattttttaaaattagtaaaaaaaaaatgtataattttaaaaagaaacaatttttttttagacccctggattgtaggtggatcctaagcacaggtccgaacttactcaacagcttattttaataaatatttattgaattttttttaggtggggcatcattaatcacttttactctagttgtaaggatgttttctattatacttttaataactaaaataattatatcccaactttttttttaaaatatcataaattataatgataaaagtcacggacaacacaaaataaagaaaagattttacgtagttgaaatattaatgaaaattaatttaggacaagggcgggcacacatagaggggaaggggtagtcgccccttaaaaaaattaaaataaaaatacatatacataaattttagttaatcacaacatatatttataattaaaaaaatatttctatatatacatagttgtagctttttgataatggttaagttttcttatagtatatataataataaatgttaagggtttaaatttcaacaagaacatttttattttttatatttaaagtttactttttgagtccctattattgtattaatcattgaagccaactattatcattatgattaactggtcacaaattgaaagattgaaaagtattgtattaattattgaagccaactgtaatcattatgattaactgatcacgaatagaaagattaaaaatatgatatatacttgacttgtgtaagatattgtcaatatatatatagtgcagaaatagtaatagtggatgtgcgaattctcatatttatacactgtaacaaatttcatttttagtcacaataaaatttataactaaaagtaaaaaatttatgactaaaattaatcctaaaaaaaatagtgagatatataacattttaaacgtgaggaatgtaagcaagtagatatataaaatagaaacaaaattctactctataggaaactcttatatatgtgtgtatatatataagctttaacggcaagctatagtggaagataagaaaaaaaaatatttttaaactcttagagaaaaatatgatatttttaaaaaaaaaaaaaaacggactatagactaagtaggtcctaaatacaagcctaacttgcctataatcagggtcaggcctactcagtagctaatattaataaatatttattgaaaaattttaagtattacttttaagaaaatttacatgttttcactttacttttactttaattgtgaagatgtgtttttaagaagctctgaaagcgagaagaggaaagcgcgtgaatgagcaaatgaggattaatccacgtggaccaatcagaacagacggaaagaggaaagctaataatgatcctttgtgcctataaatagaacttagaaaatattgcctcattaaaaaaatatagacgacatgttgctcatgttacactagtcgaaactctttcgaaatatatcttcaagaacactttgagcatgggcctcaagaacactttgagcacaataaacagtcgacctaaacaaaaacttagtgaattgagagggaaattgtgtagacagagatcatattttaattagactgaacttggtgtaaagaattcaaagttataatacaaattgttgtcgagaattttcgacatcaaacatatatgcaaaccaaaaaaaagaaaaaaaaaatcttaataaaattttataaaatcatttttgaataatattttctctttgaatatatttataaatattttaaatcttgtaaaattatattaaaaaaaattaatgtcaattatatatataattaattaatattaatatttgaggaatttttcatatattatattttaatttttttttttaaatttacagtttagattgttccgataatatctatgtgagttgagttgctaagtgaattttaattactatgtaggttgttatataaatttccgttaaaaaaaattacttaaaatataaaaataaaaaaacccattattttttcctccttataaaaatgcaagttccaaatttatcttaaaagtatccaagactctacatatagtgcatgcatgtcctattattattggttaaatctttaatacatacacttgtatatataaatatatattggtgtgttatatgtcacgttcattttcacctatccatttcagttttagcatgttttaattaatatacaaacaatcaaatatttatgtatataatattggttaattaggatttttatccctgtactttgacatgtattaaactatggctcttgaacttttaaggtcgttaaaaatacccttgaactattgaaattgttatatttaaggactgttttccaattttaataaaaaagtctaacatggataaaagtccagaggccatgatttaatacatattaaagtttgaggggcatgatttggtagatatcaaagtctgtggagtatagtttggtatataaacaatcactgaagtagtaaaattgaatgaaattagacaaaagtccttaaatccaataatctcaatagtccaggggtatttttgacgaccttaaaagttcagagagcataatttgatacatgtcaaagttcagggaaaaaaatcctaattagccaataatatatatatatatatagttacttgtgctaaatagtaaatagcaatctctttcaaattatgaaattaattagtgaagagaaaaccaatcacgtgaatattgatcgtacgtggaccacttctatatttgtagatatatatttgataataagaaagattctcattaaatccattcataaaattaatgacaactatgatattggctagaataatttcaataacactatcacaaaattgttacaccaaacctatattgtttacggtgataactataattttgaatcaacaaacttttacatcaacaagtttattaaagcaattttttgaagacatatcaactaactcatatttctgtcacgtggactatgacactcaaaattacatatattttgggatattattttgttagtggaaattaatatgcacttagcaacaccaaaagaatctcttattaacattgaaaatacagataattatattattataagtacttacagttttgagtttgtaaccggtatgaatctaattatttttttagcaacatagtagtactcaatgttagtaaaacaatcattacttggagtttttacattgtttaaagctagaagatgattcaacactctaatagagagatgtcttaatcttttatgcccaatataattaagggaaataaaattatcgtcgtttgacaaattgagctataaattgctttgtaaaactgaaacactaatgaatttttgggattgatttggattacttgtcacttaggggctgtttagtatgtgataataggagaaagtgagaatttgaaagtttacgatgtttggttaggtttttaatattttaatgttagctaagtgaaagtggtgggctttaattaagctggcaaggaaaacctaatgaaaatgtggttttgcaatttccaatgctactggcaaattaatacaaacttttgcattttaaaa

SEQ ID NO: 262943 - DNA, 696 bp, Cannabis indica
tagttatacataatcaacaacctaagtgtttcataaaaaaccctaatcatatagtattgtaaacacctactttcaatgcttcataaagcactccagtttacacattagcatatccactcaatttcagtgcttcataaagcactctaatcatgcatcattataatcatgtattcttacatcgctaggccactgagattacaagaaaagtgatcaacttcacaagcaatataacattcattcaatcattctataacaaaatgtactcaattgcaacttatcacatactaacactcttgattcatttcacgacatcgtaaccacacaatttcggtacttcataaagtactcttaccactccttaactacgagctacatatgtcactatcgttgcacgatacaacaaatgataagtaagaaacctatccgcagtttcaggagtaattactcataaacggtaatgcccgtttcttttactcgatcataattgactcgcaacgttaataatcgtttcatatcattaccctcgattataatcgagtcataacaatgataatcgtttcctattatttttccctcgatcataattgagtcacaacgataataatcgtttcctatcatttccctcgatcataatcgagtcacaaccaacacatatcgttaatctcgattgcgtttatgttacaacaaacacatacc

SEQ ID NO: 262944 - DNA, 534 bp, Cannabis indica
caagctacagatagataatatgcatgggtgtaggctgagatcaagactgagctagcttgcgccatgttatgggcgtgctttgtgtttatgggaacactagtgttgtatggaacactgtaagccgaatggttcagagagcatatgtcgatgggagatagcagattgggatgactttaagtcttaagagtaagactttgtattatcaagtttatcaaagtttagagagtcatcaagggatgaagggctggttttgagagatggacttgtgacacagttttgagagccgacacaaataggagccagagggtaaattcgtggtttaggtgattgatagatcatttatcacgtgaaagaagctttgaggagcaagtatgtagtgggtcaaaagggccttttgcatgaagtcgtggtgtgcggtaggccggagggccaagtcttgagtacttcgcgaagtgattatgtgaaagtgagcacttggtgctgcattggatgaagttggattgcaagcctgtctagaggatgcattatttatcc

SEQ ID NO: 262945 - DNA, 509 bp, Cannabis indica
aatatactgtaatatactttttcgttcttcatatataaccccacataaaacaagtcaaaatagttcaaaaattctgacagaaacaaagcttaataatggcaacaaggctattattaacacagagaaaatatagaaagtataacgaaaacaactccttcacaatccagtcacaccaaatagaaaatatagtataggattgaactcttttcccgatctttaaaaaataacatataatgggaatgtaaaaatacaaatgttatattaaactaaagaaaatgtagcaaatacaaaggtagaagatctgcgatgaaaactggcaaggggcggtgacaatctacggtggtaatactcaaggggtggcagtcgagcaagtagaggcgagatggtctagacttggtgctgagggagaagaaagagatgagtggtctggacataagaaaatgagaataggatagaaagttagggtttattatctaaggttataattgtaatttcatcatcaaattttt

SEQ ID NO: 262946 - DNA, 956 bp, Cannabis indica
acgtccactaccgactaacaggtggggggagctgtcgccgagacctgtttgttgtgaatcgttccaaagtaaccgcgggcccaatgtactatgagaacaggagacaattcaacggttgttatgaaccattttattacgtctaaaccaaatcctctaaagaatcaccataaccaattcattcacatcctttgaaaggatatcaacaaacctgtgaataaagtcaagaaaatccacacagtcaacaagcggatcccccaacacaaattcacagagtttcctacaatgagacaacgaagaacacccccaaatagcgtgatgagtagtttcttcttccaacccacacaaaggacataacccatcagttaatagaccatgacgagttagattgattttagtgggcagcccatcatgtgaggcttaccaagtaaaaagtctaacttttggaggaagattaagagaccaaatctttgtaccaaccaaacaaaccagacggcaaagcacgaggagcggccatattgcagaggccaagtcaataaccactcttaacagaatacgatcccgaattctcacaattccaagttatattatctggcacatcatgtgaagaccacaaaatagaaaggatagcttccgcttcatgaggtaaaaaaattgatcagatcagcacattatcccaaccactcgaagcgtctcttaataccaaaaccttgctagatccatcaattcgaacaggagccgataaaatgaaaggcgaaactaatgggatccaattgtcagaataaatagcaatgtctgtcccattctccacatgttgttccagatggaactgaggtaacagaaggagaagacaataaagatcagtaggaactcagtagctattagttagctagagatggagagagaagacagaagaaggcccctgatcgttttggctatgttgaattcattgcatatgc

SEQ ID NO: 262947 - DNA, 3201 bp, Cannabis indica
tagtgtgtgaagtgacctcatgtaagccatcaagagattaatcaaggaagcacactcatctctctagagcaaaggccaagagaatagccaatgaacatttttttaatttgtaaaaaaatgccttttgataatatctacactcaatgacttttttcaacaagttgcggctttcacgcccccatagagatgtagtcgtcaccccatggatttttctcaataagtaacaagagaaggagcaaactacttgagtcacatattggtacaagggtagctcttcccattgcatccatggaaggtagcattctcaactggggtgacacaatgttcaccaccatacatgagcaattaataagtgatctgactcaagaacaaacaaacaacaattgaaagattaaatacagccacatacacagttgagataacaactagatgctactttgtccaggttagatggtgcacacaccaatagaatttctgagatgagaaaaagtgtgggcattaaatgcttttgtaaatagatcagcaagttgagcacatgtggatacatgtgaaatagttaaaaaaatttagattccaccatctctctaataaaataataccgtatatcaatgtgttttgtaatgccctaacccgtaaggcgccacacatgtgctttaaaaattagtttataataataaactaacagtgtaagaaaaaaatgaattaattaaaactttagaaaattaattaaagtataacttaaattatatctcaaaatattactagattcggggatccccttggttacaaactttttaccaaaataccactgtactagtttgttaccaaatattgttatacactcaaaatattactaaagatggatcctgtcaactaagcacagaggacggagaggctgatatgtacatttgctaggagacctctgactcatggctaatccactttccctttcccttacctacaccacaaagcacccgtgagtcacaaagactcaataagaaaagtaggtaaagcataaacatcatgcataaagtactaaataacaatttaacacgcattgaaacatataatttaagtaactattcacagtgtaatcaactatttgtctaaaaagaaaagctaatcttgatactttgtaaagcatcattaaccgtcgttaccaatgagtttctaatgtcactatcattgcctaatgaagcaaccgataagtaagaaacctaacagcagtttcaaatgagagtaataactctttcttaataacagtaattaccatatcttacttttgacattctatgtcgtacaattgacttttcttaccttattccaaattcaggtgtacgggccaacttgaatggaatggtgctcaacgatctcgaacccaatgtcacatcaacgacaacttgatatataactaaattaaacttgaaataggctctaaactcaaaaccggacaaatccctatcaataaaatacagaaacctaggtattggaaaaacaccccaaacgacatcttcagaaaatggggtttcccactgggttaaactgttaaccgtttccacagtaccctatagaaatggttaactgtttcccactacagaaatagccaaaccctagtttttatgtcaaaactatcacaaaactcctccaaacctaatcaaactttccagatcaatataatatcatatatacaacatatctcaacactcaaaacaagtattcaacataaaatcacaaaaacaccattattgagtgtgttcttgagttcttgaactcaactcacctaaccaaagcataacaacccctaattcttgaaattaaaacttcaaacaaccttgaattaaacctaagaacatgctctggactcaaaaaaaatccacagacttgaaatcaaacaaaaatccccaaaaatatcaacttaaaccctagaaataaacaagaacaagtggagaaacttacctcaaggtttgggtagactcctaaggttgaagatttagtgagaaaatagtttaaaaaaaaaagtgattatttgtgctgaatctgctaggttttcccttgaagcaaaaaagaagagagagaaagagtttatgtgatgtttttaaaaagatttttcttatttggataaatctctaattatctaataagacttaattgaattaagccctttacatacccctaaccaaatatgacaaaagattaaaaacctataaaatgaccactctacccttaattccataaataaccaactttataacttatgggcatttttgtcaaagctatctacgtcgaataacctaaaaattcaagcatactaaaaaattgcggtacaatccataacttattctattaccgtcgtgacattcttggccaatccattgagtttccacggtcctcgaacccaaaaatattttatttcaaaagaatggtataaatacccacctgtttcaataaattacgctcatttaatcattttctcaaacgtcactaattatctcataattagtgttgacccccaaaaattactaagtgtaatttttgaagtcattagtgttatgcctgaaagttcaccaagtgtaaatcccgaaatgcacccaaggtgatgtgttggtacaaggaggagcaaaggcacacgcccagctcccctagcgcccagcctacagtgctcagctcccttagcctcagcttgtagcgcccagctcccctaacctcagcctacaatgcccgaatcccccagccttagcctacagcgcctagctccccctaccttagcctgaaacacccaactctcccagcctcagcctggagcacccaactcctccagcctcagcctacaacacccagctctcccccaaccttagcatgtagtgcccagctatcccccagccttagcctgcagcgccttgctccccttaccttagcatgttgttcctagctctcccctagcctagcctacagccccaactctcccaacctcaacctacagcgcccaactctccctcagccttagcctgcagtgcctagctccctcaacctcctcatacaaatagaaataaggaagaaatattgaggctagggtcatttaagcaaaaaaattactgacacgatatcgactacacaatgagtatagataatggagacaaagtttatctcatctgaggtgcaagtaaaagagggagttttagtgaaactgaggatgtctgagac

SEQ ID NO: 262948 - DNA, 543 bp, Cannabis indica
tatgataaaaatacgatttttgatcttctaagaatttctaaaaactgtgaaacacgaaaatctcaattttcgcactcactgaaacactaccaaaacttattcaaatcacttcaaacttcacagggcacatatatatcataaaaaaaaaatcgcacaaaatttaaatataattataaaatcattataataagtaatgagaatcaatagtaagagagttattcccttacatttgtttatttactttattaaatttaataaaggtaaaacttgattaaataaggaaaaaaaaagggagaactcccttcattaattttctaaagaatgccattaaaataattgattttattttattttgtaatattaattttataattacaattttatcctttaaaaatatcttataagaaaaattaccatatactatagtttaactcaaaagggtaatttaatcaaacattccgattacgtttcataataaagtaaataagataaatcacagttattttatttctaaaaaaaaattagtaaacaacatattacaaa

SEQ ID NO: 262949 - DNA, 814 bp, Cannabis indica
tctaacactattatgtttgtctagcggatgacaatcctttggatttgttaccattaaaaacaacaagctaagttacaccaacaatgaagatttgaaattaatactacaacattaataacagaaaacaacataggttcaatataaattcatacacattctaaaattatcatacatttagcaagtaagaaagacatatgaaaatataaaacaaacacatcttaaatgatttacaaggttttcaacaaactgttacagtgtcctgtttaggcgagagtcaaagatatcattcattgaatagagtactcaactcatctaaaatgcataccattctagcaaccttttattcaatcaagactacaatacggcattgtcccatttaggggagagtcaaggccattctatcttatgagcttccaccattgtttcatattttgtaagtcttactcttagcagccactttagggtggacgttactaagaataaaatacttacaataatacttatctgtcgagatctacggcgttaaattgctaatgaacgaacatccattagggatatctctcactaaaacaagaactatgtagtactaacaatggagattgaatgtccttataactaaagctcattatttcaaatagtgtatttttatttgatatatattttaatctatttattttaatacatacattaatttaattaaaattatcaactctaaatataatatttattaaaaattataccctaagaagatctaaaaaataaaaattatttttcatccttagtataaattttcctaataaatattatgaaaatt

SEQ ID NO: 262950 - DNA, 838 bp, Cannabis indica
gaagaacagttccgcacacagccagggcgttcataacacgactattccgccagaaaccaacgcccaaacgaccatcagagacgcaaccgaattgcaaaatatccgtgttgtgctcggactcatgcagagtcataacaacactctgcatcatgatcaggatgaactgcgtgccgcagtaaatctcgcgtttgatgaacagaggcgtatgttcgctgaatggagagacaaagagatggaggcattaagggctcaccatgcagagatcaaagatcgtagtcggcaagctaccgtgctgatacgaagagcctaccagactgtaggccagcaaacgccgaacgtcattcccctgggagaaacggaggatgacccgacgatgaatgcctcccagacaaccaatggtcagccgtccaatccccggtcacgagttccactcgtgggccaagaggtaggcgggcagaccttgtccgggaattcatcaggaggagccatacctgacggatccaatcagaataatggagtcattctgcctgtcaaccaagcgaatcaatcgctaaggcaaccaggctcttctgtgttcgataggctgggaatgacccatgacctaagggacgatctaaacagaagaaggggaacagacgagcagaatactacaacgatcgtgcagcccggagcccatactcagatccccgctcagaaagacgctgacgtaatccaaaccgaccaaaatgccaatcaagtcagcccagccgtacaggcccagcttgacgagttgaagaatatgtttcatggcatggccggacagcgtaacaatgatcttgagttagaccgtgctcgcgga

SEQ ID NO: 262951 - DNA, 647 bp, Cannabis indica
tcaattctagggatctaccccacaaaaaacactataaataccccccctaaagctcatgaaggcaggggtcgagaattctgggtttcataagaactagaagaggaaaaatccaccaagaacattctctgtaataaatattatcataaatacacagactcgtggactaaggctctttaatgccccatgtaaaaatctctctcttaattccttatagctttcttaattactattattatattggttgccgaaaacctcggtcaacaattttaatagttttatatttgtcatataaataagggataagatgaagaatacttcttttttctatctattaatcaaaaatacccttatattatatttcattaaaatatacccacttttgtgaaagggttgcccgatataccctcaccttccacttaaatctaccatataatttacattaatctaagggtataataggaacatcatctataaaaaaaataggtttatcttaaagaatatgacactactacaaaaatgccttttagtgacaggttttgagagtttctaaagtgttttagttacacttcaatgcgtgtcactaatggaagtgtcactaaaaaatactttttagaagttcaaaaatgtgtgtcactatatccttttta

SEQ ID NO: 262952 - DNA, 615 bp, Cannabis indica
atcaaaacgaccacctcgacgagtagatcacacccatgccaaccgtttgtcaaaacggtacatgatgtcaccggaaagtcgccggaaaggggaggagctacaaaaatatcaccggaaaaagtagcgaactgggaaaatggtttagtgtaggttgttgtcctcgacgagatgagtttagtggtgaagacgattcgtcaaacggacgccagaggtgatcgaaaaatccgttcaaagtttgaaaccccaaactttgacttgcgatcccgagctaacggtggcgaaaggagcggcggcgcttgggggtgaggtcgtcgacacctagagttccgttctgtccggcgcgtggtgtcggcgggtggccggaggttggtcaccggagtgtggtggtgatggtggtttgtgggttttattttgggtttgtgtttgaagaaagaaaagagattgagtgaagaagaggacgtgtgagagagggaaaaaggtctgactagttactttttttttttacatatatatatatattgctttttttttttattattttgactcggtcaaactgagatctcacacgaagtctggcgtttcgaggttatattgaaaacatttaacttttgtaag

SEQ ID NO: 262953 - DNA, 1227 bp, Cannabis indica
attttttctggcacaaaaaatgtagcagattgttgccaaactcaaggctctaaaaccggttttcaagaagatcaatcaagagggcttcacggatctgcaatctgcaaccattcaagtagctagaaccgtaaatttttgtcaagataaattgctcctagaccctcaaaatctagtattgcagcaggaagaatcgtatgctaggatagcttttacacaagcttacaagaattaccagttatttctccgccaaaaggcaaaaaccagctggataagagatggagacaataacacagcagtattccatgcaagtctcaaagccagaaacaaccaaaatagaatcctatctattgtggatgaacatggcacgagagtagatgacccgaacaagattacagaggtattcctgggttactatcaacattacttggtacgaagatgatgaatagaagaagtaataggccaagttctcaacaaagggcctacagtctcgatgcaacaagtttagcctcttggctcccattacagatgaagagatcaaaaatgctatgtttgcaattcctggttccaaagcaccggaacctgatggctactccagctttttctttcaagataactgggatttacttggaagtgatgtatgtgaagcagtgaggtccttcctccattctggtaagatcctcaaggagatcaattctacggctctcacaatcattcctaaagtgaaatatcccaatacaccaagcaattataggccaattgcatgctgcaatgtgatctataaagtagccacaaaggtactctgctctagactcaaggatatccttcctactattgtggctcaaaaccaagggggatttgtcaaaggaagattcattgcccacaacatcatgatatgccaagacttggtgaggcactatgggaggaaatcatcaaaggctaattgcttgatcaaacttgacttgcaaaaagcttatgacacaatagaatgggatttcattgaggaggtgcaaaggggtctactttttcctgaaaagttcattactcttgtaatgaactgtgtcaaaactccaaaattctctcttttcttcaatggatctcttcatggattctttgaatcaaagagaggattaagacaaggtgatcccctctcgcctctattatttgttattggcatggaatacttgtcccgaatcctgaaaaaagtaggagataagagtgattttgctt

SEQ ID NO: 262954 - DNA, 318 bp, Cannabis indica
ttattggggtccctccgggagctatccttgtacaaggaaggcgatctccggtagttcgtatcttgcctagtagcaaagtacacacgctcttgggagtccgtcaactccgtgtactaggtgtactgtagagtataccccctcttttggcgtttctcctccgtccgggtgctgcctttggaagatcgtttactcctcgagccctgggaaggacctgccaggctggcggttggagcggagtgcgagggagcttgtccatttatccctaagggatttccaaaatgggacgatgcgggggccaaggcctggccctgactgtat

SEQ ID NO: 262955 - DNA, 2702 bp, Cannabis indica
tagtgcatatatgatttattaattccgcactttatacttaatcatatatgtttcattttatacatataaattgtctaacagatacatcttatatgtgacattgagaatctatgtctatacacagtctaagatgagatttcgagcaacttttctctttatttttcttgcttcctgtaatagcaataatacattttgttattattttattgcttgcttgttttgatgtttagtgcaaagtatatttttcttttttgcaaaatttatcatttttaacacccaaaaagatattactggtatttgaatgtaatatttattgttttaattacacaaagtgagtgcgttagtgtggttgtgttggttgtgctccaacaaccagattttaaacataaaaatgtttatatcaacgtttattaaggtaaaaatttgatcttacaatgcattatttttggttttgtaaattttatcaggtttttcttgttaagattgtgagttctttgggggttgcggtggtggccagattttttgtccctattggtgacaaatttcagtaacaaggtaaaaatttaatctttaatagttttattacaaatatttttggattggaatgatttttttatactgattgtgtttgtgttgtgctatatgataatagtattgttaaaaatttatttatttttctttaatattaatatgttaaatattgtgattgaaagatgaaaagtaaaattaagaatgaaataggagagtattaaaataaattctagaaattaggctcttagaaatatgttagtgagatgtaatttattataaatgtataggtaactccttttttttttcaaaataaatgtaaatataaaatgagaaaaaaaaattaactcttttatctatttttttatgtttatattaaataaaatttaattttatttcttttctctatttttcattttcattacttattgatgtgttttaatttttttactagtaaataataaattatttttcattactaactagttactaattttactataagtagctagtcattatagtaactatttagtaataaattacttaactagttagtaattaggtacttctaaaatatataattacttggtagttaaataattaaatttttaattttttaacaatttttatgttgtaggttgtgaggtcaatttgtaaagatccgtcttttttttttttatgaactggatgaatttcattactcccaaaaataaattttacaaactaaagagactatataactagccttgaggggccacctacctcatggggcgacctacctcaggggcccaagaaattttctcttttaaaattatacattattttttacagattttgaaaaatatcacttttttttttctaaaggatggtccatttttttttttccaataacccactatatttttttttctaataggggcaaatagtgacatatatatatagagagagagactaattaagaataaaaattgtcttggtttattgcttctttgttatgatgcaaaaattatcacaccaaaaaaaatatatatattatgagagatatcaagcgaggagaatgaaccataatcatgtccattgctctcaattacaacagaaatatttaagcgccatatagaggagattttgcctcaaaagttcttggttggtgattcaaactcattaacccaagatctccatcatgcagttacaagtttatcatgtgatctttacaccaaaaatgttcactttctcatagaatttatcacgctgaacttgtccagaaaggtaatcaaaggaaaatattcaacttttgttatattagatttctttgttttttctactaaaaccttaataggttttctcatcatttcattccatataattcttattgtatttctccatatctcaccattctcaggaaagaagtacaacatgtcacgttatgtaaatttattggaagtcgaggatatgattatttgatttgagttatgttttctttaaagtaattttagaatgatattaatgtaatatatttacttagagtaatctaaatatgtatttatttatctgttcaatttaatttttatttacggttaatatatatatatataatttgtacatcattaaatatattgataataaaataatcatatgtatatatataaattagatttctaaaataaatttttaaaaaatttatgttatcacaaaaaattctaaagctgaaaaaataatcataggaagtccctatggaattgattattatgaaaaaatcacagtgatcatagcgttcctatgaagtcggttataatgaaaactgactccatacagaccttacatggctaccaactccatagatcccttatgaagtcgattatttcatactccctttaacgtcgcttggaatagtgtcggtcacaaatttcgctaaactgacgccatatacccacaaaaagaaaaaaaagaacgcctctaaagctcttttttgtagtataatagataacttattattagttctttgcacatgagcaaaactaatgtactataattttaaaaatctcttttaaattaatttgtgttaaaacaaacaagattacaattctacattaaatattttaaagttttttcttttttttttttggtcctatatatacacatatacaagatatctttaggggttttttttttttttt

SEQ ID NO: 262956 - DNA, 856 bp, Cannabis indica
acacaaggcccaaaggagaggaatttaacctttcattaaataattgttattcattgaataagctcaatactaattgggcctaaataaaactatctatatgcacctagtccatttatatatttttgaaataaatgggcttcctatatgcatctaagcccaaaagtaaatatataggctcacacaggttaaattgatttggatgaaccctatcatgtttctaaaattacaaaatttacctgttacaaattatttattaggatctattaacatttggactatgattaaaatcatatcattggatctgtcaacaagttaagcatagcaatttagatcaaacaaataataggtttgttaaaaaaaagttttgaatgaaaaatttaaaatagacaaacaatgtccatgtaacagatgtgaagtaagatattaatataattaaattattattttatctaacaaattattttgaaatttagggttgttaaaaacaaccttaaatatcatttcaaaatttaaaattcaaaaataaaactaatttaaattatctaggttcatttgaattatttatcaaattaaattaaatatctaataagataaatgatttaaaaataaccaaatagatattttcaatatcattttctaatcttataatttaattaaattaaaataataaaatagaccaattttaaaatagatatggttagccaatcattattttaaaaataaaataataaacaaataataatgatcctaattatatgtcaaaatatctcaaattaagcctttttaaaaattttattaaaaataatctaggttatttaaatatttaaaatactatttataaatatttgataagtaa

SEQ ID NO: 262957 - DNA, 569 bp, Cannabis indica
tagaacctaaaagatctgaaaagagttaggttgatttataatctgtcattcacttcaagaaaaggatagcaattaggcattaacgatttggtaaactaacaacaggattcttctccctaatctctcatcttgattaatattcacttgtttcttaaagtttttgattaaattttattctgttttaatcctgaaaattatcgatttgccaaatagaatcataagtataatttagtggtagttaatcccattccctgtggttcgacctcacttacgtgagtttattacttgattacgtacacttgcgtactattattaattttcgtaacagtagcacaacttttcaacttcatctttcaaggctattggtcgttctttatccaggaatctttgtttttgctgaactggccggatgttatgatcgattttaaggacgtgtgaaataatggaagggtcgattccgaccatatccgcatgtgaccaagctaaaatatctaggtttgctctcataaattttatcaactctgattttacttcgagcaacaaaccctttccaatttttagctttctgg

SEQ ID NO: 262958 - DNA, 514 bp, Cannabis indica
cttggtgaagaaactggtttctttattaaaaaactacttactaggtgatttttctagtgattttgctggcgacaatgccaattctgacgacttttttgatgccggcaataactctggcgatttttctaacaccgagaactactctagcgacttttaaggcatcgacatcaaacagcagaatagtcgtcggaattggcgttgtcacctgaaaaattatcaagaaactggtttcttggtgatttttcctgtgatctttccagcaccaattctaattttgatgactttttcggcgccgacagcaactccggcgacttttccagcactagcaactactccggcgacttttccagtgggtagcaaactccggtgacttttccggcacgagtgacaactcccgcgatcactatagtattatttgttttatttttttataaaaataaatatgaatgaaatttttaatatttttttatggtaatttaattaagtttttatttttttatgaatcttaaattca

SEQ ID NO: 262959 - DNA, 504 bp, Cannabis indica
acaggggcaaaattggtaaagtgcttagaaaaaataatactttaaaaaagatggtaaaaataaaagagaacaatataaaaagagtatagagtccaatttcctctatattttgactcaattgattgacgaggaaattacactctatactcactttttaattcttattttaatttatacttttattttattattttttaatttatacctagttttataggtcatatccctattatatgcattagaaactctaattttgataaattatgtgaggttatatttggtactttgattataaaaaatatatatttattaattaaaattattttgaagttatatttagttaatgtgtaataaaaagggatagttttcaacttatcccttattgataacctcaatgttgtagctgaaaggttctttcaaaaattgaaatatttgacatgggcttagagtaattgggcttctcactttttttattggaataattttacaaggcactattttttt

SEQ ID NO: 262960 - DNA, 1054 bp, Cannabis indica
aaaaaaaaaagaaagagaataagagaagtcacgagacccagaggcactttgcaaatcttttgtggattcgaactcgtccacgaggtgtaaatttttgggattttagactcctcgtaagcgcaactcctccttcgaacagtcaccattttcttcttcttcacacagcaatggcacctagtctctttctctctcttcgaccctcttatttctttgttttttgtttatttatttacatttttcttttactttttaatttttatcataattggttttagtttgttaatcttatactacgtaggagccatctaacacatatcagagctagaccaacagaaggagtcctgaccaaaacgattgtggaagttgggaactttagccataatttttctagtatgggaattaaaccgtttatagtttagaaacccaaaatacaaataatttttcaaaaaaaaaaaatattgctattagacactactaggtggcatcttaagaattaataatatttcaaaaaaaattattgctatattttgtaggaagctccccacagtgaacaaaatgaaatatgtgctcatgaaaacaaacatctatagaatgaaaaattttgtttgtgttgagatccaacaatctgtagactttcatacctggaggatatccaagaaaaatgcaaggagcagctaatggagagaattttgatctagattgacttaaaattgagacataggcaagacaaccaaaggcctttaagtgttcataagttggttgtttggaatataggatagcagagggtgatttatttttagattaagtgtaggtatcctattaatcaaataagcagcagtagcaacacattccacccagtaacataaaggaatgtaatgttagactataatatagtatatgaaatacaacatatatataaacgatatgtaatgcggaaaatactataaacatatcgaaatatatatgcaatgaaagatcgaaatacctccagccattgatctttgagcttcaatccctgcgatagcttcggtattggagttcgggcttcctcgct

SEQ ID NO: 262961 - DNA, 157 bp, Cannabis indica
tctgtatccttacatgtgacgtaccaaatatcagtaccggacttcctaacgtagtagtcaaaccctttcttcattgcatacaagccaacaaccatctttaaatgcactttgtctctaaaaaactttcccacatgtaactccccgcctggtgtgccac

SEQ ID NO: 262962 - DNA, 883 bp, Cannabis indica
agacataaaataattatagtttattttattttattgttagttatgtgaattttttaaaaaatattaaataatttaatattaaaaagtaacaaatctaaaataactgatctaatcccgaattttccagattggattggattggatttgaactattgtgcagattggattggatctaaaaaatgaaatccacacttagtgcggatccgatgcactatgagaaaatagagcgaattggattggatgaacactcctagaacaacccaagtctagggtttttttattcactcacatattaataaacactgcactagaatcagctatcaatttatttactcactttatatttttttttcatttctcttagttgcaaaaacaacatcatatcaggaaaaaaaaaagagactggcccatcggtaaacctccgacatgcaaaaataactcaaaagtttaatggtggttcgacattcaaagctggaaaaaagtatgtggggaacaaaatcagttaaaataaactaatgatagaaatgaaaaaaaaacaaacaaaacaaacaaatctactggtagttgtggtgtgatgtcttcaccctgtggtgcttgctcagtgcagaagtggagcaagattagagaagagaagaggcggagaagaaaaaagagatgaagagaagaaacgactattaatggaaaccaccagtaataaatataactgtaactctctgtctcacagggacgctatgtgtgtgctttataatttaatcaataattattaaaagattagtttaaggaaaagtgtggtcaatttaaaaaaaattggattaaactaaaatatacctttatgtaaaatactactaagcacggggatttcctgtttataaacttttacaac

SEQ ID NO: 262963 - DNA, 667 bp, Cannabis indica
acaagaaaccaatacaaaaaagcggaaaaaactgttatttatcaatatatattgtttaaaaaaattagataatagaaaatgcaagatcggttgccaattttcaataatttttgacctttgcttctagatgaaggtataccagccattggataccaaaaatatagcattctttatcaatctaatggttaaaaagctattgaagttttacatacctcaagtgttaaatgaggttttacataattggcctaataacaaacacttacaatgtcttctttgaaacactacttgattttttatttttaatttaattgatatactcgtttaattttgcaactgcactatttgtaaagattttactggtcgaggtttattactaaattttttatttttatggtactctaatttaacttttgctcaaaaattattacctgtttggtttcttcatatgattggatcttgataaatgtcaacataaatacgatacaagtgcacattttcctttgctaagtaagaagaaccgcgaatggaagatatatttgaaaaaaatggaactatttagaaaaatatattaaagaggtatgatgaaattaaatgagaagtgtgagattatataaagaaagaaaattaaataagtacgtgacacatttaaaaataatatttattataa

SEQ ID NO: 262964 - DNA, 547 bp, Cannabis indica
aatagctataacatatatgaatatgaaaaaaattaaactaatttttttttctagatgctgaaataagtagggatatattagtacttcccttttaaggggatttattgtagaatcacccattattattactattttttagagtaaatactattttagaccttgtgttttacaaaaataatcaattgtacatataagaccctgaactaattttttgtcaaaataaaacttaataatagtttaatctaaagatattatgacaaaactgattacattttctgtatctgttcgcagtgacggacccagaatttttgttttgtgggggcttatttatcattaaaagatatttatacatatattataattacttttactagatttatttaattttgtgggggctttttctactattttaatttataattatgaaattaaaaaaaattgcatttaattttttaaaaggcagtatttttgttagtgggggctatagcccccacatcattcaaagtgggtccgtccctgtttcatattagaaagtcttaaagttagt

SEQ ID NO: 262965 - DNA, 1211 bp, Cannabis indica
caagaaataacatttcaaaatacaatatgcacaatgagtgttttcttaagatgttttcaaaatacaacatgtaccctgttatatgccaacctagatgcttagcttacaaattccaagtactataaaaagcccttagatctgcagatcttcagtttaaaagtgatcattttgtgagcacaaatatgatccatagacttgctggagttttaattcactaataccagcatattaatgattcacaaaagcctgctttgcttcaagattaatattcaaaatccataccaccctaaaattgcagagaaactagtaagcaggtaatcagtacatataagcctcgatcagtgaccacaaaacaaaccatcaatctcttcatcatccaatatctattacctgttgtcattactttcctgtccatacatgtccaagaaaagttgcacctcttgttgctccttctgcaactcctcaatctgcaaaatatattcacacatcaatggctggctcataaagttcagatttacagtgcataacaaccgaaaaccttctgctacaattttcacaaagttcagtgattagccaaaaatttatgtaagatgcataaaagatgtttaaacacataaaggttgttttagaggggaggaacgcgtacaaagggggggagcattgcggatcgatgaaaatgaacagtgagaagagaaataagaagaggaacaaagaggaacacgactacagtggagaatgaaacagagaagacagctagcaaatttataactgaccaaaatatttgtctttgctttgaaagaaatttaacttaaattcttaagtaggacagttttgttatcgctatcgatagaagaattcattcttaccatttgattttagtgtaatagtcatagtaaattaattttattgataaatcattaattcaataaatattaaatacaactttccatacacgtgaaaaacacgaaatccctatcaaacgattcaaaccgactcacgatattgagaaaataccatgttgatcccgaataattctaagcacactcattttacacaatcaaaatgcacacaatgatgtgacatacattttaaaccgttattaaggttaatgcatgttacatcattgtttgcattatgagtgttttgagtatgtaaaatgaatgtctatttagtattactcttaggtggcgtttggttggaggcaatgaaat

SEQ ID NO: 262966 - DNA, 1286 bp, Cannabis indica
ggcataaaacccaacaccaaaaagggaacatgttacttggaaggttcctataatgccctaatgctaaggcacactacagtgatttttcaattgcagtgccatctttgctaatcaaagaattttcttgaaaatcgtatcaaattaaaacttttagtattaactatgaaattttataaactttacattattatttacaaaagtcgggatcccgcttctaaactttttacaaaataatccaaaatacattattcaggtcgcacaacgactacaaccccagatgtcccaagaccgaatactccaggtcgtgccgccttgacatgtacaacctcatcctagctcaagttcactcatgttcagccttcaccttttcctttacctacacatgaaagtagaaatgtgagtagacagactcagtaagaaaagtatataacatatcacataataacgacttgtatctaggcgcccatacacctatttacaaggctcaacagatgagtaagaacgttccatactagggtgcagccactgtaccacatacactacgtaccttattgtacgagtgttggtagggtttattttgtaccctgagtaccactaagtgatataccacacaccctgtacttttccgtacttgtgctggtaacaccgtaatgtactttttaaaccacatacactataccaatgcactatgtaccatttttccgtacaagtgttagcatgcatatacattaacacatacatacattcgcatattcatatcacatattatacgttgttcttacctctttgccgaattcaagtgagttggccgacctgaatggaaagtctcgtgctggatggatgccctaatcacataacataaccaggtaaatcacatgtcaaaaccctaatccggtaaccccgaacctacaacttaaggttctgatattactaaaaggaatcccaataccctaggaaacaggaaatcacccaactaagacaccgaagtggacatgaatcgagaaaacgagttatttaaggaatctgccaaaatcggttaactggttttacaagtcctggcaaacaggttaaccggtttgcaccaagtttccccaaacaactccaaacttgctcaaaatttgtccaaatgccaccaaactttccagagtacctaaagtgagcttacacaacatattccaactaataaaactcaaaaaaacactcagaatcaaaatatgccattaaagacctaagtttgagtttccgaacctaaacttgtccaagttctacacaatacaacaaaatca

SEQ ID NO: 262967 - DNA, 633 bp, Cannabis indica
gagttatatgtcagagaaattttacgtcttcatggtgtcccaaagtccattgtttcagatacagatccgaagtttacatcgagattctgggaaaagtcttcatcgagctatgagtactcagttaaagttcagcacaacatttcatcctcagacggatcggaaatctgagaggactattcagactttagaagacatgctacaggcatgtgtgcttgactttgaaggatcatgggtaaagtacctttccctgatcgagttctcttataataacagctatcaggcaacaatcgagatggccccttacgagcttttatatggaagaaaatgcagataacctatttactgggatgaagtaggtgaaagaaagttcttgggccccgaggctgttcagagaacgagtgaggcagttgacaagattagagagcgaatgctcgcagctcagagtatacagaagagttatgctgatccaaagcgttgggatattgattttcaaatcgggcacaatgtgtttctctaaatatctccgatgaaaggcattaaacgctttggtaagaaaggaaaacttagcccgaggttcattggaccttttgaaatccttaagaggatagggcaagtagcgtacaggttggctat

SEQ ID NO: 262968 - DNA, 797 bp, Cannabis indica
atcctcaggacatcagggcttttgttgctagtccctgggtgacagattatttgtaaatgagtagcaaacttttgtaaagtaattttgtaaacggaatcccgaaatattttgtatgtaatactataagttttaattaaataagcaaattttaattaatctcgtttttcattaacctcgttgattagcaacgagctgcacagtatgtttaaaatcacgttaacgtgcctatgctagttcgggtgttacaaatgggattgggaaatcgtattgagcaatattattgattatgttgcctggggttagtgagttaatgagtgttgagggattacaccatagatgacttgttgtgattatttccttgtagctcccgagatttatatctcttattctcattatcaataaagattggtggcaatgctttcaaactggagtatgaccaagttcacattgaacttaggatcagaaccagtataaatctctgtgttattgtatctaacaaccatttaaattcatctgtgttatatttttctagtttaatgtgtttgctagtgttgaccgaggttttcggcaaccaatataataataatatttaagaaagctgtaaggagttaatgcacaagatttttacgtggttggggcattaatgagccttagtccacaagtgtgtatatttatgagagtatttattacagagaatgctcttggtggtctttctccctagctcttatgaaacccagaattcttgacccccgctttaatgagtttggggggtatttatagtgtttttgtggggcgat

SEQ ID NO: 262969 - DNA, 683 bp, Cannabis indica
aaaataaacaaggcttgctcaagtgcttccggttgactcctcggtttcctgacacgagctttgagcgcgtgagggtgtatttaatgatggcctttaatgcagcgattcactttttgcagaggtcgattcgtttcacgcccattgattgatacggcgcattaatggtgtcagacggatactcaaacgtttccaccgccttaattgcaaaccaatctggttcgttgatttctgagaattcgaatcgtgcgcttcccccaccgttcgattggtaggtgatgacgcctgttcctcatgcagctttgcctataaaagccaccacctttccttcatttcggttacttcccatttcttgccaactttgctcaaatttcccagagagaaaaaattctcagacccagaaaacacctttaaacactttgcaattttctccagttcttcttcgtttgttactgtcagtccttcttgtcttcatttgattcacagcaggacccccagtctcaacacttcattgtaagttccttgcaccctttgcttcattattaatatgcatggcatgctgttacttatctgcttgttcttttctgggtttgtattcgaagtttctgggaatgcaaatgtttagatccttcatataatcggtttgagtttactgctctagtgataggattactgttgtcacgcat

SEQ ID NO: 262970 - DNA, 1779 bp, Cannabis indica
atttttatttaatttcatttgattttactattttagggattgttcatgtactaaactatgctctccagacttttatatctaccaaatcatacctctcgaactttgatatatactaaatcatgtcccccgaacttttaaccatatgttaaactttttttactaaaattagacaaaaatccttgaatctaaccatctcaatagttcagggatatttttaacaaccttaaaagtttatgaagtatttttaacgaccttaaaaatttagaggacataatttaatacatgtcaaagttcggatcataaaaatcctaattagcttaaaaagaatttcacataataacaaagaaaatcagcacaatttgattgtggtgcagtgttggaacacgtggccattttaagtttaaggtagaacgaaaagaagcgagagacaagaattttctatacatatagtatactaatgcagaatataaagcttaacgaatgaatgaatatatgctctgacaactaaaaagagagcataattaatatcaatgggtgtagtagtaggggagacaagacaacagcaaaattggtgtaattataaatgaaattctgataaatatgtatttctctagggcattgttatttgagaaatgctaaaagatactagtagtgtttaatatttttttacatgttaatattattattagtctaattaagtatcgcgtcccatataatttaatatagtaacttttagaaagtatcgctagccaatcataaaataatacgtctagaaagtgctagacaccactaatgtttaatattaatgctcttgttgtaaggaattatgttgtttagtatctctatcatgttttattattaattaatagttttttttatataatttttattaaattaaaataaataagacctgatattgaattgcaccataacaatattagtcaaatatcttttattatttcttatttcttttactataaaaaaatcatattatataaatgagaattactaaaaagtactaatggtacctaacactctatcaatatcgtattgctattagtgtaattaagtatcagatctcatataatttaaaaaaataatttttagcgaatatcgttaattaaaaatagaaaactacttataaaaaataataaacactactaatatccaataacaatcttatatatatttattattaatcacaaaattaatgtagcacctccatttctggtggaagctatagccttcaataagttagccaaaattttaataacttctatgggttgttgcaactacatcatgttctcattaactctcttatctctccctcaattgtgaactagctcttttttgcggtattagtagttgtggtttcgaaacaagtagtacataatatttttctctgttgcagtttaatctttttacttaaaaattaaaaaaaaaataaaaaaccaagtaaaataaacaatattttattacgtaatgtctagtttttcattacaaactgtctttgtttgtggctcttgttcctttgttagagaactttatgaagtggatagagtataaatataatacttaaataaaaaaaaagagtttgaaggttataaaacacatttttattttctgtttttaaaatcaaaaaataaaaatagttatagaacacatttttattttttaaaaataaaaatgttactttcatttttgtgattaaaaattaaaaaataaaagtattaccaaacgctccctaagttagacgtttttttagaaatgaataatttc

SEQ ID NO: 262971 - DNA, 934 bp, Cannabis indica
taagaggaccaaatgaatcgattgggctctaccagcaaaagaaaaatttctaagtactagctcaatagttaagcttactattaagcttatctaaaatcacaccacagtccgagaatttctattttgtaggtctcatatgaactctaagatacttaaaagggaattcaccttcagccatatgaaccttctagagaatattagctttacaatttttcttgactcctccaaagtaaatatgagatttcgaattgtctgcagaaagacaagtggcatcacaaaagctttggaaagcttcaaacacacatctcacatatgtcaaattgccctttcaaaaaataagaaggtcatttgcaaaaacataataaattcatcagcctgagattcatacacatcgggttaaacccgaatcccttactgttggaactttgagccaagagcctggtgagatatacattgatcaatacaaagagcaatggtgacgtaggatctccttgtctaagaccattttcccccttaaaagaaccttagattctgtcattcatcaaaaggttataatttgtacctttcaaataaactatgatccattgaatgaatctagacgagaaacatatgcatttgagcagcttttctacaaataagcaatcaacagtatcataagctttacttcaatcttcatgatacatctagctaaaatatttttcctgttgtagccttttagaaggtcctaaaaatcagaatgttgttggaaatattttatcaggatctagatttactaacaagtatgtttcattaacattctaatatgaatttttaaaacaatgaaataaacacgtataaagtttaggaaaccttacattgggtgcagcagaatataatgactagcccttaattcttagcccttaattcttttccgttagcagagcattatcaagat

SEQ ID NO: 262972 - DNA, 445 bp, Cannabis indica
aaagcaagctatatatagactgctaataatagaaacagtaaaaaaacaacactgcaacttgcagtacaattctaactgttatgacagctaatcaaccaactaactaacaaacgaacaactttgatactcccctcaagatggactatagatattctttagtcccatcttgtctttaatgctcttaaactgattaggataaaggggttttagttagaatgtcagcaagctgatccttaattggatgaaacattgacaatttgacagcttcctcttggaccttttctcttactaggtgacaatctatctcaatgtgtttagttctctcatgaaaaataggatttgcagctatgtgttgtgtagatttgttgtcacaatacaacaaaccaggtcctttatgttctatttttaattcttttagaacagagagaagccacacaattttaca

SEQ ID NO: 262973 - DNA, 1493 bp, Cannabis indica
ccctaagattgaactagcaagtgactttttgcaagacatagtatctttttgttaaaaattgcagtcacaacacaacaaactcaaccatattcaaaactaaggtaccatgttacttttagaagcaatataaaaccctaagattgaactagcatgtgggtatttttttgttataaattgtagctgacaaaacaaacacaaccatattcaaaagtaaggtaccaggttacattcagaaccaaaataaaaatctaaaattaaaattccttataatttttcctaaataacatgttaattacgtcaagaatgtaatcaaattcaatagtttcttacttttgtctattttgagaataactgagtttgaatattttggacgtgaattttataaatggaaatatcattttataggtattctattttttccattttttaaatttcttatttttttttctagattttaagttttttcattaaatgtccatatttttcaaaatgcatttaaaaaattccatatttataaaaaaaaaaagtccttatttaaataatgattattcattgaataagccaaatactaattggacctaaataaactatgataggtgatattttattttagcaacttagtctattttatgagcgtttataaattttctactttaatgtgattttattaatattatttttatttaattttaatttactttagatatgctttcactttaatttacagttgttggcaataattgtgtgatttactttttgattttagttttgggcgaaatgatattaattgtttgaatttgggtattaatatttaattttattaatttctaaaatattattaaggttattttttaggtggtcaacttatttccatttttttaatctattttatttaattccgtttaaattttattgatacagacattagacaattgaatgttatcttttccctaattaatcttgttaagattaatttatagttttgttatataaatcttaaaaaatattttaatattttattctatgtttgttttgatttgtttctttttagtagctattaaaataatattaataattgtttaaaaatatatatgagatcacacggcttttttgttagaattattttaccacgatctagatttactaacaagtatgttattaacatcctaaacatgaacttctaaaacgacatgaaataaacacatataaagtatcagaaaccttatagtggttgcagcaggatataatgtctccttccactcagatctctaacccttgtatcctttttgtagcagggtatcaccaagatctgagtctgaatctccttctcttgaaactggattcttcacagccttacgcactatgattgagtaccacttgatgtgtgtggacactcactcttttcactatctggcttaggttttgaagagaggaagagagagatagggttttgattttggtataggagaaaaggctcaaatttttactgaagg

SEQ ID NO: 262974 - DNA, 757 bp, Cannabis indica
aaccttgaaagtatcaaaatgagatccctggaactcagaaataggataccaagtgcccaagttgacaaatggcctggtacgatgggttctgcttatccaattttgattcagtttcgatcgttcgtctaatttttcaaataaataagatccatgaatttagagaagtcaaattcataacttttcatttccaacatgggaaactcactcatagatgaagagttttgagtctcatttttgtaaattaacaacaatctccgagaactggtgactagcttcgccagaacacataaacaggttaagtgatgtcaaagtatcacttatacatcttaaagtacatcccttggatgtttttacacttacccaatgtccaggttgacgtcatatgtcaacctgggcactgggatgtcaacctatgcattggatgtcaacctgagtgttgggtcatgaattgccttcagtacaacagtcataactcactcaatattgatctgattattgcgattccacttacgttttgaagctaaatcgatgctctatcaagtcatgtcttacacttcaaccgtaattataaaactatcggcaccaaatttcacccccaaagaagttacaaaaataagttccaggttacctgtagggggtcctgtcgagctccgaaaagtagccatcaccaccagaagttaattttcatcattagtttatcatctatgtgttgggttttatgccctaaataaaactctttacaatctgattagtaatc

SEQ ID NO: 262975 - DNA, 821 bp, Cannabis indica
ggactatatatactaaactccctagatcctgtgatcataaatatatcataaggatttagtggatctagatcccagcttgaatctatgtgacccgacttatccaacatggtcccgtactgctcgacaatcctatagaatgagctagtgcagctaatttgaacatgaaactctgggtaccaactattaaacctatgggttatgcgatctatgaggagagggttcgaagtgtaaaaattatatcgactatcttgaaaacacattaaggtgttacggtcgaccctaagcactgtgggtgaccacccacattgattacatcaagatgctccatctacccgaggggggactctttcgagatgttgtgcgcgagccacgaagtcctcattttcctcctcatctgggactaggaccttttgccatgtcgtatacttgggtattttgtaatcacaagtatattcttccaaggcatggacgccaacgttcttcaaattcttctcatttaataagaagttcgcagcgcgcaacccatatggtaggctaagcaggattccgcgacgctcgactatctgaggagtaggaactgatctccgaggaaccgctgcaaacaaattaaagttcagtaagagaccttaaagatacaagttaatatttttatggttaagtttacaaggaaaagaagttatgtataatacaaaaggcagttgtgtttattggagaaaggcctgtcgtatagaagaagtattctttaatttcacaatgtataatattttcctatttaatattagaaataattagtagtctagaaataactatctagaaaatat

SEQ ID NO: 262976 - DNA, 815 bp, Cannabis indica
gtgataaccattcaactcgccaaataaaaggatcaagagagtattaatagacaatgggagctcgataaatatcctttataaggagactctaaagaaaatggggctcgaaaaagccatgttaagaccttgtatggtgaatctttgcggattcaccaaggacagcatctctagccttgtcataattgagctcacgttaactttaggcgaggcacctttatctgctactgttatacaagatttcttagtcgtcgacctgccctcggcttacaacatattgttgggtcgtccaacactgatcggactagggcaatcagtttgatcaagcacctatccttgaaattctaaacgctaaaaggtgtgggagtggtgcatggcgaccacaggctagctcgcgattgctatcgcatagagcttcagcctaggaaagtcgttcataagttgatggcaatcttggcagaagaaactgaacaaaaagacgaagatcttgacccccgagttcaagatgaaagaaacttgctaaaaccagtcgaagaattggaagaggttattctcgacccaggaaatcccacaaaatgtgtatacattgggaagaacctggacgagtagctcaaataacaactaataagctttttgaaggcaaaccaggatcagtttgcctggagtcatggagatatgatagggatcgaccctagtattatctgccatcatttaaatgttgatccaagttacccagcaaagagatggaaacggagacccttggattccgagaggcaaggggcactgaaacaagaagtggacaagttgttagttaacga

SEQ ID NO: 262977 - DNA, 756 bp, Cannabis indica
tctcaatctttttctctctcaaactctcaatctcatctctaattcgtaattctatctcaaaagtcaaggtggtatttataggcttaagattaagatcctaaattcggtggctgcaagaaacgaggttgttaagttagttagaaataaactcctttttgagtgaagtctccatgtcaacttaagtaccagagcctccgagacataaacgagcttccagacttgcagaccatggacacttgctgaaagaaagtattgcttgccggagtgagtaggcaccttgtatggtccccaaagatcaacatgcacatattcaagcatctttttagttgtattccttggtggagtgaacttcagcttatgttgtttttgttaagattttatgccctaaagaaaactcatttcaatataatctaatttgttgtcaataaaagattagaagtgatttatgtttacatgtagttttcatgtttatggtttaatgtatacaatttctgttaaatctagaacatatagttattcacaattacagtgatgtcaacatagtggaaggtaattgtgattatatgcttcaaaagataatgtcccatgattcattagtgcattggatttgcactgatataatagtcaacgataaagcttacttacaccttggataagttttatgttctttccaggatattggcaaattatgttagtatcggatgtatggagtatacattggactcggaccgatattgatcttggtaaagatattat

SEQ ID NO: 262978 - DNA, 500 bp, Cannabis indica
aaaagacaatgtgccaccagggttattttgttttttgggctaattaatttaattcaataaataaatgtttaaatttaaaaagtagttgagatattctttcaagtgactgagagattctctcatgatcggttataaaatatgaatatctataactgaatttagttatattatttattcaaataattaaataagatttaataaaaaatttgagtttaaataattaattaaataaaaattttattgagtttatttaatatatctgattttttgaaagcttaaaaatgattaattagtaaatttttttactctccatcactaaatagtaattaaatagttcttgttcatgcgttgagatttaatcaaaaacttaatttatatacactattatcctactagtctacactggtgtgagtttgtcatcacttttctaaggatatataacatacaaaaagaaatcgaaaataaacttgatagatcgacttcgagatgtaaatgttcct

SEQ ID NO: 262979 - DNA, 2556 bp, Cannabis indica
agggtcggctatggaggttttagcgaacgacggttggagctttagaccatggtggctatggaggttttggcacagaatgaagaagacgaaggggaaagagaaaagtaagggtcggttttgtgaaaaaataaaaataaattaattaattaattttaaaataatttatttgttttatttttcaaaaaaaaataaatttatgattttaaaatatttttttaagtttttattttattttaaaatttttaattaaaattatgatttggaccaattaaaaattgacacgtgacattttatttaggtttaacgaatcagttagaaagaggtactaacggactaacaaaaatggtgaccttagggactattaccgccaatttttgaggttggggactaatctgtatcaatcctaactttttagggacttttgccgcaattatccctttaattgatgtaatataagaaacttcaaacatcttaagattaagaaataaccttaaaaatggtcattaggatcctgtgtgagagagtatggctcaagagacccttattttggtaatatttgatttctttgtctatgattttatggctataagcactagtattgtagatgtggaggaaacagatacattgaatatgacaaacgacaaccaagtaaaagaggattatgaagattcagaataataaatagaaactgagacaactcttgatgaaggagatgaagattgggtggttgataatgacatggttcatggatttgggagccttttaatagttgtaagaattttctctaaaaagagatgcaatcacaagttcattagaactatatttggaagtatatggaagactaacatgaattggaaagttaatgttttaaaacatgaccatattagtacctatgctggtttctccttttattgtgataaagattttcaaatggtccagagcacactaccctggacttttaagggtggatttataatcgttcaagtctagcctgagtcaggacaatgggaagatgcgacgcttcacagagttccaatgtggattagaatggtaggctttcctatgaaaggcttcaatctagttgtagtggcaaaatatagtacacaaggcccgcatcccaaagagcacactttcagtctactaacttataaatctaagtaggttagtaagcccaagtcataaatactcaagcccattatcaaagtccaacttactcaacaatgaagtcaaacgtatgatgtggaaactatctcaaacggttcactctacaattgagaaccagtctacgactctttaactgtagagggaatatcgggtgtcacatcactccacggcctagtcttgtgagaagcaacggtttcactctctaaaaaacaagttctattagaaggatcgatccttctcaaggaaggatcatttgacaattgttatcttctacagtctacattctacatcctacactctacgcgtttcatttactctaacgcttattctctcaacatgccagcttcgcttcaatctccaaccttccaacgacgatcatagctaagtctttatattttatttccattctacttgttaagaactacattactgacttgaccgtcagaatccctttagtcggcaccatcccggtgtcccaaagactttacggtctacttcccttttgttatgtgcaggttatcggtgcccaccttcaattaattcaattatagattcgtacgtccataatgtggcacccaccgtggggccctgacaatcaatctaacaatgaagctagacattcaacaatggcagacatagaggaaggggagatcaacatcaacactcaagttgttcaactcatgactcaagtgcgagagaatgttgagcgagtccaggtgcttgaaaaggaaattcaaacctttcgtgatgaaaacaagatgttaaaagagaagatggagtcaatgtctgccaacatggccacttcactcgaccaaagctcaaggctcagagttccaatcaacacaatgcaattattggaatcaactccaatgaatgtggcccaatcaaccgtattctcacaatcggcaatggtaggctcaacgagtcaacacggaggaactcagccaattgaagaacatcacacatcaactggagttcccatgatcaacaataacatttcattcaacattccatctcaaacccatggaataaacccacatgtacctccggctacaacaaatatgacatatggttttatgtagagtgacatcagtcgacaacaagaaggcgtcaccctcccgatgtcaactaacatgaacttcattgatacattcaaccttttaggtcaacctcaccagtctatatgggagtatttcctatatcaattgcaacttattcattactaactacttctacaattacaggaacaacaatgccacttgggaaaacttttgacatagggttagcacgtaggatggtggagatggaggccctgatccatcaaatcccctgagtgccagcaccaatcaaaaagagtttacccaacaactttactgactctcctttcgtgga

SEQ ID NO: 262980 - DNA, 468 bp, Cannabis indica
ataaattttctctaaaaaataaagtgtgtcacaccacatcagtcagcgacacggtcgaacagtgcacatttagtaggttaagtgtgtatcctcacttattcacataaaactgaatatctcttagaaccctatttcaagtgccaaagttgcactttatatatccaaagattagtataccactcatactatcacagacactgtaacactctctcattttatcaatattaactttgaagaagttgcaacaaataatagatcaaaaacaataaatagtcgatcaaaccaactaattcgttcacaattgactgccacaaaaattaaacattcaactctaattaattagattgtgtttggatccaaattaattaaatgagtcgctagatggattgtatttgttaaaaattttaaatattctacttgtccaattacatatttatacgtatagaaaattttgaatcgatggatata

SEQ ID NO: 262981 - DNA, 1028 bp, Cannabis indica
acacatcaagtagtatctcaatcatagtatggaagatcgtgaagattccaatcaacaagaaggagaatcagactcaagaaggagagaaagagatccaggttcagatcttgataatgctttgctacataaaggaatcaagggctagagatctgaacaggaggagtcattatattccgctgcacccaatgtaaggttttcttaaacgttatatgtatttatttcgttgttttagaaattcatattaggatgttagtgaaacatacttgttagtaaatctagatcctgataaaatatttccaacagtttctttatattatatttgagttattgtgtgttattattgtgtgtttatttattttattataaaaccaattcttttcatatttatacctcaatattttttaaaattgatcctcattttttttaaatacaattataatcaattttatgaggtattatgtgttatgatgtattttgttatggaactagttttgtttctaatttatgttgcagtattttaagaactgatttactctttattttttaattataatcagtttgagttattgtgtgttacttgtttgtattcattatgttatataaccggttctattttagttataaccggtttgagttatttcatgttatttgttttattcattataatattattatagaaccggttatattttaattataactgagttgagttattttgtattatttgttacaaaactggttatatttcaactataactggtttgacttatttgtttttattcgttatgttatagaaccgattctatttttttgtttatatttgagacatttacttctagtgacttttttcggcgacggtgacttttctggcgactaatctggcgacggtgacttttccagcaatttttcctacgactttcccagtgatttttctagcaccgacgagacgacttttccagcggcggtgacttttccggtgaaccttattattacaagttttattaaattatttagagtaatttgcggca

SEQ ID NO: 262982 - DNA, 502 bp, Cannabis indica
aatacattactatttttttttttcaaattttaatatattttattcattttaaacatatagtattaatatttacacatatcctctcataaaaagtaaaattaaaatttcaaataattaataaaatatatttaaagtaattaatagtattctataaatgttgaattttaaaaaagtttttaaatagagaaaaagtttagaacatataatgtaatgtgtttttagtttaattctttatattttttattttaaagtatctgatgtgagtattctaagagttcaaaatcccactacggctcttagacagggacggaggcaggatcaaataacagggggggccatttacttttaatattttttttcaattgtttttcactttatttttgttaattctagtttttattttaatttatatatttatctttgttctagtaaaatttttatataattgtttttttaatatttaaaatatattttatttgtaaatatgtattcataatgtata

SEQ ID NO: 262983 - DNA, 627 bp, Cannabis indica
aaacatgattatttgattgatgaaattcaataaataatttagtttatgagagcttagtattatcggtccatggtcctcgaatctccaccttgaaacactgtcaagggtatggataaaatttgtataattgatgttcagaaaaacctattttgatttgtcaaaatagtaattatttattttgtaataaataatttattttcaaatttattaattaaataaattaggaaaaagacaaagtgttttctaaacaaagacactaccactgtctgcttgagacattggtgacaccacattcactgtgttgagacacaatgataggtgtctataagatatggtaagcaacactgaatttattttggattaattaattaattaattcagaagataaatatttatttaaatttgaacttgaaaggtagttatagatataagtgttcattggatcacatccaatgtttttaggcctatccagatctgatccaattatatattagatgttagattttaccatccgatctaattaatttcagtcatccaatcgatccaacctccattggatgttggattggatcagttctatccgttgagttatttcatatgtatttattggtttaatttaagtttatt

SEQ ID NO: 262984 - DNA, 543 bp, Cannabis indica
aaacaatgttcaaacagtctattttacacgcgtattaaataaaatagtcacgcatgcaacacactgcttgaacgtatttttcggcgtgctaaacttttccaaatttcttaaaattttgcaggatgtcttaaataactataacgtacatgaccatggaaaaaaatttgactaaaaaattatttcgggtgctaaaatagataagggtacatcaatatatccattttaagggggtgcattgtagaatttcccaaaattatattatctaacttcatttccttcaaaaaaaaaatatattatctaatttcataattaattttttttattacaaaatttaaatcttatacaattaagggataattacataagacaccattttttgtaaaaaaaattacaattttatgtttaaagaattttttgtatatttttacggcttttcatagagcaacaagaaaactacataaaactaaaaagaaaataacatcaaaacaacaataaaaaataacatatagataaaaaaaaactaacaaaaaattaacaagagta

SEQ ID NO: 262985 - DNA, 548 bp, Cannabis indica
attttattttttcaaaacctaaaaaaaatcaaatctctctctaataaccatatcaacccagcacttcccctttctttgccaaaaaaaaaactctcctcctttctctgtatctctgtcgctgctaaggacatccactcagcagcccaaccaccatgaaagacgtctgcccaatagcccaaccaccatgaaagacgtctgcccaatagcccaaccgtcgcccctcctctagctctcttacattgtggattaataagtaagttaatttttaaaaaaatatattgttaaataattgtaaaagtataatatattttcggtagatttatgtagttgtttttactgccatggtcaggcaggtcatgttcctgccagggtcttgcaggtcatgttcctgccagggtctgacacatttaaatataatttgtttattaaaatatcataataattttaaaaataaaacatttaaattttatttatttatttatttatttaaataaacacttaaaaatcacacttatgtttattaattattgaaaaatgtagttttaaaa

SEQ ID NO: 262986 - DNA, 867 bp, Cannabis indica
tctcttctacatgagcaggctgctgtgacatacttagtcaggttgttaaaggtcaaaggggctattggaccacgtatcgcaggcctcaaatgacgcatgaacttttcaatcacaaagggttggttaacaacacaaggatatgcataagaggatagctctacaaacttcatgtgaaactcattcacagtcatatccccttgtcttaaaccataaaatactccaatcagagccctcctatgagatggactaaaatattgctccctaaaaactccctcaaaatctctccaagtcatcccatcagtttccattgtcttggacaagtctcccaccaatttgctgcaccaccctctaacttggacacaacaaaagtaactttattcctcaggtgttcctattgtgttgaaatttttctttatctgcctcaatcacctttcggctaccatggtatcttgtccaccctcaaactcaggaacttggatccgatgaaagatttgaaagtgatgactctgtcgagcggcaggatccatctgttgagcggtaactgctcttaaggcttcgagaagggcattcatagggaattcagcttgtggaggttagacattagattgaggggcgtcttctccaaccgttctcattgtcttccttccttttggaggcatttttttaggtttgagaacaaaaatttaatcatttagcgaggattggaagccaataatataaatatgtctcatacatataaatacgaggatacttattactattattatttaaaataaatctaaactatttggtgacccactccgaggtcattaaacccggtgctctgataccatttttctgtcacgacccgagccctaggccgtggca

SEQ ID NO: 262987 - DNA, 1006 bp, Cannabis indica
cattcttgtaaatttttaattttaattctttttgattcatgttgttgttaattttattttatattaatatttttatgcatcgaaattcattattttcttatattgatatatgcataatcatatagctcttaatgggtattacccatgaataggtatttaattatggaccattagatttaatcaaatgaatgatatttaaaattattaataattttttaaaaattaatatttttgttttgacctgtgatctgatgacacggcagtcatcttatttttaaaaccccatttttttttccttctcattctcaaatctcaagtgaatatattataattaaaaaaatcaaatccctaatactcacaaatccactgtaagcgtaatggaggaagaacagagaaggaaaatcaaattattatcaatgtggtaattgtctttcggaagaatcaatattatcaattttccacctacctcctttctctccttcatccaccaaaacggcttccagtccttccactcagagtaaaactcatcagaccaaaggagaacaaaagggcattgaggggggaaccaaacgagtagtgtacaagcagggcatcgaatggtttgatggaaccgttggggaagtttaaggagacaaactgagtacccgaggattgcgtcgctgtcgtagttttgtaagcaaattgggcatttcggtagctccatcatcaccgaccaccaccacgaccctgttccgtcattcaattgtatgtaatatctctttagttcaatagtattagaagttctattttttctatttgattgaatcaattattgtttctatggttacatctgaacactttttattttataataatgattctatagaaaatttagtgattctgaatcagggttaatgattctatatagatgatttacatcgagatgatataattttaccgttcccacccctcaatgtattttgccccttaaaacacttagctacctgtaaatggtgtttagtgatct

SEQ ID NO: 262988 - DNA, 647 bp, Cannabis indica
tgtgaatttggcaaagcttgagtaaatgattctttaaaaataaattacttatttccaataagattagcctgaacataaaacataaattatttatgtaatgacatattgtaaaaatgctacttagaaaataaaaagaaaacaaaaaataacaaattacattatgtgtaggtaacttctagtattgtactttctcaagagcacttttaggtcttatataaagatttatcacgaaattttccgtttaatttcactcctttaatattgttgatctcttcatctcttcgaggaagttaattctcattcttttgggaacatacttggtcatttgaactactattcccaattttaattattttcaagccttccaaaatatttctaaaactactgatagcataatattaatttttttcatccccagatgcctttgtttctatatgagttataaatctacaaatctctcgataacgattttccatgttgactttaattaggatctttattgtatatatgttgcacatcattatctaattcacctccaaattttgcatcttttgtccatctttttaaaatataatggagaagaattttcattacattttttgcagacaaaactttaagagcatgtgagcataatatacctgtaaact

SEQ ID NO: 262989 - DNA, 839 bp, Cannabis indica
atgggcctaaattcattaggacctttccaaagagacccaattttgtttttttatgtgaaactctttcaaaaaaggatactgtggagaagcttagagtatcacttggttttgatggggcgttttctgtgatgttcaaggtagaagtggaggagtggctatgttatggagacatgaggaagaagtacagttgcttggttatggtccaaactacattgatgtatcaatagatgctagggagagtgggagatggagattaaccggtttatatggggagccaaatagaacatatcgtaagaagacttgggatctcattagaggtttgaaagataagtatgatttaccttggtgcattgttggcaatctcaataatgttacatcgcaacaagataaacgtggtggaaatccatatctgaattggcttattgagggcttttggggggtgttggatgagtgtggactccatgatctagacttgagtggatacccgtatacatgggaacgtgggcgtggtacggatgagtggattgaagttcgcatggatagagctcttgttagtcaaaggtggctgagtatgtttcctacagttaagttatacaatctggaagtttcgaccttggaccattgtcctttacacttgatgcctgctaacttaagttatacggttgctactagcaaagtctttcgttttgagaattgctggttgaaggagcctctgtgctataaggtggttgaggatacttggaatcaatataaagggagcatgattatggagaagatcaaaggttgtgggaggttcttattgaatggagcaaagactactcggggaattttaaagaaag

SEQ ID NO: 262990 - DNA, 679 bp, Cannabis indica
ggtctaaagatcaggttgctgatatattaccaagcacttttcacccatcaatggttcaaggaaagatggggctgattagcattagctccccatcgttgaggggaatgttaaaaaggcttgtttagtttccttttggatttagttttactgtttttactgccactagtttatggcatatttgagttgtattctgttatgttagttacagttggttagttgtcttcttgtaactaactttgtaactaattgcctattgtaatcttcttgagcttgagctatataaagctcactcccttctttgattcattaatgagaaattcgttctgttttcttcttctctttctttctggttttatgttttctggtttgtaataagataagaggaaaacaaaataagttcattataaagttactctttattattcttgaagtttatatagaaaaattatcttacaaaaataaattagtaattttacatttgtgctgttctatgaaagttttttctcgaaattggaggaaatttttttgatgggctccatttaaaaaaaatttcaacactttccacattctttcttatgaataaattgggagtcacgaaaaatttgattattatttagggataatttcacaaatacacaaaaacaacaaaaaattataaaaatacggtttcaccgaattt

SEQ ID NO: 262991 - DNA, 521 bp, Cannabis indica
acatcaagactacacacgatcaagcgctatacgtttactttagtcttgttaaagtgatttgcatagtacactaaggtttataagtataaaagtttggctcactaatttgtgcgacaagttatttcacaaaaatgatatctaagttttttaaattgatatttaagatcacatatcatttaactaagagaacgcaactagaacttttaaaatcggataaacgagtaaaaaattatgcatgttttagtttgaaaaaatgaaccttttgcccctgttagccatcataattctttttcccaaccgaaattctggttgtaaccaatccaaaattctggatcacggcagaattggcctcaaaaaatgtgctaacagctataacggctagttttcattcttactctatataaacttatttttaactcaaaaattaaggttggttgagcttctattcatcatataacatcattataagtgttctaagctaaagaattatcatctttttataaacacaccaaccacacaca

SEQ ID NO: 262992 - DNA, 1355 bp, Cannabis indica
aatgtaacaagaaaaaaaatttaattattttttatcaatttttttatccattttaaattttattccattccattcctattctcattcccattcccattcctattcctatattttcaatcctcccaaccaaacgcctccagtgatttgatacattaattgagataaagggaaagaaagaatcatatagtcatctttcttttttttttctttttgaaagggaccatacatcttgattcttgaaagctatagttaagagttgtcactaaattctcacgcttataatatataattactgcaaaatttgaaaaactcgacaagaagaaaaagaagaacctagagctatctagacatatacactattcttgagttgaaatataagccatggccattaatgttgaagaaaacaatgaaagaagtaacttttgtcaaaactactcataatctccattaatggcagtaactactctcatttaaagctaattttgtcccttttatttttaattggaaagaaagcacactttctttattcattccaactcataataggcccaaaataaaatgtaatatctttcttatgttaaagactgaagagtaattttgatagagagtatcaaagtttgcttctttagctaactcacccccaaaattttagatggtccacatccttttgctgatcccaagaacacctttacaagtctctgagactctgccaaagaatgggaattagagacccaattcagaaatttgagttttgttgtcgttttccatattattctcaagaaaaaaccttaacataataaagctgcacattggttttagaacattgaaaattaactgagtttaaagtaagtttgcatttaatttagggctggaaaattggcttgcaattgagagcaaaatacccaaatatgtacaagagtatcttcttaataataatttatacaaaaagattcattttttttttcaaaaaaaccagaagagtaacaaatttacacatgtaatcacatgaaacccccagcccaaaccatctctattagatctaattgagaaacaaaaacatgatgaacattgaacactattcaaccaccataaaagaaaacctaataatagtttttctaatttacgacaaattcattaacctaatcctatgaagacgaagactcgcatcatcaaatccgatcgataattaaattaatcgccaataatacaaaacatacccaagaatattccaaatcttcgccggtacaaactcccaccaccggttaccgcgatctgcgcttactcttagtactagtagtagttgtcttcgttctccgattactcttattcttagtggatttgccaaatggattgca

SEQ ID NO: 262993 - DNA, 364 bp, Cannabis indica
ttttaatttaaaatattatttttatgttatttaaattttaaatttaaaaaattaaactaaattaattattaatgtattatgttatttaaaagttgtttttttttaaaaaaaaaaaattaactaaatatcatagcttttcttatggactcattattgaaagggatatatattgatgtttgatatttttatttatttatcttttatctcaacaaaaatatgtgaattcatctttatataaaataataaataataaaatttctcttaaatattatattgcatcctatattaattctttaggaaatgtgtttagtgcatattttttcctttattataaaagtataatttttatgatgctataaaagtc

SEQ ID NO: 262994 - DNA, 1462 bp, Cannabis indica
aacgtacttgaacaaataatataaaagaaatgccagaaaaaaaagaaaaagaaaagaaaactatagaaactaagaaagtttgggatgatttatatatatttaaagtctctagatgatgaacgtagaccgtttaaagatatttgttttaacttaggaaagatcacaattataataatagtaataataatcttgtttccttaaatactaacacatcatttaaatttgatatgtacaacgtttgtattaaaacgtggcactaaatgagcggtcaatattggtccaaaacatgggactaagtgcagttcagaatatatacacatagctcacttttatttagttaagatcttccgtgtgatctcattcattatcaaactgtacgacacgaaacgaatgactaagaccaaactccacagaaccaaatatatatagaaagtgaacccttttaaataaaaagaattattataggtacggctgttaagaaaattgatgagagtcgtataataagtacttctaatcccacattcccattatattaatgtgttcaatcattcgagttaaggaaaataattacatgtgttgattgtgtatcaaatcaaatattatacagtataatataagttccttcttattatagaagtagaagctttgttccggaaggttgtagaaggactagtgtgtaatagattaaaatatacataatgtaaaactttatagagaataaaaataaataaacaattgggaaagtagaccactcttgttttgtgtcattggccttggtgaagttgtgtggctctgttccattattgataccattgttaacaataaaatatggaacatgaacgccaacttggatattttttaatatttctttaaaagattacattaaaaaactaaaataaataaagttataatatcgaatttcagtgttgaatgtgactggttttacgtctctgtgaaccaatattgggcgcccatttgtagctgctgacgtatcccgaaaaagcaggtacgtgtcgagcaatgtgattgccacctaatgcttagtaggattttgtatattttattacattttgtattattttattacttattcacagccagaagtttcgtctagccacccatagtattataagtaagtagtaaaataacaggaataccaaaccaaagatgaaacaacacataaataggaagaaaaaaaacacgccaataattaccactcttttttcagcatctccaatgttgttgttgttattattattattatcattatttagtttttttacattgaattagtacaaactaagaacataacataaaacagtaaatataataatatgtgtacctaaaatatgtacacaaaattacacttaatgacatagtactgcttttatacaatgatgttttttacatttatacctataaataattgtataaaattgttgtgtatttgagtgcacatatc

SEQ ID NO: 262995 - DNA, 1879 bp, Cannabis indica
ttttgggggttaagtgaaacaaaaataaaagttttggagagtttttaccactatttaccctttagtattgctctgaatttatttcaattagctagtctttaaaagtagtattttagtgattagtgattataagactttattgtcaggactttcttttaattatttcaattttttttttgtaaaacgatctgcgaataaagttacacgtgctttaacaaaaacctctattcatgttgttgattgtattttagtaggtaaacatttcatccttacttttggataaaatttaataaagaagtttttttctttcaataaaaatattatttaatctttatttatataataatattatatgatatttattttaaattacttaatcaaagtatattttatattgttacataaggtagttattgttttcaattttttttttattgttaaataattttaaattattagttatttgagttataaagttattgaagttataatagttatttaaatattattgaattagtgctcctgaatctattataaatactaattgcattttgacaagataaatcatttcacttttttcttatagtttttttctgttgaaaatattttcttagaccatcttcaatgggagatgtaaaattgatctatatttgacacaaaaagtagttttgttttatttttacattaactttaactattgttctccattacataattataaatcttgatacaaaatttaatatgtcatttaatgctcaattaattatttattaaaaaaatataaaataataataattcaaagaaaatataaaatttaataataattataataataataatgcaagtcatttaatataaaagagcatgttaactaaaatttaataataaaatattaaaaatggcataaagataaatataaaagcaaaatttttattgtgatgcaaatttgactttatgtcatattgtgatctaaatttggatcactttttgttatgtgacatatttgcattacaatttgatggagtagacttttaacaaagtgaactatattttgcatttgcatcacttatttgtatctccattggagatgctcttatagtgactattgtttttattttttattatttttatctattcatgctttttttatttgtagtgaaaataaactataaatttgctacaataatttttgtttttgtttaatcctaataatgtataatttatttatgtgtagctaaaacactattgttccttcaagctttcaaagaaaggataacaagttaaattgggtaactctaatgatgacattgggttaaaatctgttaccaggattttacaattgtgattgcgtgtactattagaattttctactataatgattttaagattattattagaagtttttacaagtttgttatgttaatctactacagattatgaaccaagatcaatactttatttagagcatcacaaacaatatgaaaaacatacctcccatatttgcattttccattgttgctataacaccaaattcttcaatgtatcctaagatggtagaagaggagcctatgaaagcaaaacccccttattctcatcaccacacacactctcttattttatactaacacatattaaccccatatatatatccaacacctaaccctaaggggcttaggcttattgggctaatgagtataattagtggtggactataatttaatgggccaattatagttttagggtgctctcatgtgcctctaatacatttattaattattgaccatcccattatggtagtgagtaaatattaggcacatagttaatgattgtgtttatggtattaagctcatgattatattagtccacaataataattcta

SEQ ID NO: 262996 - DNA, 628 bp, Cannabis indica
ttaacattggtatgggtcctcaaggtgagagtggtggtgatgtggagttagtggagagaacatgcacttgcaaactgtttcaatcgctaaaaataacttgtcctcattcatgtgttgcaacagttagtcagaatgcgagcctgtacgcactttgctcccccgtactacacaaaagaaacgtggaagaagatttacaatgcaacaattaatattgttggcgaggaggatgagtgggtactatcggaacacattaagaacttaagagttggggtaccagtgaggaaaaaaccagtaggtcggcctaggaagagcaatgcaggtaaaagaccgacgaagcgtcaaccatctaatggtcaggtgctagtggaacctcgtcattgttcgctctatggcagttcaaggcacagcagagctacatgcaaagctcgagtttgaattttttctctaatagtttcttagccatcaatattagttacaaagcttgagtttggatcaaatttatgtcttgtattgctggttgttgtttaacaggattgtgttggccatgttcattggattttgtgccctaaataaaacttatttcaatataataagatttactaattaataaaagatcagaaatcgcttt

SEQ ID NO: 262997 - DNA, 554 bp, Cannabis indica
tgtgtccactttcttgatcctttcacttaatctgaaaataacaaaataaatacttttaattccacataataaattaaaaagtaaaaaaaaaaatacaacaataaaatatttatataaactttacaaaatatatttatttagcatatataatattaccaaaactgtatatattaaatatacacttatataaacaaaaacaacattattatatatataatatacaaacaatacattatatttcaaaaatataaccaaatcatatatatatacacagtgaacatatataccaaaataaaacaataaatacccaaatcaaatatatatatacacacagtgaactaaatacccaaataaaataataaatactcaaatgaaatatatatatacagtaaacatatatacccaaataaatcaataaatactcaaattaaatatacatacacagttaacatatatacacaaataaattaataaatacccaaattaaatatatatatatacacagattatattatataaatacccaaatcttatatatatacacaaattaatat

SEQ ID NO: 262998 - DNA, 678 bp, Cannabis indica
cttgctggtttttttttttttaaatctgttaactctgccaggattgctgagtcattgctgggtcattgctgtatcaactgggacatacaagtggaaattaatcacccaagtctattttccaaatctgaaattatcaccactttaatcacttttagcttcttatttttagtttatttagtttaaaatattatttctcaagtttagaattaagattataaatttttctcttgaattaagattataaatttgaagacacgcaaccttgacggccacctctatttccacaaaactttctattacttctcggtgtttcaaaagcctcaaccttccgcttgtggtctgagttccatcgtcggtccccttactaatcatgattttcatattatccttaaaacacttagctacctataaatgatatttcagtaaactaatataattactaaaatgagatctcaatcatttatctctattcagccaagctcgaaggaaatcatcgtttcacttctatgtctagattgaagctatagattccatatctgtgattagcgctcccactcaattgtactatcatgttcccaaaatgtacgtatcacccagatcaaaaagtaggcttaactaacaaatcaaagaacaaaaataacactcttgagatcgaacctaaccatgtcaagattaaga

SEQ ID NO: 262999 - DNA, 830 bp, Cannabis indica
gtctatttattttaattaatcattaatgaaaaatttatttgatttaagttgaactaagattaataaaaaaattaattttcaactttaatctattttccaaaaaaaaattaagaacttatctgcattaaataatggaattttgaaatttagtgggtaaatgactaataaaataaaataaaataaaatatattttgaaaactattctaattaaagttgttctgaaattaaaatttccaacttaattataattttctatctaattgaaaattaactaatatttaagtgtctagaataaaatcaacttaaatatttaactttcagtttaattaaatgtattaaatataagaattaaataattaagtataaattaacttaattatttattataatttaatactaggaaaaatattctaattcaagttgatccaaaattaattaataaataattaattttcaacttaaatatattttcctaattaattaaatattagaaaatataattagttactagaaataactatctagaatatatctcattaactaagtgtttttctaaaattaactttaaaatattaaatgaaaaaaaattcatatattttaaagctaattatgttgctaattcaattttaattaggttagactaatataattaacctaatacaattatttaaataaggcaaatgagccttcacaattggggtagttcatgtgagggggagctgggttcagtatgtcgtacccactactatggccccctaactctcacacaaggcccaaagaagaggaatttaaccattaaataaataattgttattcattgaataagccca

SEQ ID NO: 263000 - DNA, 540 bp, Cannabis indica
ttcatatccatctaagtataattttataatttagactattaatttattttaagttgtattatattatatatcctttactgcattatgatattttgtcgttttaaagtttataatttgatattctgtcaagttaaaagtgggggttaggcgagttgattttttgttagtattatataaaaaattgcatggaaagacataaattgtattttatttgcagatatatgacatcttattaaatttaggcatataccgaatacgatccatcttaaattcataatcggtatactctgtacattcaaataacaatatgttttgggcgttttgtttgttacaataagaatccaacgactccgtttcgctcggagtacgttgtcgcccaccagtcatggccacggatctcacactcacagtgcagctgcccggttatggtattgacgtcgtcggtatcatccggtggcaacgtgtaccggtcagatgaacaggaaagcaaaaagttcgtgaggcgatttcggttgtcagagaacgcgaaggatgatacca

SEQ ID NO: 263001 - DNA, 685 bp, Cannabis indica
ctttagatccaagagagatacacacatcattccgaattaatgatatttgcaagttggtacaaaaattttacccaaaagattttacagaatacgagatggtacaactaaggacacaatttgaacattttttgctcatgttacgagaactttcctgattttttacagtttttggcaaccatttctgattttatgtcagtggttggtaaaaactagaaaagcagagattttttccaattgtctataaagtgataactcttattcttacacttccagtttctacagctaccacagaacgatccttttcagctatgaatatagtgaagactacacttcgcaacaagatggaagatgaatttttaagtgattgtttgctcgtttatattgaaagggaaatcgctagaaaatttagtatagattcacttatcgatgattttcgtgatatgcaagaaagacgttctgtattttaattttaattatgaatttaataaaaacattgaaatttttgacacttaaatttacaatatggtttggccccccctaactcttcatgctcgctccgctcctgggtatttcaaacatgcttctagaagactagagaaagccattttccaaaattgctgaaactttttaagtattcaaattttttaggcaagctcaaaaaaaaaaaaaaaaaaataaaaaaatc

SEQ ID NO: 263002 - DNA, 980 bp, Cannabis indica
gtcaagcaatcatattgctcagagatcattgcaaatggcatatcaagaagttaaagcaacaatcaagtatggcagggatgtgatctcgttggagggtgttcatgtggtattaaagtcaaaagactttgaattgcaactcaagaaggagactaggaaagaagaagcctatcttacaagaggaagaaatccaaagagaggatcatcaaggaacaaccagccacaatcaagatcgaagtcgaagatcaaagacaatcgacaatgctatcaatgtggaaagatcagccacattaaaagattctacagtcaattgaagacgcaaactggtttcaaatcaaactatgatgacaagagatgcaacagaaaccagaatcagtactcaaaatctaatgatcatggaaatcaaagaaaaagactctacagctgtggctgagagcaatggagatggaagttcaaatggggaattattttctatttcagaaaataataacagtaaagagtggatccttgattcaggatgcacttatcatatgtgttccaacttagaatctttctttgattttcaagaaaccaataatggtggtagagtactaatgggtaatgatgtttcttgtagggttgttggaattggtaaggtggctataatgcaatttaatggtgaagtgaagattctccataatgtgaggcacattccaaaattgaggaggaatctaataacacttggaaccttggaagatgaaggttgtggctataagtccttgaatgggagcctaaggatcacaaaaggttcaatgcttgtgataaaaaaggaaagagagtacatgggttgtatgtgtactcgagggtgaaactgtacctatggccgaggtagatatagtaaaaggtttagaaagtgttatgcagctatagcatcaaaggcttggacatatgagtgaacaaggcacgagggaattgcacaagaagtgagtcattgaaaagcttca

SEQ ID NO: 263003 - DNA, 665 bp, Cannabis indica
cattaaggaaatagtgagactcaatggtactccgaaatcaattgttacagatgtgatcccaagtttacttccaagttattgggaagtctacaaaaaaccatgggaactaagttgagattcagtacaacctatcaccctcagacagatggtcagtctgaaagaaccattcaaatattggaagacatgctgcaagcatgtgtgatagattttgagggatcttggagcaagttcctacccttgattaagttttcatataaaataactattaaagtaccattggcatagcaccttacgagatgttgtatggtaggaaatgtcgattgcctatccactgggatgagactagagagagacgttatcttcagcctaaattggtccaaaggactagtgaggccatagagaagattcaatctcgtatgcttgcttcacaaagtagacaaaaaagctacgctgatccaaagcgtagggatattgaattttaagtgggagactctctatttcttcgagtatcacctatgaaaggagtacgtagatttgggaagaaaggaaagctgagccctagattcatcagtccttttgagatattggaccggataggccagatggcctatcgattagccttaccacccgcgttgtttggggtgcataatgtcttccatatctct

SEQ ID NO: 263004 - DNA, 3359 bp, Cannabis indica
atcaagtcttttgagttcgtatgttctatcaagcacttcatgttgtatttcatatgtccattcacagttaggttcgagggcccccattcatggctcctgagatgttagaaacactcttcttaagacaaggtcaccaactttaaacttctagcttttaacttttgagttgaagtgtcgagaaattttgttttggtacattttaagctggacttataatttttcgcagagttctttgattaaatctaacgattcctgaagtaaagcgtggttccggtgggatcataagtctctcttatgtgagaagaaacagtgttttctactgggattacaacttcacattcgtaggccatttaatacagagtgtgccccattgaggttctttatgtggtatggtatacccaaagaactcttggaagttcttttagccagtgagctttggatgcctgaagctttttcttcaacgtggtctttaagattttatttacaacttctacttgtctgttgcttgtggtctggccacagctgaaaaactctttatgattccatgcttgacaccaaaattagtgaagtgatccctatcaaattgttttctattgtcagacactatcttatgtggatgtccataacaacaaactatttctttgatgacaaagtctagagcctttttggaggtgtcaatattcataggttttgcttgaaccgatttggtgaagtagtcaacagcaacgatgaagaatttgacacctccttttccgattggaagagagcctattaagtcaattccacatatagcaaaaggccacagactgttcatcaatgatatttctgttggtgaagcccttggaacctttgaattatgctggcactgttcacatttctagacataattgatacaatccttcttcatggttggcaagaagtatccttgccagatgatcttcttggtcaaacttggtctgaatgtatgatcgccaaagaaactttcgtgcacttcatggattacaacacttatttcggttccagatatacacctcagttatggtacccataaccctctttagtataactttccatcaaggagcacatatctcggagcttggtactgaatcttctggtggctgccctatcatttggaagctctccaaaactcaagaacttgtggagggggcctatcgaggaacaaattatcataagctttaacaagatcaattttaagagcaaaaatacctcattttccttttttcctcttgaatgaatgaatgacctcctataaaagaacattattatcatgaatggaatgcctgggacaaaagcagtttacattgagaaaatgagattaggcaagagaggttgaatactgtccgcaataatttttgagattaccttgtaaaagacgttgcataaagcaatgtgtctaaattgggtaacctctccaccttagggatgaggactagattagaataatttaaccttcgtgcatgaccctagagtggaagaaggcagaaatagcattgtagaaactctcacccatagtttcccaataagttttgtaaaagaggagaggaatacgggcctggggccttgaaacttcccatggaaaatatagcttcgatccctaacatcatcatggctgggaatgtgaatcaaattcatgtgaagattagcaatgaacaacgatctagctaaatgaccaaaatcaagtaggacaacacaattcttcttagtaaataatcttttgaagtagtcaagaaactccataccaataagatgttcatcagataaccacgcaccacaaacagtctttatacaatccacaaaatttcttctcctctagatacatgtagtaataaagtgatatcgagtacatctatcaccatctttaagccaatcgattctagacttttgtctctaatgaatgcacttgcgagtaaggagttcatgaagggactttataagattcaatttagtttcatacaagatactcaagtcataatctttcatacatgattcttgtcctaatttctattgttctatttgtcattatgccaaacaaaggaaattaccttttgtttccaatcaaaacattgctaaagaatgttttgacttgattcacattgacttatagggaccatacaatactcttaatattaggggacataagtattttatcaccattattgatgatcattctaggtacacttcggttcactttatcaaaaccaagtctgaagaacaaactgccattacaaattttattcagcttgttaaaactcagcaccaaaagaccatcaaaggtgttaggtgtgatattgcaaaagaattgtaatttgttgatgtgtttagttcacttgaaattgtgcattatcattcttgcattcatagacctcaacaaaattatgttgttgaaagaaaatatcaacacttactaaatgtagctagggcacttttatttcagtcttacattcctttaaattattgtaatgagtgtgttactactgctgcatatctaattagcaaaacacccacaccaaatttacaaaatgcttcccctttcgaggttcttaaatctgaacctcccacatatgaccatttgagggcttttgggtgtcttgcatatgcttccacctcattttcatctagaactaagttctcaactagagcaaccccttgcatattttaggatagcccgctggtatgaaggcatacaaacttttggatcttaattcaaacaaagtcttttgttctagagatgttcagtttcatgaaacaatttttccctttcatactactgatcattttcctgatgcatataatgatttttttttcttctaatcattattcaatttctcatactcttgatattcaatatactgatcatcatacatctgatatttaacatgctaatttttctgatgttttttcttctcataccaatcctatttgaacctccaaaaagccttcatatttgtaagattatcatagttttatgccactgctaatccatctggtttgtcatcagattcttcctctgttacttcatattccatttcacaagttcttgattatagcaagttagcaccccatttttcgtgccgcttttttttggcaatttctagccatcatgaacctgagtttttttaatcaagcacaaggcataccagaatgggacaatgccatggttagtgaaattgatgctctgagaaaaattacacctgaatagtggtaaccttgcttgctagacattatgctattggatacaaaagggtctacaagataaattataatgatgatggttctatagagagatttaaggtcagacttgtggcaaagaggtacaatcagaaagaggcctagactac

SEQ ID NO: 263005 - DNA, 586 bp, Cannabis indica
caaaatatattttattcacattttttccaacacaatattattcacttttttttttttatatgaaatatcaacttcattaaattaacattcagagtacaaaacatccagaatagtagctggagcatcagacacagaaatactacgaccagataagtaccgtgacatcctagcaacaacatgtgctagacggtttgctgatcgtttaacaaaataaacttttattaaaggcatagaaagcataaaagaatgacagtctagagcaagatttccaaaaatggaacaaagagacgagcggctacgaatagcttggatagagactaaactgtcagattcgagaaccacattttaccaaccttttcgtttgatccaacttagagcctctttgatacccataatcttaacaacctctggtgtgaaggcaccgttagaacaatgaggtatggcatcaataagagaacctgagtcgtttctggcaactattccataaccataacctgagtcatttacacgtataaacaatataattttggctaatgatgaatttttctccccaaactttgacatgtactaaatcatgcttcctgaa

SEQ ID NO: 263006 - DNA, 573 bp, Cannabis indica
cacaatcaactttacaaactataggcacctatcaagatccttaatcggctattcatcagcttttcggaaaatacttacatgttagatcaatttactctatacttcctttatactttcttttctttttcttttatttacaaatggtgaaaccacacttggtctatttctttcaccttcttcagccagcagagagagactctttgtttgacagccaccttagtttgttgcaccatgcaatcagcttccacctgctttccttcccacactttagagtttcgtgctctccaaattgagtacactaaaccagtaacagagggtacgcggatttttaccgccaccgattgttaatgtgcaccatttaagtgaggtttcggaaccccaaattttaaatataatcatattatatgtcgttggactcggttttgaatgtagaatgcgatgatgataattatttaaccatttgatgatataagtgagagtaatatgtaagattggactaaaaaattagagctcgggacttgagagcttaagatcgtcttttggaaaaaatttaacgactcgggagaggtaggg

SEQ ID NO: 263007 - DNA, 963 bp, Cannabis indica
ttccatgagtcacttgagttgccaatcttgcccagaattaagaccccattcgataaataccacggcattcttgctaggattcgagattgtgtttgttcggaattgaaagaaaaggtaaggaacatacctgttgtgaatttcttttgaatcttaatattccattccgattccttcaatttccagatcctccccagcaagttcttcaagaatcctctgctgtgatccactttcgaacatagccttccccgaagattgtatttggcaatcatggtggataggctatgatccacctcccaatcttcttcatccgagacatgaagtttactggtttttgctaacagttcctccattgtgatggcgagtacacaccaggccgatcaccggaatcccttcgtcttcgagggaaaagaaaggcaggggttcgaacccagagccctagcagagagcgcgcgaaaaaatatcccttttttggattgtatgaatttaatcgcgaaatacggttatgatttcaattgccttcatggcacgtataccgagatgaagttatattcctttgcgttgctgatagtttggtacacaaatgcacttccaacaatttttcttatttatttcttcaacttattattattattatcagtaaaaaactgaaatagtgagccattcacacattgactcactttaataattttaaaatgaattaatttaattaccttttgttttatttttgaaatgaattaaactgaaatcattatttcacttctatgtccggatagaagctatagattacatatctatgattagtgctttcactcaattgtactatcgtgttcccaaaatgtacgtatcacccggagcaaaaggtaggcttaactaacaaatcaaagaacacaaataacactcttgagattgaacctaaccatctcaggattaagattatttgatctaggatcaactaagtgatat

SEQ ID NO: 263008 - DNA, 4066 bp, Cannabis indica
aatcaatgctctaggttttttactttgtgattaaaaatcgttgtttgtctatttatttttctatttatcttattatttgtttcttaattataatttactttgtgtaattaattaaagtataaaattaaaaagtataataattagtaaaatttaataatcaatccgtgtgggttcgacaaagtattaaaactttggtataacaacattgtacgcttgcagtaaaaatagtgtatcaccccatcactatcatgatatagggatgaactactctaaattttatgtcactcttataaatagttaactacggtgtggattaaaagtatagtctagatttctaagtcaatattttggtactttcattgcgagccacagctcaagaatgtttctagcaggatggttgcaacacgttctacaagtgttgatagacaaactctgacaactagctgaacaactggggcacgctagttgatggatttggaccgtgagtacttttgtgccctaggcttccctcagttttataattcaatatcattgccaatctcccctcgtggttcttcaatacctggtctagcttctctagtgttgtgagtgctagtggttccagttttctatgtacccaaagtgaaccctaccacaggggttgccactcccagtcttgctgatggtgggacttgtggaggcaggtgagtgctcagatcaggatctgtcaccacttgatcttttcaattagtaggagtttccacattaggatttgtggccattggatctgttgattcagtggattgggaccttcttgtattcacgatcatttttccttatgacttgtagagaatcaaaattgtcaaatcgtgttcttttactctcaatgaaagtaccaaaatgttgatctcgcttttagccaacgacgttgaatcataaaagcattgagattatgaataataattaagtgaagttaagcaatgagaacaccagaatctatagaggtttgatcccgcgattatggtaatagcctactcctatttttacttgtattacttcaaagaattatcaagatcacaaggagctaggcaagtgagtttctttataatcttttggaaaaacttacaatttttttcgacagcataatagatctcaagaacatatgaatttggatccccaaataataaaataatttcactatttatagggaatgatatatgaattaattttcccaaaacaattaggaataaaaacggaaattaagctagtttcctataatcttctttctaatgattgtcaatcccactaattagggatttaattaaactataaatgtgaatatatttatggaaaatatccttgaagatcttgctcagccgtgctaacttgctcggaggatttggctttactgagtggtgagaacttgctcagatagttgcatacatggactgtctagataatacatgctgaaagtttaaacttaattaattttacgtaaaactctctggacaacaatctatccaggctttggaaatattctccacatgttactcttattaactgccacatcaccctatgtggaaattgaatccacatcactcttatgaagaacaattctatcttttatgatcaaggtactatatatggaatccatgtcttgaaattatttttatgctttagaaacacaatactacttgtgtgaaaaattcccatcatttgtgtgcaaattgcttaaaatctagtttttttcttttttatttgcaaatataatttatactctgtataaaaggatatatcctaagagccacactttggacaacgaaaaaaaaaaagaagtggagttggtgtgatagctataaacatcatctaaccatcttccaacctcatgttctatgtttaatttcgttattctagagcactaaaaatgcaatacttgttgtggtataggtgggtggataactatttggtgcatgttttatcactgaacatatatcgagctgtttctaagtcacttaagttgtttgattacatcacaactcatggtataccaactaaatccagactatttttgtaagtttatattagaattcgataattgaatttttggcttggatatttaaacctgaattgtgcaaatcttgtgttattttatatattttcaaaattattattgttcctaaactattaatagtctatgcattatgttcaatatttataatcttatctgcaaggtgtccctttgatacatgaatttttaaaagaatttggcttcaagttataggacttttggaggttaagcatgggttgctccagatagcagaatccttggagttcttacatagtaatgcacgacttatacatcgagcaatattaccttaggttagaacttgttctctttgtttattacagtgttagtgtaattgatagtttgatatgacttgggggttcaaaacccatagcagcttatattacgtttttttttaaaaaaaaaactacaatcattttctgagttattgtgtgttgtatatttttacttattttattgtgaaatcggttctatttagtttatgtctctgtatttttacatctagttccttcttgtttgtatataattttttttattgatttaaactggttcttaataattcttctattgttttattttattccaaccaacatattttaaaattgacctagaccaaggtttactagtaagtttcaaacctaaaatgattaaccataatgaaaataaataataataataatatatccatattattttattccatgtttgcctcttgttgtgtaattgagcaaaaattcttagagtgctatctgagtaaaaaaaactgtaatgaatgtgtctttttcaatcatgtgtgcatagtttgataaacataatgtgtaacgctctaaatatttaggcacgctaccaaaaataattatgaaactctaatcccctaaacaagattactaatcaaaagggcacggaatttaaacttttataataaacggaaggaaaataaaacttgtaataatttaaactttacaatctaaaagttacaacagttgggatcccaaaaatatttacaaactttattacaagtgtatttctttcagccggcctaagcggcaaaatagagtttcaaaatacatcactagtagacccaacccgcttggtctagtatggccaggacatgtacattcttcgcccagctcctacactcatggctgatcagctatagtcttaccctttgctgcacagtaaagcacccgtgagccaagcccagcaagatagtataaaataataacaattatatgctcatcatgctatttaaacagtaatgccatttatatatgtatgtgtgacacagacctgcacgttgcactcacatgcctatatatgtctacgtggcgtagacctacgtgttgctctcacacgtctatttatgtctacgtgacgtagagttacgtgtttctctcacacttctaaacacaacaaggccttagaatggttcatctcggttatggttaccgagtccaacttgattatgccttgagcgcataatccttaaatctcattacatttaacatggcatggcatttacacacatatatcactaataaccctaggctaccagaccattcctattagggtaataaccctaatctcggttactaaatgatcatacatatcattttcaacaaaagcgccactatgcatactctacgtgctaactactgtcttacctgatgtctcgtaatagtagagattccaaatccccaggtgctcctaaccaagtgtcggtaatcctagtcacaaattcttagattttcacaaatagggttaacccctgatttcacattcataaaatattcacatggcatttaaaattcaaatattcacatagagctcgaaaagagccttccaacggtatatagaactcacaaatcggagtccagatcacaaagctatggctatttgaagtttgcataaggatctgctcagaaagagaagggcgcgccgcggtatgctaaataccatgccgcggcacctgggttcaaaacccagaaaaccagcagcaaa

SEQ ID NO: 263009 - DNA, 642 bp, Cannabis indica
tgtactctttttccttagctcagattttttcccactggatttttctgacaagatttttaacgaggaaactttaaatcatgttaacatacttgtattttatgaagcaagtagagaatgtgtgggagtgagatcattgacatagcatatttggaaaacatatgaattgcactctataaagcacacaagcagttctctatgaagataatactgcttacattgctcaactaaaaggagggtacattgaaggagatagaattagaacacatttcaccaaattcttctttatacatttcaagaaaatgcatattggtgttcaacaaattcaatcaagtgtcaatcttgcaaacttattcacaaagttattaccaacatcaacatttgagaagacgacagataggatcaaaattgaccagtagggttcctgctataagctaagcatcatcaaggtgaaagacaacttgagcaatgttctcacaagaatcagcacgacttacgactctgcagtgtgacttacgattatgaaggatagattgcttagtatctttacacttgagtgatacctaactcataacagtaatatctattaagtatgacccataatgcacactatcactatctcggaaatctcttaaagaaaattta

SEQ ID NO: 263010 - DNA, 503 bp, Cannabis indica
ctatgtaaatgagcatccgggagtaggtctcccatgtcaagataaatgatcaaacatatctttagccatctgagaggtactaaacttctgaattacaagttcgccaggactatcattttcctaagatttcaaatatagatacgttattaattatttattgttataatttaaataatcaaaaatcatccatagatgatttacattgagtataaacaaatttaccgttctatccctcaatatattttatccttaaaacacttagtttcctataaatgatatgtcagtaaactaatataaaaactgaaataagagctctttcatttatctctattaacccaagctcaaaggaaatcatcatttcacttctatgttatagaagttatagatttcgtacctatgattagcgctctcattcaattgtactatcatgttcccaagatataagtattaggctgatccatttggtcaactttaacgaacaagtcaaagaacacaaataatac

SEQ ID NO: 263011 - DNA, 610 bp, Cannabis indica
ctcaccaagaacattctctgtatttataagagtgaaacactccccaaatacattctctgtattaaatacatccataaataaaaaagactcgtggactaaggctcattaacgccccaaccacgtaaaaatctttctctaattttcttacagctctctaactttataatattttattagttgccgaaaacctcggtcaacacctacagtagactactaagaaagataagagataattgaggaaagtgatgtacaatgtaaatgttttggatgagcaatacaatgattcttattcatacaaaaaaaaaaacttttctagctaacttttttttcgtctccatttctctttttccaacgactttcgccacaaataggacatacttctttttttttcattctctttacaaaataaggcacaagtataattgcatacatcaatggtttcataacccaaaccaaggttacacaatttcatcttcgactcgtaatgagacttgggtaattttgtactctctagaaataactcaaccaatatggcgagtaacatatcaaaagaatggtactccacttattgagaactttgaagtgcatcagcttcaccaaagcgttgagc

SEQ ID NO: 263012 - DNA, 1788 bp, Cannabis indica
ggactactgactgtcacagtttatcccagtcttcttattacaattaattatgatgaagcgttcaataattaaatatatttactaagcagtattagacccaaagcatgcaatcatttaacttaagaaaaatattaaattctatagagacacgttaatctaagcaacaaattaatttagcatataattcatttaacttatgttgtattcttcaccataaataataatacttgtcacaataacattagaagcaaattatcatttaaatctagaatttagagtattaggtaaatagaaattttgagaatgatagtagaataatgtaagatcttatttagcgatcgtctaaacaatgtcaaaacattaatcataaaattaagcatagaataatataaataattcaatatgaaggaataaaatactaatgttaataaaagcattcaaaaaatcatgtctcgggttttgaaataacccttaacctaaaagaaaaggctactccataatctcaaacataatgataaatgaaaattaaaagagttttaagaagaaaagctagatgtagattctcctcttctcttgagttctctcctttaaaatgcagttcaaaagttgctaaaaaaaccctaaaagtcctataaatacccctaaaaatatcccaatttaaaaaagataaaaatttgaaaactggtagaaatcacaaaagtcaataagttcaagagaagatggagaaaaattccacgactacgaggccacgttttcccttcgtggtgtccaattttgggaccccgaagcattacttctgacccccgtaagtctcccttgagtttttattatgtttcgtttgttaaggaatactctctcactcacggtcgctcggctttggcatgaggctatataggttctgaatgccccatactcggtggggtgatagggaaaaagattttttatttttcaaacatgagtggtttccatggccgatctcaaatgagttcaactctcctaattcctatctttctggaccattcttgctacctaacttcaagctagtttcttccctcatatagttttttaggagatgacgacattagctctttaatttataaatttgtaaggacagaattaggacattagggtaggacattagctctttaatttataaaagtgagaattcacgacggtcctaaaaatattttttttgggtactatcgctaaaaaaattaagtaactgcttaaaactgtcgggaaaaattagtattcccgacggattataacagtaattacaggaataggccacggttttaattggaattcgtgaatttattgggcccttatacccgacgggtataagggcccaataaaaaatcgttacatacttcttgccacattttccacgtgcccacctactttttttttttttttttttctttatttctcacatgctcacctatttcttctccatttcccacaccctaaaatgaaaatcttaactctccaaaaccccacccacaccttcgtaccattgctctcctctctcgccgtcttcttccctctctcgatctccctttcttctcgtctctctcgtccatcaatctccacccactctcctccgttggtctccctcttatctccgtcgcatacgttagaccaccaccacctcccgtcggtgtccctctcatctccgtctcatacatcgaaccaccaccacctcccgtccgtatccatctctctcgttctctctctccgggctcggtataaatacatttatttatttatatatatatatttattttg

SEQ ID NO: 263013 - DNA, 3523 bp, Cannabis indica
tatatgtatatttcaattatttttacacatttactaaaaaaataaactaaaaaaaaaaaaaccctaattctaaacaatgatatattatttttcttttcttttttttttttcattttcactatttttttaatgaaaaaatgtataaaaatgatactttccaaaaaaaaataataaaacggccagcccaacctgaaacccgatcaaaacccacccgaacccgatccaacccacacccaaaatccaaaaacctagttacataaataggcaagttcggcatactaattctacacacccaaatccaaaaacccaaaacccaatacacccaccctatgcacacccctattctcgaactaagggaagcaaaaatcttaaataaccattattttattataatatagcatttccttaataagaatcaagctaaaggaggttgtgcttcactttttggtgtgagatacaaacgaattctcctaaatgctctatcatagtttaaacaatatttcacttgtttttgtcaaatgatctgcaaaccgctaccaattatttggctcgtgctgcttatgtattccaagattgtaattatagtatgaggttcgtctctcactactgatttgcaataataaaagtttcaaactaattaaaaaaaaatcaagctattttaatatctattactgtttttatacttttctttagttaagaaaaagaggtgggaatcaaggaaattgatatggggtcaacactacaggccattaaaaccagattcagaagaaaaaaacacaagtagataatacaacatgccaccctaaagagagtttcattttttaatccgaaaaaaaagaactgtcggctcgatcaactgcatctaatttataaagggtatgagatataaacctcttactgatccttgtatcgcttctcgacttcctccaaggcttgaatatctttgtggtacttgcaaatgcggtgaaggcacctgcaaccgaaacccggaaacagaacttagtaaagcattggatttcaaaggaagagttttctcaagatgatggcagtagaatgaatgcatttttaacattaccaataaagaatgacagcagcagcgcagagaattacattcctttgagctttgtaggtctgaaaatcataaagaccgcgttaagagtaatcgaaattaaataaacttttgaggattgaagtagtaaggtttaaactaagttattgattgattcaccaaataagaaacataagtttctgaggataaagagaagagcaacacactaagaaaggccaaaacaagcaaactatacatatatcataaacgaatataaaaattaacttaagtgagctaaataacatatccgtaaaacaaaaactgataaagactaccaactcttaggtggcgtttggttacaaaataaaaatggaatgggaatgggaatggtaatagggatagaatggaatggagaccaaaaaactatatcaattgctaggtaggtacctaggagactcgacctcaatcttgttggagcaaactaaatgtctgaccatttgagcaacccttgttgggtgattctcacaaaatagatgtgaagaattgtattcaatctcttaagagagaggagaaacaaaaaaaaggggcttaaagaaagtgaggatgccaactggcagtgttatatttagttatttctctcgttgctacttttataatgaacacacattaacaaaaataaaggcacaagacatcagaaacacagtgataggaacagttacagagcagaataataggaaaaataaaaaaagaagctaaagcaaaaaatcgcagtttttttaaaaagaaaatagttccaatacaagaaactctccaagaaccgtgaacaaaatattaactctacaggatttcaagagcctggtctctcctcaactcacttccgaaatcccaatactcctccccaacatgtgtccttcctatttatactcatcaaccaccaaaactacaactaaagtacataactttctcctctaaacaaccaagggccgactttccatgagaaaacgtatacaaggttagtcctcacaatcctaagagttttgtcagtaaggaaggattgtaatttattggtattatggaagaaagaggaagttatggaatgtctctgttttgggtgtcttagctgtttattaatttggataattaaaacaaaagattttattttcaaatcagtgtattttgaagtaattgatatgacagtgatctcctttaatcaataatggagtgcatttttaatacccaaataaaaggtcaaccaaaattatcttattgtaattacaatacatttctaccaaaccaaataggtagttctacacaaaactaagataagttcaaatcataaatttgttatcgcatcaaatcaaaccttttatatttatttccccttattaaacacttctccacaatctcaaagagtccctttttgagttctctggcaaaataacctttacgaaaacttttatagtaaaatgactattcaaatatttttattagcaaaatgaccttgtagggtcgcagaaacgaccatgaattacactttgtgaccattatggtcgcaaaacaatcatagatttactctgaacggttattttacaaattttagtatttcagttttggcaaatttcactccctgttctaccaaatcaactattaattccttctaaaaccttaatttttccattaaaaattaggcaaaaacattctctatttctccctaagcaaacaacaacattcttaaggcatagtagttcaattcaagatttacaaaaccaaaaattcaaacttcaattcaattcaatcaaacaaaaattaagtaaactcacagttttctcaaatcgatctctctcagtagccgtacaaatgtcagatgtacacgtcaagcgatgctcgttcttccaatagatatctacactcaatacaaagaaagtaaaaaaccaaacagatctatctatcaataaattttaaaattttcttggatgccaaacagaacagaataaaaccaaaaattacataccgaggagctgaaaaccggcgaagggaacgatgaagaggcaaggttggagtatgagagagatcaaagagacgaagcgattcttgagaagcttaggtgaaggaagagttaagagaatagctaagagtgcttcggctgccactacgtaggtgagtatcatccattgaagcgccattggttccgatcgtcggagtcggagctggaattccgattcgaaatcttcttcttcgattggatttggatttgggatttttggatttgatctgagttttgagagtgaatattcttgacttaatatgcaagaaaagttctaaacggacccatttttgcaaatattgaatttttcaaccacatattacacgtgtcatataccattttatttaagagaagagaaatgttcaaggtgaattacttcatatacaattttttaattttttttttaaatttacagtttgagttgctttggt

SEQ ID NO: 263014 - DNA, 5242 bp, Cannabis indica
acataatacaaaccaacaattcaaaatcctccttggaataaatggaagataaaagctggagataatcaccattctgcattgttttggccgattggaagtcaatgaaaaactttgattattgccaaattcttctagcatgcttacaagcaaatagtgcatgcccaactgattcccatttagaagtacatagagaacaagctgctgaatcaattattttctgcttgtggagtgcagcagcagtaggaattatgttgtggtaaaccttccaagcaaaaattcttatttttggtggtaagttcaagttccagaagaatttccaccaagcaagatttggatctgaggcaaaacatgtatcttgttcctccaaagatgaggctaaatggaacccaaatttaacattgtaggaacccgatgttgaatgatgccaaataagtcgatcatgagaggaaaaaaaactcaaaggtattgtcaaaatcctatcaacatcaatcggttggaagaagctgtgtaacaattcaagattccataccctttcttcagtaatgaggcttgaaaccgacatgttgggtggaccatgatagctcaccagcttaaaattcgtatggcttggaatccaaggatccgtatcacaagctatgcgatgaccatcaccaaccttgaatctcataccctttaccaagagttctcttccccaacaaatgctttgccatgtatatgaaggagagtgaccaatattagcatccaagaaaagaggtggttgagaaatatctatgctttaacaagcggctgagtagagaatccggcatgttgaaaattctccaagcttgtttggccaaaagtgcttggttaaaatgaacaaacgatctgaatcccatgccccctccgtgcttagatttgcatagagaattccaccttttccaatgaattttggtgccattttggttggcgccccaccaaaaattagccatcatactctccaattgattgcaaaaattttttgtgagtttaaaacagctcatgacataagtcggaatggattgtaccaccgctttaagcaagacctctttccccccagctaagaatatttgctcattccaagcatgaagaagcttttatactttttccttgatatgactaaacaactcttgtttatctcttccagaataagatagaagacccaagtatcgttcatgacattcagtgatgggcataggaagtgtttgagcaaaaaagttttgagcagccattgtagtgttgggagagaaagacattactgatttgttgttgttcaaaacttgacccgaggccctatgatatgtctagagttctttagatagcaacaccgattgatcatttgctcgacagaacaacaaactatcgtcagcaaagaggagatgtgatacagcaggggagtttcttgttaagcgtaatccatccaaattccctacagcctcttcatagcgcaaaagcctagagagtccttcagaggatatgagaaacaaatatggagatagaggatcaccttggcgcaaaccacgataaggttgaacgtgtcctactacttctccattgagtgaaaaagagaaggtgcttgtagtaatgcaattcatgataaaagtaacccattgagaagcaaaacccattttcaacattacagcttccagatacttccattccaccttatcaaaagctttactcatgtccaatttgagagcagcaaatccaacttttccttgagttttatgccgaagatgatgaacaagctcaaaagcaataagatgttatcagtgataagtctgttggataaaaaaacggattatgtttctgatatgacgaacggtagtactttttgaaatcggagaactattgtcttggatattagcttatagatgacattacacaaacttataggtctataatcactcataccaacaggattgggaacttttggaattaaagtgattatggacttattaagttgagacatgtcagtaccttcattcagaactccaagaacaatttctgtgactgaattcccaacaatgttccaataattttgatagaacatcgccgacatttcatcacttccaagactcttatctgggttcatggatttcagggcagccactacttcttccctggtgaatggacaggttagggactgattcattgctgctgttatggtggcaggaatggcatctaacacactttgaagtgcttcaggattgactccatccgaagcaaataaagagtcatagtaagaacatataactcagatcaaatctggtttgctgctgactgaaactccttgatcattaagtaaagctttgatagaattttttgccttccttgatgaagcatgagcatggaaaaattttgtattttgatctccacattgcaaccaatctactctcgacctttgatgccaatattcctcttcttttgcaagaaactcatcaagaattgcttcgaaatttttaagccgagaaacattagcttgagatctgtcagctacattatttaaagtagcaacagatttctgcaattgagagatatctcttttcattcgtctgaatttttgaaagtgtcactgctgtaatgcctcagtgctaagattatgcagaaaaccagaaatattccctgcattgtcttcagaccagtgttcccgaataatggtggcagcttcaacatcctttaaccacagtttttcaaatctgaatcgagtttttctgtgaggagaggtctggtttgaaccaatttctatgacattgactgcaatggctcggtgatccgaggaaaagtagtccaagtgagaagtaactaaaggttggaaatgagatgtccatgaattattggtaaaacaccaattcaatcgttccttaatagtgtccacattgtgtcttcctttaatccacgtgaaaggatctccattaaatggtagttcattcaatggacatgaatccaaaactgatctgaattcatccatttgatttgcacttcttaagttccctccttgcttgttatgactgtaaaggatttcattaaaatcccctattaccatccaaggaagtaatggagcaatgtctttcaattttttaagtagagtccaagtatgtccatggttagaaagagagggggcaccataaaaggctgtaaagtgccaagaagggccattgttgcaagccatgtaacaatcaaagacattaacattaaaattatttaaggatacctcaacatcatctttccaaagtaacatcaaaccaccactaagaccaactctaggaacttctaaaccattattaaaatttaaaatactacgaaaacgagcaatagagttacaagctaatttagtttccataataaaaagtacagtgggggattgctctttaacaagcaaacgaagcttacaaatagctctttggttccccaaaccacgagcattccaactaatgattttcatggctgcccgcgggactgcataccagtctccgctgaaatgtcatcttcacccgtcgaatccatgaagtcagtggaaacttggaggtgatcattctcatcaactgacaaggttgattcgaagtcatttacaatattccctcggcatcttttaagtgtttgtctgagagaaagaccttcattctgtctttttgttaacacatttgggtttgagttttccttcccaacaatattaattacagcagtggcagggtttgatatggcatgagacattagtggtgtgagtgcagaagtaaccataatttgcttgttaggaaaattaatgggttgacctgtaaggggtacgtagcaaaggcattgcaagaaggagggatggtagtaaatggcatataaatggatgagagatctgtgaaattggagagggggccatgagatatatctgctcttttgtcaatgctagaagaggaagaagggcaagatatggtggaattgtttaaagaagatggctgaaaacaaattgatggtggtttcttaattgaagcagggacaacaagattattaggagcattagtaataagatcttcattgtcattggcatgagaagactctccagcatataaatgccttggttgtggatgaccacgcagatgaagttgagggacagccgctgtgaaactcttcttagcaagtcttgtcagtaatggccaagcatctcctttggtgaaatcggttctataacgatcacaagaagaagtaggcagagcagaacctttaataaagggctggtattccaaagcaggttcttcaccattatccaatttctcaagaaaaatggaacacttgatatatggatgaccaattattccacattccatacagtatttaggcagcctctcatagcgaaaatcaacccagaacttgtccttaacatggcccaaagaaatcattctcctctcttcaaaggtttagtaacatccataagaactcggatgcgtaaaaagggtccccagccttcatttaacgagtcctcaaacacatcctcatatttgccaatgatattaccaagagcaatagccaaagtttttgtcttgctgagaaatggaaggcgatatacttggacccaaaaaggagtgaacttaagatcatcagagttaaaattctgaccaacaactggtgtatgcagcacaacatggtggttctggaagtgaaatggctctcgatccagtacacgaagtttatcaccttcacagccgaaggtaagcatgaacaaatctgaagattcagagattttaactgggaatctaccatcccagtgctctgccatttgctgttgcaaggttgaaagccaaacttttttcttagtgaaagtcttcgcatataacacagtatcagcactaacagtaggggaaatggcttcggaatcatgaaattcaaagactgattcttcatcctcagtgagattgatttttgatttcatcttatctaagagaggatccatgaagaaactaaagaaagagagaataaggtagcagaatgtgaatgcaggggaatggggaattgaaatgatgtttttagattaggggcagagacaaaggagaggctttgaagagtggaagataattgcagaaactgtaactaaagcggttgatatctagaaaaagatgaagaaaacggttaaaacccataagggacaggaaactgcctcagagcacaaaacgtgggcagacggctcaagttaaaaaaaaaattgtatttttgatctccacaactaaagaatcattaaaaa

SEQ ID NO: 263015 - DNA, 891 bp, Cannabis indica
tgtaattaatactatgttttagttacaagtaacattttttattgtaactaaaagacacatttagtcacaaaaaagttatgttgtaactaaaacattatcactaaaagtaacaattttttgtagttaatacataaaaaaaatatctctaccgctacaccatttaattattattaataagtgtaatttaataattagttacccacaaaagatccatggactacatatattattggtcacaaatacaattaactaaattcaatagaggctatcggtgaattattttgatagatattttaattaacatatccacatctctaatgcttaataattgcttatctttacaaattacagcgacatatgaatttaattgcttttttatcattcacttttggggctccaaaatttgtaaaagtgttttaatgcaaagatgaggtaaagaaaaattgtcttccattagctttgtgtcttttgtatctatttagaggaatggggcatcatacttatctgttttgatattcaataatgactgatcaaagctatttataaatttgaagtttcattttcatttttatatacaaatatttggtaaatgcatatccatatcaactatctttaagatactatttcccaaacactttttggaggattctctttacttttttgactgccatttcttaaagtaatcccccttcaaaaaaaagcttaattaactttttgttttcttaataaataacaactttctataatgtacttactttagcataaatatatgataatgtacttaaatttttaattattgttgttattagaaaaatactacaaataaaatatccacatttgttgccagtaaaagtattaaaagtaaattgataacagaaaaaaaaaaaaaaa

SEQ ID NO: 263016 - DNA, 779 bp, Cannabis indica
ggcccgattcccaggtctgtgtcccccatctatttttaggtcctaggtcccgttctgggtccaagttcgtgtttcggttcggtccgagtttagttcgtggttttggttagggtccgagttcgcatcccaatcctagtcttggtctgagtttcgagtcctaggtttgagtctggttcttgagtcttgggttcggccccggtgtccaggttcgggtcggagtgccgtgtttcgatttgggtctgggtttgggtttaggtctgattcctggtctgagtctgggtctgagtcttggtccaggtccggatcctggtctgggtctgggtttaggtccaggttcgagttcgtgtcccaggtgcggttccaggtctgggtctaggtcagggtctcgttacagatctagcttcccagtttcgatcctggtctgggtccgggttttggtccgggtgtcagtctttgtctgggtacacgacttgtcaaggctcgactttaggtcacggtttgggtttggggccaggtctgagtttggttctaggtttgggtccacgtcctagtcacgatcctagtcttgttcgatggtcttggtcttacggttcttgtttaggctctattctcgggtcctaggtttgggtcaggcgccgggtttgggtcctggtctgagtcccaaatcaagttcagggctggggtgcggttctaggtcccggccccaattttgtgtcccgagtctggttccatgtttgggtctgagttcgggtcaaggttcggcatcgagtgtaggtttg

SEQ ID NO: 263017 - DNA, 1268 bp, Cannabis indica
acaacaaaagcattagggagaggattgattgggagccacatgccatctttcttgacttggaggccttgtacttcattcacttgaagaagaaaggtaaggcatcccccatctgagtgatgactgaggcctataactttctctggctcaggacatggagggtaacaattcatactaaaaagctgcaatccatcttcaaacaaattcgaaatttcatcgtttttgattcctaaaatcttctccatttggcgaattagatctttggcaagctttgcgagttgtaatgaataaatttccaaactttgctttaaagtaattgggaggtttggaaacaagtgaggcttcctcaaagcaagtggtaaggtgaaaattaatatgtaatcagtccaatcaagcttttgttcttcactgaaaacctgagtttgtccaaatccttctatgtctcccggaagctggcatagttttttcttctcttctactgataatttgaacaaatcttcaactcctttctttacattttctatcaaacaatcacttattccatggttgatcaactgcatgcatgcatgcaaattatatatagtcaatataaatattatcattattaatatatatatatatatataaatataaatatatatacctggaagaagccccaatccttacaagctgagtggaggttagatagttcagattgatgatcatcatcatcatcatgaagaaacaaattttggaaattgataacagggatttgatgatcaagagaaacagaattattgatattattttgaggattttgaatgtatcttgatgggatggtcaccatgttgggatcctttgccaataattcttgcacacttggcacaaccaaacgagagctcttaaattccattattattgttattttccactctaaatgatctatgattttgattttgattttgattttgattttgaagacccagctataccatctccattatatatatatatataaaaagaaaaactaaacaatttttcatggctttttgcatttatatctgttgactttatgcaccgctagtatcagtggcttagtaattcaatataactattaatacaattaagtattgtgttttatataatttaatgcaataatttttaagaattatgactaatcaattataagataatacgtttagaaggtgttaagcaaatttggtgcgcaaaagcaacgctctattttttttttttgacccccggtgatccaaatcacacatgattaacaaagc

SEQ ID NO: 263018 - DNA, 873 bp, Cannabis indica
taaactttaacatatcaagtaacatcataacttaataaagtcttctgttactttgtatttaaaagttacgatatagtatactaataataaatttatttaataaaaaaaatttaatatgttaatacaaaaacttataaagttaccaaatagtatcttaaacataataaaattagttacaatataaaaattattatatatattcattttaagttgcctgaacaaaataagcaaccaaatgtgtatgagaaaaaaatatcttgaattaattttttttaataaaaaggtaactaattgatatattatttatagcgaaagcaaccaaaaggttgcttttttaaaaatttgcaaaacactgaaacttcaggaagcgagatttttcattttttttctattttcggtaattattttatatttcggtatttatgctgatgtggcatatcggtatttgtgcaaataattttcctaaaggtatttttataaataaaatcaattttaagtataatattgaaaaaacccctaataaataactagttttgccaataaaatctatatataatattagaattttaaaaataaaaattgtagaatatatatagtacgtactatttaactataacaaaactgacgggacaaaaatatataatacattcttttttaaaaaatggtaaaattcaacttatactacatagaagagatatttggttttgtgtcctcctcaagctcatatcccctggagtaatgactaataagggtatgggtagccgttcaatttatcaaagcataatattattttgtgcttggctgtgttgaataaataaaaaaagaaaaaagaaaaaaaaaaaacaattttaaaacataacattgtattgatgc

SEQ ID NO: 263019 - DNA, 2116 bp, Cannabis indica
cacgtagtttacagttgccctactacttactaccaacaagcctaatgtgagaatcaataactattattaacttactactcacacaatgataccattaccaccttagttatttttaaagcattacacacacatatatatatatgtattttttttttgaatgcactaggttaaataattttatcctatttgtaacataaatattaaagtttaaaatatttatctcaacccaacccaccccctatataattgtactaagtagagttgggttgtacatttaaaaaatttgaatgatttatagcatatccaaacctcaataattgggttggcaggggcggacgtacatggttgtttatagtggccatggcccccctagcatatatgtaattatgtatatgtaattctaagttttaaactttagtatattgtaattggcccccttagcatatatgtaattatgtatatgtaattcttttttttttatccaaacaaatgatttatttaaagcaaaacagggcattaaaatccaaagtttgtagtgacaataagggatgccacttccctaacagaaaacatcttaaaacattcattggatgcagcccacgttgcaagagagtgagctgcaccattgaggttgcgaggaatccaacagagtttaacattctcaatctgggacaagcaatccaaagtggaatcaaagacactccgagctttccactccgggcaggacactccgagctttccactccgggcaggacccagccaacaatccgttcaccgtaacctggcagtctgagaagatggagaaggacgcccaaccagagagcagggcccgacggcacgcctgctttatcgcaaccagctctgccacaaagggggagctcaccacgctcttcaccgtgagcgcttcgatcaaagacccagaggcatcccatgccaaaacagctacacttccccagttattgcgcacagctgcatccgtcaagaagttgtgctcaaatcacgggagattactggtatgggatgaaaccagatcgacgcttctcaacccctcgggggtttcggtattgtagctcgccactgaggcaagatctcccgctgaataattaggacgaagatgggagtaccttcatgaaaagcctgatttcttgtcccccataatttgtagcaaaggtgtatcgcatagagggaaaaagcctctctgtcgatatgattcccgaaggggatatgtgggggagacaccagccatcgcaccaccgacataggatcatcaaactgaagcaaatccgagcaaacatcccacggaccagatctccacagtattttggcgaagacacaatggaaaaataagtgaagggggaatcaacaccatcattgcaaagaacgcaagtcttaccatgaccgaagatttgctgagttctgctaccaaaaaggaggatatcctttgcaagcttccaaagaaagtatttcaccctctcatgcaccttgcatttccaaatcagcttccacaagtcattctcaatcccacaacgctcacgaatgcaagccaagaacgcattcttgactgagaaggagtcatcaattgacgccttccaaatcaactcatcctttttatctgctaccagccgaggaatagataacacttctctgcaaacatgagggagaaaccactccccaacagcatcaacaaaccaatccccaggctcatttgcaaataaggagttgaccatcgaccctctctcccgcactcttggattgaaggaagcttcaaattgatcccaagtcagccccgggacccaggggagtgccaaatatcaatcgataagccattccccatgagatagcgggcctcattgtggattaggtctctaatactcaagatgccttttgccccaaaggacataaaattacaaaagggggttgtccagaaagtatggccccttttaaagtacttatcccgaaaaaactagcaccacaaggagttagtcttagaggcgagtttccaaccaagcttagagaccaacactagattaaactcctcaaatttcttaaagctcagaccgccccattttcttggcacacaaggagttagttccggaggcgagtttccaaccaagct

SEQ ID NO: 263020 - DNA, 1224 bp, Cannabis indica
tgagacctaaaggatatctccgtagtttttcttagcaacaatacctcattccttcaagtttttctttagtcttctttttttcgctcgtccttagacctttggttctctctgtagtacctgcagaagtaccctcattgtattaactcattgatttcaatcttgagatctttgcattcctctggaaaatgtccaatgtcctagtggaacttataatatttattcgggtcccttttggatctatctttctttatgggggatggtttcttgaaaggtatgttgtgtgtagcatgtgtattggtaacactgtggttccatccttctcttgatctttgtgctctgatcgtcttcctggtgatgaaactctctctccctgtgtagtttctcgagcgaggtccgtccacattattcattcttatccatactgaggtttctatgttcatcctctaagagtatgtattttttggctagctcattgaaatcttctagttcgtccaactctctcttgagcaagctattgtacattttgcttttaagttggactcccgtgataatggccatcttatgttcatctttcgtaaactttcctactttaattaccttagcattgaagtgcttgatataacttttcaagctttcatctcccttttacttaacatttgctaggcttgtcccaggaatggtgtagtcacgggaggcatggtgttaagccacaaactcatcaataagttgtttccacaatgtaatggatctaggtgatagcctaactatttatatgtcgcacctttgagtttcatgacaaagcattggcatctcgctttgctactgaccctcttcatcttcataacctcgttgaaggcatataggtggtactttaggtttgtgttcccctcataaagtggaaaattaggctctttaaagtttagcggtagtggttcagtttgaatctcccttgagaaaggagattcatcaccaaaatcatcctcatcccaattgcactctttggatgcagctgacactattctcctttagagctcctccatctccttaccaagttattcctaccttttattcaacttttctcggaggtctgatgatatgggctttgttcctcccttatcgagaggggtgatcaatgacaatgtctatttctcaatggtagccttttggttgagtttttttttttttttttatataaatcactgtggatctccttacattcagtct

SEQ ID NO: 263021 - DNA, 3206 bp, Cannabis indica
caattaagttcaattatataaaaggactgaattggagttatataactaggcatctatctatgtcgtatcatcaatcacggtacgaaacagaaaagatatcacaacccaccaacttcatttattgattattattattaagatcacaactcaccaccctaacttaatgagcccaacatcgctacatcacaccatagtgtcaattaagtaattaaagagtgttgtgtagctatttcacacttaatgtcaagtattatatatattctcatataataaattaataataacacttttcaagattacttattaaactaaacgaatgggatttaaaattgaacaataatatggttcacctctcctttggtcatctttaagatttaacaatccatttggcatgatttaattcaatcaaatccatacattttgatatttttttttttttaaaatgtgtgttttgtttggattgaaaaagttaacagatgcatttgtatatttttagatgcacttttaaatttaatattgaaagtaatcagtctaattcaaactttataaatgtaaatataattttaaaaaatatttatatatgtggtgataaataagtataattgagtggtttcatattctttttataaaaaggatgtaaaaaaaatatttatgtataaaataataattttaagttttaatttttttataataaaacttttataagacaattgacaaataaaatatatcaatatttttggtacaataaaactactaatatttgaagtttgaactaatcgcttgtatccaatataaatacaaatgctgtaaattttaaattattttgtatataataaaatattaattattaattttattttataaaaattgaaattataaattgaagattgaaagtatcacaagtccataaaaaaaaaagtatcacaacacaattagttaatagtctacaatttagaagaaaaaaaaaataaccatctaaattaatctgtaatttggtaaattggattagattagttttaaaatagaatattaaagattagattaaacccaaaatataaaacctataattagtgggaatattatatatgagcaaaataaagggaattggattagatttacagggtgcttcataaacttaacaatattctaattttacagccctattcttctcatgacgtttggcttagctcaagtctacgttggggacgaaaccatttatattcattcactataaaaaaccaatcatcccaacacaaaccaaacactcctcaattaatttctattaacaatgcttctttcaaaatcacctcctgtagtaatactactactcaccctttttcctctcatctttcttcaaacactttcatcatcatcatcatcaaatctagacaacttcatcaaatgtatctccaccaattccgagttctccactccaatctcagcagctttcttcacaccaaacagtccttcattcactcctcttctccaatcctcagctcagaatctccgctacttggtcccctcagctcccaaacccgagttcatcttcacacccttgcatgattctcacgtgcaagcatccgtaatatgctccaaacagcttggaatacatctcagggttcgtagtggaggccacgactacgagggtctctcttatgtttctgaaatcgagacccctttcgtagtcgtggacctcacaaacctcagggccgtgaatgttgacatagagaacaacacggcttgggttcaagctggggctacaataggcgaagtctactacagaatctctcaaaagagcaaagtccatggcttccccgcgggtttgtgcaccagcttaggcgtcggtggtcacataaccgggggtgcctatggctctctcatgagaaaatatggccttggcgtcgacaacgtgctcgacgccaagatcgttgatgttcatggaaaagttcttgaccgtgaagccatgggagaagaccttttttgggccattagaggaggtggtggaggaagctttggaatcattctttggtggaaaattaagcttgttcctgtacctgaaaccgtaacagtgttctctgttcctaaaactttggaacaaggagccactaaaatactctacaaatggcaacaagtggtggataaactcgatgatgatctcttcattagagtcataacccaaccaacttcagtcagtaaaaacacaaccgaaagaaccataatgactatttaccaagccttgttcttaggagagcctgaaagacttctcaaaatcatggaacagagcttccctgaattgggtttgactcataaggattgtatccaaatgagttggatcgaatcagttctttacatagcaagtttcccaactggaacaaaacctgaagttcttctccaaggaaaatcaacgttcaagaattacttcaaagccaaatctgactttgtcaaagaacccgtacccgaatccggtttagagggtctgtggaaaaggtttttggaagaagaaactcctttgactatttggaccccatacggtggacaaatgagcagagtttcagagtccgaaacgccttttcctcaccgaaacggtaccgtttttatgatccagtggctttctacatggcaaaatgaagagaaggagagcactgtgaaacacatcgattggattaggaagctttatgtgtacatggctccttatgtttcgaagtttcctagggaagcttatgtgaactacagagatcttgatattgggatcatgaataagaagaaccagacaagtacatcactggccagttcgtggggaaataggtattttaaggataatttcaacagattggtcaacgtcaagactaagtttgaccctgaaaatttcttcaggcatgaacagagtattcctcctctttcaacctctgctagatgatctccaattattatagagtaattatctgactattggaaaaataacaatggtaattttatattttaattgcttggagttgtgattttcttgcactcgagagatgatgaatagggtattttatgagttgaatggtatgtgtttgtgtgagaaatgatgtacgatcatattaacttaagataaaagccttataataataaaatattaaataaaatacaaaatttgtcacttgtgtttgttgtagtgtaaaacaagatgaagattgaagtggtataatattatgggtttaaaa

SEQ ID NO: 263022 - DNA, 1510 bp, Cannabis indica
gacatcactgtaattgtgaatgactatatattctggacttaccagattttgtatatattaaaccataaacacgaaaactacatgtaaacataaatgacttctaatctttcattgataacaaatcagattagattgaaatgagttttatttaggacataaatcctaacaccaacgtcattggatgttggattggatcggttctatccattggatgtattttatatatacttattagtttaatttgggttacccaatatattagaactagtatttttaggattgtatcaaatccatctaatattttaggtccaatatatattggattgaattagatccatccaatttaagaaaaaagagtataattttaatgttaattttattatataaatatagattttatgtataacaatacaattactcatccaaaataaataaaaatactaattattggatttttagatatctcatccaacatccgatccgatccaattggatatttgaaaataacatctaatccgatttgattaaaattgaatatccaatatttggcagtcaattatcattggatcagtcagtgctcaaaatatatgtatgtacatgtagtgcacaatagggaaataagactaaagatttatgttctcaaaataagaaaaatattaaaatatgttgtctagcactaagtcttatataatttaatctaataattattataaaatattgttgaatacttacaagaccatactaatacgtaatagtaagctcacaaataagaatttgattagaccataatgatgatggtgtcaatgtcttttaactgcataaatataggcctatttaggcctagctaccatctaggtccagcattacaaaacatattcattacttaattaactatttatttccctttctttctacaaataaaaaacaaccatataaatacatacattattaatcaattaaaagaaaaaccgtttgttcatccaatgcaagaataaatctggcaaagttgggcctttaacaggaaaattacccacttttggaaatatataattattaatttacaatcaagagtgacctaataattaaagatctactgacaaaagttgattcgtccttatcatttttatcaatcaagagtgtcatgaaaccaaataatggacgaactcgtcaataaattagaagtgaattttataaggcagaaccaacaacataagatggtgaaaactaaacaaaatgataaatgtatataaaaaatatatatatatatatgatgagataaatgcacttttacaggaagaccactaattttgtttgacgcaatgatgaaatgtgtgtataaagcacccaattagatctaactctaattaagtaaaaaattaggaagagtcatgcccaaataaaatctgcaattatatttctcaattgtgtctctttttactaatctgtttggtaaaaaccggcagtacaattatataagacaaacaagtagaaacatacatgcatgcttata

SEQ ID NO: 263023 - DNA, 868 bp, Cannabis indica
agtctagatcgaacacgagcccaatctaaatccccgttaaatgcgaagccctgtcgaaggtctagatcacccaaaacttttttcgtccacctgcatacacacacagaaacatagaacagaggatgactaataatttaaattaataaaactcttcacatttcataccaatataaaattaaataaaatatcaaaatgataacaatttcttttacttgttcatatttcacaatcatggaatcgacactaccgcaaaatcaataggggaaatgttgaagtagaaccaacatccacgctagcatcgacgtcatcaccaatagatgaaaacgtgctggctttcgacaaaactggatacgaatgcacgtattcctcaaggctgccactctttccaacttccctgtttggcggcagaaccacgtccgggagccgcgcctccctgtttgggttcacgatggcggaggtagcccgtcaaactgagcaaaactgacagagagagagagtgaaagatgagggagagagaaggtcggggcattttggaatggaggcaaatggatctgtggcttctgtgcaaaaataaagagatggtgagaagtcgagcaagagagaaggccggggtcatggctccgttgagaaaatagagagagggtgagaggtcgtggctgtggtgcaaaaacagagagaggctgagatgttggttgttagaaactttagggtatttttttctgtgtttaagagagggaggggaaagagataagggttgatatttgtatatttatttatttattttttttgaataaaatatttatttatttatttttagaaaaaaagtaaataagcattggaacttattgggatatacaacattaattta

SEQ ID NO: 263024 - DNA, 690 bp, Cannabis indica
tgcatggtgaaacatttaggtcgaatatgccccttaatactataaaaatgacagattggaacaaaccttcttacttgagatcttatcctttttgaacttactggagactttgcttctatagacgacatttttgtagcagcaggtgaatatgctggaacactagattttacaaattttatttttctagaactttcagtaccatttgatccaagaccagcaaagcctctttgacctgcattctgaacttcctaaaaaatagaagattcagggttaagcatttgaatatttttcttgaaattttgaagttccttctgtaatagaatagttttctcatcttttaaacaaaaatcagtctcatattctttaatttttaattcaagagatttagtttgatgagacaattgtttatttatttttgacaatgatctattttcagaagtaacctgtatccacttttcatacataaccttgtaagactcagccagtgactcctcacagatttcaaattcatcagaatcaaaatttttttttcaatgttattattcaaacataccaatctttctttcacctgtgaatcacaaacaaacttagaaaaactgaggttagtgcagcatttttagatatatcttcatcactatcagtttcatcgtcacttcatgtcacatttaaacttttcttattctttttcta

SEQ ID NO: 263025 - DNA, 555 bp, Cannabis indica
gacttcataatagaggcattctacccacagttggtatccaacccggtactggtgcctaaacccaacaagaagttgagagtgtgtatcgacatcaccaacctgaacaaagcatgtccaaaagactgcttcccactccccagaatcgaccagcttgtggatgccatagctgaccatgaaattatgagtttcatggacccgtattcaggttacaatcaaataaagaagcatccaccagatcaagagcacactagcttcatgacggacatatgcctatactgctacaaagtcatgccctttgggctaaaaaatgcacgggccacatataaaaggatggtgaacatgatcttcacagatctcatcggccgcaacatggaggtgtatgtggacgatatgcttgtcaagtccaaaaggttgggggcatgtggaggacctacgcgagtgcttcaaaatcctttgcaactataacatgaagctcaaccccctcaaatgctcttttggcgtaggctcgagaaaattccttggcttcatagttaatgctaggggaatagaagcaaa

SEQ ID NO: 263026 - DNA, 751 bp, Cannabis indica
atatgatatttaagttcaaatatattaaaaaaaataatattttattttaaatttggggttttaaaattggaaaaattgaattttgggaaaaaatcccacaaaatttggaaattgtgggttggcagcccagtaggctgcaggtggagcctcgagaggctgcaaaacagccttccgcgcgcggagcttgaggagctgggcgagaatcctcggcgccagcagggtgattgtgggcggattgcagggcagacacgggcacttcagacaggatttgtctgagcacacgcgcgcgctgtgcctccttgttcgagggtctggtgtgcacggtgcacccatctcgacttagtttcaacccgaaacttccaaaattcataactttctcaatttttatcggaatcgagttccgtaaaaaacaaaattgcttaatttttcacaaggaatccaaataaaatattttcagaaacagaaaaaaaaatatttttcaatggaaaaaattctgtacaacacatacattcatcaaaccacatgaaaccatccaaatcaacacacaacatcgttctaattcatatttcaatgaaagtaaatcattaacctagctctaataccaagttgttggaaatattttaccaggatctagattttactacaatgtatagtttcattaacatcctaatatgaattctaaaacaatgaaataaacatatataaagtttaggaaaccttacattgggtgcagtcggaatataatgactcc

SEQ ID NO: 263027 - DNA, 548 bp, Cannabis indica
taccttctaccccataatctcataattggcccatttactaagtagtaaaagctgtatcatggtcaacttttttttatgtcataaaatagctaaaatcctccgtcgttggttccccttggacatactccttatacatctcataaaaccccagaattttgcgataactattcggggttacttaaaagggagagacatagtaatgtctgagcatggctttgacaaaaggatgaaagggtaaagttaccccacatcaaagaatagggatcgaaaccaccacgtcttgcgtggggataattgcgggattggtaaaaggaaagtgacgtctttgagacgctgaaaggcataaggtccctattcgaactgaatttaactgtgcaaatgtatgcaggtcagatttggtgactcgggagactaggtcgtcgcatgaaaagggttgattcagttgagcgtcgtcaacggaatccgtctcgctaccctcagcacattcttcctcctccgtcgcaatctggaacctcgaagtcttccaatttttcgacttcaatgtcagg

SEQ ID NO: 263028 - DNA, 983 bp, Cannabis indica
attttgatgccaaataaatcttacctaaacctagtggttgcctataaatagagagtgatggctcacacttaaagattgatgaaatttcttgtcttaaaaaaattgagcctcctacctatagcagaaaccacattctttctttttttcttcaaaatttttataccttgagtgatagagtgagtgcccacacacatcaagtggtatcttaatcatagtgtggaagactgtgaagaatccaatcagagaaagagatcgaggttcatatcttgataatactctgctacataaaggaattaagggctagaaaactgaacgaaaggagtcattatattctgctgcacccaatgtaaggtttcctaaactttatatgtgtttatttcattgttttaaaaattcatattagtatgttaatgaaagatacttgttagtaaatctagatcctggtaaaataattccaacaacctattcctgttattatcgatgtgatttaggagcctataattcgtcgagcagttgttccactcaggttgaccagcacacctaaattctaaattgaggtaagattagtataatatcatgcatatgttattccatgtttagcgtacatgttgtttatgcccgtgagattacattgatagcagtaatagtatacatagagttgtgctgattactgataaatttatgttggctaaaatacttatcgatgctataacgtcaatatggctagagtatgactagcatattgagtataggatgacattatggtcgatagtgttgtcatatgaacattctagactcagtaccgtgtgggacacggggattagggttatgatcgggtgtatgggcgccaagttgtatgcatcggaatggaccgatattgaatcctcttctgtacatgactccctctactatgatataccgtgaaactttccttctcattttctgagcctcatttctgttatctgggagttccccagagttga

SEQ ID NO: 263029 - DNA, 506 bp, Cannabis indica
tcctcaccaaacacataaccattcaagttactaaaactaccttgtcattcaacaccaacctaattatttgagtttagaaaaacaaagatatcaccactctttcgaatgaatgggcttttaaaaactgcttctaggcttctgaagctctaaaaacacttctgctgctagttggataactaatgaatttcaacttttagctctaaaaagtccttttaaccgaagtcactttaggctttgtttgactaaacttttactttctacctcttaacttctcatgaagagcgctcttcctaagaaagctactaaaaccgacttctgttagagttttttaaaactaaaagttgaaactcactagctacccaatcaccaccagaagtacttttggagcttcagaagtccaaaagtaacatttaaaagcccaaccaaccaaggcctagtaacctattcaagaggagaaagccgaaaggctaaaagctaaaagcaaaaagcaaaagtttaaccaaaca

SEQ ID NO: 263030 - DNA, 680 bp, Cannabis indica
atatataaaggagaagaatgaaatagtgacattgcagtttgaaatcaccccaaataattttttctattctctccttaattctctcatttttataattttaaattttattttattatttttcctaatattttatttaaaaaaacttgaactatgcctactaagtttatttttcttaatacaaaaaaaattgcatatatagtttattatttaattattttcataatttttattatattaaatttgtataattattttcttaatcacacatctgttgaaaagggaggatgcttcagaaagggcattggacgacaatctccaaacaaaagtttaacttttaggggagtggtagaggtccagattttagaccaaaactttgttgaggcagagaaggaagataaagagggaagatcttgttgtgaaatggccaaatggtaagcagatttaacagtgaaaaaaccagaactttccctttcccaaatcatatcatcacggccgtaacacctagaaacaggaacctcaagaatgtcattaacaatagaatcatcaaaatagcatcttaatttagctacatcccaagctcctgagtcattaataaagtaggacaataagcaagaggagagagagtcattgctgttcaaaaacttatttttgtggttaggaatccaatgatcatccagagt

SEQ ID NO: 263031 - DNA, 1528 bp, Cannabis indica
ataaataggggcaaaatgtatagaaaaaagaatgaaaatccttgagagaaaaaccctagttttgtatcagagaaatctaataagatagactcgtgaactatgcgtaattttaactacaaaatcacgtaaaaaactttgtgtgatctttgcattattcttcttatttttattttctattatttctgtgctaatcctatcacgaaaataggcttatatcgttaacaaaaatctgcgttaacaagtttaaatttaataatattttactttaaaaaaaaaattaaaaacacttcctcttattagagtaaagatttaatttactatataataagaatggaaaatgactttatttttgtcgttttctactttttctttattttttttatctattaataattttttattattttttttcaaattattttttgtacttatattagcatcttaaggtaggtcaataacataataatgtggtatccaataattgactaacaaattttttttattatcttttatgaatgatctttgtcctatattaattttttatcttttatatttttttacaaattattttttgtacatgttattggcatcttaagggggtcaataacataattataatgtggtacacaataattggctagcaattttttttttttttatgaatgacctttgtactataaattttttataattaatttttcgtactattattgttatatagtaccttaaggtattcaatacaataccgatatgatacactattttatcaacaattttttaaaccttttattaaattaaaatttataagaactgatattgaaatgcaccaataacgatattttaccttttgtggtgtttgacaccttaatgtgccccttaacattttgttattaatatgtacatatctttattagtttcgattgtgtttttttaattattttttatgaatgatctttgtattctattttttagtaaataatttttggtatttttattgatatgtggcaggttaaggtgctcaataccatactcatgtgatatataataatttgttagcagtttcttaaattatttatcaaattaaaattagtgagaacttatattgaaatgcatcaataacgatatgctaccttttatggtgctagataccttaatttgtctcttaatatttctattattaataagtatgcatctttattactttgattataattttatttaaattttttaattatatataagtttgcaagaacatctctaatgagatatgtaaaaaagttttatatatttggcaaaaaaaaatactttgtgatatatttgcatcaatttttagcattatgttccaatacacaattacaaaacttgatgcaaattttttttttcttttttgttatgaattgtctttatactattttttttggtaaataatttttttaactattattgctatgtgacacgttaaggtgctcaatacataccgattgatgtggtatccaataattagttagcagttttctaaattatttat

SEQ ID NO: 263032 - DNA, 1048 bp, Cannabis indica
aattgatgatttttttattttttaatgactagaacaaataatatctataattgtaattaaatgtgctcatcaaatgagtaattaaataactaatgatgattagaaataataatatataattagaggaattattttacatactatttttttatttattttttaaaatttacagtttggattgtcctagtaatttttatgtggattattatgtagattttaattgcgatttaaattattttgatggttgctatataagttgctatgtaaatttcggtaaaaatatataaacaaaactactttacatgtaaaaatgataatgggattactaatatcactcctaatatatatatttatataattgagtagtagtattattatatattttattttaagttaatctatataaaactcttatactaaatatatttgatgttcatgcaattaattggatgttattccaacaacaatagatgctcagtctcgagaagcactttcagcaccttatacagcttctgatgttctcaatgcactaaactcaatgagtgatgataagagccctggaattgatggtatgtcagtcatgttcttcacaaattattggcacattgttggctctcttgttacagaatcagttttagatgttctcaacaaaggtgcggatcctactctcctcaacaaaacgatcattacactcattcctaaggttaaaaaacctcagctaattacacagtaccgtcctattagtctgtgtactgtcctctataaattgatttccaagtcaattgtgttgagaatccagccattcttgccattggttatttcagagtatcaaagtgccttcatgtctcaacgattgattactgataatgttctcatagcttttgagctgctacattcacttaagaatcgaaaacgaggaacacaaggatatgctgccataaattggacatgtctaaggcttttgaccgtgttgaatggcactatgttgctcaagttatgttgaagatgggttttggttcaatcacggtgaatcttattcttcgatgtt

SEQ ID NO: 263033 - DNA, 1358 bp, Cannabis indica
tcttctctttttatctttcttacgaaaaataaaaaatttgtaaattccgcttaaacccaaataaaaaattcctccaaaaacgttttctcaagtaaaaaaaaagagagagaaaaaagaaaagaaaaaagtgtctcagttgatcatcttcacagtagcgaatccccttctaaagtcgatcaaaaatgtgacaaaccctaaagagagttgaagtaattagggtgcagggtatgagccacttgtcgcgaagaggccagaaagtgagagaaagctagtgttttatccgtgaatccaaacagcacattttgattttgtcttagtttaggtgttagcgtgtggagaaggcgagtgtcgtattgttgaagaaagaatggaaaccttggagagaatggatgccatagaaggttgggcagagctacagtaagactgtaaaagagtaatgagagaaagaatcggcgaaatggaagggatgagagagagagagagaaagagatattaatctgagtctaagctcagagtcagatccatccaagtgaataataaccaaacacccccaaattatctcacatacacagaaacacaatctctcctaacttatatttacgaaatattatataatattttaaaatatttataaatattattatattgcatatttcttttctttttctctctcgaaattaagtataatttagattaaccacttcactagaatagaggcttataagatggaatctatgaaactgaaaaaatgtaatataaagatatttctattgaaaaaaaaagtgtaatttaaatttggattgaattttcaaaatcaattatttatagtaattgttttgcataattcagttattttgaaaaaaaaaaaagtgtaattgtttagctagtatggtctgataagtcccttacttgttcacttagctcaagttttactcgcagattggactcgggctcaagattcaacatttaatcttacggctgcatttcttaaatatgtcgatggtgctgaaacttgggccaaaccagcagaaaacaccttgaagattaatgtagatgctgccattttttcagaaactgcaacttatagctttgtagaggtgattagggataaaactggcgtattggtggaagctttgggtgttaaggagacattaagttggattaaacggaaagattggaggaaggttgtcattaaaactgatagtcttactgtggtgcaagcgttacgtaactctattcctatggtttcatagagtattatttttgattgtaagatgttgttaaatgactttagagatgtttatgtcaattttattagatgttctgcaaatagtgcgagcatcctatttagttgttga

SEQ ID NO: 263034 - DNA, 2626 bp, Cannabis indica
gaccaggactaggacaaagacccggacgcgaacccaaacctaattaaaaacgtagagtgagacccaaacccgcacctagatcgggaccaaaaacccgacaaaaactgggacattgacctaaaatcaggacagggacttgggcagcgaaactaggaccgggacccaatacccgaccctagaccttgaattgaacctaggacccagctcgtgacccgacacccaaaatggaatcaggtggggatccggatctttaaccggggcttggaccgaacctgtagttggtgtctagatgtgggaccagcctcggacccgaacccagacgcggaccgaaacccagcaccatagcgaaccttggacctaaactcgtaccctgtgacctaaaattggaaccgaaactgtaagtagaccacgacctgggaatgggactagaaccaggacttgaatctggacttgtaaccgtaaccagacctggaccatgacccggaaccgtagtcggaccatgaacaagactccaacccagacctagactcgaactgggaacgagccccggctccccacccagacctggactcaagacccaaacctggacccgaactctgacccaaacattgaaccaaactcgggacacaaaactttggtcgggacctagaaccgcaccccaatctcggtcccaaaaccaaacttggacttgggaaccaagacctgaaccataacaagatcgggacacgtgtcggggatccagatctggaactcagaccaggactcgaacccaggccaggaccccaacctggacccctgacctagacccgtgacccaaaattggaacctgaacaagaaccgcaagacgaggatgctcgaaaaagactaagaccatgacaaggaactagacccacctaagaaccgaactcggaccctagcccatggacccagaccgggatcgaaactcggggacctagatccagaccgagaccctgaccctaaccgagacctggacctgcagtcggacctaacctaaacctagacccaaactgggatatagacttggacccagagccgaacccaaactcggaccaggacacagaccccaaacaagacccggacctaaacccaaacccagacactgaatcaaaatcgaaattggcaaaaggacccaaaccaagacatagacccagaccgggatctaggagccagaaccgaattagggacctagacttgggcctcaaacccagacgcatatcagaactcaagactcggacccgaaacatgaccaagactcgaacccagattaggacccataccgagatcaaaacccaaacccaaacttggaccaggagttgaaccccgaccatgtcgtagactcggaccgaaacccaagactcggaattggatgggggaattggactcgggacacagacaaaaaaattaggaccgagaccgaagacctggccccggacctgaaccctgaccctgacctaagacccgtaccgagacctaggacccgaagtggaaatagactgggacccagaaccccgactcaaactaaaacccaaacttgaactcggaatcgtaactggaactagaaccggaccaggactaggactaggaccaggaccaagacccaaacctaaataaaaacgcagaccaagactgaaacccgaaccgtgactaggacccaaacccgaacctagatcgggacctaaaacaagaccagacgggacctagacttagaatcaggatagggacttgggtagcggaactaggaccgagacccaagacccgacccagaccttgacttgaacctaggacccagctcgtgacccggtactcaaaatggaaccagaccgagacccgagatcgagatctgaatctgggcttggggcttggaatgaacccgtagtcggtgtctagatttgggaccagccccagaccccacccagaccaggaaccgaaccaagacctggagtcgaacccagtcccacacctaaacatagacctgaacccgtaccctgtgaccggaaattggaaccgaaaatggaagtagagcaggacccaaactccaaccaagacctagacccgaactaggacccagactcggatccctacctagaccttgactcgagatccaaactctcacccaaactcagacccaaacatgtaaccaaacttgggacacaaaattgggaccgggacctataatcacacccaaatctcagtctcgaatccaaacttggacctgagactcaagacctgaaccagaactagaccgggacatgtgacagggatcgagatctgagactcagagcaggactccaacccagaccagaccaagatccaaacctggaccctgaccctgacccgggaccaaaaactgaaacctgaacaagaaccgcatgaccaggaccctcaaaaaagactaggaccgtgacaaggacccattgccagacctagaaccaaactcgaacctcgccctatacccaaaccgagactggaacttgagacttgatccaaacccgcgtccttgtcgcggtatgggttctggttgagtttgggtttaggtttgggtcctgttacagtcccaggtctgggttcttgttccaatcctggttcgattctgattgtgggtcca

SEQ ID NO: 263035 - DNA, 1548 bp, Cannabis indica
tatcacttggacctcctcaaaatgaatggtcactatggcgcatctcacagtaagtaaactaatttatctttccttgtgtttttttttttttttgttgaatcaaattaggctgtcgttctgtttataatgtatggatttttgtgtcgttgttgtaaatagataatagagaggacattattggttacattccggggatcaaggctattgagccaaatgacatgccttcttacattagagaacttgatgtctccaccaatatgcatcgagtcataaacaacgcattcgaaagtgtgaaaagggcagatatcattctttgcaacactgttcatgagcttgagtttgagcctatttcggccattcaagagaggcagcccatgtttgcaatcggcccactatttccatcaagtttcaccaattctcttgtgccaaccagcttcaaacccgagttagattgcactaagtggctcaactccaagctccctaaatcggtcttgtacatctcattcggtagctttgttccatgtgggaaggaagaaattgacgaaattgctcacgggcttgtgcttagcaaggtgaatttcatatgggttcttcgtcctgacgcaactagttatgaagagccatatgttttaccaaatgggtttgaaaatgaggtgaaaggccgaggtttaatagtgacatggaccaaccaaattgaagtgatctcgcactttgcaataggaggatttttaactcattgtggttggaattcagtgttggaaagtgtgtggcatggtgtcccaatgttatgttttccgttgatgactgatcaattgactaataggaagttgttagttgatgattggaggattggggtcaatctttgtgacaagaaaccattggataagtttgaagttgcagagaaaatcaacaatctgatgtgtggaaaatcatctgatgaattgagggtgaaaataacaaaggtgaaggagataataaagaatagcttagctcaagatggatcatcagagaaaaatttgtgtcaattcattagggatgtgaagaccaaaattagtggtcggccaagaatgtaataacagcacgtttggttgggtatagtaggctttgaaatggaatttatgttttccattgaacttttgtaatagttttccaatgtcatgagtattatttcaattacaaatatctgggtgaattgattagggtggctgccaagtggttgactgaaaagtaattctagtgtattcatccctcaatggagggagagccaaatgagagattgataattacattaggctatgatatcgtggcgtttgttcgtaactgttatgagtatctccattatacctatgaacttattttgtaatgaatatgaggtttaatttgttttcaagtttcaatgaatatgctaatttttttttaaaaaaaaaaagtataaatagactaatctactttaaaaaaaaaaaaaaaactcaaacatatatttatcattttattatggactatttacgaaacatatgttatagtttacatatatataataaaaaaaaa

SEQ ID NO: 263036 - DNA, 678 bp, Cannabis indica
tcacctagactttacacacagatgctaagcccattaacaatcgatcaccgacaacatgggctagcacaacaaagaactatccaatcaaccaaagttttaataaaaccaataaaagttaatgtaagcccaaataaaaagtctaacattttttttgtgtaatgtggtctacaatattatttctaacgttatggccaacctatttaaagtggtgctgccactagtaatttctgacacacaaagtgtttgtataccgagtcggttgatttcctttaatatcatggtgtcatttaaaattatacactacttgaaacgtaaggtttctaagaattgatacgagtaaagtgtataatagggtggaatcaagtttatatttaaaagccgaaacttaattctcgtctcaaaaaagcagcacaactatcaaaaaagcatcacaactagtctcaaaataccccagaaacaaaactccgagctcacatactccataacagccacaaaacacaaagtcatataaaatctaaaacttttcccatggaataaaagaactaatccataccttagctttctcttcaagtgacttactcctatttgttatcgaggagccgttggacagaaagaaatcaagaaaacaatagttccttggcttggtttggtttgatcgagaaataagacaagggtttg

SEQ ID NO: 263037 - DNA, 556 bp, Cannabis indica
gtagagttagagatttcagattgatttttagacttctccaaaatcactgctccacccccagggtcatcaccatctcattagtagactttctagcactaaggcaagtctagaaacctgattaggtgtagtctaagagtattaaaataccaccattatcgactaacatatagttcttcttcttgatcttaagctttacttgattgtcttccaatgtttctttcttggagtaatctgatacctacacattactcccactcaacaacacgtgtctagtctaatgcatagcaaagcatatctgagacctctcactgttgatcctaaggaattcctttctttggcctttatcttttttgaaatagttgaaacttttccttagataaataaaatctatgtctagaagtcgagaagcttctctagattgccattagaaacatgcatcagcatcttactaaaataagttgcttgcactagagtaagtatattactaggtacaccacaagccttaggtttagataaacttaaacctattataacactaggaacatgaagttttgtt

SEQ ID NO: 263038 - DNA, 748 bp, Cannabis indica
aaaaaaaatctcacataatttaaacaattaagaatgttgtattatagttcgtgtagtgttgtttaaatgtattgtggttaataaatataatttaacccaattaataaattattattcttgaagaatgcaacatatattattttatttcttaatttattttcaagtgtaaaacaagaaaaaagaaagaattatttattatcataaataacttaatgcaagaggtttttttttttttgttagtattatgaattatctttcttacaatttttcttatatatattacataattacaaaaaataaaaatattaaattttaaattctattcataattaaaactacatgtttgttttaatataaaattttaagaaaattattaaaaccgcgcgaagcgcggcatcattctctagtatatatataaaggaaagcattaaggagttgaggtggcaatttgtatgagtttttcaccctcttctttgatttctcaatttctcaatttttctcatttatttataattttttatatattatcaaataattaatgtgtcttttcatttctataacttacactattatgtactctctattattatatcactttctataacttacactattatataatctctattattactatattataattggtatataagtgacttttgattgtattttcttaaatgcaaaatgtcataagttttgaccatttagtttacaaataatattatgatctctatataaatacata

SEQ ID NO: 263039 - DNA, 1409 bp, Cannabis indica
taaagttggtcttttttttggtgggattttgtagactgctcagattttatatgtaaatatgtatgtatatatgtaggggtgtgcataaatcgattcaatccaatgagaaccgactgatccaattacaaccgaccgccaaacactggatatccaattgtgatcgaatcggatttgatgttattttaaatatccaattggatcggatcgaatggtggatgaggtgtcaaaaaatccaatacatctaacatccaatcaaactaattagtattttcatttagttttaatgagcaattagattttttattcttttttccttggattggatggatccaatccaatacatactggacctaaaatattggatggatccgatccgatctaaaaaatattaagtctaaaatattgaataaattcaaattaaaccaataaatataaattaaaccgatccaatccaacatctaatggatgttggatcaattggatgactaaaattaattagattggatcggatggtaaaatctaacatccaatatataactgaatcgaatctagattgatctaaaaacaattggatcatgtagtccaacgaaacactctatatgtatttagagatttatatatatatatatatataaatatttataaattccaaattaggttatgtttattttgtgtttttttttgtttttggctttgtttgtaatgggaattcggcatacactcaaaaattaaaaaaaaaaattgtaatatgtgtttagaagtaactgttggtgtttaaaaataaataataaagaaactgtattattagagtttttaggttttatttttgattttgtggatatagcttgttctaagctgttcttagaactttagtcttttaagcctgcgacggcatagttaaaaggatgtaacagtagtatgcattataactcactgaaggaaacaggaaaacatgaaaaaaagaagtgtaaattatagtataactacatatacatatacataaatatatgtgtatgatgttatatataaataatgaaatacttcttcatgcctattatccattaattggtattgcccattcatgagtaataaacaaatttaagtataaataataattttcaaaatattaaactatttgattttggtccgatagcgaataataaaagagtaatttgaatttccatgcttaatttagctgcttaattaaagaaaatatcaaaaaatacctcttcgtacactataccaaaaatatgtctatatgaaaaaatatttaagtcaaatttaactttttttatcacttttttgtctaaaaactgtttattttattaattttttttttctagttgatggaccaatatgagcccatataatgtaaaaataagaattttttctaattaaatagaaaaatt

SEQ ID NO: 263040 - DNA, 1903 bp, Cannabis indica
caatttttactatttgtttatgtactaaaccatgctcatgtcagatttttttactaaaatttgaaaaaaaaaatcctttaaaatccaacaattctgaatagtttcaggggcatttttaatgaccttaaaagtttaaggaacataatttaatatgtgccaaagttcaggggacaaaaattctaattaactagagaaattattaaaataatttggttttaaatgacacgaaatcattttattagctagagaaatttgtattttctctttgaagtttatatgattcttcttgctaaagaaaatacatgttgatttgtatctaaaacaacaatttacacctttgtcccaaaaaaaaaaatggggattagctcagctttacaagaattcttacagcttaagtcagatacaattatttcttatttcttatttaattttcaatgtttttctttttttttttcgtttattttattttttggttgaatgacaaaaatgagaaggtacaggtgaaacactttaagcattgaaaaagcaaagctggttctcttctctccaattaatatggaaaagtctgttcaagaaccatcttcaatggtacagccttctttgagctctcaccttgtttccaaatcttaaaatctggaggaaagcacttatgatcatcattccaatttttcaacatcaatatcgagaaagggccttgtatatctccctggggatctaagtaatgccacatggtcgaaactggagctggagccggagcctgagttggagctggtagttcatcttcatcttcgtcgctcaaatcaatcaccactttctcctttaccccattagaaagcttcttttctggtacactctcggtttgtgcttcaatttcagattttgttggctccttttctgactcttgcaatgaattgctatgctcagatactacattataagccaaacgagaacaagaatctggtaagttaatatttttttgtgcttgtagcatgcattagtccaaaaagagaaaaagaacaaaaatggttggagaaatggcgcaaattgggaatcggaggttgttaccctagcatttgcatgataaaaagctattaggaaattctatggtgctgcccccaaaaaggggtattcaaatagtttcaatcttactttcttttaataaaacaatattgcatcgtagttatctaagacatcttgaaaatcttcgaaaaattctaaataatttaatgtgtcaaatagtcatcttttattttatacatttataaaatagacagactgaactcattaaaaattttacatgtcttgaatatgtacattgtcgtatataataattactattaaaactatctagatgtcgaaaaaaacaaagagggttcattaaaagcacccaaagctaatttttccatcagtatcaataaaactaaatagagtatacatcctaaaacattcatatagaattttagagatttgatgaaaataacaagtaataatgtaatatagaaatgtaccttcagaaattaggtcatctatggcccaagttaatgcaaattcatcttcacattcgtcttctctagtatcaaacatattagcctccttagatcctgggaggattgatccaggtgaactatcatttgcttgttttacttcctctggactatgctgtggatcaatttcaggttctatatcttctgcaattactttgggaacttcctgaaatagttttgactgttcatccgccgtctcaagaagttcccttctttctaagtactcggccagcgtgaaagagaaaagttaaggatcaaacatcaaacatcaaaaaccaaatgtgtttctatttcacattattttaacaaaaatcatatctatcggaattcggaaacacccatcagctctgttattgcag

SEQ ID NO: 263041 - DNA, 882 bp, Cannabis indica
ctttcaaatgtcaggttcttttttattgtattttctttcagtttttttttcccctaaaaataaatcattttaaattaattgctttgctctagtagtaacctgtgcaccacaattgagaacttaattttgttaaatgtattgacaaagtcatccatcacttcagttttgatttcccttttcactattgaaactgtacagcacagttagatttttaatgaaaggaatttctagaaaggaaattcattacataggtgattatacactaaattaatatttgcgatttgacaggattcagctcgagcatgctatggacccaaacatgttgaggtagcccatgagcgcatggctgttcaaacgctgctcatcacagacgaactcttcaggttagtaatgttggacatggcaggtcaaatggcatagttctctttgtaatcttgaataaagttctatacatttttttttgctggtttggtgctactgtcaagcattttttccccctttgtttatgaaaccccatttctttactgaacaatagtctcttttgggtggacagaaatgctgatttagttgccaggcggaggtatgtcaatttggtcgagtcagtgaaggattcaggcggtaatgttcatatattttcatctttgcacgtctccggtgaacgtgagtattatcttttgtcccttgttactttcttactgataatttcatgaattcattatggatatattataatcttttacaatttcaatatttatgaacagaactggcacagataagtggcattgcagcaattcttcgtttccctttaccagaccttgaagacttagaaatgtgaagaagcatccatcttgttcttgtgttttctatatttttctttttata

SEQ ID NO: 263042 - DNA, 1008 bp, Cannabis indica
gcatcatcttcgaatggtattgtagtgatttagggaccacaagttgtacgcaaaatttaaaaagtgcgaattctggttgtctgaggtgtcttttctgggtcatatcgttgggaagaatgggattatggttgatccaaacaaggtggagtcagtgaagaatttgccgaggccaaagtttgtgacagaggttcgaagttttctcggtctagcagggtattatcgacgttttgttgagggattctctaaaatatctatgcccctaaccgaatggactaagaaaaatcagaggtttgtatggtccgataagtgcgaaacaagtttccaagagttaaagcaacgtttgataacagctctggtgttagctttgccatcagatcaagagaactttgtagtttattgtgatgcatcaagacagggtctaggatgtgttctgatgcaagctgacagagtcatagcctatgcctctcgtccactgaaacattatgagcaacgttacccaactcatgatctagagcttgctgctgtagtttttactttaaagatatggcggcattatctttacgatgaaaaatgtgagatttacactgatcataagagtcttaagtactttttcacccagaaggatttgaacatgagacagaggagacggctggaattggtaaaagattatgattgtgagattatgttgtggtcgatgctttgagttgaaagggtccccgacaggtttgcaccacaatgatgatatcccctcaactagcctctgaaatggttaatggagggattgagatcgtagtatcgaaatggcacaatttgacatttcaatctgatctatgagaaagaatcagaaaagcgcaattggaatatcccaagctagttaaggttcgagacgaagtaatggctggtcggcctagagacttttcagtctggaacagtggaatgttgttatacaaagctcgagtttgtgttcctaatgttgatgagcttaagaaagagatacttgatgaagct

SEQ ID NO: 263043 - DNA, 943 bp, Cannabis indica
ggttttataaaacttacacacaagcttaaaacacataacctcctgacaacaaatagaattggatagttggatgtaggatttatttaatttaaaatattaatttaaaaataataaataaataaaaaaaatattttacggttttaaataaaataaaaataatatttaaaattaaacctacaattttgaaaaattaagtttcaactaacctaaatatcatttcaaaaataaattgctaactcaccttttaaatttcatgttattttataaattaaatattcaataaaataaaatgataaacaaatatcctttttctatttttataatttaattaaaaaaaaaataacaaaatttaaaaagttagcaaaatatcttatatctattcaaaatatcatgattatagttatcttattttaaatttaaataaggtcaaataatttaaaaaaaattatttaaaagaaaattattatctgaccttaaatttaaaattaagataaaaaataatcaaattttaaaaataagatagataattaagcaaaaaagttagatatttacctatttccaaattcaaattacactaatatcataaattaatttttaaatattcaattaatttaattatgataattataattgaaataggaatagtaatatctaaatacaaaactacacaaaaatttggaagttaatttcatgaaatagtatgaaaaatcgaagaaaattgaaaaaaaatgcatgtggtgcgcgcacaacagggaggtgggccgagtttctttggcgttggaggctgcaagcagccattctgcgcgtggatgagggctttaggacaacccaagcgtgttctcggacatgaggctgtccgaacacgcatctgaccgagtgtaactcggtgtccgcgcgcgtgagggtgtgtcaccacccctaacttttttcaaatcttcaaaaa

SEQ ID NO: 263044 - DNA, 549 bp, Cannabis indica
taaaataatatccaacattaatatatttaaaattaacttagatatgtttatagacatcttaaccataatatttttcaaattcaaaattagttattttgtaaaatatttaattgtttataaattataagttagaaaaataatatttcatatcattttacttatcaaaaatttataaatagtattttaaatgtttaaataacctagaatttttgtaaaattttgaaaaagacttaatttgagatattttgacatataatttggataattattatttttttattattttatcataaaaataataattgcctaaccatatctattttaaaattggtttattttttattttgattttattaaattgtaagattagaaaatgatattgaaagtatctatttagttattttcaaatcatttatcttattagatatttaatttaattttataaaataatttaaataacctacatattttaaatttagctagaattttaaattttaaattttgaagagatatttaaggttgtttttaacaaccctaaatttttaaaat

SEQ ID NO: 263045 - DNA, 825 bp, Cannabis indica
gcacgctaaacatgtaatctcatatgcatatcattatactaatcttacctcaatcccaaattttagtgtgccggtcaacctgagtggaactgctgctcgacggtttacaagcccctaaatataatatttacaaaactgataaatcatacgctaaatcactttctggggacttaaaatcaaaactaaaggtttccttatcgatggatagcatggcaataccctaagtattgctaaaatatgaaaaaccttggttccaaaacttctagaactagtaaattgaattctcaaaatggaaaaccaattattagggttctacatggggaaacgattaaccagttatacagagctaacacaaaccagctaactggttccctacaggaaaccctaaacatcccactaataactcaattttaccccaaattgtttccaactctctagaccacctaattaggtcacaaagagcattatttaatgaacaaatgcagatatagtctcctaaaatcgaatccaccatggaagagcaaagtttgagctctaaagctcaaactttttctaaactcaacaacaaacaacaattcaagcctaatccaagtcaaataactccaaaccaacatcagaaatcactctctaacataaactcgaaagctaacagctgaattctcaaaacagccaacaaacctaactttaaactttagaaaaacaaggagaagagagtgtgtgagcttaccttggattgattcttgtagttcttgctaaaacaccaagaaattgataaagaaaaccctagtttctactggttccaagagaggtcgagagagagagaga

SEQ ID NO: 263046 - DNA, 622 bp, Cannabis indica
taggcctgtagggttcgatgagcgtctttataggtttaggatgccctcgacccggtggggagaccatatgaaggagttttatttttccaacttaggagatttcctaggtcggtcccggatgggttctggtcctccggagcccgtccccttagacccttcagcttatatttcatccagctggttccggccttcggacagctatctcggagacgatgctgccagcattaagatttggaactttgctagggccgaattagagagtcagggtaggactagcttgtttgctatatctgagtgtttgttgtttcccacggatgttctaacacttgccttctttcttttgttgtagcaggcgtttccatggacgccattttggtcgaacttgccggggttcacactcctgaagctccccctccctttacttcttcccagatggccccccctctaaaggcttcttccagtgctcctccagacactattgacttagtggatgaggaggtgctcccgggagaaggtcaagaaaagcaatggggcttttctgaggaagttgaagaagctgaaggagggcaccaggctcttcctgaggaagttgaagaaagtgaagaagagcaagaagttgctc

SEQ ID NO: 263047 - DNA, 570 bp, Cannabis indica
ccgcccacacttctttgtcaagctagtggagcttgtgcattgacatagggtagatcacaccaattgctagagtttggtggatccaactgtctaaagtgattaatttcacttcccaaattatttgattaggtgtttccacccattcctagtccacatcggttgaaaattgatctttgagtgactcgctccccttgaggagggagagctcttctctagtcaaccatggggactgctggtggagtctggctaaccatctggactgctggaggagtttggccgaccatggggactccttctagtggttggcccgccagaagatggacagagggagttgttgttgagcctgagatccctggtcgcccccatgctgctggttatcaggattttgctgttcatcctccttctgtcaaagaaagatcagtcctagtccctaaggaactgggttgatcaacatgtttatagaccctccttggtcaatcaacaagcctttcttgaagttggcctctgatgagatcctagcctcttctatcggttctctagttgaactaccttatcagatcactggcctct

SEQ ID NO: 263048 - DNA, 730 bp, Cannabis indica
ttgtgaattcattaaataaaaaaacagataacataaattaaaatagactcgtttccacaacaaaatgactaaaaacaaaataacacacaataatccagaaaccgattatagattaaaaatataactggttttataacataataaataaaaataaataacacaacataacgcaaaccggttataattaaaatataactggttctgtaacatagtgaataaaaacaaataacacaaaataacttaaaccagttataattaaaatagaaccggttctataacaatgttataatgaaccagttttataacaatgttatagttaataaaaataaataacacaaaataactcaaactagttgtaactaaaatagaaccggttatatagacataatgaatgagtattttttaggtagctatgacatgagtgtaattatttggtgggttggagcatgttgaatggatgtttttgtttaagctattttatttaactggtttttgtgtgtgagtttttatcttagttgctttgtggaaccaattttttgtgttaaatttttaactagttgataaaaatacggtttctttatattatattgagttattgtgtgttattatttgtctttatttattttgttatggaactgattctttttatatttatgcctcaatattttttgaaattgatctccattttttttaaaaaaattataatcggttttatgaggtattatgtgtt

SEQ ID NO: 263049 - DNA, 666 bp, Cannabis indica
gataaaaccctccaacacaactcaacaattacaaagccttgacaagtttgagagcatctatatatataaggagttaaacatctcaaatatggacaaaagttgctattcatccacatatgttataaattgtccttgcaaagctacatagagcacaatagtaataacactattcgttctcttattataattaattcacctattgaataaaatgtgctcgatcaaataagacttcccaaccaacttctaattctttgcaaaactctccatgagtatgagcaagagaaaaataagtgtgcatgatcttttatgtttatatctcacacattggatagttaattagcagactcaacatataaatatttcttaatcaaattatctcgaataagaaaattaatctgaattactagccacattatgaagcgatgatttgcagccgataatgaacaccaaacaatcttctcaaacttgagcttagcattgttcgaccctagctagcattgtttgctatcaagaaattatatatccttatgattattattatttaataaaaaaactttattactcacaaaatagtttaaaaattatttttagtaaaaacaagagaatgtaaccagggacgaacccattaagattgatgtgggggcgtatagctcccacgaacaaaaa

SEQ ID NO: 263050 - DNA, 722 bp, Cannabis indica
tattgcatataaataattacacaataaaaaacattctctatataaaaaacgtctagcattgtcattaaagggttttaaagccttatttctaaaagagaagttttatctttgaggccttatcgcttatacataaataaaataaagcaaattccctgtatttgccatgagtgtaacagttattttaacatttatatacacttttattattatggatcttttcattatcaaatatagataaattattacgaaatgaaatcatttgttttacatttatacacttattatatgaatctttccaataattccactgatatttatcttagtatgtatatctgaaatgaaatcattgatgatgtatttatttattaatttattttgtcatatatgatttttttttgacaagatgacatatatctttaactaattactgaaaaaaaaatcccgtaaaatttcataaaaggtaaaaaaaaaaaaagttagagactggctaataatttattttactatattgagtcaaaaactttctacttttggtctcactagctattttcctaaagtacctgaactcagtagtttccaaactttgattatgtttttttgggttaagtaaatgtttgtacttagtattttgtatgtttatcagtttagcccaaaaaggaacacttttttagtattacatacatatataccaagtcatgagatatatacattcttataacaat

SEQ ID NO: 263051 - DNA, 4230 bp, Cannabis indica
tttttttttttttaaattgggaatagctggctatattttgaaatgtctctgtgggcagatgcgtgtcaatgttttctttgcttgagagaggaaatatttttacttttctttgcacacagtagtcatctatttattttttgatattttcatataattactggataatatgaggtgtcaattgtcaaaatttttacagaagtaaaatattctaatcttgctatctgcttggtcgatttttctggtaaagaaaagttggtatgttcggttaactgcatctataatggattcctgaccatgcagatcaaactttcagttcatttggcactgggaagagtgggcttatgttttagacctcccgaaatgggcccctcaacgtgtgtttgttcaggaagttttggaaagagaagttcgtttatcgtactgggacaaaattaagcaggtaagaatcatgctgaagccaattggtttacatgcataaaatggtcggttggttttccagggcagtgttattagtatgaatagcattgatattgaatttttggcatccattcctgcaagcatagtcagatttctaccaccagtatcagtaactgaaattgcagtctttttctgcttatatccatcttcatttgttcatttctttcctatgtgtagtggtgccgtgcataaaggagtcctggttatcaaaagtgatgttgtggaacagtcttttttgatgttactataattattatcaagaaacatattgttgttaagttaatatatataatacagtaaaatctttgtcattctagtggactagcattatgtagttgtaaatgttttctggtgaataataaatccgcattgtaataagttattattattatttttaaagtctaattgcctccacaaaatagtaataatctgaaatgtgtaaatatatattttatgttaccttgaaagttcatgatgaattagaatatttatctctaattgtttcagaattgttattaaatcattaaattttgagtaaataatagcttgccaacatagacacattcttattgaagtgagtatatttttagctacatccctactactaacttataacctctttaatgtaataaaattagtttggtcccaatactattgaggttttactgtttatttaaatatttatatgatggcaggaggtacaacagagatttatttttctgatattcttccaaacttgttgctgacatgtttttactgctttcatgtgtttatttcttaccatttttctagagtgttgataatgcccctggtttagaagagttgcttccgcccaaaggggggcccaactttgactttagagctgaagaaggtagtgaaaaatctggactttctgcagacctaaaaaacttggtgaaagggagggcaacagcccgtgaaatgattttatggatagaagaaaatatattccctgttcatggattggagattactctcaaagtggtggtgcaaactctacttgatataggatctaaaagttttactcatttgattacggttcttgagagatacgggcaagttattgcgaaactttgtcctgatcaagataggcaactcttgttaatcacagagatagcttcttactggaagaacaatgcacaaatgacagctatatcaattgataggatgatgggttaccgacttttatctaatttatccattgtaagatgggtattctctccagaaaatattgatcaatttcacacctcagatcgtccatgggaggtatggtactaagctatttaatctattattctttttatttttaaaaaagacacaccaatcatgtttcataaatatattctaaaatgttataaatttgtatgttcatgtaggtcctaagaaatgcggttagcaagacatataaccgtatctgtgatctgaggaaagagatattatctctgaagaagactcttgtgttggcagaagaaacagcagtgaaggccaaagcagagttggagactgctgagtcaaagcttacacttgtggatggtgaacctgttcttggcgataacccagtgaagttaaagcgtttaaaatcatactctgagaaggctaaagaagaggaagtgtcaattcatgagtctttagaggctaaggaggctcttttggcacgagctcttgatgaaattgaggtacatttttgtgtgtcaacaagtaaaaaaatgattctgaacactctgtctctaagcatgtatgcttacctgtatctatatgtgttcatttatatgttatcatgaatatattgaagtagtgtttgtacttctattcattagatttcctctgtgattaaaatttcccctggttttgaggcatacgtgcacagttctatatatatgtgctatatgttatcatgcatatattgaagtaatgtttgtacttccattccccattactagatttcctctgtaattaacatttcccttggttttgaggcatacgtgcacagatctttgagaagtcattttatctagtgttgacattttccattctagaatttttcttttcttctcttttctcctgtcagtttttcatttagattttcttgttcttcagtcaagtattgtatctggtttcttcatttcattgttgttccttctgtttttccatcttgactattgttggcatgtccaggcattgttcctctctttgtatcaaaacttctgcagtttgctaatggaacgtctgccagatgcatccatagttagaacattgcaggaactgaagtctgtccctgcagattccatggctgttgaccttgaagaaccagcaacaatggaggtggatgatgaaactggaaggcctaaaacaaggtttttaacctatcacattaaaaagaaaagttgctctctattttctaaggtaattatgacacaactaaaaatgtgttaattctggcagtcaattgaatggagtgacgaaaagcaatgtgtataacataggcgaaaaagagcaatggtgtttgtcgactttgggttatctgaaggccttttcaaggcaatatgcttctgaggtaattttgtttttttttttggaagcttctgacccttctgttatccaactctctcaattggattgctgttgacaataatttgataagcctaagacttatcttgtgtatcacaaaatgattaaatgaaatacttagggctcatttagtatgccgtataaaagtggtattgtattaaataataaataacactatgtttggattaagcaatgtattgtgttaattattacgaccaatttttttaatacataataaatgttccgtattagcttgtattataatatttacaaaggatttggggtcaacaccaatcttcgatccgggaactggacttggatccggactcggacctgaacccgaacccggtccgggactccgacctgtagttggtgttggaattgagtgtatttaaaatatattataactttacataatcaattaatacaagtcaatattaaacattgtattgtattaaataatactaatacaatacaacgcaatccaatacaatacattacaatacggcgtaccaaacgagcccttagtctcttatgtacatgagctgagttgtctttttaagaccaaacgagcccttagtgttttaattttattggttcaattgtaatcctaggtggcccaagtctttttaggaccaatgcttataaatagagagggagcaacctcatttagattaacttggaattagatgagagtagactctttgtggagagaccaatcctctcgaaagattgggaatttggagagacgagcctctcgaaagctcgatattgtaacttcgtgactatttttccgaataaaaatcatttgagaaattcattattgttatttattttgggaaatagctaatagaatatttctactctaagattattctatcaaattggtgcggtgagctgcgaacatggtgcccaagaaacaagcagataacggtttttcttccatggttttggaggacgattgtgaagatctgaaagttgcatcttctggaatcaaaggatttctttataattcaatacaagagataacgagacaacttaatcagcaattgcaagaatctctttgagacatgttaagcaacaattcaagactttcttggaagttcaagaaaaattaaaaactgtccaagaacccaaaaaagatgttaatggagttgctggcaacaa

SEQ ID NO: 263052 - DNA, 825 bp, Cannabis indica
aggtgtgttctgacaggttggcgcggtatagtcacaaccgggcatttcgggccgaaccgggttcgggcccgaaatgtaaattggattgatttaattggcattatatttgatattatgaaatctgaaatttatttgagaatgattgaatatgaaatgactaaattacccttgtgagggtgtatgtgtgtatttgagccctaggggcaaaatggtcttttgaccttgattttctaaatttaataaaagttgatttttatgagaaagaggaggaattttctggttatttgccctctctcccgtcccttctctctctctaaaccctctttgcattcaactttaaattttgaaaggaaaaagcttggtcttggcttgatttgaagctagagtttggaggaaagatcattgttcttgctttggtgtgaattgaggtagttttacagacttttaattgagtttttcttgctgaatttttatggtggcaaaaacatggaaaagtggttttgatcttgtgaatgcatgtttgtgtttttgagttaatttgagcatgttattgtattaatttttgtgtgtatgatgcttagaattttaattaagctttagctgggattttggaggtgatttttagcttgagccaatgtgtttatgagatgttttcatggctggatattatttgagttgttagagatgaagctcttattcaagagcttgaagtgccatgtttatgcatgattttgagaggattttacaatctgaaattatgaagtttattgttggatttgatgcatgagatatgtgttttgaccctctgatatatgctagcagctc

SEQ ID NO: 263053 - DNA, 927 bp, Cannabis indica
acggtatatcatctagagggaattatgtatagaagagggttctccatgccattgctcatatgtgttactcaagaagaagctacacgacttctatttaagatgcacgatggattttgtggaaatcatgccgctgagcagagtttatcaagaaaattctaaggcaatgttatttctggccgacaatgattgaatattcaaaggcctatgttaagaaatgtgacaaatgctagagattttcgaagatagctcgagctccgcccaatgagttaagtcagatgcaaagtccgtggccttttgccatctggggaattgaccttatcggacaattacccaaaggcaagggaggagtgcagtacgcagtggtaacaattgattacttcactaagtggacggaagtcgaaccactcgcaaccattacatctaagaaagttcaagacttcattgtgaagaacataattttccggtttggattgccgtacaaaatagtttcggacaacggcaaacagtttgacagccagtccttcactgatttttgtgcaaaccatggtatcataaaaagtttctccgcagtagtgcatccccaagaaaatggtcaagttgaagcagtcaacaagaccctgaaggatacactaataaaaagaatcgaggatgctaaaggaaactggccgaaagagcttcctgaagttctatggtcataccgaacaattgagaaaacggtaaccggacagactccattttccatggcatgtggatatgaagctatgctgcccgtagagcttgagccaccatcccacagaagattaacgtacaaccaagagacaaatcacgtactcctggcgaatcacttgatgaaatcgaagagaagcaaaccacaacaaacttaaagttgatagcccaccaacaaaaagtagctcgatatttcaataa

SEQ ID NO: 263054 - DNA, 875 bp, Cannabis indica
gattatctttggctatgatgttaagattaaaaggttattgagaaccatggaggttaaagcgaaaatagtatgatgttttattcttgaaaggtgggtaacctgagaagatcaatggaatattagaaacatgttgtgagcatatttaataaaggatagattatcttagaataatctcttccctgatgaggtttttatttaaaagtgataattaaatgtaccacaggttaggtaccttaataagtgtggtacaagagaaatattagatacctgtttactgaggtaattaggctaggtagcctatcagctagccttaactcctgcgttgtccggagtatataatgtgtttcatgtctccatgctgagaaaatatgtatcagactggacccatattctgagctgtgatgatgttaaagttcagacaaatttattatatgggaaaaatatcttgtccatgttttggactagaaagaggaggtactataaaatgagacagttccactagttaagaaattgctgtaaaaaaaatatatacatatatatagcaaggtagaaacagcaatttgagagttagaatcatagatatgggggtaatatcccaaattgtttaaataaatttcgaggaggaaatttctataaggaagggatagttgtaatatcccaataaatctaatggtaaataattataatcaggtaataagtgggattatgatcctactaatttatttcagtatataatcgtatttgttaattaccgggatttatttgaaatatgtggatataatatgagttctttgtgaaataaaaatattttcaagtttggcgaccctggagacccgattggaggcaaaaaatgtcacaacagttttagttagaaa

SEQ ID NO: 263055 - DNA, 638 bp, Cannabis indica
tcaagcttaagtggtcggccatagtaatgggcctcactaggtataatttttctattttatttcatagtttatcgtttctttcagtaatgccacatttttcaatttctatcctataaatatcaaaagtatttatttaataattataatcaattatcaaaaaatattaccatttaacttatttattaattagaaatttcttcacaaagcccttgcttagtggaaattcataaataagacatagtctaatgttaaaattataatagattaataaaaaccaattaactaagtctacaagcaatattataccaactagtatgaggaccatggccctatgtaatcaagcttacaataagtggtcggccatagtagtgggcttcactagttataatttttctattttatttcatagttcttcttttctttcaataatgtcacattttctaatttcaatcctataaatgtcaaaactatttatttaataattataattaattatcaaaaaaattaccatttaacttacttattaattagacctgacaaagtctcttaattaataaataaaccctaaaacttcttctccttacaattaagcctttgctgagtggaaattcataaataggacatagtctaattttaga

SEQ ID NO: 263056 - DNA, 607 bp, Cannabis indica
atctttccttttatttttgtgtatagatctctggtatatggtgttccctctcgttctctctggttgaatttctctacagacgatggctgggcttgagtctgttctacggttccagcttgttagggacagagatcggaacttgaatcattgtgactaagttattttttctgattttttttattcaaatgctcatacgcataattatgggtttacattgttcttgtattttattttaaacaattatatattcttttcgctgttgaaaatatattactgtaatttattttagaattctatttttctttgttcatttgtataaaaatcatctgagtattgtatgtaagtaaatagaattttgattagttattatagcattaatatccataaaaattaatttaaattttatttaaaaaaaaaaactggtatcattttttttaaaatgaaatctggtatcaatccaattttacaataaaatttaattaaataatatataaaattagcaattatatatatttatttactgtttctaaaaaaaaataatgtattacattaataatatatattattatttataatacataaaatttaaattaaaataattaaatat

SEQ ID NO: 263057 - DNA, 575 bp, Cannabis indica
ttgtcatattatttctcttagaatcaatttaagtaactattgtttaattaacaatattttaaattatgaaaacttacgtataataatttaaaattatacattttcactaattttaatgaataagtttttgataaaaaatttatgaataaatgtgtgataattctttcatttaaattcttattaaatttaaaatatattaataaaatcaaaattaaaaaacgataaaaaaaatctcatctgcatgggattatttatcccaccctgctggatgggataaataatcccaaacagatgagattagctggatttattatccagacttctgccatgcccaaacattagattggacaaattagcctatctaatccaatccagtcctgcgtaccaaacaggccctaagattaaagaatcagattagcaaaccctaactagttaaatgtgtattaatgtggaattatattattatataatttaatatatatatatatgaattatactgataaatgacatgtaaagaccccattgttgagcgaggggatttttataattttgacccaagaagggtaaaactgtaa

SEQ ID NO: 263058 - DNA, 539 bp, Cannabis indica
ttgtattaagtttttttcaatgtgtttttgttcaatttttgctggaaatttatttttacatacattgtgattgttttcatttaattttgttatttttttgtttaattatatgttttttgatttgtttttgttttttagatttgtttccatttctatttttaaaaattaaagtatatcatctggtttttttttcttcattttttttagttattattattttttttgagtttataatttgtttatttttttagtgttagttatttttttgtttatgcattgtttatttatgtttatttttatagttgttgtagtttttatgtttaattgattttactattttattttttcaattatgggataataaatttggtattgaagattttcataccacaagagtgacttttacttgctcatttaaaatcattgaaactatcatttctattttgatccccgaacataatgaattgtttggacaaactgtttttgagttctttttaaaaactccttcttatgttatgcaacaccagttgttccatagt

SEQ ID NO: 263059 - DNA, 927 bp, Cannabis indica
gtagtagcaggatagtaaattctcctagcagaaaagattaaggtaagatttaatttcattttaagtttaaaacaattagtttcgtataggagtttttgtgaattagaatagttatgaaagttctgaccttataggattattctcgggtagtcatgagactagttttgatattttcttactgaaattgaggattttgggttagaaattgagtttggaacttcttatagcttaagtccgaacattagtggcgtttgccaatcgagggcttgattttagattttattgtgtaagtatggtagtatgtatagtatatatgtgccctataaagtttgggatagtttggatagctttcggtagcgtttcagtgaatacataaacttaaaaaatcacatttttaccttttgaaaaaaccggtcaaccgattttgaaaccggtcaaccggttctggccaatcggtttaccgtttcgggcaacctcgggaactcaagaatcgtatttttgccacaacttttcactcgggtgtcagttttggatgttctatatactgtttcaaagcttgcgacgagatctaccatatggtgtatgttttagagctaaaatataagttttattttaatgtatttgagctatggggtttggtaggaaaccttaggtcgtcatttgcaactgttaagcagtgttttgggataaacacttattactctattattgttatgacttagggcccaggatcatcgatcgtactacaagttggtcggccaacatacctgaaccaaaacttgaggtaaaaaaaaagtatattgtactgcatagtacgctgtatgtaatacaattagtattgcaatgaattgattaatattgagatatagttaatatttttatataatgaaaagattgattggttaagtatcgataatgtgatgatat

SEQ ID NO: 263060 - DNA, 1131 bp, Cannabis indica
tctcattgcaaatcatagcctcatgtaacagggatttcatccatgagtaaattttcatcattatcaagtaaacatgccaatagatcagataaggcctgacttttctgtgcctttggatacatgacagtgatatcaaactcgctaagcattagtatccaccgggctattctactagaaggtataggtttgttaacataaatcttatgggatctgccttggtcatcactattactttatgtgctactaagtaatgtcgcaatcgctgggcggtgtataccaaagccaaacattgtttttcaacataggggtaatttgtctcggcgcctttcagttttcggctaagataatacacaggcttttctttcccttcgacttcttgtgctaacagtgtcccgatagatgtctcggtaacagctaaatacaatagcaatggtactccttgtactggtgacatcataacctgaggagaagacaacacacttttaatcctgtcaaatgaattttgctgtctttctccccaacaaaatgatacacccttccgcattatggcctgtagtggatttgtgagttccgccaaagctggtataaacgtcgtaagtatgatacttttccaaggaagctttttagttcttttgctgactgtggtgctcccatggctaatatagctttagttttgtcttcatctatgcttataccctttttgtgaacaacaaaccctaagaattttcctgcgctcacaccaaaggtacatttaagaggattcattttaagtttgtatctttcacacctttggaatgctctctcgagatcgcgaatgtgattaaatttattttgggatttgacgacgatatcatcaacatacacttctacgttctcatgtatcatatcatggaatattgccgtcattgctctttgataggtggccccagcgtttttcaaaccaaatggcatgacagtgtagtagaagtttccgaacggggttcgaaacgccgttttctctgcatcttctggagacatctgaatttgattatatccgctaaacccatccatgaaagaaaaaatctcacaatttgctgttgcatcaattaaagtatcaagatttggcaatggaaagtcgtcctttggacaagc

SEQ ID NO: 263061 - DNA, 1668 bp, Cannabis indica
tgaaaccagagattccatttttattttcaacttcttccatattcaaatcccatatcttgttttctctcttggctgcactacagttgtggaaaggcagtccaaaatctgctcaaacgcctctagcagacattcgagctgggggatttccatggtggtataactggctagagaagcagttacctactccatctaatcctcctcagaccactaatatcatgaagacatttcagctcactcctccaaggccgaattcagaggcaagaacgccatctagtagtgccccgaaccagaaccagaagcagcagcagcgaaatttcgcatttgaaactatggataccccaacaccgaggtccacaagatcaaccatatatcctgcttcaaaaccaatgcgaacaccaccatcgagcagaacaccaatggcgcttcatgcatctaagtattctagaccaagagccagtgttggagctggatcaccatttgaccttccactaaaagatgatgacagcctcacaagctgcccaccattctctgttcctaactacatgaatccaacagcttcagccaaggcgaaagccagagctagcagtaatccaaaggagagatttatggcaactccaagcagcgatcgaaaagaagactttctttccctttgacacaaggcattggatcattcaagtggaacaaaggctcatttttctcaaataaggataacagttcatcaagggcattagagcaacaccagaagaaccaacaccaatctgcaccttcagtagggaacatgagtgtggattcgacggtttctttgccagctggggttggaaggagaccatttaaccgatttgtgtgatttcttttcctatatttttaaccttcttttccttttggtgtttttcttttaatctttgcatggagtgagtgtatggtaatagtttgagtctttgaaaaaaaaatagtgttgtaaaataataagaaaaaaaattaggaatatgattatgatggtttgagtaattggatgtaacagattgttttcttctttttgggaaaatatcatgacaactattctttttttggtttgtttaaataaaaacttgttctcttttcagtattgtggtagtttctaataattaatttgatgatagatattattattgagcaatttcaattatatttttaataaattgaagatgtaataatgtgatgtaagttggtgggtttgtgttggcttggctttgaagtaaaatctcatgaaaaactttaaacttaaaacttagtccatcttgaagttacatagaattttaataaagggaatataataaatttatcaagaaaaatagaatcattattattaatgcatatatatgtgcatgtaatttctttatttataccatagtaatattctaaagtaataattacctttccagttcatgatccactatttaacttatacatggatattaaattgagattaattgctgtttacattaaacaaagtgtaaaaaagaaaattctatagaaattcacacaatgcaaagtgaataaccaacaccatcagctttggcaattcattcatcatattaattatatattaatgttagaaaaaagacaaacaaataaaattaagggtgagaaaggaatatgattaacttggccatttctccttacattaac

SEQ ID NO: 263062 - DNA, 513 bp, Cannabis indica
aacataatttgagctgtagtgtttatccatttctctattttgtaaaagttttacttagtatcagagccattgacgacaatgtcaacctgtgaacaaacttctagtggtgctcaaggagatggctcagctccagtgattagtaagcaacacgcctctgttcagacagtagccagttcctctcagtcacagtcgtctggtgttgtcgttcctcagtttgggagtactttgaatcagccctttgctcttaaacttgacgatagcaatttctctctatggaaaactatagtttctgccatagctagaggacacatgttggatggtttcttgacaggtgccaaggccaaaccctaggagtttataccataacttatttcagttgatggtcaatctgtcaccagtagtgaagtggatcctgattttgaacaaaggattgttcatgaccaactcttaatgggtggctatatggttttatgacaaaaggcatagcaacatagggctgagcatcggtcggtt

SEQ ID NO: 263063 - DNA, 1298 bp, Cannabis indica
ttccgaacagatatgggtctatattgctacaaagtcatgccatttggtctaaaaaatgctggagccacatacaaaagattggtaaacaaaatgtttaaagaccagatcggacgaaacatggaagtatatgtggatgacatgctcgtcaaatccaggatggctggggggcacatagatggctttgacgaatgcttcaaagtcctcaggaaatacaacatgaaactaaatcccttaaagtgctgctttggagtcagctcgggaaagtttctgggctttattgtcaatgcctgaggaatcgaagccaatccagagaagattcaagccctcctcgatatgaagtccccaacaagaaccaagaaagtacaaagtttgactggtcaaatcgccgcactcagcagatttgtttcaaaatcaacagacaagtgcgttccattcttcaacatcctgcgaggaaataagcaattcgagtggacagaggaatgtgaaaaagctttccgggagctaaaaatgcaactcgcaaagcctctcgtactctcaaaacctttggacggagaagagcttcggatatacttagctgtcacggagcacgttgtgagtgtcgtgctgattagagaagaaaacaacatacaaaacccggtctattacatcagtaagagactcattgaggccaaaggccggtacccattgatagagaagctcgcttactacctaattctagcaataagaaagttaaggccctattttgaagctcatcctgttcgggtgtacactgaccaaccattacgccaaatattgaaaaatccggacgcttctggacggttactcaagtgggcagtggagttgggtcagtacaaaattaccttccaaccccgaacagcaatcaaaggccaggccctagcagacttggtggtagaatgcacaggcaaagaaaaagcatatcagaaggcaaccctaagccagtactaacacctcagccaagtaacagtgaagacaagccgacttggaaactacatgtggacgggtcggctacagataacctatcctgtgcaggaatcgcccttgtcacacccggggggcaacacctgcacgctgcagttaagtttggattcaaggcatccaataacgaagccaagtatgaagctttgatcgctggcctaaaattagcctgggagatgaaagccgaacacatcaaaatctacagtgattcacacctggtggtaaatcacgtatctggagaatacgaggctcggggagaaaagatgatagcatatctgagcaaaatactgttgggttttgtg

SEQ ID NO: 263064 - DNA, 1051 bp, Cannabis indica
ttttaaaaaaacaagtaatatttttaatttttatattaagaatatcaaattttaaaataaaacaaataaatgtagtgtatttgtgccctccacgtgtctatatttatgagttaataacggaagtggtagtaacggtgtaagagaattgtaacattaggtatttttgccaccaaaaataaacattaggtatttttgctaccaaaataaacattaagtatttaagtgtacaaaatcgaaaacattaagtatttatgccactatttaccctaaaataaattaagcgagattattttataaatttgagtattttacattgttaatttaataaatttaggcaaatcaaataaatattttattttgagagaaagaaaagaggataaacaatgaaagagaaaagccgaacaaatgtatgcaatctaaaaagaggctatttggactacattgttgagatgtcaaaataaaaaattgtataatctaaatcaattagttacccgattcccttctatgagcccccatcacatttatgaattcactcagtaatttcagccataatacagacgtaacttgataaccaatcacaaaccttatgtcacctccacttaccataattgactaggatttaatttatttatgatcatattttaccatcaaaaccaagactttaggatcaatatgtaaccatcaacatgaataaactataaaatgggtacaagaaggcgtacaatcataaaccgatccaaatggctgccttacgaacaaaattctcattattgtactattgtaaatgcttagtgtggaattcaatcccacttcaattgttttgtataaatctcaacaatcaaaaaacccacctcctaagctctctcggtggtttaatgctcaacgaatttcttgaggttcttcaaccaattcatgtactctttgctgtctttggcaatcatgtactcttgcaggaaattaattgtgcttcggttgatcccccgaacctcgagatatttgtggaaagccttctgcaagttttcatctaaatcactgaagaaaagggaaaaga

SEQ ID NO: 263065 - DNA, 1142 bp, Cannabis indica
gactgcccgtaatgacgtgtttggcaacataaaagttccaccaccctcagtattgttgcatctgcaatgtcttaccttgaacaatggagaatggcccagtctttagtcaatgttgctctgtttcctaccatagagggtagagatggtgctgaattgggttagaccacaatttacttcttaaaaggtggtgctgatgcaattttgttttgcaattttgcttggtgatggtagtgctttcggtttggatttggttgcaagagattctaatggagcgatagtagaaactcagactctttacttgtcaagcactcattgttgagatgaaagaggcgattgagatcaaggaagctttgagttggatcaaagttggtatgatgtggtgttggaatcacattgtcttgtcgtggttcaggcaattcgcagttgggttccaattagggatgcacatttcgcccatggggatgaggcctcgcagggacccgcccctaatggggtgaggattccccatctaaatgggaaacggggcgaggacggggatcacactccccgccccgacggggacccatttagtattttattttatatttctagtaatattttataatttataatttatgtttgtattttttagtatattactatccattttatgaattttaattttgttttcgataattattagtttattgaataataagtaatgtgtaatattttaatttttgtgtaggttaatatttttttatatttaaatttttattataaattttaatttttttattaagggatttttcggcccgttcctgcctccattaagggattccctgactcatctcttatggagaataagcgggaatgagaattaaaatctttaacgaggatggggataaggggagcactccccgccaattctccgccccgtgtgcatccttagttccaatctttctctttttggattgattgttgatgagtgttggtttttacttaattctttaaacaatgtgtctttgttttttaataaatgttcatttttagattaaattttcagtgagaagactgtttctactgaattttagtcttggttcattttgactgagtttgcaaattaataaaacttcagaatttacttaaaaaagaaaaaaaaa

SEQ ID NO: 263066 - DNA, 479 bp, Cannabis indica
ccactgagctcaacagctaggcttctaacaatcccattcgagcaacatgctccaaaaatacacatatgggtaagcctttcattagtgggtctgctaacatgccagtgctaggcgtgtattcaatggaaataagagactctgtaactttctctttaacaaaatagtactttatgtcaatgtgtttagaacgggaagtacttctaacatttctagagaaagctactgccgcggaattatcacaagataatttcagcggcctcaagatagagtccataacacccaatgctgaaatgaagttcagcagccatattgcttgacaagtagcctcataacacgccatatactctgcctccatcgttgaggatgttgtgtgtaataaccggaattaagaaatggattagcaaaaccctaactagataattatgtataatggaggaattatattattatatagttcaatatatgtgattttatatgaa

SEQ ID NO: 263067 - DNA, 716 bp, Cannabis indica
tctctctttctcgttctctctctgttcctatagtgcgacgccggagactgggagcactgtgctccgatcacgcccaccgccaacggattccagttccattccttctaagctagaaaaacccgaccccctccctctctcgatattactttttctctgatatcgattgtgcagcgatgataccacactagattcaatctttgccggtgccaatggtccatgagattttacgttgactctaaatctaaaggagaagctagttattccaattgcaaaacaaccatcaaaacacatagtagtcttgtttctttctctaatggtgatacctcagctttaatagctgagcaataagatcgtgattcacttactcttaaagtcatggctggccaaatggtggggcagtcgtggcctaggcctcaccatttcaaaggctcccaaaaattaaattaatttatattttatatataaaaaataaaaatataatatatatttatatatatattttggttcaataaatttcataaaagagttataccacaattagtaagagcatctccaatgaaagtataaataaatggcgaaaagctaaaatatggctcattttcaaaaagtgtgctccaatggtgtgccaaaaagtgatataattttggcacatagtaaattttgtgctaaatttagcacacatttgctatgatgtaaaatttacaccacaataagtg

SEQ ID NO: 263068 - DNA, 758 bp, Cannabis indica
ttaccaaaagctaaaaagctcaaaatatatatagtaatttggggactaagacttattaacagtccaatcatataaaaaatacatgtctctaatctttcatttctttctaatctagctctaaatctcaataatatttagtttctaaaaaacttaatcatataggataaccattgaaagatatcatgctatccatgataaccttggcatgtagtggaaaaaccaaccactctccactaagtgagtgatgttgtaacgctagggttgtatatacaggttctgatttttgatgtggcacgaaacttgtacgaggttgggaggtacgagcacgagttgacccaaattaattaaatgtaagtttgggtatgacaccgtgcaatattacaattgtacgatctaatacgaaaaatgtgagcttaagtatgacacaacacaataattctaatagacatgattacacttaagctcgaagattagatgaatatttaagttctaatcattataattattttttttatataatcatatataattattattgaaaaattgtaattaaaactatgaaaatatttaactcattgctataataaaagtatgaaaatgcatgtgcaacacgaatttgagtacgcgcgcagaagataattgactgacttattcaataaaaaaagaccaatcaatctaattaaaagtacaaattcgagcacaacataaaatatcgggattatggattgtattgggtcgaatctgccctatattagtac

SEQ ID NO: 263069 - DNA, 2671 bp, Cannabis indica
ttaatattttaaaataaaaaaaataataatttaaaaatctaatacatatagtatgatgcaaatatacttctaaatttatatattaagtgtatattccatacatatatattaataaaatataatctaaaacaaaactaaatatttttttctacatacaatttatttttcacttacttagagtcttctattttttgttttcatttatttttatttgtttgatagagatataaaataataataatttgtcttattttgttattagttatgtgaaaatatatatatatatatatgttcataaatatgaaataattcaatatttaaaaattaaccaatctaaaataactgatcgaatccaaaattttaaataatttaatattggattggatttaagttattgtgcggattgaattgaattcaaaatataaaatctacagttagtgcggatcgaatgcactataaacaaaatagtgtgaattgaattgaataaacacccctaattataccacgtttatcctactatgagagtattttctatttttgacaatgcaaaaattataattaagttatttttatatggtaagatatataatagttatagtaagtattctctcaattttcaaaaattccttatgaagcctgcgtattttttatacacatagaacttaatattttgaattttgatttttacgtggttaaattattcaaaatatctccatatatagtgagatacttgcataactacaatttgtagggaaaattacatttttgcctacactaataactcacgagattaatcaatcataaggtcaattttgacctttctcctttagcaatgttagaaagaaaacgacacaacacacacacaaactatattatgttttgataatacacatacaaaatgcaacactcccacaaaaatgaatctcacaatacaaaccctaaatctagaagattcaaaccctagcagaatgtgttcgagcttgaacacctctgatctaccctacatctaagaatcacacaacacaaaataattactagaaaagagagaaatgaaggaatatgttagagatacaaatagagagtaaaaaggcacaagtgattgatcccagagttcaccccaatcaagggctacgtctcagttaagctatccttcaagaagagcttgatttccactatcaataatggtggaatacctagtagccttggatttccaaccacagaggtaagactggtaaaccctaaatttctctcgatttctttccttttcttttgcacagggatttctcattaactctctttttctttcttttacatgaacacactaacacgaaggccctctacctctcctcttctctcaagttaatgcagaataatcttgaggtggaaatctcaatctcgagtttagcttttataggcatctagtagagtagagctcgatctgagctgaagtagacctgtacttgtttttttattgtgtttttgttaattgtaacagaattggtagttgtaaactgtttggatgatctggcgtgtaactgaattcgagaatctttaagtctattgtaaattaactgagctataaaaatgatttggtcttgagttagaatagtttatatgggaattcatcccaaattccacctaaatttccatataaactgttttagttgttgatagtgttagttctccgagggtcttagcttgaataattccttatttatcctccaaatccctaatgagttcaagcacaattgaacttactaagggtaataatcttagtacccatgtcagttgacttttcaaaagtagcaatcttctaaatactcacttcttcttgtgtcactttatccttgataaagtgatacttaacctcaatatgttttttctatcatgaaacattagattcttgcataaaatgtaagcaactttgactgtctgaaaaatactgtagggatccttttgtctttagtaatttcagttagtaatccttttagccatattgctttctttatggcttatatagcagcaatgtactatgattctattgttgatagagcaacaactggttataaatggactttccaacttacagaacacccattaatagtgagatagtaggttgttatagacttcctgctgtctttatcccctacatagtctacatcacaatacccttcaattctcaggcttgtgttcaatcttttataggtcaaaccaaccttattagtacctagcaaatatcttagagtccacttcacagctcaccagtgaacctttcttgggttagacatgtatttacttaagatacttatggtgcatgctaattcagatcttgtacacaccattagatacattattgatcccacaatattagaataaggagcttcactcatctcattagcttctttatcaattgatgctgattttttataggtttttagtcaccttagcttctttcatagaaaacttttcaagcgcattctcaatgtagtcttcctcgtttagagttagcttccccttttctatatttctcttgatgttcatgcccaaaatcttagtaacatttcctaaatccttcctggtcaaaatagctcttcttgaacctttgtttcagcatgaaaaagacaaattttttttgtcccattgtctaaatgactgcttcaacccatataat

SEQ ID NO: 263070 - DNA, 467 bp, Cannabis indica
actataactaaacaatcagacttcagaagcatcctcttccaccgctgtgtcttgatccagcttaacgcttcttaaatttcaatagctttcgcaaactttgacttgggcacaacaagcacatggccttcattttcacaaaaattgtatagctttcaattgtactaacgagttttattttaaaaatttgtgcactaagtaggggtgtgcacaaagtatctgatccaatccaattcgcacgatccaatccaatccaatcctcaaaatgcagatatccgcacttgtgcggattggattggattgaaaaatctaaaatccgcacttgtgcggattggatgttgtttgacctcaaaagtaaccgatccaatccaatccgcacttaattatacatatttttaaaaaattataatatataatatatattaattaaaaaagacacaaacttctaattcttaatctttttagtaata

SEQ ID NO: 263071 - DNA, 2033 bp, Cannabis indica
gggcaagtagcgtacaggttggctatgcccccagcactggcagctgtacatgatgtgttccatgtttcaatgcttcgaaagtatgtctcagactcgtcccacgttctgagttatgaagcattggaactccagccagatttgtcatacgaggaacaaccagtgcagatacttgatagaagagaaaaagtcttgagaaataagacagtggcactggtgaaagtactatggagaaacagtaaagtggaagaggcaacatgggaacttgagacggatatgcagcagaaatatccggagttgttcaggtaaatttcgggatgaaatttctataaggagggggtaattgtaataccctggaattaagaaatggattagcaaaaccctaattagataattatgaataatttaggaattatattattattagtttagtatatgtgatttaatatgaattttaatatgttaagaccccgttggtgagccaggggcattttagtagttatgacccaagaagggtaaaatgataaaattaatttaattacgtgcttaatggaactatattattatatattaaacatgtgttgtcttttcaggtgtgttctgataggttggcgcggtatagtcacaaccgggcatttcgggccgaaccgggttcgggcccaaaatgtaaattgggttgaattatttggcattttatttgataatatgaaatctgaaatttatttagaaataattgagtatgaaatggctaaattacccttgtgagggtgtatgtgtgtatttaggccccaggggcaaaatggtcttttgaccatatttgatttacacttaatgaaaattgatttttgagggaaatagattatttttctagttgcttctccctctcacccgaacccccctctctctcaaaccctctcttaaaatttcatttttggttttggtaattgattaatttgaagcttggaattgggagatatttgagcttggagttgaagggagttcaagctttgtttgaggtagcttttacagatttttaatcttgtcttcctactgttgagtttgtgaattgttttgaattgttgagtttgtgaagttgcatgtttatagctttgaatgttaatcttggtgatcttttgtaagaattgcatgatttaagttgttgtgcatggattatgattataaggtattttctagcttagaatcatgtagccttgaattgtttttattgctggaaattgtttgggttgttgaagataagcttttgttcatgaacttgagttttgttaagttggaagcttgactttctatgcttttgagcaatctaaatttttgatttattatgggattttgatgcataaaatatgttatttgagcttctattaattgctagtaatcctatttattaacttgaaagtttggttgtgaatttgaggtgaaaagattggaatttcttactgaaaatcgtgttcatgcttcctagtttctgggttcggaacccaggtgccgcggcatgctctgagcatgccgcggcccgcctcttgttggtggaacctaggtttcgtcctaggtgccgcggcatggcttgggcgtgtcgcggcccgccctggtatttttgggcagtttcgagttgaattttgaaaaatcataacttttgattccgaactccgatttgggagttttgggaagttctttatatcgttggaaagctcgtcccgagctctatatgattatttgaattttaaatgccatgattaaattttatgagttgaaaaccaggggttaaccctatgtgtgaaaatcccaaatttctgtgactaggattaccggcacctgatcaggagcacccagggattcaggatctctttcaattgtgggacaacaggtaagacagtgcttagcacgtagagtatgtgcagtcgcgtttatattgagaatgatatgtatgaatgtttagtaactgggattagggttattaccataataggaaccgtctaatagcctagggttattaccctagtgatatatgtgtataaatg

SEQ ID NO: 263072 - DNA, 878 bp, Cannabis indica
gaaaacaatgagtgatagttgttatatactaatttgtttatttaaatttgtaagtagattatttaaagtgtatataataaaattaagaagtgttaacctctatgtcatttggacttattattgatgattgtacatgtctttttctcatgtttatgtgactaattggttggttcgatgtgcttgttcttcttctggtaattaggggtttatccctcctgactgatttggcaattatttaattagcagtcaatattgattaatgaaattgtttatttctcttaaataaaagtgctaacctagtcaccttattaagatttggaataatataaaaaagctatattaagtaattttacttattcgccaaataaaagtaattttactcaaaatgaggttagctgtatctctcacacattttttattccatatcttgaatttataatgcatggcaatatgtcatatatagctttacacgataagtctgtttctttcaaagtaaacaagctataatgtaaattaattagctggtttccagataaaactcgttttagggatgatgatatgaaaaaacaagaatctttttgtttcattaaatgcaaataaattaaaactatgatgaccacgcaaatcaaatgccccaaaagggaaaaagacaaaaccatttttgtacatactactgtactgatatcacaaattatcaaaataaattgtgtaagggcatatccggaataataaagaccaaagccttacctagattcctagctaaaataaataaataaaaaactctaactagattttggaggttatcattttgacacatacatatatatactaggttattgttacgtgccaaggcacgtagtgttagttttatttaatat

SEQ ID NO: 263073 - DNA, 369 bp, Cannabis indica
taatttttaattattataatataattctatgcatgtttaaaaaaaaaaaaaaataatgtagaatattatataaatttttgttaggatttaaattattttgttagttgttatgtaagtttttatattaatttttgtaaaaatataaaaaaaaaaatatatattttaaaatgtgaaaattaaaaaaacaaaaaaaaaacaaatgtgtgttttctagaagaagccaaagccaaaataatatattaaaatattcttttatcaatctcatttgtgtctttttctgcattacgctactgtagaattatgcttagtgaaacagtgaaaaaaagcatttccgatcaacacagcagtactttataataactaaattca

SEQ ID NO: 263074 - DNA, 1451 bp, Cannabis indica
cccctgatttcacattcataaatattcacatggcatttaaaattcaaaaattcagatagagctcaaaaagagctttccaacggtatatagaactcccaaattggattccggatcacaaagttatggctatttgaagtttgcaaaaaggatctgcccagaaagaaaagaacacgccgcggcatggttttaaaacccagaaaaccaacaataaaccacgaatttcagcccttaaatcacatccaaacaacccaattcataaccaaaactcccaaaccataaaataggtttttaatcatcatacagagagtttaaaacacatacttcatgcataaaattcacaattaaactcaaaaatcagattgcaccaacaacctaaaaatcaagcttagcttagcagcttcaagctcttaaacaagagcttcatctccaacaaatcaaacaatttccaacagcaaaaactccataagaacagatgattccaagctagaaaatacttccaaaatctcaactaaagcttaaccaaaatccaaagcatcatacaaacaaagtttatgcaaaaacatgctcaaatcaactaaagaacacaaacatgcaactacaagatcaaaatcaccttttccatgccttacaaccataaaaattcagtaagaaaataagattaaaaatctgagaaagctacctcaaataaagctagagtttccttcaatcccaaactcaaaagaaatcctctaaattcaagcttcaaatcaagcaatccaccaaaaatcaaattgaaatttcaagagagggttgagagagaggggttcgggtatgggaaggaaaaagtcagaaaatcatttcctttttctccccaaaaaaatcaattaatcaaagtatatcttaaaggtcaaaagaccaaaatgcccctagggccaaagcacacatattcaccctcacaagggtgtttttgtcattccaagcatacttaaatcccaattaaatttatgattatcaaatatcacataaaatgccaattaattcaatccaattgcatttcgggccctaacccagttcggcccgaaatacccgattgtgactataccgtgccaacctgtcagaacacacctgaaaagataacacaggcatactatataataatatagttctattaggcacgtaattaaattaacttcatcatttttacccttctcaggtcataattactaaaatgcccctggctcaccaacggggtcttaccatataataaatcatattaattcacatatatggaactatataataatataattcctcaatcattcataattatctaattagggtgttgctaatccatttcttaattctagggtattacagtctcattatccaactaatgcttcaaaggcaagaaaacctagctttctttctctttaggttttgagacttcttcttcttcttttcttctctatatt

SEQ ID NO: 263075 - DNA, 1037 bp, Cannabis indica
tgttgatgcttctgttgttagtgcaaatgatagctttaggattggtagggtaacccgtgaccatgagagaaatgtgctcattcaaagttattgcctggttgtgttcaatcaactatggtagaagtgggaatcaaagaagttcttagctagattaagcgtcagaatttttctcaaattattattaaaattgattgtcaagtagttgttcatgcaatccgtgatactcttcaaatgtcttcggctgattatttctgattgtcaatatctactttcttcttttaaacaatatctctattatctttgttaaataatctatgaacaagaaaatcaattgtgtggctcttgctacttgttcttttttaggtcgtccaatctgtggagctaatcttcatactattttattagcagatttacacttttaattaataatacaacgaaatttcagtaaaaaaaattgtcgtcccttgtataattaaataaattacaagacttgtcatgtaatgtactccaagttgtaaaacaagtggtaaattgttgctaaaagtgagatacggcaagggagatcataacaatgggcagctttgattattcttaagtttgacccattttaactaaatattacttttaaacccttacaaaatacacaaaattgagtaaattaatattttatagaaaacgaaataaaagtacttcaaaaactaacgaaaataaactaaaattaatatttttttttttcaaaattaaatacaactaattgaaattcactaaaataaattaaaaaaccttgtgaacaaaaccgattttcacatagtaaacagtatataagaaactgaattattccctctcaaaatctgaaatggcatatgttcattgttcactcaccagccatgcttgtttagcaaatccttggttctcttcctcatgcgtgtgaaaactataaccacacaagcaagaatccatggcgggaaatttacacccgtaacattaaacttcttcatccattgtggggtttcctttaaaacgaatgttatcaaaag

SEQ ID NO: 263076 - DNA, 502 bp, Cannabis indica
aattataaacactcatttaagataagaatataacacacacaataaatagttaatccttgtattataatctctctccatatgatgatcattattcaaaagaagaaaccatcatcatcattaaagaaatcatctaattctaattagtaattaactaagttttttggtttgatctcgagtttgcggaatgggaatatttggtagtccaaagaaatgttaaaagtacatgaatctagtttggttgtacattttgaatagagggaagtattttcaaagtatatgaatcgtaattgtattaggggtatttattggaccacatttaatgtttttagatttatttaaattcaattcaattatatattggatgttagatttatcatccaatccgatccaattaatttcagtcatccaatcgatctaacatctattagatatatgttagattagatcaattttattgaatgtatttcatatatatttattggtttaatttgaatttattcaa

SEQ ID NO: 263077 - DNA, 2047 bp, Cannabis indica
gtatataacagtttataataataataataataataataataataataataataataataataataatatacccatataacaatatccagacatatgtatctattaggcattatgcacatgccaataaaatcgaatattatatcatcataaaaataatcccatacatatttaaatccataaatatgtaaaataaaaaaaatactctcagctaaataaaattacaaaattaccctttcggagttagcggatattacatatgcactgcaaaccatccgcgcgcgcaagtcataggggctggtcgagaaacctcggccaaggcggctgggtgcagccttgtacgcgcgcgcatggcccctgtttggacaaaatcttgtcccctgaccgagaaaactcggacaagatgcttgtccgaatgcgcgtgcacgggtgatcacccttgtccgcgcgcacacgtgggtgacaccacccttatcatttttttcaaacttcaaaaaatcataactaattcaaataaaatcgaaattgcttaattttttccaaactatccaacaaatataattccagaaaaaaaattccaattattttttgtaaaaaaatttgcaaacttcaaacaatcatcaaaaaacacgtagatcaacatgaatcacattcgaaccacacctatatcgttttaagtccaaatttcttgaaagttaatcaattatcatgactctgaggccagttgttgaaattaatttatcgggatctagatttactaaccagtatgtttttaacatcctaaacatgaacttctaaaacgatatgaaagaaacacatataaagtttcagaaaccttacagtggttgcattagaaatttaatgtctccttccacttagatctctaacccttgtatcctgtctgttgcagagtatcaccaagatctaagtccgaatttccttctcttgaatctagattcttcacagccttacacactatgcttgagtaccacttaatgtgtgtgggcacttactctaatcacactagggtttcggttttgaagagagaaagagagagagaatttcgaaataggtagagagaaggtggctcaaaaattttactgaaggaaagagtttgcatcatcttttcctttgaggccatcactacctatttataggaaaccactttgggttaggttagatttatttagcagtaaaataatgaaaaaaaataaaatggttaattgctccccaagtggccggccatggatagtgggcccctctttgcaattttgccatttttccaattgttcatcttataatctgaaaaatgtcatttttccaatttaaccacttaaatgtcaaatctaattatttaataattaaaattaattatctaataaaattgtcatctaacatatttattaattagacttaatatcgtctcttaattaacaaataaaccttacaatctcttttcttcacaattaagccctagcttagtgaaaattcataaactagacacagtcaaattttcaaattataattgattaattaaaatcaattaacttagtcttacaagcagtattatctcaactagtatggggaccatcggcctacatatccgagggtccaataagcaaatctagaatttaccaagtaaatccactaacttattaatacctcattgcatccaccatagaacttcgaattgaactatcaattatatagaacgctctatatgttctacgatatagatatgctattagttatccattgttataatcccaataatcaatgatcctctatagatgagttacatggcatagggattaatttactgttacacccttcaatgtattttatccttaaaaaacttagccacctataaatgatatttcagtgaactaacataatcactgaagtgagtactaagccattcatctatgcttagccaagctcgaaggaaatcatcatttcacttctatgtccatatagaagctatcggttccatatctatgattagcgctccaactcaattgcactaccatgttcccaaaatttactaatt

SEQ ID NO: 263078 - DNA, 751 bp, Cannabis indica
ggtttttttcgggggttggatagcgctagagattttttgtttgtttgtgtttgctcttataccatgttagaatttgggataaggtgaatagtgttccatctcaaaatcaattggcaatgggaggagtagcccattcatcttatatacacaatttatttccatacattagcaatgtgggactaactcttaataagctgtgaattatctcaaagttcctgctctctacaaatccaatatatttaattttgaaaaaaaaaaaaagtgactgaagctagttttagtggtaagggagggatggaaaaaagaaaaaggacatagttcgaaactttaaattttttaacatttaatcccaaaaattaattttttgggggccaaaactacttaaattttcattatgttttgctttgtacccatccgtccaaaaaacatagttaagtgccacggtgaattgtccacgtgtacacacttatacacgtggcaaattttagtggtccacgtaatataaattttaaaaaaataattattaatatttaaaaaaataaaataaaaatatttgtttttagttttctttttctttttctttttcttattctttctctgttttttcttctttttctactaaaccccctcccaggccctctctttctctctctcgtctcaccactggagccaaagcacccaggccctctctttctctctcccaatcttctccttcccaaatcatctttttctctttcttgtctctctctct

SEQ ID NO: 263079 - DNA, 1110 bp, Cannabis indica
caacaatggcttcaggttagtgcttccgctcatcttttgtcatcttcttctttaatttagcaaagactttatgatttagggttttctatattaaagcacttttaggaatatgattagatctgtgatatatatatatttcttaagttttttataaatcctaacaagtgttactgaaatccccataatatttggtaataaagtcattttttattacaaagacaagtcatttgaagagccaaatatttgactagacatagctcccctgttaaaaggtttttacaatcaaggttagagttaaaaagtccttatccatacagacattcgcacggggacttggaggataaatgttatcttaatttttgtccacttcacgtagcatgtacatataggcaaaactaaggccatgtgaaatacagcctgggaatgggtgaacaaagtcaccttgcacgacatgccaattgtcaaggatcctaagcaatcaagcaagatcaagcaaggagaaaatagctagctaggaaattctggccgaaccacaccctggctagttaatgaagtttcatgtgccgtccaagccctaagaatatggttggccagctagctagtgcaaagagcatcaaaaggagtttaaatgaatggtggggtccacaacaagctttctgaacgatccacgagcttaattccagttacgggacagatctaacaacccacaaaggtaagaattcttcctcaaactatttgcatattctttaaggatattacttatcttatttgtaatttaaatgaaagataaaaaagagagattttccctattttagagggatatttatctatttaaatgatgattttttataagccctacattatagaaagggcattaggcaagatgaaaagagacctgaactctaagtctcacacgcccaaggctcctctctctcaatctctcacgcctcctcactcactcattagatacttagtctatttccttcacaaaatttcataagttctaaatatgtagcactcaattctcactattgtaatattgaagaaagtctagctaaaaattaaaaggttcaagcctgtattccgcgtggtattatctccaaaattaat

SEQ ID NO: 263080 - DNA, 795 bp, Cannabis indica
taaataatatccctagagtctaaaaatctctggaattaagaaattacaactctaatatttatttctaaatattggggtccacacttaaattaattcacaaataataataaaataataaaaattagtgctaattgcctttactaatccaaatactaaagcggtcattacatttaatttcgttatagttataggagcttgagtgactaagaataattaatgactactttttattaataattttggagtggatttacatttttgatttatttattttttttaatttaaattaatttataaatatatcttattttaatatttgatgttaagatatttatgagtatcctaataatactcaacttagtactatgatttttatttgattaaaattttgaagtgtttgaatttctaaattagtaattttgatttcattctaatataaaattaaacaacctttattgtgtgttaatagattttttttaatatcttaagtttaaataattgaccaaaggttgtttaataaaaattatacttaacttcatttcaattttatttgcaacctaaaataataaaataattgaataataataataataaattcttcaatctttctatctattattgataaatcttcacagaaacattacaatgataaagaaatttattaattaactaaagaagaacaaagttaccataattttggatcatgttcactccatatttcttaaatcccatcactcaacacttgagaaaagaaaatccactgaacaaaaacataatcagagctatcaccatcat

SEQ ID NO: 263081 - DNA, 1086 bp, Cannabis indica
ttagttgatagttaagattttgattttgtattaattattttattttagattttattataaatttattaaattaatttttacataaatagttttttataaaaagaaaattaaatttttactttaatggttaatattaggtggttatttaataagatgatgtgacattattttaaatgatgtgtcatgccatttggtgtctagtgtgcaagataacagctaggtacctacagaatgtctgaaagtgtaacggaaggtatttatgccgccaaaattttaacttaagtattaaattgcaactggaagataaacttaggtatttatggcgcaaattactcttatttattttatattttaaactgaaatggttgtaataaaaaattgattgctttccattttaattatggtaaatcgattcacacactatatttttcgtaaaatttaggaataaaattcaacctatatatagacacactcaaatttaattatgtgagttttagttaagaatatacattaagaaaattttaaaaatacgtatatatataacctatccaaataggaatattggcggctaaaccacctgaattttacggtttgtaacacttaaccacaaaaactgattttttggcataaaaagaagaagaagaaaaaaaaaaaagtaaaaaaaaaaataaatttttaataattttaaattaaaaaaaaaaaagaaaaaaaaaaaaaattactgatttttaatttttaaatatttataattatttttaaaactaatattacgttgaccactaaaatttaccacgtgtacaagtgtgtacacgtggacggtccaccgtggcacttaactgtgatttttggacggaggtgtacagaccaaaacggaatgggagtttaggtagtttagccgccaaaatttcagtttttgtggttaagtgttacaaaccgtaaatttaagtggtttagccgccaatatcccaaaaaaaaatgaagtttgaagagtttagctgccaaaatctctctctttatataaaaagtcaacagtttatttatttttagtaaaaagtcaacttcttattgaagtggtaattttcagag

SEQ ID NO: 263082 - DNA, 715 bp, Cannabis indica
atagtatacggtacttttacagtaaagtaccgtatatttgtatattttgtaatttataccaattttactgtataaataaaaaaaattactttgaaatactaaaaataaaccaaccccgtattattattattattattaatattattattattattattattattgtgcaaatagaagtagtattattagtaatgatgtgattgcatagattttgcttgtgtgaatacatgattatctgctgtctaacttaatccttgactgttgtcgtttcatatgaattataatttgtctttagtgcaatatgtttattttttttttttattttttggtccattagtatgatttgttttgtaattttctttttggttttgtaagatatcgtgttgaattatgattgatttagaatttccaactatttttttttttcataatcttcgagtggccattatatttctattagttatggaataatgattgaggcatcacaagcgttataacggtgctaattgttcctttgtgttaatgtttgaattctgtatcgtttgtattcattgtttaacatttcctaattcattctagataagtaggacaggagatgtattagttgtgcgactgcatggattcttctgctgactattgtttcatggttgttcttggtcattattctactgtaatagtggtttcatcatccttatatttgattgacaatatattt

SEQ ID NO: 263083 - DNA, 617 bp, Cannabis indica
taaatcttaaaagattaatttagctctcaaaaaaatcattttgaaagattaataaaattaaaaaattaattaaaattttaaaacaacttaagcgatataaaaaattatttatttcttagtataaaattcatttagatattaaaaaggtatattaaaattaaatttttataaaaactaaattttacgagaacgaacttgagtatattttatttttatcaaaaaatataaatttatttaagtaaacataacatttttcagtttaatttataatttttttgaaaaaatatttttatatttttattaaatttttaataatttttctttatttgttaagatacgagtttataaatataaataaatttgagtttttcttcaaaaaaaaattagtttatttaaattatttattacattctcaataattttagtttaatttttaagatacgtgtttataaataaaataaagtgaaaatattttttaaaaaataatttaagtttttttaagtaaaattaatatttttttataaattcaatatttttatttaatttttaataatttttattatttttttccgaattaatataatttctttaaaaaaatagaatattataatttttaa

SEQ ID NO: 263084 - DNA, 552 bp, Cannabis indica
gagccccagctccgggcaaaaaaataaaaaggcctgaaagcaggcggtaggcttggggaatgagttggtacggcgcaaggccaacaaatacaaggaaatgaataaaatcgtcttagagagggagcatagccccggacatcaggtgcatctggctccaggctccgaagcccccataattatggttaggagtctcctcgtccctaggcagccggtgataggtcccggaggtcgaaggcttaatgcctgccaccaccacaatcttctccagctagtgaacgcaggtcaaagtagagtggagctcaaccgcctcccacccgttggcacgggacttgtaaccttcctgggccacaggaccctggatgacctcctccagggtggccaaacgtacttcccctttctttgaagtcttggagctagatgcgaaagcatacattttcggttctgaaaaaatcgaaaaaaatccagcagttaggccccaaaccaaaccctaattcaaaaagggtatgggggtcccctaaccgctggaaagaggccccctccggacacttgcca

SEQ ID NO: 263085 - DNA, 508 bp, Cannabis indica
atgagtttttattatattataaagattaatttgcggcctaaataattaagattaattctcagttttaaataaatatttaaattttcttttcttttaaaaaataataaaaaaatattccaatgcaaagataaaataatagtaatattaatttttttatgtattttaaattttattttatttttttatgggtaaatactattttggaccctgtattttacaaaaattactgattggatcttgtgttttattaaatgacaaaatgaaccctatattttccaaaatggtaaaaataggaccctaagcttaatttttgacaattttttttaatataacccacttgaagacaatttctaatacgaagagatacaaaaaatataaacagttttatcatagaacttttagatcggattataattaaattttattttgataaaaaaatcaattcagggtcctatttgtaccattttagaagatacatggtcaactttgtcatttaacaaaatataga

SEQ ID NO: 263086 - DNA, 578 bp, Cannabis indica
aaaaaagtaaccggtacccattttttaaaacctaattacccctacatgaacccctacatgaaccccaaccgttggatcaaattaactacccatccgacggttacagtacatcacggattgaaatccgtgtctgtacaatccggtcccaataaatatatcatgagctaaaagcacaaaatatataaaatatatatcatgtgttaaaaatataaaatatattattcataaatatgctaaagtagttaatcagttagaaatttattagctttttaaatagttgttatttagcattttaattagtttgttacgtgagattctgttacttgaacctcatttcatgcttcacctgtcttttatatatattcaattgtttttagcttaatcaataataaggaaatttttttcaaccttcttctttaattttgtcttttcctctcttttattttattccttcttagctaaaatgtctaagaaattcaatatggtatcagagctattcccactgttaatggtgaatgttgtcactgaaagtcacacctccggtgcattggcaatgatgaaagcaaagaataaagata

SEQ ID NO: 263087 - DNA, 1192 bp, Cannabis indica
gtgtgatagttgtcctcatcaccagatcattggacaactcctaatccaatacttttatggtacaataacttgctttaggccaacaagtgaggccatgtggaatttgtcagactgtgggacaggctactgatacctatcctacactatttgaaaaggagactgaagatgtgaatgcagtaggtaattttcctagtcaattaaaccagctttatgacccacactccaaacttatagatctaattggtagattaatccaaatttttgctacagcaatcaatttaatttccagcaacctacacctacaaaatctagtttcaattatcaaaaatggacacctacaagacagaatcaagcaccacaagctgcccaaccagcaacttgcaagcctaccactgaagaacttattaataccattgttgctagttctttaaggttccagcagacaactgaagcagcattgaaatctttagtgaccaagtgggctaactcttagaatcttataaccgattgaaagctcagttttacaatcaatcgccatcccaacctgagaaaaatgataaggagaatgctagtgtagtgaccttgcaaagttgtaaacaatatgacccacctatcatcccaaaacaaaatacagtgccacccaaaccacaagattataggccagatgataaaagggaggcaaccaagccaaacaatcctgtcccaccaaagcctacctttgttatgccaccacctttcttaagtagattgaagaagactaagaaggaagaagctggcaaggaaattcttaagacattacgcaaggtggaagtgaacattcctcttcttgatgacattaaacaagtgccacaatatagcaaatttctaaaggatctttgcaccaataagagaaagttgaggttaatgataaagtaagtgtgggggaaaatgtgtcggcagttctccaaaagaagcttcctccaaagtgtaaggatcctagaactttcaccattccttccactattggtaatactgggattgagcgttgtatgtcaaaattgggggcctccattaatgtcatgccattctctatctatcactccttgaatctgggtccacatgaagaaactgggacaatcatgcatgtaatgatcgctttagtaatttagattagtaaaggcaattagcactaatttctgatattttataatta

SEQ ID NO: 263088 - DNA, 748 bp, Cannabis indica
tgaaacatgaacacatcgtgtacagctgccagcgctggggcatagccaacctgtgcgctacttgctctatcctctcaaggatttcaaaaggtccaaggaacctcgggctaagctttcctttcttcccaaagcgtttaatacctttcatcggtgatattcggagccagacgctttggatcagcataacttttctgtctactttgagccgtgagcattcgcgctctaatcttgtcaaccgcctcacttgttctcttaacagcctcgggatccaagaaccttctttcatccacttcatcccagtgaatgggcgatctacactttcttccatataaaagctcataaggggccatcccgattattgcctgatagctgttattataagagaactcgatcaggggaaggtactttacccatgatccctcaaagtcaagcacacatgcccatagcatgtcttctaatatctgtatagtcctctcggattgcccatccgtctgaggatgaaatgccgtgctgaactttaactgagtacccatagctcgatgcaaactctcccagaatcttgatgtaaacttcggatatctatccgaaacaatggactttgggacaccatgaagacgaacaatttctctgacatataactcagcatactggtcaatggagaaattcgtccgaacaggtaagaagtgggatgactttgtaaacctgtccactatgacccacacagagtcaaattgtcccgtggttctag

SEQ ID NO: 263089 - DNA, 850 bp, Cannabis indica
aaaataatttccaacaataacgtgatttgggtacgtggtgctatgaatcctcggggtacaagaattgtgattatatcacgtttatctttgaggttcaggaattcaacaaccatccattttagcgatttagggatcttgtccatcttctttttcgagaataattcatcttcccgtgcacgaccgccttgtggagaaagcatcggagctttctcctttgacgcatcacgtcttgaaggcgattaagcgagtggaccctaaacaaaacaaaacataatacatcaactttgattcaaattctaccgaattgttggcaacataatggctgtaattgaatgcccccaaaaattttaaacatgcctgtataacgacaaataacacagatataaaagtagtttgttcatccatcccaccacagcacatatattcgcagaaactacttcactatggttgaatattgaagatattaaactctactaatcattaataattaatttataagagaagttacctcggatgttaatattaagtgtttaggccaaggaaggaacatgtttgctacgtccctaatatatatgcacccttcaattgagattgggatttcagcattctcttgcagcattttcgaaatcaaaatccaggcatgtgaatcatcgtagtccattcagtgattttaccaacatgctcgtacaaatacgcttgggccacaatattgtcgatgttgtcagaacagagatatacttgctgatcaagggtcgcatggtcatcgaaattgtacaagagagctggcacattgagggaaacaaacttctcagcataagtttgtggttgatcctcatcctcacgagcgtat

SEQ ID NO: 263090 - DNA, 591 bp, Cannabis indica
caataaaaataaaaataacaaaattaaaattaacatatttgacaagcaagtaagtagtaacatacaaatgagtataatcttaaactagtatataaatgtataaactaaataaatattaaatatttatatcacaaatatcctgtaaaaataaccctagaggaacttatcactattaatacattgaattgaaattgaatgcaatagtgttatttttgaataattttttaaagtcatctcaaaaaacttggaagactacaatatttaacttaattagcggtggactacgccgttaataaaccccaattcgaccgctataggctattagcggcggtaattctccgttaataatatgtcgctattaaatagccgctaataatagttattagcagcgcaattaagctccgccttaataatattattaagcagccggcattagtggctggaccccatcgttaatacttgttgctaataaattttaaaagtaaaaaaataaattaataaatatacaaaataatgataatatataaatataattaaaccaattataaatattatgatttaactccaacaatatttattaataatttaaaa

SEQ ID NO: 263091 - DNA, 3120 bp, Cannabis indica
cgaacagtcctactggaagtttgtcctcccccattagagctaattgagcccttgttgaactagcatagctctcatctttaccctccataatccgaagtcatttttgccaaaaaacttttcaagatcaaacttggcattttccatcttcatactcgcaaatcgagccgagtcttgaacctttaatacaaattaagattctatttcaaagatcaagatccacctttgaatttcttgagtattcgagctccgataccgcttgttaatgctgatgccttcttttaatctagtatacacattcaacttaagttcagttaaatcacacaatcatagaaatttactcgagagaaaacaatggaagcttttcggttctgaattaaattgtattacactaaaaagtgttttattacaaggctgccaaagaatgattacaaagggcctattaataagctaactaacataatcgacaccaaggctcaatgctcatgacataaaatgaccagaggacactaactctactaaactatactatcagtatcataactgtattaactgtcacacaaactaacaatttgtacgctcttcggacacaaatccctgtcttcataaaataaataaataaataaaataatcctctattcattatttacgcacttgcttacaaattactgagagctagatggataaattgtgacaattgataaatttttggattaataacctcatgaaagttttcaaaagcgaactttgtcttgtctagtattaacacaattacacaaatgtctgaattgcaagaagtgaagataagttgtcccatttcggtacctttgatgagtattattatatagtcctcagccataaaatatgcaagagaacatataacaaacaatgagcatgtaagaccagactattatcttgtatggaaataataactagattgcaagggctaattataaagcagtacttaactcggttttctcacatcccactcagaataacaaatttacatgggaggatactacctaatatatatgtcttctagcttttacagaaccacagataaaaagaagggacacagtaattaattaattatctatgacatgcccacatgcaatcactttaggaatcatatgaattttagatattaacccactgcagttgaagttcaacttcaccacactctacattcctcagtctcagaaccatatcctgaacaactttgccattgttgaagtaaattcggctctcttcagctaggcagttctgcctgttcggctggacttttgtgattatggttccatttgggaggccctttaggcccatctttaaggccttaatatatggacctatttcaaactctgcatcacccattttgtcatcaaagctgaaggtgtctttgtcatatacacactgatccaaaggaatggacaaaaatttgtatcagcattcacatggaaaaaaactgaaaatgggacttgagattttaagttatcattattgttaccagcttgactggagtatttggatctgaaactaacagagtgagaagatcattccattccgggttcacatttttctttaccacacaagtcttcaccttctgcggtcagattatttcaaaggattttaaataaaaagaaaaccattagtacctatatcacgcaatattcatttatatataaatatatatttatatattaatcatccactttcctcaatgatttctaatctgctgaaaaaataaacagaagaagaagtaaaagagatgcacttattagaactacctggaacattgaggattcaaaaacaaatataaatcttcgtgagatcataataaaagccaggaaaacaaaaccattcaacacatttctacactagaattacaatttacagcaaaaagacacagcacaaaattgagaacgcccaaattgagagtcccaaatattacctgctttcccagcttgagaacaacatatgggtcactggttgcggagtctctgatagcaaggtttacacccctctgtacgtgaattttaagaagacccaaactattctccattacacccacaaacaaaatcgaagatcagaagattgcaattgtgcctaaaacaatcctaaataaattatttgaagaagaaaaatagtgatcgaattctgagacttgtaagtggtctgggttttgatatgagacttcagccttaacaaaacgtggcttttgcttcaaaccacaatttggttgcgcatctcaatgctcacgtctttattaatttatttatatatacaattgaaaggaccattaattaataaagatttttttttttcttttgattcacatttctaacgggaaagactttgagcattaaccgattatgaaaaatgagagtgggtgagactgaaagagagagagcaatgatttggacaatgcccgtgatgaacgcttctaattgaagttgtccactctatgtctcaagaagccgaagccacgacgtgaggccaacttattattcttaattcaattttgatattgtttctatttttaatttatttaatttattttttctttaagtaagcttaatgtttttacaagtgtggtgcatacttaaggaagagttgactaattttatggtaggtgtcgcgtcaccttcagccccaagtggagtttttattggaactgtaggtgtcgcgcatgccggattacataggataggactgaataatttcttaaactctagattagggaggcacattttccaatgggtatgagtccgccgagaccagtccttaatggaaccgggattttttttctaaatagaaaatgagacggtgaggagaattattttttttgccctaatattaaataagactagaatagggatgacacttcccatctccaagatgactcatatattattttattttataataatattttataatttataattgaaatttttaccctaaaaatttattttgtacattttattacatttttactcttacacgcctacatcaacttttttacttaccatctttgttttattataaaaatagcacttactcatcattctcatgcacagatgtgccatccccatcacacatcaatcaaatctcactctcttccct

SEQ ID NO: 263092 - DNA, 776 bp, Cannabis indica
cttcagcagaagagcgggaaacagtttattgtttttttgatttccatgacacaagggagctaccaaggaagaggcaataaccagaaatggatcgccttgtgtcttgacaagcccctcaatcatcatccgaaaaagaaggatacttgaacatttgatggggaaagacttgtttcagcataagctaagatagtggctgttgtgttagaagggaaataaaggccttgtcccagggttgattttaagtactgcaagatacgatttgcagcatgaagatgtggaacccgtggacaagttaaaaactgacttagatggttgacatcataggagatatcgggccttgtaattgtcaagtatattagtttgccaataagacttctataggctgtgggatcggggagaagattccctgtatctttacttaattttaggtttgtttccatgggagtagacacaggtttagcacttatgtagcctgtttcttttagtaattgaagtgtaaaaggcctttgagagaccgaaattcctttctttgtgcgaccaacttcaagaccaaggaagaaacgaatggtgccaagatctttaagtttgaattcgtcatggaggtatgttttgaagtgtgatattgcatggtcattgttgcttgcaacaactatgtcatccacatagataagaatggccaagaatatgttgtttgtccttttaatgaacaaggaattgtccgaaagagattgaataaagccatccgaaataagagtttgactaagtttgctaaacca

SEQ ID NO: 263093 - DNA, 715 bp, Cannabis indica
aaatcactagccttcccagccgaaaccctatctcaggtttttaccaactctagatcttgcatttgtacttctttgattcgctctaaaagagtagattgcagggtaacattagccaactgccccacaaccaactcaatcttaactcgggtcatctcatttgctagctgctgggagatttgtttcacagtatttatctaactctgccccttttactcaaggcattaggaactacgttggcttcaccagggtgataaaggatttcacaatcataatccttcaccaactctagccagcgtctttgtctcatattcaatctctctgggtaaagaagtatttcagactcttgtgatcagtgtatatctcacatttctcgtcatataggtaatgccgcaaaatctttagcgcaaaaaccactgctgggagttttaaattatgagtagggtacctctgctcgtactcctttaactgtcgagaagcataggatattacctttccagcttgcataagcatacagccgagaccctgtctcaaggcaacacaataaactacaaacttagtcttatctgaaggaagagtaagtactggagcggtaatcaagcactgcttaaactccagaaaacttttctcacaccgatctgtccaaacaaacttcaggttctttcgggttagttccgtcaagggtacaaaaatctttgaaaatccctcaacaaaccga

SEQ ID NO: 263094 - DNA, 1031 bp, Cannabis indica
ttttagtactatatataataatttgaacattttattttaacacacattttaagtaattattaatgttaataaccattaataattttagcatacttgcatctatatatcaagtaataaactgttatcttctattgcctttgaatttgaactttcttactaccaagcttttaaacataattagttgtaataaaaggagactcatcatcaaataacccaagctttgtcagaatatagaatatcaatggacatttacacattgcctttataactcatcatctggttaatttctctccacattgcatttactcgatcagtgtcatcatctaactttaaaaggagtacactcccatttacatatcctggtattcctatatgttcaaagaaaatatctagagcagagtgtcaatgtctcctaaaaaaaatgacaagtagaataaagatgtggagcactaggaacttatcttatatgggaagagtgatactgattaattaactcagttcttctagctatacatacatattgggctcaaatctttattctaccaaaaaagcttttgaaggatatatagaagctacttgcagatcctttctctggaagggtacacaagatggagcagggtctggtttagtggcttgggactatgtttgcaggcccaagacagcagggggtttaggctttcgaaatgtacaacattggaacatggctaccttagggaggtatgtgtgggatatagctagtaaaaaagattgtctttttgtcaaatggagtcacaatgtttacatcaaggaacaggattggtggagctataatgctccctcggattgcagctgggcatgaaggaaaatagtggctgtcaagaaaaaaaattcttaatactattaaatttaataaaatatttttatattcttaaaatattttattaaactaacgaaaaattgttaagtagatacattttatctataaacattatatgatgaaacttaattaaagtcgtattttgtccctccaaatcattattttttaaaaaata

SEQ ID NO: 263095 - DNA, 828 bp, Cannabis indica
attaatagagattattggaaatccataaaatactaagttcttgtgtacttcatctattttagctactattatatgtctacggtctacctcttcgttttcatgtcccgattcaccaacccagagcttcccttcagaatctctcaagcaaacagctgtatgaccagcataagatcccgtaacccacttctctaaagactcaaaaccaccccatcgtccacggatcttagatattgcgaggaaatctcccgagtgaatatcatcaacagtgatgtttgtcacccatggctgaggacgttgttcgaaagtagcccccatgtgcttcttcagaaatgcaagattggagttctcaccccatccagtatttgtaaataaaggaaatacttcccaaagcgcttggagggttccaagcatccctgcttgcatgagaaaaattgaaactccctttcgtttaacctgatgtacagggcaagggtcatgatgcaaccaatatacttctagaaacatgaacatttagtaagttgagaattagcaatactaaaaacttacatattcaaactcagctttcccttcccatgcttcaaactcaagtgtatgttctcgagctcggaagtagtaatcccaagttacacgatatggagttgcaaagacatatatatccatgcatgtccaactatgagctttgctcatctgcacaaaaaaaaaattaaatcaaagactactccctttgataaaatataaaaaagtaactattgaagtaatggaaatcaaaagcttgaaaatgatacagaatgttcattctttattcaataaataaatacagtggtttat

SEQ ID NO: 263096 - DNA, 517 bp, Cannabis indica
aagcgtttatatattataaccatatttttatttgggactcgaaatcaggatctccaagacacacacacccacctatagccacttaagttagcctcaagtagtttttaatttctatttattagttactatctcctcatacttattttttttggagatagttaattatctcataaaatgaaagttgtaacctttttcttaatttgagtagttgagtgtacatagctatatataagtctacatatagcacccataaaaaagtgtataatcgtgtacgttatagttatttaatactatttgtaaatttttaaaaattttcaaatcaatttaccatgtcgaaaataaaatttacatactttgttgcacgtacgattgtttttcttatacgcatagtaaataatagggctgtacatcggtcggtttgggcggtttatcctatatattttctaacccaatctaaagttcgggttgataaaatttaagtgcaacccgcccaatttaaaaaaaaaattctataaac

SEQ ID NO: 263097 - DNA, 1363 bp, Cannabis indica
tttttttctttttgttctgtgatatttgttacactgtggtattaccgtgtgcttaccgtattatatatttttttaggccactggttcagacccttagcccagtgcaccatcttcatcagacattcgtggtgccgagtatagtgatttagtggggaggttggataggatcgaggctgaccagaagggtatgtacgcttgtcatgccgagctgaagatggcatatgagaccagccatatagagctgaaggctggtcagaacaattatggagcagctcagaaatatattgaccatgttgcatcgtccgccaacgacagcttcagcaccggaggccccaacagatccatctaccccactaccagctgcatcacccccactacaagaggaggaggtctttcttgacgggtatgatccttatgagggagctccagctactcctatcggtacaggtgttatccatatacatgacagcgagtcccaaggtgaaattttggcgatagaggcacaacctgcaggggttaagagtgggaagaggaagagaaatccccctgtatggtttcgtgactacacggagatgaagaagaaacagaggccttcttcgacgtttgatcccctggcgccaccggatgagcgattgttggatactttccgaaagtggtgttctggactcattcccaaccaccggcttcgggatttgaaaagtggtgattacggtccatcgttcttttggaagctgttgacactacaggaatggcttacagatgacgtaagtaaactaatttataattttactttactttacaactaatctacaattaatatattttgttgtctaactgctttctctaacctttatatgcagcatatagatgcagcagtccatatgctgaggaggcgacgcgccgactatccactgacatttcctcagaagggtatcattctctctacattcgttaccagcatgatcaacagtgcatggacgaatcacaagggtcccaggagaaactttgtgtgggaggattatatcctggagtactgcagaggtgttcatcaggtattgttttagtaagattttaaatgttgaactatgattataagtttattatggtttgttaattgtttagattttctccataattacagacccagttctttccgagatggagggtaatgagttcatttacttcattttgcatcttcccgaccataggcactgggtcacagttgaagttgacatagagctgtggaaaattaatgtgtacgactgtgattccagcatttgtcattggaccgccatggcacccatcttgaagacttgggaagaactgttgccctcactaatccatgcaaccagggattttccac

SEQ ID NO: 263098 - DNA, 796 bp, Cannabis indica
attgattttaattatttaataaatagtttttggcatttaagtggttaaattggaaaatgacatttttgagaaaataagataaatagttggaaaaatggcaaaattgcaaagtgggggcccacatcctatggccggccactattgctctatttttaccatttattttattttttaatgccaaataattcaaacctaaacctaggtggttccctataaatagatagtgatggcctcaaattgaaggatgatgaacacacttgccttcagtcaaaaatttgagccttcttccctatgctattcgaacccttctcttctcttttcatcttcacaatttcgaaccctatggtgatagagtaagtgcccacacacatcaagtggtcctcaatcatagtgtgtaagactgtgaagaatccaaacacaaggaaggagtttcgggctcagatcttggtgatactctgctacagaaaggatacaagggttagagatctgagtggaaggagtcattataattccgcaaggtttctcaaacttcatatgtgtttatttacattgttttaaagattcatatttaggatattaaacaacatacatggtagtaaatcaagatcctggtaaattatattccaagaacaaacctcagagccatggtaatgatttactttcatgaaatatggatttaaaacaatgtttgtgttgatttggatggtttcatgatggtttatgtgcttatttgataattgtatggaaatcgcaatgtctgttgtaaaatattttttatttcattctggaaatattt

SEQ ID NO: 263099 - DNA, 387 bp, Cannabis indica
tgctatgattcgggactttgctagggccgagttacagagtcacggtaggactggctttattgccttttttgctaagtatatgctgctctcgcgaatgttctaacacttgacttattttcttgtgcagcagccagacccatggacaaaatcttggccactcttgctggagcccacagtcctgatgcttccccacctcctgcttcttctcagttggtcactcctgagaggtcttcctccagtgccccttcgggcactattctcttggtggacgaggaggaagttcttgaggaagttgaagaaggtgaagaagaggagtcggccgccctcgagcgtaaacgaaagggaaagatggtgggaggaggagccttctaagcggccccgcagggt

SEQ ID NO: 263100 - DNA, 1373 bp, Cannabis indica
tcaaaaattaagtttaaaaattcagtatatttattttttattttgtacgcgcgcgttgaactgaatgtttgaacctttttttcgacaatatgaaattgtctataaatttttcaaaagcaaatataatatctactataactataatgcacacactcatactcatgatataagaaaattctaaattatattttctgtaagtgctaaaaaatttaaaaaaaataataaataataaaaaaaaaaatctcttccagtaagtacaaaagtgatgacccattagtagaatgtttcaatatgtatatacattttttgtctatcttttactttttacctacacaaaaaatctcacacttgttttatatatatacatatatatatatatatagacggaattgccatgattggagtgatgaagagtgcttgaaattgttaaagaattgctatgatgcattggatgatgatggaaaagtgattgtagaagagttgattgttcctgctgcaccagattccagcccctccactaagaatagtttccattatgatatcctcatgatggttaatctcaatggcaaagagagaacacaaaaggagtatgaacaattggccatggaagctggctttaaagccttcaaaatccattccattgctttcaattcctatatcatggagtttctcaagaccactaactaataataataatattcatcttttatatataaatatttattgctttaaaataaataaacaaaaataaatgcaataataataagatattttctttttttatattattattagtagtagtactattgccattaatattgccacttgtgttgatgttgtgaataaaaaaaaaaaagtttttatgctatcaaaataaaaagatggattagtagaaattaattagcaagaaaataacaaattttataggtttatatatgcttttgtgcaaaaatatagttttttcaaaatatataataaattttatgagaaaaagccaaaaacaaaattaaaagtatggaaaaaataggtaaggataacaagtttagggtaagtactactaactagttaccctcttagggtaaatattgctcaatcaaatatacaaagctgagatatagctcaagcttcaaagtatgaaaccaactcaaatgatcatgactcttacaacctttcaaacatgtacaagtgactctattataaacatcatattgaatcttctttacaagagcaccaataagccaaattttgctcttccaaaaagccaaattcctaacactccaaatgctatacacaaggggagcacaaacagcccaatgaacgcatttttggaacttatttaacatgttccttttaatccaattcataataccttc

SEQ ID NO: 263101 - DNA, 614 bp, Cannabis indica
gttgtaattattatggtgggaagccttatatttttcattgttattatatattgacgttgtattacatgaattataacagtgaacaataaaataacacatgcattaataaataacattcaaatgaaaaattatagctctttgtcaatgagaccgaaataccagatgatgtgatgtacggagatgttgcaaaaactatattatcatgtattgccgttcaattaaagttgtatttgaataaggtatattttcacatttaaatatatatatatatatttataatattttcgtagttaagaacttaatgaatcttatcctaacaattataaaagtaatattaaaaattaattttgcataaacattgcttgtttcttcaaaaaattacgaagaaattttcagtcaaagaatctaattatatgcagattcaaaacaaaccaagtttaacaaaaattaatttcaactattattttatattgtttagaaaacagagtctaatttatcatttaacaataaataatgattctatcaataacttttacaaatacaagtttaaaataatatttacccttatataaattttaaaatagttaagctaaaagtattccttccatcactgt

SEQ ID NO: 263102 - DNA, 1950 bp, Cannabis indica
aaaaaaggcccaaattgttattttaattttatttttttctgctgcccaacttaaaaaacctttaaaaaagtaccaataaacattaatttaaaaaagcacaatgaaatatttaagtaagcccaaataaaacttataataaaaatcctaattctatcttcttcctatctccctctcttcttcacagcagctgtgcagctgcttatttcttcaaccaacagaggaaaaaaaaataaaaaaacttgttgcttgcttccttcaaatgtgttctagaatagtagaatttagaattctaattctagaaatataattatctttattttagtttgagttttatgagacatatcttttggtatgtttgaattttatgagacgttttatggttattatttttatgagacattttatagtatatttgaaatttatgtgacagtttattcattcttaggtgctctaaaagtattgattccattaatttttgaggcttacgcccccaaaactaagcccccccctaaaaaaaaaaaacacctcaaggctcatttgcattttttaaaacattgctagctataagtagaaaacatacaactgaagcaagtacccaaacaaagcaatatgatgagaggggtttatatccataccataaccatggtaaagaggctggtaagtgatgctaacgaatgaagtaataatataactaatccaccaccctccactgtctctattgatcttgcaagtagattaggtgtcaaagcctcaaaatcctgaaagaaatacaaatagtaattgaatattgaaaagcaaaagagttattacaagtgttaataatttataagttataactaattagaggcaaatataactcaatcaggtgagtatatttatgttccaacaaaataaaagaggtataaaatgtaaatagcttcttaaaattgaaaatcgttgttttctccaaaaaaaaaaagatctttgacaataaaaaataacatcaaagaaagagctctctatgctcaccattcaaatgccttttttttcatcagcaactacattgccgagacaaagagataatatggtatcatcaataatcagagtcttagtaccatacaacattaattgcatcagacttaccagtcacttcctaaaagttcaattcaaagtagccattgctaaaaacaattaaagttcaagtttaggataaaaacttaacaattatcctgaattgaggggtatactccctgaataaaagtgaaaaaatgggacaaaattacaagaatttgttacgatgtcctaacatcttaaaaccttgggcaaattaatacaaaagaattactttttcaggaaacgtttctgaaaatatcttcagattgggacaacactactttccccaccactaaatagaaataactaaagagataataagaaaaaaagtgacacatacctggagtacacacatcccaaaagtgttacccagaattttttctgaatccttgtacagacaatatgtcaatcctgcagtttcaagaaaaagggaaagagaatctgccttctcagcatcctgcaacccactctgcattagccgttttagctgctttgcacgttttttcttgtgactgcattatcaagtattaactatattaatcaagcttggaagtaaagagatattgctaactttcagtgcggctagcaactatttcttggcaatatagttcaaaagtaggagcctacccttgatgtcctttttattctttgcattaataaaattttagtttcttcaccacaaacaatcttctgcatatgaactaatagtaacataacaatttacaaccactaaaggcgagcctaaaaataatttgatcatattatgaacttctcctaggtttcttaatacacactctttcactttcaagccatctatttttttattgaaaaaaaaaatgttacacaaacattgacaca

SEQ ID NO: 263103 - DNA, 898 bp, Cannabis indica
tcttatgcaggaagggagaccccttgcatactttagcgaaaagctaggtggggctgcccttaattagcccacctatgataaagagttgtatgcactggtgcgagctttagaaacatggcaacactatttatggcctaaagattttgtgattcataaagattacgaatcccgtaaggttttaaacttcctatagaccggccgaacatgtacaatcatcgtcagagacaagctcgactcatggggtagtaagtgttgagagtaaatgctttactacttgtatgatcatttatttaccactttccattttagggagtattcaagcatctagaatattatgtgatttatgatgccatgcttagaacgtcatatgataaatgtttatttaatttgaatgaatagttaagttagggtttaaaccaataagtgcataagtgtggtattggtgcttaactagctgggttgttgagtacaaggttatttgcaaaaatggagcctccgccatcatctagaccacagggtgagtgtgtagagcctggtgcagaccagaccaatccatcggcaccacctgcgcctccgtagaatctgagggataatgcgggggttggcaatgctaatccccctactgaccggtagcagatgtttcaagaaatgcgaggtatcatacttcgttaagaggaagagttgtgtcgataaaggcaaccgacaccggctgcccctatagagctagtgttaccaccagcacttgtgcttgtggtgggtaattaggggattatattgctgcatagagactcggtgtttacagacataattaaagttgagcagtggatgagtacaatatcacccgtatccttgataatatgggggtgacgagaacagagagagtaaattgtgcagcttt

SEQ ID NO: 263104 - DNA, 3519 bp, Cannabis indica
atccgcctttcctccctgacatcaacagatttactgagagggtgtcaagggggacaacgacgactcaacatgcttatatagcaggaacaaattttggtttgttcgaggtacaaaatgaaatgagtttttttagtgtaatattggattctagacatggcaggttgcttcggggtgtaatgataggtgaaagcgactgatcatatgatgcatgggggaagctgaaggtgtaaggagaagggggctagctataaattagactatcccttccattgcaggagggaggattttttggggggaggggccagaaggaaaaacttgtatcattgaaagagagagagtttattttcaaacactaaaaagattttgaagttttttcttctttgcattaaagtaaaagttctattaaaatttatcaatattattagttgaaaaagttatctacatcgttaacaagttctgactgttaacattttggcaccgtctgtgggaagtgacagtctaaaagcgacatttcttccctaatacaagttaccacaaaaatgccgagatgttctcaccgctgtcaagaagtagaggtacgacttgatgaccatcaactgatcgcttcgatacctcccccgccagtaggagctgccggaggcagaggcgctggtgatgaagcaccacagaatggaggaggtacaaatggtcaaagaccctcgacagaagaggagaacaggcgacttgaggatgaccaagtaaaccccacctaggatggaatgaccacctccctcatgctagaagaggacagtggggctcgacggtagaaagtgccatccctgataaggcacccacagctgccagggccgaaagacccaggaacatcccaccgatgaccgagaaaagagaagcgggcctactttgtaagtttgggttcacggacctgactatacaatgaggaaatgaacaaactaaggctgaggaacctacaaatggaagagatggttgcaaacatgcaaatggcgttggatgaactccttaaaggccgctccgagatccccctagtcagacgaggagcaccagaggcagggagaaggaggacagacaagctgggagatgaaggggcttcgagatactcaacaagcaacacccctgagtcctccccgcataaggtttctgcccggagaaatcctgagccctcctcacgacccaagaaaacagaatccaagctggtccaaggagacttaagggagaaactccaccagaaggccacaatcgaaaagcgttcgctgatagtagactctctttaggagaaaaagaaggcaaagccggcctctgctgatttacgggagaagctgactaggaggaggaaggagttagacaaacaaatggaagacatgcgacggagaatagccttagccacatccaaagacagtaattgggaagaggacgactttgacgaggagtcccctttctcaagagagatccaggcggagcccttggccgtgaatttcaaggagcctaatatgcttccgtatgaaggtttgatggacccaaaataccacatggttgcctttaacaagataatgaaaatgaagggtcataagcaaagcaaggtgccagtgtttgcggtgacgctcaagggggcggcgtataagtggttcaaaaggttggcacatggatccatcacctcttggaagcaattcactgatgaattcttggcccaacaccacgcgtccatgaaactatccctaggatgagcctggcaaatattaagcaaggagaggttgaaagccttaaaagctacatccaacgcttcaatgctgaagcagctagggtagggaagctgacaaaagatgagcacaagatggccatcgcggcaggcgtccgtccaaagagtaagttctggaacaacatgcccaagagagaattggaggacctagaagatatttacaaaagggccaaaaaatacatccaggttgaagatgggcatgaaaatctcactaagggaaagagcgagccgggtgggtcagccaaccctcacgctcatgaagagtcatgaaggaagagggagttcaacggaggcaaaaacaaccgaaataagagagttatgagggaggaagaccctcgacacagggagttcacgtattacactgggctcacatgctcaagggaacacatctttatggaaaatgaacaccagatgccgtttaagaagccgcctccaatgagaaaagataggtcaaagagtgaccccaacaagttttgcaaatttcacaaagatatagggtacaccacggaagagtgtacccacctcagaatagaaattgaggacatgatgcaaaaggggaacttggggggctactggagagaagaaatacgccccgaggagagagggtaggaggagcaaaggtgagaacacccccgtgaggcccctgaggtgataagagatgtcagaactatctgtggaggacctggaataggaggagacactcggaagggaagtgacaggtacgcagggaggccagacagccacctgtggtgatgaacctgaaacaaagaccgcctaagatttcaaaagaagagaagtattctataaggttcactgaagaagatgaacgaggagttcactttccccaaaataacccgctcgtgttggctgtcccactggctaacgctagggtccatcgagtactcatggacaacggaagtttggttggcctactctaccggagcgccctagaataaatggggttgggcatgaaggatttgaagccatgcacaacacccatatatgggtttagaggggactcattccatcccctaggaatgattgagcttcccctcaccattggagagcagcctaaacaggtgactgtgatggccacgttcattgtggtggaatgtctgacagctttaaacgcggtgcttgggagaccctcgctctaccgcttgaaggcaattgtgtccacttatcacctagccatgaagttcccaacttccggcggagtcgcgaccgcaagggggcaacagaaggaggtgagatagtgctataacacatcccttggaatggccatgaaactccgcgagtcaatggccatggttgtttgtgacaaagaggcacaccaacaaagaatcgaagtagacctagacccaagggtgagggaggaggaggttcatgctaaagccaacgaagaaactgaagaagtggtgatatccgagcatccgttgaaagtgcttaaaattaggaaaggactttacgaagacctcaaacacgagctaaagcaatacctgtggggatggcagatgtcttcgtctggggacatgaagatatagtggggataagtctcacagtgatgtctcaccacctaaacataggcccgctagctcgaccagtaagataaaagaggcgggcccttgactcggtgcgatatgtgccgttaaaagaggaagtggacaaacttgacatgcaccgcttcatacgagaagctttttaccaggtgtgggtgtcgaaccccctcctggtccccaagccaaaca

SEQ ID NO: 263105 - DNA, 813 bp, Cannabis indica
aggatgagtcagaacgatccgctagttgtaaagtcactgttgtgggctttgcttttcccaatcctagccttttgaagacagacaagggcattagattaatgcttgctcccagatcacatagagctttagtttccaccgaaccccctatagagcatggaatattgaaactacccggatctttaagcttgggcggtagtttcttttgcaaaatggcgctacactcctcagttaatgccactgtttcatagtcctccatttttctcttcttagacaatatctccttcatgaacttcacataacggggcatttgttccaaggcttcagcaaaaggaatgttgatgtgtagtcttttgaagacctctagaaattttgtgaactgcttgtctagattggtctttcggagtctctgaggataaggtatcttcacatgatgatcaatactgattggtggagactgttgtggtggtgctggactatcagtaatcttcttatctgatgatgcttgagttggtgctgtttgatctttaatctcttcatccactggttgtatcatctcaggcccatcatatttctttccactcctcaaggaaattgctttacattgctcttttccttttgcatcattagtgctaggcgaatttccttgagcttgtttttccacttgagtagccaattgttccatttgagtttctagagttttaatagaggctctagtttccatcatgaattggagcaataaatcagcttggatagtggagcctccactagaactttgttgttgcagctgttgttggttttgttggggctggtttc

SEQ ID NO: 263106 - DNA, 677 bp, Cannabis indica
ttattttttttaatttttttgctacaaattatttattattatatattttaattttaatttattattatatatttttattttaatttaagtttttctttttctaaaaggaaacaaataaaataatccagtctattcttaaaccaaacacaagattactttcagcataatccaatcttgtccagtccaatcctttttagtccaatccagtccaatcctacataccaaacgggcccttaaagcatagtatgaaaattaaaaagtcaagatcttactatataatgatgcacaattattggccatattataattacgtaaatatggttgtgttatatatagtgacaatagtaatactcccacattgattgcaatttataataacaactaactataacttataaaacttaaatcttttaattaaggataatcatacaccacattagtttatttaacgtataaaatagtaatttttctcaattttcgttagactccattttgaatttattaaaataaaatttaaaaatatttctgccaagacccaatgatctaaaaatacgtgccctaataatatgagagtatatgaaaaggaggaatattatatgtatacatgaattattatttatctttataaacttaaaactttgagtacgctgctgtttacccttaataacatatgttct

SEQ ID NO: 263107 - DNA, 489 bp, Cannabis indica
actaaggctttagtaaggaaaataaatagaaaaacttacattaatcttaacaaattaatacgatcatcaatcaaatataaatatatccttgtatctatctaataatatcaataatatatatgtatacatcataaaaataaaaataatatgaacaatacttaaatatataaattgaaaaaaggaaaaaatctaattataaaataagcatatatataaatatatattagttaacgctttacaatataactcacaataaaaattgatattcctcttttataatttgtatataataattaaaattttagttctatcgaaaattgaaaaatttaacttacatgataattgatgacaaaaagggaagatcctcttgttatataaaattgtaaagttttgtataaatgaggtaggtaagaacaatcacataaaaagtgtttgagagcaaaaaaaaaactaatatatatatattgaaagttgaaaggaaggtgaaag

SEQ ID NO: 263108 - DNA, 588 bp, Cannabis indica
actagatgttgcatttaaaaatacgtatctgtcgagatctaacactattatgcttgtctaatggaagacaatccttaaagatttctcccattaaaaacactaagttaagttagaccaacaatgaagactcaaaatttataactacaattcataacagaaagcaacatggttcaatataaattcatacacattaagaaattatcatacattcaacaaataacaaaggcatgtgaaaatacaaaacaaacgcctcttaattaatttccaagatttcctacaaactgatacaatgtccccgtaggaaagagtcaaagatatcattcattgaatagagtagtcagctcatcaaaaatagacaccactctagcaaccttttattcgatcaaagtaagagtcaaacattgccccggtatgaatttataaactattcatccaatgatatactatctaagaaaattgtaaatgaaaaagctaagaggaaactaataaaagataatttcgaataaaataagaatcccacgatgtcccagtaggcgagagtcaaagttattcttattttataaatatcttcattgtttcatattgtaa

SEQ ID NO: 263109 - DNA, 1669 bp, Cannabis indica
tcaaacatgtcacaagacaagacgattattcagaaataccatttaatatattgaagttatagattttgattgtcttccacttccaaatatttatttttgttaattcataaattagattccaattataatcttatttattttagtcattttcctacttaaataattgtagggctggagctggatctcaagaggagacatgacatgtgtaactgcaatttatagatttaacacaataattttgtttcttttttttaggaaataaaattgcatattattgttattttaatatgacttgttaagataacatgtttttcttaatatatagtttggttggtggcttttaaatttaaaccacattatagataaatgctaaagggcaccaatggtgtccatcattcttctatgtgtcaatattgttattagcccaattaagtatcagattctatacacgatatgttgagaaaatgttagggaccactattaagcattactaatacctaataacaatataatttttttaaaataattattaaattaaatatgtagaattacttaacattgcacatccataaaaatagtctcctttgtagttaaacattttaattttcataaattttggtttgcaaaggacaacaaaaaggtcaacgcatgtattatcaatatgatcacttactagcacatcaatttttttttttttttgttaaaaatcaccaacaaatcaagaagcacatcattaaaaagaaagtgtaatagatattattcttcattataatttatagcacatgcacttaaattgatagtatatatatatgtttatgttagtaaatccaatggtggatccataataatattatactttatttacatattttattattttaagctttgtgtccaactctttttagtcgtctctttcatcatcaaaatataatgaagtgattgtagcctcgatttgagactccttatgaaatataaaatttgtatatatatataatattaattggaaattgtattctaattttaaatttgaatttacatataaattcaatcttgtacaaattgaaattttgcttaatgtaagaaagagaagagttgaaaaaatttattttcaaataaaatttaattcataaatattgtagatggatgtgtaggtttgtgggaaagttggaataaaaaaaataattagagaaaaatgaaaattatcgtgaagtgatagaagtcaaattagtcaaatgattgaaaaaatatgtaaacataatagaatttaaaaaaaaaaaaagaataaaaattgaagacatcaaagttaaaaaaaaaaagtatatagatataaaagagtaaattgtgactaaaatacttaatatttttaacacaatattaaagtatatttttttattagatgaactatatataaatacgtgtcgtatttgttaaaagatagagtattattattaagtattaatagtatttaatactttttagatgtattattttaattagttaataattagctctaagatatatcctatgtttataatggtaaaagagatatatatggtggcagacaagatgagatttttaatgaaatatgtaagtgaatgaagtcattaataagctataaaggtcaacatattacaatctctttcttttttttttttttttattttagaag

SEQ ID NO: 263110 - DNA, 1759 bp, Cannabis indica
accataacaataaattaatgttactatttataatatataacaccaaaataatgttataatatgctatttaataacatgtgaaaaatgtaattaaatgtcagtacttttaattacatgagctgtcttaacagttgttaaaatattataaaatacatttaataacactttttcagtgttatcataactgttttttcttgtagtatgatattttctgcaataagagaagggttcttttgaagtgtagaaaagcaaaatggtccaagaacaaaaagtacatataatagtgttgtcaagtcaaccattatcttttgttgtgcctataaaaaaaagttgcatgaaaaaaatgcatatacaaaataaagattctttaaatcaaaagccatgtatataaagtcaagtatgatataagaaatgtttgatgataattactacaaaaaatgtatatagacatatgtggggggtgataataatatactactattgcttaggtggtcccatatgtgtatgatgagaatctatatctaccacaaaatattaatgatggtattattacttcaaacatagcttctcttattcactgttgatataattggaatattctcttccaatgcaattataattcatgatcaaattacaaaagttgtgcatgtaataattatgttgatacaattatcgatcttacacacactaaactcaattactcaaaaattatgtaacaacagctaattctcctattaattgtaaggaagcataagaaaaatatttgtagtaattacaatatataaatataaattgagtagagaagaattacttattaagagccacaactttaacattataaaaaatatttaaaattaatttgtggcctttttgtagccaaataatagaaataaaaagcagtaaaagttttgtgtattttgtcttttgttctttggtgggataaggattctaaaacttataattcagacaaagacatgtgaatctttatattgaattgaaattgaactatatggttttgctttacccccacaaatgcaatataatctattatggtctagatatggaccctttacccactacactagtttaattaatttggatttaagttctgattgtcttgtcttattataatccctccctttaatatttcctaatgatgaatataaatataagtggttggtccattaatatataattgtgagctcagctcattatatttatattaattacactcatgatgaccctccaataacatgaatcacttacttataaataacactataatgattaccgtgcatactcatactattagcaaaggagttgatctttcttttagcttaagttttgtcttttctgagtaaatattgatatgggtttaaataaaaacaataataataaaaattagtaccataaattcagataatgatatgaatatatatttatatataaggtgttggttggtggactctgttttcaggcaaagacggtaaggaaaaaaaaaggaacaagagaaagtgagcatttatgagttgttatttgtcataagcttcacgtggacacacaccaaagaaagaatgagtagaaaggacaagttattttcatatgagaaaatatataagttggtttggtagacatatatattgaatggtagttcaccacgttaacatattatgaagaaaaaggcttaaagacagtgtacaaaatcacgtaaggattagcgtttatatattacaactatgtataatataaaactcgaatc

SEQ ID NO: 263111 - DNA, 674 bp, Cannabis indica
tatcatttgatatttttcattatttttaaatgccaaaataaatttcaaaacaacaagaaggagattcagcactaaaaaaaggagagaaagagagccaggttcagatcttgataatactctacgacagaaaggatacaagggttagagatctttacggaaggagacattttattccgctgcacccaatgtaaggtttctcatactttatatgtgtttaattttataatcgttttaaaagttcatatttagggtgttaatcaacatacttgtgagtagatctaagatcctggtaaaataatttccaacagtttcctgttgaatgtacttgctaatataagtaaagtattcgtagtttattttttccttttatttactgtctgtataatttttggtctcggccccagtcatggacacagacctgttgggttttctgccctaaataaaacttatttcaatataatcagatttactaattaataaaagatcagaaatcattctatgttgtatggttcacatgattcatttcatgattatatttaatgaataaattctattaagtccagaacatatatatttgttcataattatggtgtcgtcaacacagtaaaatttaatcaagattatatgttcaaaagtttatgtcccatgatatgtcagtgtactggatttagact

SEQ ID NO: 263112 - DNA, 719 bp, Cannabis indica
ataaataaaactaccataaacaaaattctaagcctaaaaatatatttctatctctcttaaccgctctcacgtttttttttttttgtgcaaattaatgtatttgattgtgtatacatatctctctctcagccgctctctcatcttttattatttttatgtaaattgatctatttgattgtatatacaaaattgtaagttacaatcttagttatttcttttattttcgtaaatttatgattatttctcttttactttcgagtgtgtttattttctcttctaattccttttttattgatcaatatttggattatcttttgtttttatttttatttattttatggggattgcttgaccttttggatacttgaaagcttttgtatgtggcgagaattaagtggattgagacagatagtcggaaagccaacatgaaggttcatgttcagtgtcaattaaggataaaaatatatagaagtatttgaggtatttttcatataatatgtgtattttattttatttttatttattttttttttgccagtttattaacctgaaaattgacatttattttggatgttaaatgaagtagatttcatattgtcttcttttatttaatattaaaaataataaattaattattcaaacaatacttattttttttatttgtaagctatgtttatgtttttctttttgtcagcaaaatctaaattcaaatattaaat

SEQ ID NO: 263113 - DNA, 696 bp, Cannabis indica
cataaaaattacatcaggttttttttgagagatgagcagacgcaattgacggaatgctctcggattgctcaagccccgagcattccaagagatgatattcatgacgattggcgaggctgaacatcagccttcgccaagagagcaccatcacaatcggcctgcagtgaaacatcagcattttcataagaagctttaggatgttaatgtgttgaaaggttggtggaatcttctaaaggagtcattcttgttcgacatcgcttcagcacagtacgcacattaccactagtagaaacatgctgccttttagtgaaaatagaagacattctattctcagagtgagtgaaagttggtgaagtagtggtagtagtggaaatggtagcagccgagaaatacagagggatagatgtaaccaatgtggaatttgttgttactggagtggagtcttgagaaaaggggcgactgctattctgaggagaaacatgaacatatgctagaggagttgcaactgaaagcataattgatgttgtggcagagacagatccgacttattgttgttgctttgatgaacatttttgactgtattaaccgtagttgaaggagaaagacatgcaggggtagttgaacaaatgatcggcttatcatcacaatgtttgtccaaattaacaatcgaagatgtacctgttggaaattatttta

SEQ ID NO: 263114 - DNA, 1214 bp, Cannabis indica
aagtaaaaacagtattatagaacgtgtttttaaaaaatattttcactttttcaattttaaaaacagaaaactgattaaaaaagtattaccaaacgacaccaattcactaactttatacaattgataattaaaaaataaaatataaaatagaagagaaattaagataaaagacctgggtagtgatgatgagaagccaaccagccaagaaagaaatcttcttatgataaaaggctttaataatatcgacaatcataacagcataagcagaaccatttccaaaagcacttccggcattagcaaatatagatatcaaaacatgctccttaatgttaaatgggcctgggttgagtgagaattttcttgacccaaaaccagggattccaaacttagtctttggaagtacggaagccatgaactggcccactggaagggttgccactaggaccgtaatctgggtcaccaccagtggctccttcctataagagaagaactggttcagaaacgacagaagaatgcaagagagaaggcccaaaaaccacatccgaaaggtccatacgggcaacgacatgtcgtccgtgttcggtacggtcaaccgaacctcctcaattggtgagagctcatcttcacttatggaaatctcctggtttatttcttgagtactattattctcatccattggacaagaatgttttttaaagaaggtactattaaatgtggactctaaaccaattgataatacttatatatcaatcacagcaggcattctacgatttcaatattgtaaattatgtagaatttttataaaaaatgagtgggatttaattataaatatatattttggaatctattaaaaaattgtagagaatgcttgaagaggatgataattaatagaacttttttttttgatagattaatatcaatgaatcattatcaagagttgtttccatcgatgtatgtgtcccttttgtatttacatgtatgacaatcacaatgttttagaacaagaagaaaggggacggcgaacacataatttgtatttggttaattaataattttttccatgaactttgacacgtagtaaattgagctccttgaatttttttggccattaaaaattcttcccgaactattgacattgtgaaatttaaggacttttgtctaatttcattcaattttaatgtttcatatatttaaccatgctcctcagactttga

SEQ ID NO: 263115 - DNA, 1694 bp, Cannabis indica
gttccaaattaaaagaattcatggctgtaggcgaccctgagcttcagggttcgcctcttccatgatcggagtgactgccaaatctcccataggagaaatgttagttactttgttttccatcttcccttttcgagccttggaatctttctttactgctacctttctccgagtttcttttgcaatgtttttcgaactgcttcccactgcaaatggtgtagatccatttaaaaccagggcatcttgtgtgtatgaaaccgggacattatagagattttgatcctgggtttctttggccaaaattgtggctgatttttttagcttcccatactcagaatctccgtaatcgtccacaattcgacgctttccacggctgccatcttcacttcggctctgaacgtcctctttcccatcattccctgcctttacactagcattctgtgatgaatattgagagctcttatccatattctgctgtagctgattgtaatcaagactcccagtacttaccacttccatagtaccacgcataggaacagagttacttataatgttccttccaggattggttgttggtgcttgccttgcctcttctaaagtatcatacatctcctttccttgtctgtttcccattatgccttctctacctccattatctaccttgagccattttccatacgcagcagtatcttctttcccttcctcatgaataatgattggttcttgatgacaatctttatggctgtgcccaattcttccacacttaaaacacataaatggtaattcttcatattggaatgcaatccattttttctttccttcccagggaagagtaaagccaggacacacaggtttttggatagacatccatgtgcgaaaacgaaagaagccatcagcaaccattttagacacatctgaattgtacaccgagatcacttcccctgcctttgctgccattcttgttgtgttctttgtagtcagaagatcagttggaactccccatgcccgaccccatataggaaagctagtcaaatcattcttccaagattcattagaattctctattttccccagaattagcaccccattagataaataccatggcattttagataatattcttctttgaattgactcagaagcaaatgtaaaagataagaaaagacctaaaatcaatcttctctttgatcttgatattccattcaccatccttcaatcaccatatccctcccagcaccttcttaaggaaacccctactgtgatcagagttcgtacagagttgaccccgtaggttgtatcgtgcgatcgtaattgataagcttttgtccacttcccattcttcatcttcatccgtgacctgaagattatgagttttctttagaatttcatccattgcagagcttatcacctcaatcccagagaaagggaacccttcgaacacgagggaagaagacagggacaaggctgagccgaaccctagcagagcgggaccaactatactctaattattttttcatgtcgtaaattgggtaatatatatgaccaatattattaagtatgtattaagggaaattttttttaagattttttaagtatagaaaatcaaattttcctaaataaatatgaaaaaaatattaaagaagaagcaagaaaattgaaaaataaaaaaaggagaaaaaagatggtaaaaaaaatgt

SEQ ID NO: 263116 - DNA, 504 bp, Cannabis indica
gcctttctgattctctccaacagatcagattggagtgataagttatgaaatttcccaaccacaaactcaatccttgcactaaccatttcagaggctagttgaggggctattaaaattgtgctacaaacttgcccgggaccccttctactcaaaacatcagccacaacattggccttcccggggtgatacagaatctcacagtcgtagtctttaaccaattccagccatctcctctgcctcatgttcaaatctttctgggtgaaaaagtacttgagactcttatgattagtacaaatctcgcacttctcaccataaagataatgtcgccatatctttagggcaaaaaccacagtagcaagctctaagttatgagttggatagcgctgctcataatcttttagttgacgagaggcataagctatggccctgtcagcttgcatctaacacatcccagaccctgtctggatgcatcataataaacaacaaatttctcttgatctgatg

SEQ ID NO: 263117 - DNA, 1533 bp, Cannabis indica
ttcgaacatataattaagattatattccactgtgctgacaacattataatcattaacaaattcatatgttctggacttaaatagaattcataccttatatatataatcatgaaataaatcatgtgaagcatgcaatataaaatattatttctgatctttattaataagtaaatctgattaaattgaaatggattttatttagggcacaaaacctaataccaacttcttatggggtggctgtatagttcgatgactgaaggaatcgcaacaaaagttctgggttgtgattcagctgctgctttatggaaggctcttgaaaatttgtatggagctcactctaagtcgaaaaatggacgagactcgaactttgattcaagcaactcgcaaaggctcaatgtcaatggaggagtacttgaaatagaagaagaactggttagattcactgactttggcttgtgaaccttacccaaaaaatcagcttatagccaatgtcacttctggtctggacattgaatatcttcccatcgtgttgcagactgaagctcgtgcttcaactacttggaaggagctgcaaggaatcctacttgcttttgataataaaatggaacgtctccaaaacctatgtctcaaacagcaccagatctggccactctcccacttctccaaatgcaaatctagcaaatcgatccaacaatggtggtcgaggccgaggtagcagcaactatcatccacacaaaaacaactatcacactaatcagaaaaatctaggaggtggtcgtggcaatcatcctcgtggtggtggaaacagtggtggaagaggttgtggtgatcaatccaatggccccaaaccaacctgtcaggtttgtggccgatatgggcactctactgccatctgctacaacagatacgatgaggcatatatgggatacattgctacaacagctagaaatcaaagtaatcaaaagaaaaattagacagttgttgcatacattgcttcaccagaagttgttgacagtgagggatggttcgtggatagtggagctagcaatcatgttacagcagatgaaaataacatgatgcagaaacatgactatggtggtaaggaaaatttggttataggtgatggtaatcaattatgcatttctcatcttggtactggaaaattgaatactaataatatgcatagacctttgctgcttaatgatatgctactggtgcctaatatagctaaaaatttggttagtgtatctagcctaacatctgacaatgatgtgtttgttgagtttcaccctgatttttattttgtgaaggacaaaatcacgaagaaggtgctgctggaaggagtgcttagagatggtctttatcaactcaactcaagtctcaacaagcctggttatggtcaaaaatagtgtcaatacttccctggtgtctcgagtttgtcaaaatcaagagtttctcttgcaaccagttttgaaaattccaagaaagatgtctagcataggcgtctagctcacccatcctctaggattctta

SEQ ID NO: 263118 - DNA, 596 bp, Cannabis indica
aaaaattatttcaatttttatttagaaataaatagaaaataacaaacaaatgaattataatattttacttatttagtaaaaatattaacaccttcttaatatatgaatttctgaaataaccaaaaaatcataaattaaattttatttttcaatgattataacgatcaagcaagcgctcaactaaatttatacggtacttatcatcttaattatcacatacttatcatcttaattatcacaaaatattaagacaaatacacattccattatagaaataattagtcatatgaatcatgactttccttttcatttaaagtagaaattaacacattcacataattcattaaaattaatcttcttattatacatttcatagataaaaattctatcactaatattttttatataaaatccttatttttcagttcttaaaaacatataatgttatgacgaagtattttatagttgtcatcctacattcacttttgtggagaaaatgttccacctataccacaaaataaaatgtaaaaactttcataaattgtatgttaaattgtttctttatagtaaaaaaaaaggtctaaacaatattttaa

SEQ ID NO: 263119 - DNA, 920 bp, Cannabis indica
tcaacatgcttagttctgagattaacacaagttggaagcgtcccagaagcagcacgccagagaaagtttctaacctttggtgggatcttcaattgccataacttgtgccagaaaccagaattgttgctaccgagtcttgggtctttggattgttgaagaatacggtaggcacttttgacagagaaatggccagtgctttcgttagaccaggtccagaaatccgaggaagcagagaagcttaagggaatgcttagaatcagattagcatcccgatcattgaacatatctcgaaccagatcaatatcccagcttcggtcttcaaccgagaaaagagagcttacatgatgaccaatgagacccacatgagatgaggttatgaaaggattatcaggatcgggtaaccaaggttggtgcaaaatatgagttgaagttccagtacctatagttctcctagctccatgacgaaccagatcttttgcgctccaaatacttcgccaaacaaaactgggattacgacccaaatcagctgagagataatcatcatggggaaagtatcgcgctttataaagcctggaaacaagagagtcggggtgacagagaaacctccacccttgcttagcaagcatagccaagttaaaatcatggagaagacgaaaacctataacccccttcatcttttggacgggaaagccggtcccaattcatctaaataattccattgcctttgctattcgtagttttccaccagaagcgagccattagcttttcaatctcattacaagtgccaagagggataagaaaaacactcatggcataagtgggaagagattggatcacagtcttcaagagaatttccttgcctgcaccagatagtaacttgccagaccagctattgattctattcatgactttatttttga

SEQ ID NO: 263120 - DNA, 680 bp, Cannabis indica
tcctttgtaaatattataatacaagttaatacaaaccatttattatgtattaaataatacaacatacattgtattaaaaaatttggacgtaataattaatacaatatattgcttaatccaaacatagtgttatttattatttaatacaatacaactcttatacagcgtaccaaacgagcccttagtgtacaaatataaacatgacatgtgtacaagagtgtgtctataatgacacttaacgaatgacattgacactttaaatttacaaccagttcagtaatttagatggttttattactaaaatttgaacttagcgtgataaatacaagtaaaatagcaattaacagggtttagtcgctaaaaactcatcaaaacatctctttaggagatgcactacaaatgttctcatatatattttccaattctacttatctatctgtctatactatcatatttaacaaaatagagcattcaatcaataatttttgcaaaatacaaaatttatctaattatatttcataaaaaaaaaatgtatcattataatttctttttcaattgaagcgtttatatatacattacaatgcataatttaaaattccatctaaggagcccacacacccttccatactcctatgcaggcctggccctaggcataggtgggctaggcctgtgcctagggc

SEQ ID NO: 263121 - DNA, 737 bp, Cannabis indica
aagatgaacgttgcagcgagagacttatatttctttataatttcttgaggaccgccaagaagaacactgtagtgaggaacgccatgaagatatattctattatgctccctttattctttgatcttcttgggttgtgtaaaaataggtccactgttcctgacttgggttctgctcttaaagctctactatgagtggtggagattccaagtcttctagttcaagagaaaagatgagttattatttttgtgttgtttctttttcattgttattgtgttgcataatagtttattaaatgttgtatttttctatattttgtcgaacaatgattttggcacatttaatttgttgctacttttgttgaggatttcatccatggcatagatgttcctaaagactttgacattaaagtttactgcactcggcttgctaccctcttgtttgcctatggtcagataaaaaatgactaaaatattgacaatgagaatgagaagctcaataagtcttcgaagggtggtaaaggcaagaagtagagtcttctgatgggaaactgatttataaactagtttgatttttaaatgttaaatgataagacttttttatggctgttattgttttatttctggttttatatattatagtataatttctgtatgactgattgtaatcttttattttttttttaaaaaatgattgttcttttttgtaatttgagtcattatacttttgttgttagtaca

SEQ ID NO: 263122 - DNA, 733 bp, Cannabis indica
ccgagccaccagaagctggaacaacttttcttttctgctcagtggtggagtcaccaccatccctaccataaacaggggtaggaacaatgggggttccaccaacactcagagtcacccggggctcctgaaggaatttcactgcaccctcggctctcagagccttttcaaccatctccgcatatgtagttgcctcagtagtagtaataaccaggtcatgtctaatctttgcactcaaacccgccaaatatttttctttcttgctgaaatcagttggcacaattcccgctgccaacttggccaaacggtcaaactttgtcgtatattcagtaaccgacatgccctcagtttgaaccaattcagtgaactctttccgctttgcactgcggactgcttcgttgtaatacttggagttaaacaactctttgaattcttcccaggtcatcactgtgacgtctcgagtgagggttatcaactcccaccacacgagagcgtcttcctgaaactggaaagtggcgcaggtcacccgatcattaccaaccactcccataaaattgagaatacgatcaatcactgaaagccactgctcggccttcatcacatcaggacctcccagaaacactggaggtgcctgcttacggaacctttcgtataacggctccatacggttgccaacgacaggttgttctgctggcaccgcaggaactgccacagcttgaaccacttgaggaggcac

SEQ ID NO: 263123 - DNA, 651 bp, Cannabis indica
aattattcccatttcccaccattctattcattttgggctaaatttttgttatctgggaaaacaactcgattcatctgctgctacaaggaatgtgcccttttccaatattctttattttattaattattaacataaaaaaaattaccatcataatataagaaaattaataaaagaaatctttttcaacgttcttattctatttaatatgtaattagcatatctagtcaaacatataataattcttacagtaataatttttataccactatgattatcaataataagtttcaaacaaaagccaaattgcatgatattcctctataattgatctctgctaccaaatggcataaatgtattttaaaatatttaattacgattcagttttactgatataacatctaaaaaaaaaatagatctactcgggtagtcaaataatactgaccagtgaccatatattttttttcttcactgttatattatttattgcacgacaatatcaacattaaaatttggtttacttcctagctagatagaattactgtctatgaaattcgtttgaattaattaattacattcgcaccaatctatataatatatatgttatataaattaacaattaacccatgatctatttgtatataacatagaaca

SEQ ID NO: 263124 - DNA, 504 bp, Cannabis indica
tccttcacaattcgatccacatagaccattaaaactgatcaaagtatccatccattgactttctttcaaaatgttataaacatcaaatggcttatgagcaatgacattaaaatttttctcaagagtaacattcctattctcataatatttcatgtctctagcatgatcattataacaaaaataatgagaatgacgcttgaagttttcaagagtaataccagagggcctctttcttttcggaggaagaataggacttggagaaacaatgggtcattttcctttgtccttctttagaaatgcagcagggacaacaattggttctgcactaacaggttcaactttaggctcttcactttcagacccagaatcatcagcagaaggttgatctttgggcacaaactcttcacttgaatcagacataccctttgattagtgatcctcctcagtttcttcttcaggttcagaatccgaagttgagacggaagggagattctctttgagact

SEQ ID NO: 263125 - DNA, 1344 bp, Cannabis indica
gtttttaactagtatttttagtgtgtaaaatgtaaataaacatatttaaaccattagcatgtagaattcacgcaaacatcaatcacttcaaatttcttatattgataactaatcagattgtaaagagttttatttatggacataaaacccaacataggcaacaattgggatcgctccttatgaaattttatatagaagaaaatgtagatcacctattcactgggatgaagtgggtaaaagaaagttcctaggtcccaaagttgttcaaagaacaagtgaggcaatcgattaaattatagcgtgaatgctcgcatctcagagcaggcagaagagttatgtagatctaaagcgtcgggatattgattttcatgtctagttattgcatccacaagctgatacattcttggaagcgaaaaacaatccttgggacatgccttgttcaggttggtaaaatcattacatactcgccatttcgtttggcttggcactagtacgggggttacccacccaagtcggatagaaagcttcaatgatgaacttgtttatgcgtagtctttctaactcttctttcaacacttgtgctcattccttttccagttagttttcttttttgctggatgggatgaaagtatgggttaatgttcagggcgtgagacatcacagtggggtcaataccgaccatatcctcatgtgaccagacaaaaacgtacgtctaggtttggtctcagaaattttattaaagctaattttattttgagcagcaatgctttacctgttttgagtttcctgaccaggatatctggatcaatttcaattcttccaattcttctattggcccgacatttgtatttgtttccccaagtcggggatccatgtcttcatccccaccttaggcaacttcctattgggcaatacatttccccctgtctgaactctggccaaaggtattttccttcttcaccttagttagagcaaggttatagcatttccgtgcaattctttggattcctttgagacatcccactccactttttgttgggaacttcacgcatagatgaaaaactgatgtgacaacttttacgtcatatagggtcggttggcctaacgtgacattgaaagtcgatgggacatcaattatcaataattgtgccattatagctatgctcctcggagcttgtccaacagtaagtggtaggcggatttatataagtggtgtaacactcaaattggagaaaccatatatgagctgagtgcaagggattaagtctttaagctagggtcccatctctcataagttgttttaaaatataaataatttcgaggaaagctccgattgtctatcat

SEQ ID NO: 263126 - DNA, 813 bp, Cannabis indica
tttccttttgaatcactatatatcactccaatggcataaggttctgtgaaaatatacgtataaaaacaatcatttatctcaaacatttatgcaagaatcacatacaaaatagatacacctcaaaaacttttataatttaattagcactctaatcttgaagtttactctgaatatttttttttttcttttcaatgtactttcttgacttttttttttaactctaaaaatattttatatttttttctagttttaattgtttatcttatatttaaagtatatatataaatatttagaatgtgatcaaaaggaaagaaaattgtataaattaaaaattgggatttttatttttaaagtatttttttttgtaattttgtggaaatttttacacagcatgcaactcacataacaattaacggagcaattaaatcgcaactaaaattgatattgtaactcatatagaaactatcggagcaacccaaactattaattaaaaaaaataatatataaagtacttctctttaaaaatatgtattttatacaaaataaaaataataaaattgaatgcctttataattttttttttgttacaaattacaaataaaattctccatattcaatctattcatatattttctatcctatctttctttccttctataggtatagtagggtcactcaataatttttgtttttctcgaaaaggtaaaaaaggtcatcatgactcatgagactttgtatattagaataatacaaattgggatagagaatttagatattccacaatttctagaccacaaatttataattaaatta

SEQ ID NO: 263127 - DNA, 720 bp, Cannabis indica
ttttgtttcaaaaataaccagtgtagaccaaatattgtaactaaaatgcatcaagctactccaccaaataaattcagtttatgtttaagaacaaaaaaattaaaattaaaataaataaaatacgattacagttcgcaaatagtcttagttaaaccaacaactacacatatgaattgaaaacctcaaaatatgccaaagaattatagagacaatattcctctaaatccctattacatttaaatttctcattataaattaaaaatgaaagtatgactagaaaataaataattaagaacaaagaatgatatgatgagataaagcactagatgtgtttatgggtagtggacacaaggcttcttaatgttgtctcattatgagcctaattcaaaataaaaaattaagaacaaagaaaatcacaaaaactttcaacatgaaaataaataattaattcttctaatacatttttttggtgaatcaatcaccatccaagaacataacaaacacttagaaatcaaagaataacaaagagaaatcaaactgacaatgcacggacaagaatggtaaaatagagtatgcaaacacatgaattacaaggtttgatcacaagcaaaaagcttggatctactccttgggtggaactgccttaaggctttgcctttaatgattaaagatgaagcttagagttggtgatttacagggatagaattcatagatagaact

SEQ ID NO: 263128 - DNA, 1038 bp, Cannabis indica
tcatagtggttttgacaagatcattcactacaaagagtaatatgcctatatccacttgaaagtaggatcatctgtattcgaatatggatgtacattcagcggtggatatgagttattgttaaattcttaagacgatcactctagattttacctagaggccagaaatttgaaatgtttgagaaatttcatggatttctagcaatgctgaaaaacattaaggtaagtggttaaagatcttgcgaactaataggagtagagaaatatttggatatgcagttcaaagatacttaagttgaactttgaattgtattcaaacttacctccctagaaatttagattgcattttgatgaaagtaaaaggtctacaattagttactagtagttgcctaagtccttctagggatataccctagtgattggaaaattttcagaatgatgaaatggttgtatacttagtgtaaaccattactagaatcatggatgtccaaattaactactagtgttacttttgttaataaaaagccagcgaaatttggggaattaacaagtcattgatgctccatgttttgtagttttcacctgctaccttattttacatctctttttttgtactcaccacttttctgcagacaacatgagttttcttatttccatggcgacttgctcaaagagaaagatcaccgcaccaaaggagacaaagccttccatcagggaggtcgtgcatggtatccttgctgcttcttctgctcctagaaacaagaagtcttggaaaggaagcaaagcagctgaggccgctccccctatccatgaatgttgcaaaggcaagtctaaagttgccaaagctgatgagggatcttcgacatttccaattgaaatttctcaagatgaggttgataatggtactccgtgttgggttttgtgctctaaataaaacatattacaatctaattagttatcaatttagaattttgaagtgatttatgattacatgtatattacatgtttatggttttatatatatatttgatatatgcacaa

SEQ ID NO: 263129 - DNA, 792 bp, Cannabis indica
tccttgtattatattgcaataaagttgtaatatctttgattttcttccattgttataaaatctctaacaaagatatctctgaaaaccaatagtaagaggttaaatgtaattctatgtatgaatttaaccagactcctactgttgagtgagagtcatctaagatgtaatcaaacaaggaacatcaggagacagtcaaggaagatctatgaaagtgacctatatgataggggtgtatattagaatccttatatctacaccaactcataacctattagagatggtgttactctaggggtgaaggaattattctagaaggatgtaaaaactcatctataataatttaagctccatcagtgaagataaataactttgttgtttcgaaaagcactggaaagttattcaactgaagaaagttctacactgtgttatctctattccatttttggatagaattagagatatatgttctgtttattcagatgcacttaacaagcaataaataattcagtatccctagatgagtaatgcatatagaaagtgatgttgcataatgttttatgaacacagaggaagtaatagtgggaaaagcagtagcttaccatagacttacagttccagtaattttgggtttagtcaaatatactacacttgatctggatatcaagacaattaattgattgaaatgcactacttgttttatgttagtgcaagtgggagtttgttgggattttatgtcctaaataaaacccatttcaatctaatctgatttgttatcaataaaagattagaagt

SEQ ID NO: 263130 - DNA, 437 bp, Cannabis indica
aaataatttccaacactaagatcaactaagtgacattgacttagaaaagatattatgttaagtttatgatatctttttcacgattaatatcggtccagtctgatgtatagctaataaatccaatactagtatactttactaatgccttaaaaagaacactccacatattagtctgtaagtaaactttatcgttgattatcgcttcactatatatcaagtgcactgataaatcgtgagactaaatagtttgaattatataatcataattattttccattgtgatgacatcgttgtaattgtgaataactatatgttcaagatttaaaagaacttatatattaaatctataatcatgtataaaaaatgtgaacaaagcatatgacaaggttaagatataatttctgattattattgaaagtaaataagattacaataaa

SEQ ID NO: 263131 - DNA, 426 bp, Cannabis indica
cagtctagagttctcatcaaggaaatcatcagtaagattagcataaaactctttaataatgttagcaatgaatccaataaaaccagtaagagtgtgttcccattgatgaaattgaatgaactttacaataccataaacacgatgggcatgcaaatcataattcctctcactttcaaacttacgagttgcataaagattccagtcacgctcattgtctcgatagtaaaaagttggacagccagagatagaggaagggatattaccagatggaggatcttccatgggctgcttgcctttggcagcagcagaggcctttgctgcagaagcagtttttggaacgaggaggctctggctcgagttctgtgtcttcactgtccttctcagtatgtctagagattactgattttgtctgaagagacttccatt

SEQ ID NO: 263132 - DNA, 3638 bp, Cannabis indica
cactgtaaataattggtgcctacgataggtgataactaagtcatttagtaatgtttgctttgcttagctttaaaagtcatggcatacttattttgggaataatagtgtcatttggtttagccatctcaactacaaggatggctcacacttttatatatggttcctttcaaatttatctcaacttattcttttcctttttgagttttagttgaagagttgtacttgcaacagtttttacttggccagtcaatacatctagcatggctttcattttactttctaaattttttgaacagattttcactcagcgccattcatttttcaagttagctcctatacgttacacaaaggggtcaagaactagttattgcctggcttgtttactatcactcgtagagcaggtactagattctgctaacctattgatatcatataatgcttgccttgatcaataatttgcctgctcgaattatgactgtttttagtgaactaaattttcatgtcaatagacaaggtatttgcaatttcgcaaatggccggtggagtggggttggtgtcgagacctacaatcatttatttttgtgttcaagggacacaacaggtgcgtgttttgcagcattgattgcatctaaaaattgattgcttgccgactaggagtgcatgatctttacatttatatgtgattgcagaatcgtgctagagcgtcctgaatatggctacgcgacatacttttttgagctagtagactctttatccattgattggcagatcaagcgactagttactgccatgaagcttacaacctgtagcaggatttctcttattgagaacaaagcattagtggtaattattttgctttgtctttttagttattgctggcaatgtgatagcactaaattattttcttaattggtatgcctgcatttgtttttgtatctcaagtttcttgaaccttaagaatggtttggaatgacttttcatgttttgcaaactgtttgtgtaggacaatttaggatttcattaacaattctggctatgaaattcagattactcggaaaaagtaaaactatgattgtgcttattgttttcagttattattttttataaatggacaaaggtcacttgtctaagacttaacttctcccaaatttattagggagcctcacttatggcagaggaaagccgtggtagcatgataaacatgaaaattaaaagcataaaaacaggataaaacacaaactctgatacttttaggcccattctatatccccaaaccaaggcactaatacaaaatagacccccattcccttgttaggtcttgaaaagatagcccctcaaagctttttgttgacccatattgaagtccaaactttaatcttctcccaaaggacatcaacttcgtcatctatgctttcaaaaatcccactatttctttctagccaaatagccaaaatgtctgtccataatctagaactcctcttatcccctataattttacataatatcagttggctacatgtttggggcatacaccaatggatcccaaactccccccaaatctggtttccaacgtctcgagtcctctataagattaaaaactggtttctgttccagaatgctcaacaattccaacaagtttgtcaattacattcctttgaaaataaaggctccactcagaatcgaaaatagacgaaccttcatttatcaccatcacttgccttgtgcttttatttttagccaaagaaattctagccaagttaggaagcaaatccttgagtgcgatatcccctacctatttgtcttcccaaaatctaattctctcaccatttccaattatgagctgaaccaagtttagaaagtcatcatgcaggccagcaataccttttcaagggcctttatatggcactttccctttctagtgtcccaataattagtatcttcatttttactttttattactttatgccacaatgattcagttttccaactagaatcttcacaaccatttcataagaattgtaatgttgtgtttttccaaactacctattcccaatccccatggaggcgagatttacataatatgtcccaagccaccaaatgtcttgttccagaaaaaatcaccctcttcccaaaagaaatccttcattaacttttctaaagtgagtgtaactgcctttttattcacgtaaaatgaatgtcacattattcaattttatagatattcaccattgagctgatcaagtgaattgttggtctctaacattacctcaaggccaaacattcaccttgtcctcaaggtgaaaatttggtaattgtccttgtatcatttgaaaatcttcccatgtatacccagttcaggtaatgatctccactcgattagcccatcgagttctcgtctctccattgatattttggcacacatctaagagtttccagaccctactaccaactataggtcaacaaggagttgtttaggaattttagataaaaaatagctcattctgtaggctcttctcagctgtgaaatgtggagcacgaatggatagaactagtagcttgtaattctagtttgcaagctacatatacaacccttgccaatatctcatatgggcaccttgctgcaagtttttcagattcctctgtcctcaactcttttgcctatatggtcttaggttgtggaaaactaaatttggagcgactttaacaagtgcacgcgaagttcatctagttcttggccttatctttcaacaatgtgtccatagctgaatacggtttcgatagtattaagagggagcaggggagggttttatccatatagagattaaatagtgtacattgtgttgctaaatgttcaaagtattataccaatattctgcacggtaatcattaataccaatacgatcggattgtgattagattcaatccttatgtaaaggaaaataatttgttccacgtgttggtgaataaggatctgcccaatctacaacaaataggtcgttgccttaagtcaaaccatgcgaatcacgggttattcaatctaggatcgattagttcagctccttttatcatctcaacaaatagtttcgtgatactaaaatttttggccttactaatctttccatacttcatacaacagctccatcttctcctctaatgcctctacctaagtttgaaccattttggtagtggattgttgtatagggacaatggttttattaatcaaaaagtaacctagaagagtccatggtaaaactagggtgtttgggagcatagcctctcccaaatccgaccacatacaaccatacatttcaacaaccgctaacattttacagccatgccttacatacataccttctctccattagttaataaccgaaattacacatcagccttatttttcagttattttgtatgcaacatatatgtaataaggggtttattagcgccttgatgttgatgtaatgaagttaatgagcttcatagtttggcatttgttgtcatagattatggtattttgctatatgtagttattagacgagcatagaaggcttgcttatatttattatggtggcgtttgataacatttttttaattagttttctgtttttaaaagtggaaaagtgaaaatatttttcaaa

SEQ ID NO: 263133 - DNA, 533 bp, Cannabis indica
ttaattgggatttatttatgctttgaagtttagaaccctgttactgtcgggagaccttatagttaccactaggtggattcgacccttgtctttttggattgacggttgtgagttgaccgccaatctaattgagttacaactttctgattttgacataatcctgggaatggattttctgtctaaatatggagtgacaattgactgtaaacggaagatggtggtgtttgagcccaatagtgctaacccagcggtgttagtgggtaagattctgttgtcgagcaaatttcgcaacaccaaaaagtatagtttaattgataaaaaagagaattatttgagagatgacaagtgcgagtattcaacctaaagtggcgagtactcgactgggaatgcaagaacaaacaacaaggctggaaaaagtaaacaagacgatgaattatagtggttcagtcagattttgttctgcttagtccactgtagcaagggattcgtaggtgtattttcatggtggatcacccctttatatacaaagtagg

SEQ ID NO: 263134 - DNA, 596 bp, Cannabis indica
agagcaattgaaacaattctctataatcttccaagaagaaagctcgatctcagagcatttttactattaggtatgtacttatgtaagttaaagaataagttcactatttttttaggtaatatttttagaaggaagagagaaaattctactaacatagaaagatgatacttaaaatgttacattaacaaataaaagtggaactatgtgagacaagggcgatactaggtgtagactaggtagagcagtcacctcagatgaaaatattaagaccggtcttaaactatttgaagttttggtctaaataaatttttttagggctttatacaaaaatatttgtggtcaaataaaattaagtaaggttgtttgatgtagtagtgaagatccttttaaaagttaaagcggtcacaagttcaacactccacaccttaattttttatttttatttttacttttttttttaagaataactaaaatattactgttgagatttgaactacttagaaactgtgtaagatgaaaatatagaatgtcattctataaaagtcactttaacataattaaatacgttttattatatctaattctataatcttgtt

SEQ ID NO: 263135 - DNA, 944 bp, Cannabis indica
gttttctaaacttaaaactctcatgcttttgtgtgtgtatgggtataaagatcagatcattgtagatctgatctttctgctgggtttgtgtttgggttctgggtttctagggtttggattcgagtttctctttgagaatctctctgctagggtttctagcatttcagagagaaaggaaggaaatgagaaggttctcgatccattcctaggttttgttcaaagacaaaacgggtcgttttggggttaactttgaaaagtcaaagtgaacagggaaaggtcgaaattgaccttgatatttgattcgtttgtttgttggtgtagggggcaagatagtaaattcctatcttaaaattcctacagtactcttagttagggcttaacatttatgtgatggaatgttgaatcatattgagcttaagcattgtttcaatttgattggaagaattgtttaatcttcctttgatgttggatactaaggaaagatcgtacaaaatcacttttactttgattggtgcaatctttgcacttgcaggtcttgaagaatttatcactgacaaaagcaaatgccaagaacattttgatgtttacaaggaatgcaagaaaaaagaggttggttctttaagccattgcagtttttcattttggtagtgctgttctagaattgtttcaggtgttctaaactgtgtaacgatatatgtttccgaatttcaacagaggaaagctcaacttgaacggaacaagactcggtcttttttctcatgaactttcttttgctacttacatattccattagtatgaacatttatgaactcttttagtataaatattcttttaaatatatatatatataaacaatgtttagtattaaatatgaaaacaatgtaagaactcgtttagtattaaatataaaaataattagtttttttaaagaaattatttaatag

SEQ ID NO: 263136 - DNA, 522 bp, Cannabis indica
agctttaaaaagttccaaactcaattttttactcaaaatcaccttagattcaaaaagaaaatatcgaaactagtctcatgactacccgagaacaattctataaggtctgaaccttcataactattctaattcacaaaatccctatacggaaccaattgtatttaaacttaaaacgaaattaaactataccttaagctttccctcttcaaggatttgctatcctgctactaccagagcttagatcgctaaattttggattgaaaatcgaagaaaatggatatagggggtgaaggttttatcgaaggagggagaacgaggatttcgttcattcttttgctatactatttctgatataacttatataatataacttttataatgtatataaactttcatcagcgtgaaagttgaaattttaataataataatataataatattaataaaaactttattattaatagttatcttattattttttagctactaagaaacttctatttctagggtaattggccaactc

SEQ ID NO: 263137 - DNA, 606 bp, Cannabis indica
gaagttttctttgttatcactctatattgtagagtttatcggcaaaaattttgtaaaaacagttttttaagaactgaagtttaaaaaaaaattagaaaacagaaaacatcaaatgtttttttcaattttcaaaaataattttattttgtctaacgtattatagtttacattttttgctcacatactcggatcttagacccaaacaaaacccgaactcggacccaagtgagttcatgttataatatggtgttaaaatattgattttttttagtaagaaaaaatttaaaaatagttttaaaaaatttgtaccaaacactattaaatttttaaaatgacgaaaaattgttttttattctcacttttgaaaacataatttaaaaaactaaaaaattgaaaacacagccaaacaggcgtttgacttaaaaattcttttctgttttgaaataacttttaaaaactaattatagcatttgaccaaattttttaaatacagttttttgaaattgagttttaaaaaactaaaaagaaaatagaaaacattaaaatgtagtcttttattttcaaaaataattttaattttttatctaacatattctttattacatt

SEQ ID NO: 263138 - DNA, 1034 bp, Cannabis indica
tttatatataattggcaacacaagaaagtgatcagtgtagtagtgtaatttaaaaagcttgacttcaaggtgtgtgagggtaaaaacaaaagcaatgtgtgagggtaaaaacaaaagcaatgtgtgagggtaagaacaaaagaaatagacttgtaatatatatattaaatttgtgagggtaaattggtcatcaattatcatttatatataattggcaacacaagaaagtgattagtgtagtgtaatttaaaaagcttgacttcaacgtgtgtgagggtaaaaacaaaagcaatgtgtgaggataaagacaaaagaaatagacttgtaatatatattaaatttgtgagggcaaattggtcatcgattatcacatcaacaagccatatttataatagtaagataagatcagataaaaattataataataaagacaaaataaattgtttgtcataaaattagatgataagggtaaaatagtcaagttgtcataaaattagatgataagggtaaaatagtccaaatttaatatagatactaataaaagatttttaatatagtaattagaaaagtcagagtctttgtttttgttgaattgttttgttttgctttttatttttattattgtaattttacaaagttgttaggggtaaaattggtatactaatatagacaccattaccacacttttataatagtaagatattaagaatagtatcgatcataactatcaaccgtgattatatattcttttatatttatataaatatatattataaaaaaagaatattagattatttaattatatgtagagtaagaaaataggtaaatatttattaatttcaaacaaataattttttttgcaatggattctaaagaataattaataagataaaaagatgaaaaatcaaagtaaatatttattagattatttaataaatacttgacaaagataaaagataataataaaatgtgatagtgtcaattcaataaagataaatttgttttattaaaaatgtgataataataataataat

SEQ ID NO: 263139 - DNA, 748 bp, Cannabis indica
ttgtttggcaaaatagttagtaattatatggataaataagattttttagtagctaatgtttaatatggaaagtttttaataattacacattgtaattacatctaattctcatgggggtcatgagaattggagagtgtaattcgaacccctcaattacttccaattacacagttacagtgtaattacatggttagacaaacatgccaaattatgtaattacctccaattaaatacaaatctaattacattgtggctttccaaacgcaccctaataaaacagatatcttttcattagtaatcatatcttttggttattttcctctaaaaataagcaatcgcaatattaatcgaaccagaaacaaacatatatcaatatacacatataaatgattaaccagaaatatatatattaatatatataaatggttgcaaataattaatttcatagaagaccaataataccatacattcttaagaattaattcagagatgctcttgataccacatgttaggaacactgtaaaacttaatttagccataattaattcatgagaattaaacaatagaataatagaatagcagaagcataccgaagtccatagaatcgattttgaatggtataatcttccaatttttgcatcaaagttttctctctagatcctgagttttcttgatgatggggattcaagaaaaaagacacgatatgtgaagcaatgcaaaaatggggaccaatacctgtttattaata

SEQ ID NO: 263140 - DNA, 2262 bp, Cannabis indica
taccggaagcctcccccttgtacagagatagctcccggagaaatcccaacaaaagatttgaataacacaatgacattggccacaccaccaacgtgtgcaaaaacctgaaagatgaaatcgagaacctaatataattaggtcacttgtatgaatggatcaaaaacaggttgccacacttgaacccggtcccaacaagaggcccattgcctcaaggaggaacagtgggtatgcacgaagggcaggtaccccccggaggggcactccctcagcaggtgcctggattaccacctcggccgaatggaagagtagccatgatctttggtgggcctcatattggagaaaccaccaagaacaagttgaagcgttacgccggggccataaaacacgatgaagtatgggaggtcactcaactcgcagcacaaacgcctagactcatggaccaacctatcaccttcacggaagaagacgcaaaaccagtgcgcttcccccatcacgaccctctggttatagaaactcccatcgccaataaggtcgtgactagaatattggtagataatgggagctccgtaaatctattattcaaagaggccttcatggccatagggctcagggatagggacctgtcacctagtggttcgcagcttacagtatttaacgggacgacacttatcccaatggggaaagtaaggcttcctgtaaccctgtgccccgacaccccacagagcactttcaaatactgcacctttgttgtggtagattgtcccaccgcctacaacgccatccttgggcgaccgtccttggtcaattttggagcgatcacctccattcgacacctatgcctcaagttccctacctgggaagtcgaagtgggaacgatgaggggaaacgaaggagaggcgagacaatgttacaatgtcgtattacacttgtcagtgttggtggtacacatgaatgaggagcccactttggcagaacaagccgagttggatcacggtataggatccgaaatagtcgtagaacctatggaggatatagaggaagtaagtgtgtgcgacctcgactctactaaaattatccgtctaggaaaaaacctagagccagaggaaagaagcaagatcatagatacgttaagggcagccacggatgtcttcgcgtggtgccaaggggatatgaccggaataagcccccatgtgttcacccatgtcttgaatgtcaacccagacatgcctccggtacagtagaaaagaagtcctcttgatccagtgaaggcagacgccttagagaaagaggtggataagttgttaaccaatggcctaatcacggatgtgtactacccggagtggctagccaatctggtgttggtgcctaaaccaaatgggacgtggcgtatctgcatagacttcactaatcttaacaaggcctgcccgaaagactgcttctcgttgcctcgaattgatcaaatggtggatgccacctcgggatttaagttgcaatccttcatggatgcctacgacgggtaaaattagattaaaatgcatgtcacagatcaggaatgtactagttttaggaacgacaagggggtataatgttgcctagtcatgcctttcggattaaagaacgccagcgcaacttatcagcgcatggttaaccagatgtttaaaggcctcctggaagaaatatggaggtatacgtagatgacatgctagttaaatccaaaacatgcatgggccatgcagatgacctcatgaagtgcttcgaagtggtccgaagaggtccgaagacatggaatgaagcttaatcccaaaaagtgcaccttcggcgtcgaattagggaaatttctgggatttatcgttagtcaacgcggaatagaggcaaaccctgaaaaaatacaggccttgttgaacatgccttccccaaagaaacacacggacgtacaaagcttgaccgggaaggtagctgccctaagtcgattcatctcccgatcgatcgataagtgcatccctttcttcaatattttgaagtgcgaagaggcattcaggaaattaaaagaacacatgtccaaactgccaatgctgtcaaaatcggttcacgaagaagacttgtttctgtacttggccgtctccgaaaacactgtcactgcggccttggtccgggaaaaagacaaagtccaacacccggtatactatgtcagtaaacgcatgataggggccgaaacccggtatcccttgatcgagaagttagctttttgcctcctgatggcct

SEQ ID NO: 263141 - DNA, 549 bp, Cannabis indica
tcgtatttgcaaagactcttcttgactcttttgtttaagtatcttgttacttggtgttgatatgcaacgttggtggtttgcgactcaactcgtttttcctcaagtagatccaatgaaaattttaaaagttcttggttttcttcttgattatgaaactcttttctgtgagtcgatatgttcacttcaataggcaacattgcttttgagccaaatgctagcaagaaaggagtgtgtctcgtggttgttttctcggtagttctatgggcccagagcacctgaggtagctcgtcaacccatcagcctttggcagcgtctaacttcttcttcatagtatcctttagggttttattaacggcgcccacttgtcaaattacctgaggcctggatactgacgagaagcttttgatattttattcctctcgcataattcaatgaacaagtcgccattaaatttggttccattatcggatactatctttaggggaattccaaacctacagataatgttcttgacgacgaagtcaaggactttcttgcaggttatggata

SEQ ID NO: 263142 - DNA, 612 bp, Cannabis indica
catgtttatatatataaatatgtattaattaaaaataattagaattaataaaaaaaaagaaaaaataattaagtatgtcatttttgtttctgttgtagaaacttttttggcacctaaaaaaatcatattttaattatttttgtacaataatgtacattatatttgtattaagcattctaattgttttttgaaattttgaattatttactgttgccgaaaataaaaaacacttaatattaattatgttaaactttatttctgacatgtaaattactttcagatttttataaaaaacagttgagatttgagatgtttgtttataactacaatatatacaatgttatattaattttctgttttataattctttaagtgcagaaaatagaaaacgcccttgtgctagaagtaaaaataatatttaatttttacctactactataaaaaactgttatgtttagtgacagctttttagtcacaacataatttttttgtgactaaatgtgacttttaatcacaacaaaaaattatttgtgactaaaatataacatttagatacaagttgtcactaatttagttagtgtcacaataagtattgtgactaaaaatacattt

SEQ ID NO: 263143 - DNA, 649 bp, Cannabis indica
aaaaaaatgtttaaaaactggtttcttaccttctcatcatccacactcttaggaagatacacgggttgaaacttaaaattcttcaaaagacgattacgtctctcagcatcagtaagacgaaaatcatctacaatgacctgttaaaaaccagtttctatactataaaacaagccaaataaaaaaatcaaatagtaaaaccaggtacaaagactattatacctcagggttattgaaaaccttttcgagtaaagtcacaaaaccaggaacatcgaaactttgccaattaagtattcggcgaaactcagaacctttcctcacacaatattcaggggacaagctaggaataatctcataaagccaaacatgaaagggaacaacaaatccaggaagtttgtacttcttgaacttcttaccctttgcttcaagttcatcaaatatagaattaccatccttaatagcaattgtcaaatagtagaatgtcctctcccaaagcatttttccaaatgcaaaaccatttagaacatctagataatcatcaccattaacaagcccaaaaagaaaattatctacctttttgtcatgtgtaaatccaaacaagtagcaagagagtaaatacacaacacccatcttaactacatcatcatcatcc

SEQ ID NO: 263144 - DNA, 673 bp, Cannabis indica
aaacagattagatattctgattgtatcaaggtacaatcgaattgaataaggaaaagacaataatcaaagttttcttaaaaaaccaactttccataatagaattgtttctcttacaagaagtttccaaacaaaggaaagtccagctgaaaagtgcatctttcctaacatagaaaagagcaactaaaaccgaataaacaaggtaagaaaatcgagtatgaatgcaaaacaatcttaccgtaaaagaaaaatattttgtcaactaacttgccaaaaaatgactttacatatataatggtaaaaattttaaaatatagtattttaaaaatataattgaatacttttttaataaaacttcaaatgtagtatcttagaaaaaaataagtattttaaaaaagtaaatttagagtatttttgttaaatatttttttgggggagatgggtcactgctgccgtgccgtcgttatttataagcatctaatttttttaagtaaatatggaatagtgttgaaaataaaatttatatattttattaaactcgtgattatttttttttttaatgtgtggtaacaaataatcctaaaaaataatgatacgccattgtaaaaatagtatatgagataatttttcttaaactctcttaaatactaaataccaaaatagatggcggaggtac

SEQ ID NO: 263145 - DNA, 1083 bp, Cannabis indica
ttaggtttattgcttgggacttctacgttttcttcatagatcccttgtttaatatagatgattgttctatcataactgttgtttggagcaaagtttatggcatcggttatggtggtgaaattccctgttccatctacatccactgttagcacttcactcgggtcatactcgtctccagtactctgcaaaattcggcgagcttttctcgacatccatgttggaaaccccagaagtcgccggttcttatggccttgcggggagcctggtttgggaagcattgaaagggaattgcttacatgtttgtatgcattagttaaggaatcaactagagtctgtttcagaggaccagaagcagaatctaagccttctaaacatgtgttcttgttggtcagagctgcactgagataagctcttgcgtcagctatttttcttgagttggctgattggactcgggaaaccgatctttgcaaagatgagactgtgatttggtgaagatccttacagtcttggatggctcctctttgtttctcaacaatgttcctttgtgatccagcggttgataaaagactggagactttcccagcttcagatattgcatcttggagagattgaaggagataagttaagatgtttggactgatgtttatcgagatcgaaagcttcaatgaatcaaaacaggtttctgggtatggagtggtcttgcatattgatctgatggatgacaaattagtatctagtttggaagtgttgtttgatggggaagaagaatggtttccaaggccaaaacaacttctgcaaaagaccattatagataatagcagtagaagttttggaatggaggcagccatgatatatttttgctgtagaagaaagctgtattactgaacagcagatagaagagaaggcttaactactcggtaggctcttaaataatatacctttgggaacgtaaattgcatggattttcttacttttagtaaatgacttcacggattattatgatgccctggttaatttgaaaaataatgtttagataataacgacaaacagttaatattctttcctatttatttatttattaca

SEQ ID NO: 263146 - DNA, 1500 bp, Cannabis indica
cttttactaattaaagagtttattgaaaaacttaattaattaaaacttttcaaataaacataaacttttaaatagtgaatactatatacatagagttacaaaattttgggatcctattttattttacaactgttaacgcagatttttgttaacaataataaagcctatttcgtgattaatttgcacaaaaattatagaaaatagaggaagaaaataaaacacaaagttttttacgtagttttgcagttaaaattctgcatagtccatgagtcaatcttattcagattattctgccacaaaactagggttcttttcttgcaaggatttttcatccatttttcagtacattctgtctctatttatagtaacatagggtggcagttacttacaatcagatacgaatcccacaataatatttctcaaaattgtgggatttaattacacaccacgtaaataaatacggttattattatttgaaaatcatgcatttgtgatttatcagcttttactgggtcaatgctgatgtggattcaaatacgctacaaagtgcatctcgctagggcatctcgttgggatagcaacaataaccctgacaacgagctagagcttttcccatatatttccaaggttgataatgtaaatatcgttgtttatgtgattgaagacataacgttccatctaacaatcacaattcttggtgagaatatgaacttcagtagtcaacatcatttgaatgtcggcttctatctgagagagctgactcgatagagcagtggatctcattaaaaaatgtctggagctgattagttccatgagtatgccttcctatagcgagatggatgcctcgctatccgtcacttaggttcttccagctgtgatacttagttagtacaatgcatattatacgctaagtgttctaatagtcaacatgtctcgtcttcacctctttatacgtagcgagattggtgtctcactttgtattactgatgtcatccttacaattgggtcttctgatatgaaatggtttctcgtcaatgcatgaatcaatagtttgtaatccttgtctcgcttaagaatttacagtcagtgagttatagatatactctatcaactctggatttaatgagttattccattttaatatcctttaatataattgtcattatattcgttgattcgtattctccaaggttgacatgtgtcctcctctgaagtgccaaccaaattttgggtataataattaccccttaaaaagttcttttcagtgaaaagtagtttttaaatgattacagagggtatatttgtcataatccattttgaaaaaatgcatgtcctctgatttgggcagttttgtggttttgatgcacatcaacatttaatacccatcttttccactttattttttaaatttgaccagttggatcaattgtttccttaatctgactgagatcaaccccagagtattaaacgaaaaaaggaaccaccttttcattacctttg

SEQ ID NO: 263147 - DNA, 584 bp, Cannabis indica
cactggtagtgatgaaagtaacacaaatataacccgctagaagaaaaaacatgtggtatataactatatgaaatctaaaacatcacatatttatgctgcaattacctcttgtttgtaatgtttaatggcaccttacatggtttctttaaagcaaaacgaggcctgagacaaggagatctgatatctctgttattttttgtgcttaggatagagtatttgagcaggattttgaaaaggttgggggcatgaaagatttctctttccatgaaagatgcagtgaattggaactcaatcatctcagctttgtagatgatgtacttttattctgcaaaggagactttaaaagcatctgtctaatgttgtagggactcaagttgttctcaaacacatcaggattacagtgaaacaataacaaatttgcaatatactgctctagtatggatgagaaggagataaaatgagtggttgatatatattttctagttttagcagaagtaacattccctttaaatatcttggtatttgtatattgccaagagaatatcaaaagctgaatgtagaaatactggttgagaaaatgacag

SEQ ID NO: 263148 - DNA, 995 bp, Cannabis indica
tttagtattattcttgtgtagttattgtaatttattgctgcatatttttagggtatagttaagagttttattctgttattattatttgattttattctttttcaaggaattcttgtacttgttaaatacatgcatttttcagagaaattagatacaaaaattaccctctttgttgactatatctggtgtattaagagctagtcttaaagtaatcttaaataatgtgttggaacttgttaaaattttacaaaaatatgagaagtgtagtatgtgatagtgctttgaatttcacatgggataggaatacttctttctaatcttaagaattgggtttgggccttaagggacactcagttttgtgtgcatgggtgaggactcacacatcaaaccaccactcgcgcgccgctgctgtttgtccgagctaaggtgaggtgtcactttatttttatagaaaaaataataaaattaatattattatttatgaattaattatttttataacgctaaataaagcagcaaaacgatcagtcaatggttcacttttttctgtcatgtaccaacatctcgcacgatcacattaccgttttcttactgttttattttggatcgacttctgtatataagtcatatcagaacaacagaagaacacaacttttcaaacacagaaaaaagatcatcttcttccttatgatttttctcaaagcaatttttgttggaggtgtaatagagcaatatcattgagtgcagattgattcatacagaggttgttttatcctaggaatgtcgtggttgttagactgtcgtgcacactttaggtagagttggaaaacgtcttaaagagagcgacaaaatcctcgacttggatagaatttttattcagtaatttgttccatttttttttttgattcagtttaacaatttttaaacattttgttctgctatggctgctaccgatgaatttttttggttctacttctaacgatattaacaagcct

SEQ ID NO: 263149 - DNA, 475 bp, Cannabis indica
attgatctaaaattaattaacaaattaattttcaactaaatctaattttcgaaattgaaaaaaatcaaaatatctacatttaaaataaatgtatttcaaaatttatgttaaacatgattattaaaataaaataaaatatattcttaaaatttttctaatttaagttgatctgaaattggaaaatttctaactttaatatagttttctatttaattaaattcattaaaatagaaatgattaagtatctaaaataaaattaacttatttattaattttaatttaatatctaagaaaagtattctaatttaagttggtctaagattaaataaattaatttttaacttagatatattttctatttaattatatttcttgaaatagaaataaataattaaatatcttgataaaaattaacttaattattaattctaatttaggttctaagaaaaatatcataatttaagttggtctaaaa

SEQ ID NO: 263150 - DNA, 690 bp, Cannabis indica
gatcaagcaaagtaggtagacaaatattaggcatccttgaatgaacaaaacttcattaccaatgaacaaaacttcattaccaaaaatattcagaaaacatcaacaaaattcacaatcaaaggttcattaaaagctctaactaagacaaattagttcatgctcaaaaacacaaaaatacccaaaattctatcatctattacaaagtttagaagtagaaaataaaatacaagaagagtaaaggtaaagagagcaaactattagcataatctcaatctctttcattccttgtacttctcctccatttttttcttttcttcttctttatcctcttgagtttctttgaataatggccgccaagaagtgtgttccttttttttggtttggtataatggaggcttccgtttttttaaagaaaatcttaggttatgtacccttttcctaacataaaccctccacatgtcataaatctagtctctccaagtatttgcttcagcagccactcctagaacgccatttcacctatttttggccacatcaattaatgaattgccatgccatccttttcaatattagttttaacaatcaaccttgctacttttgctgcagcaaagttcctgcaaaactacaacaaaacattgcagtttctctattaagcccttttctttaccaaaacccaaataaaacttaata

SEQ ID NO: 263151 - DNA, 729 bp, Cannabis indica
tatacttagctattacagaatacgctgtaagtatcgtgctgattagagaagaaaacaacatccaacatccagtctactatatcaacaaaagtctcgttgaagatgaaggacggtatccattaacagaaaagcttacttactgcctaatcttagcaacaaggaagttaaggccttaattgtaacgccctaatactaaggcacgctacaatgatttttcaattgcagtgctatctttgctaatcaaagaatttttcttgaaaatcgtgtcaaattaaaactttagaattaactatgaaactttataaactttatataaatacttaaaaaattcgagatcccgttgctaaactttttacaaaatattccaaaatacaataatcaggtcacacaacgactataaaatgaaaaccctagatgttccgagaccgaacactccattgctaaactttttacaaaatattccaaaatacaataatcaggtcacacaacgactataaaatgaaaaccccagatgtcccgagactgaacactctaggtcgcacggccatgacatgtacaacatcattttagctcgaggctcactcctgttcaaccttcgtctttcctttacctacacatgaaagtagaactgtgagtcgacaaactcagtcagaaaagcatataacatatcacataatattgacttgtatttaggcgcccatacacctatttacaaggcttaacaaataa

SEQ ID NO: 263152 - DNA, 1337 bp, Cannabis indica
tacagggtccattttgtcatttaacaaaacagagggtccaattggtaacttttacaaacacagggtctaaaataaaaatgtaatatgggttgtagtttttgacatgacaagaaactggcacgagtccggaaagtatgaacattgagcacaactagacacgaaaaagtatggatttggacacgacacgacacaatactacaaattgacacgacacgaaaaatatgtccttagcatgacacaacacgagaaacacgaaagacacaacacgtaagtacgaacaacctagcccaaaaacacaatacacgataagcccaaaaaatacattacgacatgttaaaaaaccttataatttattaataataataataataagatatacatttatcaattataaataagttaaaataataataaaatttaaatataatactaaatattataattttataattaaaactattaaaacatgaaaaattaagattatatattaatttatttataatgtgatataaaaattaaatatttataagtaaatatttaaattctaatgttaatatatttttatatgattacttgtaaaatattaatcaaaagttatataaattatataactaaaattttgaaatatacaaataatttagtaattgtaaaaaaaatatatgaaaaagtaaagcacgaatttaagctcgaatataaaaatggactggcctgtttaagaaatacgggcatacacgagcaaagtacgacacgaaaatactgggcctaccctttaaaaatattgacatgacacgacacaacccatatttttctgtggcacagcacaacatgacggataaatacgggttgagccaacacggcacgcacgagcttataatactacaactgttaatgtgataaattctgtcccgtaagaagaacttaaaaaaaagagactttgtaatatcaagtaaaacccacaatatgaacagaaaaagtacgaccaaacaacaaaaataacgctcaaaacattcaaatgtcgttaaagtgaatgttcttattttataactgatacaatcaatatgattactatgccaattataattataagttgtaatgatcttaataggggtgttcattggatcacgtccaatgaatttagacccaaccgatctaatccaattatttattggatattgaattttgccattcgatccaatacaatcgaattgagtcatccgatccaatagatgtattggattggattagttccaaccattggatgcattaactagttttttattggattggattggatccatccaatctattttagtcaccatttaagttaatttcattaa

SEQ ID NO: 263153 - DNA, 1555 bp, Cannabis indica
aatctaatcatgaaggctgacataataagaaaaatatatatatagggagagaaaaaaacatacaagaataattggagcccatagtgcaacaacaacaccaatattatttctggctgcacaaaaggtgagatgaaatcaatatcactttttttttttgctaagacaaatcaacatatcacttgatcataggaactgcattaatttatatatagataagagctaaagcataacaacttcatatattcatatataaacccattaccacggggaaagaattcgtgccactgaaaagtagatatatgcacttccatgatagcttttgtcggccctactagaggttttatctgtatccaagacacacatgtataatcgctcttcaacatgtcattaatcagatgaaaacaaacaaggtatataattataaaatgttaagagattgagttgccatatagttctataatgttgaagtgtgcacatgagtcttttccctgattttatagaaattagcagaatttctattgtacttatatgtaatttttagcttcttaacattggtttctgtttagagggtgtagctcacacttttccttgaaataaactgatattgttaatacaagtttgaggctatgcatccaaaaagtaaaaaaaaaatgtaacatgacattggtaattaaagaacaatatttcaactcgtttaaaactgaaaggaaatgcagagagaaagggttgttcttgacctatttcatgggtgtgatgcttcgaaaaggaaatgcagagagaaagggtgcagatgaacagggatggtcttgacttacatatgtgtgatgccttcgattgtaaagctcgagagatgcctttgattgtaaagctcgagaatgagaagctgaagaacgatggagacttaaacaagtacgagtctttgtgctctacttttatttttttatttaaacaaaatttatttctattttgattattatctatatatttctattttctttttcgtctattcaggttcttcacaattattgtgttagtctttgggatcctgtgctcattagttctctccggatgtaactagtattgacaactcacttgaaacttttggctctaatttaatgtctctactatgttcaaattgtgagtcttttttgtttttctttggatgatggtctgcagcaacaatgctcttcggaccatcaagtagttcagctgctaatgagtcattgcagcattcgtttttcaaagtatatgtgtttccaactcttgctactccttattaataaaatcaaaataacttacatttggttgcttgataggtgacttgggttcctcgtttactacatgatccacttgagctaaagctgagtaacatgaggctacatacatggctcatatgacattgttcttgtgatattcataatgttataataaaaatataatacaaaatgtaatacactaataactcgttaactctgttatgtagaatgcactaattttttcttgattgggaagatcgtgtgggaatagtcaggtaattataggttttcttttattt

SEQ ID NO: 263154 - DNA, 802 bp, Cannabis indica
gagaggaaggtagagaaggggcggtggttggactaacgagagaaggttgggtagctgagtatcctcagcagatgtaggtggtggagctaaggtaggtttttttttttttttttttgaaaaaaaaggaggtggctgatgctagagagagggatttgatttgatttgattttatttttttttttgtttttttaggttttgaaaaaaaaattaaatggtaattaatggatacagatttctcttaaaataaatattatataaaataggaaaattatcccatatactatttaagatttttttttttcaaatttacggtttgggtttctaaagtggtttctccgatggtttctatgcgggttgctatacgaatttttgtggcgatttaggttgcagcactaattgcaataagagtttctatgtagaagtttgtaaaaataagtaaaaaaaaaaaaaaaaacggttttaacaaagtgtaaaaatgaataagccccttattattattattattattattattattattattattgcatgttttattctatagttcactattatactttatgtaatgcaaccatcaatatatattaacaaataaaaattgaagactttctaccacacaataattacaaactttacaacttttatgggataagaattcttccatattagtaaatattaaaaaaaaatatattattgtttagaaaaaaaatttaaattattaaattaatttaaaagcttatattaaaaaaacatgtcttttgaaaggattgaactcatgtctttatacttcatataagataat

SEQ ID NO: 263155 - DNA, 758 bp, Cannabis indica
tacttttggccaaagatggagcaggacattgagacatatctgaagacctatctagtgtgccaataagataagatagaatgaagataggaagcgggtttgttgcaactcctatcaatccttgagaagccatggtagtcgataagcatggattttatagtgggatttttagaagtaaaagggtttcagtccattctcgtggtagtggatcgatttttcaagtatggtgtattcattcccgcaccccatgcttgtccattagatgtggcgacggagcttattatgaagaatgttgtgaagtacttccggttgcctaagaacattataagtgactgagattcaagatttacgataaggttttgcactatatttttcaatatgttgggttcagacttaaaattctcaaaaacaaaccatccccgctcaacgatcaaacaaagagaatgaatcagctagtggaacaatacttttggcattacgtaacagtaagccagaggagttggatataattgcttgatgtagcgcaatttcgctataacattcatagtcctctgcaactggaatgagcccagtagagattttcttggggaggcagccgctgacaccacatgaagttgctaaacaaaaatctcaaggagtttgcccagcgacatatgggtttgcgagagatagaaccaaactgctagaacttaccaggaatagccttgaaaaagcttcgaaacggatgaagaattatgctgacaagcaccgaagagatttag

SEQ ID NO: 263156 - DNA, 704 bp, Cannabis indica
tttatgtagtataagattggatgctatagtaatgtaaattgctggttattcaatatattcttattcatcaaaagaaaaaaaaaaatagaaataattacccattttatgttcttttgctatttatttttccaatttactgtatttatttttactttttacttttatattttgaatttttaacttttacagtaaaatacaacttttaatttcaactgtaggatgtcccatttcagttttgtgtgagccttagtcttcatcattatgtttaccctttgcattagtcttcttcttcatcatttcaagattttcatatcatccaacacatgttcactctcgaccttactcttattttctattgtttcaaagttcttcacactgtccaacacaggtgctcttcttggccttagattgccactttgaggttttattggctatacttattatgatggctatggctttctttcccattaccgttctccatttgcatgtctagagaatttcacaaagagatcttcaatggtgactttcttctctcatatatagatatctcacactaggacgatattggacaaaataaaagtgtatggtaagtatataaacaggttcgccgcaaaaaatagagatcaccaaattttgattacgggtaaaatggagcttattgaattcgtattgccgctaaagatggggtggtcgggttttgattg

SEQ ID NO: 263157 - DNA, 735 bp, Cannabis indica
aaggagcatgatcgctcattctacctacctgagtccctctggggagaagcattaaagacagcagcttacattctgaatagagtaccaagtaaagcagttgcaaaaacaccttatgagctttggacaggtcgaaagcctagtctaaagcatttccacatttggggatgtccagctgaggcaaggccttataggccacatgaaaataaattggactccaaaacagttagcagctactttattggttattctgagcgatctaggggctataagttttatgatcccactgtcagaaatatttttgagacgggaactgcaacattttttgaggatgttgaatttgggggagaaataaggttagagacattgtttttgaggaggaattgaattcaactcagttcctactatcattttagacaatgttcaggcttccacacctgtcattgatcaagaaatgaatccggaacctcaacaagacaatgttgaacaactcccaaatcaaaatgaggctattgttccagaagaacaaattcaacaccctcaagaacaagagccattaaggaggtccacaagagagagaagaaatgctatttcagatgactattttgtatttcttcaagaacatgaggatgaaattggaatgatggaagatgatccaatcaacttgcatcaggccatgaaaagttctaactctcaaaagtggattgatgccatggatgaagagaataagtctatgca

SEQ ID NO: 263158 - DNA, 535 bp, Cannabis indica
tatataaatttatttttctaaagttgtgtcaaaaaaaaaattctaagtaagataaaataaaaatttagtaaaatagttctcatataattttttttaaaaaatataccaacaatattaaaattaaaaatataatataattttatgatttaattatcactaaacgaaatacaaccgcacgcgaagcgtgatttgtttcctagttatttataaattttaaatttcaatttgtatattcaaatacaataaaaattattaactataaaatttagggtataaatacaattttggatcctgtattttgtaaaaattatcaattggaccttgtgttttgttaaatgacaaaatgaaccctgtattttctaaaattgtacaaataggaccctgaactgactttttgtcaaaataaaacttaataataatccgatctagagatattttggtaaatatatatagttacattttttgtatatgttcatgttataaattgtcttcaagatggttttattaaaatataaattgtcagaaattgggctca

SEQ ID NO: 263159 - DNA, 506 bp, Cannabis indica
caaagtgggcgtcgcggcccaccactcttcagcagcacaaatatcatttttaattctctcacgtgggctgagtgtggtttcctaattcaatgctgaataagatttcagcatgtgcgtttttctatctttttagtccctcaatgcctatataaggggtgaactttagttgagttggggaagcaattcaaaaggaaataaacagcagaatacggagtacgaattttagagatcaactgcaatactggaggcattcttcaaagagttttcaacattcttttcttctcttttcttaaattaatatgtgtgattttgctttcataaacatgagtagctaaacacttgattagggtttagatggatattgtttgacattgttttatggttttaatatgatttattttcccccagtttttatgtattcgatttcattcgtacttaattacttttaattgcatggccatcaattaaatgtttcatgatttcgatgcgagatctgagaagtgagt

SEQ ID NO: 263160 - DNA, 569 bp, Cannabis indica
accagctagggttcatgctttttctcattcaattcagtgttttatttcagttctaagcataattcaagctaaggtaacccttgtgcaactctcttactagtttccttgagttttaagaaaaagaatttttgcatgctttggggtttttcttgctgtgattgctgtagttgtttgttgttgtatttagaggcttacttatgtttaattgagtggattagaacaggttttgttgcatgttagttggatttaaccaagtttgagttttgaactcaaaacttggagctttaatggtgaattgagtttttagttgctgtagttgctgaagttgtgagatgttgtttgcagagatttaattatgatttattatgttgatctatgcatgatttggttgtttttttgttgtttgagcaagctttggagttttgaactcaagcttggctaattaatggtagaatttgattctgtgtttgggtgactgttttattgcttttgaaatgttctttgggatatttggagcaggtctggagagttttaggtggtttggggttgaattggttgagaattgaatt

SEQ ID NO: 263161 - DNA, 606 bp, Cannabis indica
aacctaaacctaggtggttagtggttacctataaatagatagtgatggctcacacttaaagattgataaaatttaacttttagaattttcctgagcctttctttctctttaggctgaaaccaccttctctacctattctcttcgtaattccatacccttgagtgatagagtgagtgctcacacacatcaagtggtatctcaatcatagcgtggaagactgtgaagagtccaatcaacaagaatgagaatcgggccacaagaaagagagaaagagatccaggttcagatcttgataatgctctgctacagaaacgaatcaagggctatagatctggaacggaaggagtcattatattccactacaatcaatgtaaggtttcttaaacgcttatgtgtttatttcattgttttagaaattcatattaggatattaatgaaacatacttgttagtaaatctacaaatatagctacgggacacactccattctcgctagcatttggctcggaagtaatggtgcctattgaagtgaacatatcgactcatagaagagaattttataatcaagaagaaaaccaagaacaattaaaattgtccttggatctac

SEQ ID NO: 263162 - DNA, 569 bp, Cannabis indica
gctggcaatgctttttccaccatctcagcataggtggtcttgtcgtctgtagtgatcataaggttatgcttaatcttcacattaagtccatcaagatatttttccttcttactgaaattggttggcacaattcccaaggccaacctcgccaaccgatcaaactgagttgtgtattctgccacactgatattttccttctgggtcaagtgggtgaactctttcctcttggcacttctaacggcctcattgtagtacattgcgttgaagagctcctggaacctttcccaggtcatagttgtgacgtcatgaatctgggacaccatgtcccaccagactaaagcgtcctcttgaaacagaaaggtggcacacaccaccctgtcattcccggtgacacccataatgttcaatatcttcgtaatcaccgttagccactgctcgactttcatgacatccggacctcccagaaaaaccggagaggcctgcttccggaacctttcatacaagggttccattttattccccgctactactatttcggcctgagcaacaggggcaggtcccactggaac

SEQ ID NO: 263163 - DNA, 586 bp, Cannabis indica
gatcaagttgtgttggctggcttagaggctgttcgtaaaatccatgtatgtgtatcttaatttgtttgcaagaaaattatgttttattttggttgcttaacagttttctgtttgttttgcaacttttaatttcagactttgttttcttaggtcccccaacccaatgcagatgttgttggtcaaaagtcagttgccattcatactgatgaagaaactgaggaaactatttctgatactcctccgttggaataagagaaagcgtgctccgacattgaaatgtccttttgttgatttcgggttggctgatgtggggagcactccaatggaggtaatgtcctcaggttctcaatcagctggggatgagagagattttaaaatggttacttatgtgaagggcctttatgctcttaatgattcatttgttgatcgcgtctctcctgagattgaggcaaagtttgacgcgtggattggtcaaggcttgcttaaacatcctaggtgactaattttatatttctatattgtattctgtttattttcattttatttggtttaatattgtttttttttgttgtttgtttgttctttt

SEQ ID NO: 263164 - DNA, 1045 bp, Cannabis indica
attttaaagcagtacttgcttatatatacataaacaaaataaaagctatcatgaccaaaaacacttttttttaattgttcatgggaaaatcaaaattaaattcccaaatttgtgagtccaatgttttctttttgtcataataagattcaatgctgaaaacgtgatgagagtttgggttgggtgtaggtgccagaatgtgtgttagacaagagatcagcagcctataacaaaggcagagtgttcatccatggagctaatgagatcacagcaaaagcatataaaaaacagtttcaaatggacttggctgggttcctcacatcaagatcaaaggagatgaagagaggtgggtccatgttccttgtctgcttagggaggacctcactggaccccacagaccaaggtggggctggcctactttttgggacccactttcaggatgcttgggatgatcttatccaagaggtaattattatatcgaaaacattctgattgtatcattgtgtgtcaacagtgtcttattaccattttctcttctggcagaccaaaaacctataatatgtataacaaaactgatgaaaaaataaaagcaagagaaaaaaggggagggggagggggggaaaatgattaggtgttgttggttttacaaaaacttattatgaaattctactggtcatgattgaacttgattaattctagccattagatacactctccaaaatgaatctagcccttcatttgttcctcactgtgtcggcaaaataatgactatggcagctggtgggtggtccatatgtatgtgttccttcctgaccatagtaatggaatttcatatatacaatgtgatttgattataggcacaacaccatcatgtcttgtgtttcaagacaaggagaacatttttgatcaaactgatcattgttttgatcagattatgataaaaaaaaaacagaaacgacttttatttgtataatgtgtgagtacatatataaagctataatccgtctactgatcaatcaataaatagcttattcttatccttgtggta

SEQ ID NO: 263165 - DNA, 748 bp, Cannabis indica
tacaattctgaaaatcctcaagcatactccaaatcttaatcgctgtcgcccttgttttccaacaaggaggtaatttacgcactatcaaagcttgcaccaggagcaaagcatcagaggcaatggctatggaacggaagccacattcccgacttaattgcaaagcccagaaaattgccgaggcttctgcatccattgcagaagctgcttctgttctcttagcagaccaaaaccacttccccaattgcctgtcctggcaacccactgctattccagcttccccatctttccaagaggtgtctgtgatcaataatccctgagtatcactaggaatttcccatactttgtctgttggaatcttcaaactattatcatccctctgcgcactactctgaacagagagaaggtcctccaatctttgcaacatgttgagtcttacctgcatagtttggaaaataattagtatcgataatagttcaaagacatgatttctttagtaataatttgttctggtaacgacagaatttgttcatgagaaattatatcttatcctgcaactgattacactcattagtatcacgaccgtaattgttctggtaacaacagaatttgttcatgtccctcttccttgactctttgaaaggaagaggtttatgaaacgacaatgttgactaagtggttgtatatatcccctctcttggaaacaagagaatggaataggtggtgacgcaaggctcataatctcgcaagg

SEQ ID NO: 263166 - DNA, 729 bp, Cannabis indica
gtgcatcttgtttttcggtagcccatcttgaaagaactccacagcttggcctggggcaattttatgatgggtgacctcctgggaagttttcccaagaagcgtgcgagtgaggacaaagcacgctggaaacactcgtgttggtctgtagggtcagtcgtcagtccatgaagcagccagggtgacatactcgtgtataagagtcattattccgtgggtgtaagagcccaatggaggcttgaagcggggacgttacggtttctacaattgctagaaattcatgaaatttcttaaacatttcaaatttctttgcataaggtaaaatctagagtgatcgtttaagaatataatgaaaactcatatccacccttgaatgtaaatccatatgtcaaatacagatgatcctactttgaagtggatatatgcatatttctctttgcaaagagtgatcttgtcaaaacctctatgaacaagatgcaaatgccatagatatcttaagaatgtggttgtggtcttttgatgacttaggtttaattataacaaagagttcttagaatagtccaagtggatcttggtcacagaatacaaaactcatattccataaataaacatacagtttagatctattgatagaaaatggatattaaaacttgtgaaagttgtactgtattgtccaatgtattctagaaaactaaaattaaaatttctatttggaatctaaaatttaaagtc

SEQ ID NO: 263167 - DNA, 571 bp, Cannabis indica
aacaagtaaatttcaatgactaaaactgttttttgaaagtgcgtgtcaattgaagaaaatattatagtattttatttttataaatattttatacaatatctataaaactatgaatcaagtaattaaactgaaaataaaatgtaaattctaaggctcatttggaaagccaagaggaatttgacttcagtgtaattgaaagtaactatattattttttgtgtttgtctccatatggtgttactcttcaattttcatacccagaattgagtgtaatttcacactgtaattacttaaaactttttattttaattattaagtactgaaaataattaatttttttctataattactaactattttatcaaacatgatattataaatttataaataattactacctcatatctaaatacactacacagtgacttaatttaatattaataaaattaatatttacttatattttttttttttttaaaaaaaaaaagaaactcatattattttaacaatgttatttctactaatattaatttgttttagaaatctacccatattattttaaagaattcact

SEQ ID NO: 263168 - DNA, 632 bp, Cannabis indica
gacctgacccgaacctcaaatgcaaaaccctagactcatactctgaactgacctcgacccctactttagactcatacaaactaatacagattatttgttatatattaaataatatgatttaccttgtattaaaatttatagtcgtaataattaataaaatataaaattttatccaagtatagtatctttgttatttagtataaaatacgattcttatacgactaaacgaactctaaataatataattttagtccttcacgcgttttaatgtgggttatatatctattctatataaaatgtgactatataacagaattcttggtttaaccaattttgttattttttaacgcttttaaaatatttcaaatcaaaacctattgaaaacgattcagttgatttatcgtttttccattggttcattcccatttttactctcatatattttattctataacaattgagctattatttgggagtggtttattttatattatcattcgattggattcttgaaaagggagattcctttgtttcactttattttagtctcaactccaaacaaccataataatgaatatggattcaagcaagcttcctaggcctgtaattgattgttatggtgatagccaatc

SEQ ID NO: 263169 - DNA, 781 bp, Cannabis indica
ctaaatattcttttattaagctcatgtggtggatatcagtatgaatattctagattctagatgtacgtatggccaacttagacaaacataataaactcttactgttgtttatttataatgcacctcattattaacccactacataaattcagtgccacgtggccctcattaagattgtgaggttgatttgctctcataaaattgttaaaaggattgctaaaatataatagtaatgttatattgaaaatcttatagacacttgtagtgctatatttcgtgatgttgagtacttaatgcaaatactcattctcttatgaaatgatagtgagagagtaatgagtctataccaagagccaatatatttagtggaaataatcattattatgatcaccttaaagtatatatttatatatatacgacgtatatatatacgtacggtaatattgaaaactgacgagttttttggttcaattatatgatccccaagagtattggaactgcttctcccttttttttttttggtggataaaaatcgtagtttacatatgtattttgttttagtagctatactttatttatatatatatataaatacataccaaatacaaatacagaggtacctaacgatgatggaatttccagttccatgaacttgttgagctaaagatgccgctagacgaccccagtcctcctcctaatatggtacccagtcctcggtttaaaacctttcccgagagtagctcctgatgagtcaaatatatataacatatataaacttatt

SEQ ID NO: 263170 - DNA, 534 bp, Cannabis indica
agggcataaaacctaacagtcactagtcttattaatcatagcgcgatagctgaaaaaggggggttacgccatctgtcatgtcgtttatggtgatttcaatacgtcttcccccatacggcattaaatgcaaggtgattacttaatagattccagtacctcccggaactgccttagtatgtccctggcctccaggagcataaagatccttcttatgtctcctccaggtgacaccttcccagagacactcctcttttgcctaagacttagttgatttctctaagagctggtcctctcagctccacgtgtcattcttatccaggtccacgtattttgggcaaaatcaagggcaacaaatccaattagtaattgaatttggaaaatcatcatatgatccaatctaatataatccaattactaattgaattggatcgattttttaattagatatccaattacacacataaattttaatattaacataaaaatatgaagaaaaatacgtaagaaaatcaaatatcatcttttatttaagtt

SEQ ID NO: 263171 - DNA, 2242 bp, Cannabis indica
gtgagaagcacgcgctggaatccagcactaaccaataaacaaagttccattttggtatctcattctgctaaaaacccacaaagaaaggaaaaggtcaattttcagggaaagtctctctctctctatacaattctcttctctcattcttcttctccaactttgtcagttgtccatttgtagattacattagattcagaaataaacaagagaaagagattagttagtaacatttaatataaatcttcttagtcttcccaatccaatccaatcatagtccttgatcaactctgtccttctgtaatagttaatctccttcttcagtcaaatcctttgccaattaaaaccccatatctcttcttttatctttattaattttccttttttggattccttggcttttgttctaataagaagccatacaacagtgaaggaatttccaacttcctaatctgtgttctgttctcaactctctctctctcttgtgtttttggaattaagaaggcctttggtttgagaaaatgacagttgacaaccccagagaccagtttcctattggaatgcgagttcttgctgtagatgatgaccccctttgtctcagacttctcgaaactctgctccgtcgatgccaatatcatggttcctctctgggtctttctttttttatataaagattcatttttttattacttttaagtagtttttgttgtttttcagttaatattgtttcttttattggatggaaaattttcttaattggtttagatttccgatctgtgttatttttattctttgtacgataatgatacttagatttgtgtacttgtcagataaaattctcattattggtttgtgaatctattatgggtttttgtagttactacgagtagtgaggcagtggcagcattgaatatgttaagagaaaacaggaataactttgacctggttatcagtgaagttcaaatgccagacatggatggatttaagttacttgagcttgtgaggttggagatgaacctccctgtcattagtaagccacaaaatattcttttatagctatctaatactgaaaaaccccttaaagaatttagtattatagtttttgaatctcaaagaaaatttgacatctgattagtttctagcataagaaatcatttttgaagtttttatgtttgatttctaaaatgttatatatgtttttctgttagtgctgtctggaaatggggatcctaaacttgtgatgaaaggaatcactgaaggagcttgtgattatttacttaaacctgttagaatcgaggagctgaaaaatatctggaagcatgtaataagggggaaaaagaatgagtttgatgagccatcaacacaaaagaagcctcgagttatttggtctctagagctgcatcaaaaaatttgtcacagctgttaatcatcttggcatagacagtaagtgatgttcattttttaacaatgttcatattgtcctattcaaatgttaatatatttgttaattttccaatgcagaggctgtacctaaaaagattcttcatctgatgaatgttgataatcttacaagagaaaatgttgctagccatcttcaggtatatttactttgtttaattcactatgatcatatgtttaactgtttatatttactttgtttgaatttcagaaatacaggctttacctcaaaagaatcagttggcatgcaaagcaacaccctaataatatggaagcagccttaggcagttcggattcttcctatctgacccgaacaaagacacatatcatattgttcattgtgttgtctatgttttttcttttcattcttttagaaatatataccataaaaatctttaaaaaaaaaaaagaattttattcctcgcccttcaccatgatggaataactgaacttagatctaagcaaatcctgaaaccttcaagacaaatgaattccatatcctttctccacttgtgatgagctttgaaactaatacctcaactttcccaaaagccaccgtgaggtggtggcttgtcgttggagcttcggcgtggctttggcgatgattgtgaaaattgtattgaactgttgggttgggataatttaatatatatacctaaagatatacattgataaatatttttgtcacttcttgttttattttattttaatattatatatctaacttaatttattattattttttgaaaaattaatatttattctatccataaagaagtatacatat

SEQ ID NO: 263172 - DNA, 1595 bp, Cannabis indica
tcgaattatactaaaactatatttcatatcatccaactgaaatgtccatgtatcacagaaaatttgcttttgttacaatagataagaaaatggagtgaaatgaagatattaaattgtattattagttttttcaaggggaagtagtcaaagaattctctccaaatgtattctttagccataaactcgtggaagtatattctaattcaatggattatactacaaaataataaagtagaataaattggatctcaagacatattatgactattgctaaggagaatcgttatcattactattatcacttccgcttctttcataggttacacacgcttaatcttcaaacaaataggctacacaaatataaaaattacgatgatttttatttctaaaaaaagatcaaatatcaagacgcaagagctttgcaagaaaactggaaataagtaacagctgctggtagatgatgacacccctgatcatatctttcattcaccctattttttagttgaaacaacataaattttaaatgtggtgtgttcccaagcagtaaatgtctaaaattacagggaaacccaaaaccaattctagacgtaaatctggtgttttgggttgaagtactcaactttcgaaagggtcgactctgattgagttgactggatacacagctgcagcgattctctccctgaggttaaatttcttcgcaatcagcggtcgcacatcatcaactccaactaagctttccaaaaatggaagcaatgaaggcaactctttatccaaaggatcatcgaaccagctttcaattggtaccccattgtccacttgaaatccaaatgcctgaaagagacatagtaatcaaacttttctcccaagtgaattcaatcaatctaaaacagttaataaactaggacccctgagaatatcaatatgaacgcttgtaagacaaccatgacaaacaacaacaatagaaaatgtgactgttccctaagaattcatcctgagttgctaaacctattagcttattattactactaaaataaacattaaaagaccaccaaaaccatccttttagaaacacaaataatattctaattcctctttatcacaacaaaaacaagtgtgaggatggtacctggggagagttgtcgattataatgacacgtgacaaatcacgaccaagaattgttaagtccttaagataattaccctccacaaaaacacaagaatcacgataaacacgatgacggaatatcttccttcttgggtcaagtacatttagaagctgctctgcatatatactttgactagctgtaaatataataatctcaaaaagactggaaactctctccaagaaatctgtcagatgaggacggcatcgaacatagactgtgtgctcctggaggttaaaatgtacaggaaatgtgaagtctgcttcatcacaaggttctagtgtggagtgcaccaatgtttctgcaaatcaatgttactcaggatccagcataatatattgacacttctcaagagttcttttgtattggcaagaaaaggaaaactgaattgcaaattggtgtgtgtgtgtgtgtgtgtgtttgttttttttt

SEQ ID NO: 263173 - DNA, 532 bp, Cannabis indica
aagtattctattttttttccatttttcaagttttttaatttttttttttccagattttaagttttttcattaaatgtccatatttttcaaaatgcttttaagaaattccatatttataaaaaaattccctttagcatggttggtaaagatatattgagaaatgctaaagggtaccaatggtgtctagcacctttctatgtgtcaatatcgctattggtctaactaagtattgagtcccatataatttaatataatagcttttagggagtatcgctaaccaatcacaacgcaatatgtcgtaaaagtactaggcaccactggtgcctaatagcaaatctcagatatattaagccaactaaaccggccagcaaatcatgacaagggaatattcaatttattggtgctgctctcttctgctgacatgtggcaaagcaaatgtgccctgtaagtgtagggtggacgaatgaggaacggaagaaaagttctgagaaaaagagaaaactataaaaaaaaaaccaaccccagttggctt

SEQ ID NO: 263174 - DNA, 621 bp, Cannabis indica
tagattattagtaaatatataagagttactataatgctaaaaaaaaacaataataaataaaaataacataaaaatataaaatcacacaaaaacaaacactggcgaaaccttcgtgaatatcatgtagatcagataagagaaagtaaaatgatcactaaacaagaacaataacaataaaattaagggtaaatggcggcaaaacccccaaaatttttattttgatttcacttaaccaccaaaacccaaatttaggcagtaaaaccccccaatactcatgttctgttagcaatttaacacttcgtccaaatttagctgttaactgtcaagttggattttcacgtggacacaatatacacgtggcacaattttattggcccacgtaaataattatatttaaaaaaattaaaattaaaaataaaaaaatatttttcttctataaaatcatttaaaaaaactatttttctttttttctttttttctttttctcttttactttttttttttctttttcatttttgcaaatactctcttctctttctctctctcgcaggtaggcagcccaagaccaccatcatctgtcatctctctcgatccccccctctctttctctcagccatctct

SEQ ID NO: 263175 - DNA, 1027 bp, Cannabis indica
atagaaatatatttccttaaataaaaatattcttatagaaaagaattagaagatgttagaggtgtttgatcctctttggcattgaagcagaatgaaatcagaggaagaagaaagaacaaagaaagagaaaggcaaacagagaaagaaaaaagaaagttcataattgattaagtaaaagttacatgagtttatatacaaaagtagaaacactaaatcaatctaaccaactagtgacagttggcagctaatcgaacctaacaaccatcataactaactcagtaatcaactgttcctaatacacaccgaaaacttagaattggtaggctcaccaattgtaaatttgtgtctataaaaagagaacagttgattggaaattggtttggttagaccgttagcaagttgatcaaaagctggaacatgttttacttggaccaaatgctgaagaattttctctacgacaaagtagagattaagttcgatgtgtttggtgcgagcatgaaaaattgaattggcagtaagaaggactgtgcttaagttgtcacaccggactataggaggtttaggcaaagcaatgtgcaattcagtaaacagggagtttactgaattgcacattgagacagtgtgtgctgcttcttacattgccaagctatgagattataataaaagaatatcgcaaaactagaagtttaccttctgtcattggggtctgtgacccaatccacatcacaaaatgcaatgaactcatagtgatctgattttctgagatgaagtcaatagtcaatggtaccacttagatatctgaaatcctctttacaacatgacaatgagattgcaaaaggttggccatgaattgacataatttattgatcttaagcctggtgatgactaagtattgcaaagcaccaataatatatctataatgctaaggatcgtcaacaagaggactgccatagctaatagctttaagccactgaccattggtgtattggatggcatgcgattttattgtccagaacctatcctacta

SEQ ID NO: 263176 - DNA, 569 bp, Cannabis indica
tgaagctagtgcactcttgatccgctatgtgcgtcttaatttggttgtaaccggcgtatgcgtccatgaaggacaatagcttgaattcagaggtggcgtccaccatctggtcgatccttggcaaagggaaacaatcctttgggaaggctttgtttagatcggtaaagtctatacaaacccgccatgttccgttgggcttcggcaccagtactgggttggctaaccactccgggtagtagacatctcgaatcatgccattcgttagtagcttgtccacctcttttcctaaggcctcagcctttattgagtcgaggggacgtcgcttctgctggaccggtggcatgtccgggttgacattaaggacatgggtgatgacgtgggacttatgccggtcatatcttcttggctaccacgcaaaaaatgtccgtggcgcccctcagtttctttattattttttctttttcctccggctctaggctctttcctagtcggaggactttggtggaatcaaggtcgcacaccaacacttcctcgacgtcctcccttcggttctacaattttttctagat

SEQ ID NO: 263177 - DNA, 569 bp, Cannabis indica
aatgcgagctggtcccaatgaccaaacagcttcgataaactgatatagactcgcgtgtctaggttctatcagctcgttataagatgtccgtaagtgcgattatacaagaacgcagacatcctagacttaactaaatgttaggtatatcctaagcccgcgagcttacaccggaatatgaacagccaactcgaacattagaagtcgcatacgttgctgtatttagtgaatagaaattgttattcatttattaatgtttacgttttagtttaattactgtgaatcaatgtataaacggattgacaatgaatgcaatcctggtgtaactaactggacacttgctttatatataaaggagtgatccaccatgaaatgacacctacgaaactcttgcaacagtggactaagcagaccgtgatctgactgaacaactatactcctttgtcttcttgatatttccagtttttactaagtacttacgttcctagttcgagtactcgtcgttttaggttgaatactcgcaattgttcctcatataatttcttcttcttattattattattactcatttt

SEQ ID NO: 263178 - DNA, 1158 bp, Cannabis indica
gagagttgagagaaaatgtgatcctttttgataaatttctatttttttgtcaaatatagagataatattggttttaaccaactaatttcagcttaaacatcaattaaaaatctgatttaatacatcccacaaaagacaaaacacacttggcaaaatgaccattttgcccctttaacattataaaacataaaaggccacttaagggcattttgggaaattctagaatcctgaccaatcccaatgaccaaataaactgccccgctacactaaaatactaagatgttattctaatagccaaacaccacgttccaatgttgtcgggcaccgaataaacaaaattatgaaatttctatatatgacatataaaatgcattcgaattcaaataaatcaccataaattaataatttaaaattaataaataatttccataattaaaccctaataatccgctaatttccaaatttaagctaagcggtctttacacaaatgggcgattttgttccaacaacgaacaaagaggctttgaaatcttcaaaaaatccttgatgaaccttctatagaaccccgcatgtccaagaaagcttctaatacccttgaccatggtaggaggcggtagcttttcaatgacttccaacttagccttgtccacctcaatacccttgtgagaaaccttgtgacctaaaacgatgccttcttttaccataaaatggcatttctcccaattgagtatcaaatttgtttcttcacacctcttcaacactttctccaagttagctaaacaagtaacgaaagattccccaaatactgaaaaattatccatgaagatctcaagaatgccctccgccatatcttaaaaaattgccatcatgcacctttggaaagtggcgggagcattgcatagcccaaatggcatcctcctaaaggtaaaggtgccatatggacaagtgaaggttgttttctcttggtcctccggcgctatagaaatttgattgcaacccgaataaccatcaagaaagcaataaaactcttgactcgccaaatgatccaacatttgatcgatatatagcagcgggaaacgatccttcctagtggcattattcaacttcagatagtccatgcacacccttcaaccactcacggttctagtaggaatcaat

SEQ ID NO: 263179 - DNA, 588 bp, Cannabis indica
gaacaaaatcaatataaataatgatatatttataatcatgattccaaaaaaagtaaacgtacaaatataattattactcccaaaattaaagaaaatgcaaattaaattaaataccataaatgtagaaaccataattataggaaaaattaacactgatatcaatcaataattaagtatacacaaacttacgaaaattaagtaacgtccttcaatttcgtcttcagctaagtggtcaaatcgaatatccaccacatcctcactcaacaaaaaccagggttggtcacatccaatgtacagtaatggcacacagcaatgacaaaaacttaacgccggcattatagagagaaaaaatatcaatgaagatatgaatcctttcagcacacaataccataatcctgaacagacctaaatatggacggaaataacaataggactaccaaaatctctaccacactgttagcaaaacacatatatacaatgaaaaagaaatcaagaactaaattctcatgagattacttttttgaatacccaaatgaagggaagaaaaattccagaactcaaaaagtgatgataaaagaaactatatac

SEQ ID NO: 263180 - DNA, 792 bp, Cannabis indica
ttaaaattaaaaaaaaaaacctaaatccctaaaaaaaaatcccaaattctaaaaaaatccctaaatctcaaactctcaccttcgacttctctctctccgacgacagagcccaacccaacccaaccctgaaagcctcttttaaactaaggagaaactgataaaattaaaattgatcactacatttctataattatgtccaagaggtgacatttggttttgacagttttgcatatataatatattgaatcataccggcaaataacttcactaataatcagaagaattttatatattttgtatcttttatgaatgaatttttctgggtaggtgtttgtagtagaaacatatgaatattttaagtctcgtagctctcgtttattttaatatatatatatattaacttgtacgaagataatataaaataaaatgtactgttgaacatctgcagttgcttccctttcaaaccaaaaaaagaacaaacaactgcagttgctttcttagacaaactgtagagcatgtttgatagcatgggaatatatatcaaaataatccgattaattatgtattatatattgaaatagcttattaaacaataaaaacatttatagatccctatatagtaatagtgctacaaattcttgaatcctgggattccaacaagtggccctacattgaaatataaattattaagaaatatttatcaacatggttgaaaaagaatagaaataaaatgggaaaaggtgtataaaaataaaaatagaaatgaaaagaaagagagagtagttttgatta

SEQ ID NO: 263181 - DNA, 2916 bp, Cannabis indica
gatcatgattagagtccaaaattacattattagttatggtatatatactcttagtcaaactttgacttttgagttaaacgtgcatagcttcaactggagaaatgctcacacgtttggtgtacatgatgaaagaaaatatattcatgcacctaccaaaaccttgtataatataatgtaactattcatataaaagctcatcttcacaaattctaacgaaaaatgctaaaaggcaactgtgcttaattccaacacttaatagcaatgctctattcaaacactatcatttaacaaaaaataaaaattaagttcgtacactgctgtttgccaaattggtctaacaccacaactttattgagagagttgacgccatctgtgatatttttttttctttccttccaatattttttaaattaagcattttcaaagcaaatggaaaatgatagccggaaaaaaaaataaattttgagtaaaacaatgaaacattattcgttttttttttttttgaaaggacaacattattcttaattatactttatttcatagtgagaagggaaccatttaaaatgaaaagaaagaaagaaaagaaaaagtaatatcacattatttcattgtcataaaagttattcttattctcaaatatcctgtggttgaaaagaggaattagattatgagattgggccgagcccatgttgtgacccagcccaaatagcatcgtacagcaaatcgggtaaagcgccttttgcgtgaagcgcatgacaacttcatgtgcggtggcatcatttctccctcaagaggacaggtggcgcaacgtgaccagatctgctctaaatcagagcgatcgatcaccgttggattagctaaaaagcaaaggagaactccacagtccacattttcaagtcacagcccttctttttctctcttctctacacacacacacacactcatttatccatctttatcgtcccctttctttctctctctctctctccctccctgtcctgaagccctagattttctcttcccgatattctctcgtccaaaatggtgagtactttttgctaattttcttctgtatttctctactgtttaactttcatgccctattttttttatttctattttatctcgttctagtgttcgatctatgaaagtcatcgctcgatttggatgaaattggggttcttatgtaatgattgaaaagtccttcgtcttgatattgttgatcggtgtggatttttttttttcagaaaaagcgtctgattctccgatcggtgctacttaatccgattgattggtcacaaagtgatttatatatttttatcagatgtatttgcatgctcatttgagtacgtgtctatggatccgcaattttatgatatttttaagatgaaatttgatgattatataaattgctacctatcacgttttgatttttgaagagctttgacccaaatggggtaaactcagatgtgatttttggcatattatatacatatcatgagatgattttgtttttgaatcatattccgcgatcatggataaaaagggttaataaaagatatggatctcagttacctagattgctcatcaagttttcgttattatgaggttttcgtttgtccgaaagtctttgttttgaagtgggttttcactgaagattcaaaatttaatcactgattgttggcttttatttattgtctaggcaaacgctgcatcaggaatggctgtcgatgatgactgcaagctcaagtttctagagcttaagacaaaaagaagttatcgtttcattgtctataagattgaggaaaagcaaaagcaagttatggtggaaaagctcggtgaaccagctcagagctatgaggagttttctgctctccttccggccgatgaatgccgatacgctgtttatgactttgattttctcactgaggagaacgtaccaaaaagcaggatttttttcattgcatggtagtaaaatcaaacctttggcgatttcaattactcatttctgatttgatttatcagtatgctgtttatgttcttgaaacccttctaaggtttgtctttattgtctatgattaaggtcccctgacacagcaaaggtgagaagcaagatgatttatgctagctccaaggacaggttcaagagagagttggatggaattcagattgagttgcaagcaactgacccatctgagatggatatcgatgttattaaaagccgctctggaaaagcctgaaaattgaaaactatgcaattggagaatcctccttactatctggtttcctttttttttcttctttttgtttcaatgtgaaatgtctatagcgtatgagacatgaatttgtgttttactattaatattgggtttatgacgtgatttgtaatgtggatttgttcgtgcctcatttgggtttgatatacaaactaatatcatgtggtggcttattgggaaccagtttgcatattatacggtagcttttgctgtagtttgctacctgtaagaaagaggttgaaatttaactttcctgcctcagcagaaatttatttcatttttggttttgcgtggaaattgattggaacacctcattgcttgaacaaaatttatgaattctagttttttagtcctataaaacttgtcttattattctatgcttctaatttcctaccccaaggtatgttatatgatgaaagtagggtatttaggaagctacaaagaccagatttcttaactgaagtacttaatcgtttgacgttattgtcctttttttagtcatttgttaatcttgtctgcttaccccacgtacgcattaacaacgcttgtatattattaggcacaaaatatgtcaaacaataattggaagtaattgtcaattttataatagctaaaatgtttatttcttcaaaaaaaaaaa

SEQ ID NO: 263182 - DNA, 3013 bp, Cannabis indica
gagcccttaatgcttccatctctttgtctcaccacttggtaaacatacgcctttgttcctcgaacacgagatttagtgttgtgcgaagatcttcctgatcatgatgcaaggtattggtatgaccttgcacgagtccaagagcagcgcgaagattttgtaactcagtatcatctccaatggttgtttgagtgttggtaacaggcgaaacgactgtgttatgaatgcactggttgggtgctgaactgttattcccagtctcttgcatgccaggcgcgatttcatctatagcagtcattacaccgtgacccacgttttccagctattcgggattaatagctggcggaacccttgcgtttcttgggttctgcaattcaggatccactgcctatggattggctggatcaaccaggcccctacgagtctgcaccaccatcatacttgtgtttagattttgaaatgaaagcgattcttaattctaactctcaatgaaagcaccaaaatgctaacctcgcttttagccaacgacagtgagtcttatttggtaagcaataagtaattgatagcaatcgatatctggtaaagcaatgtaaagacacaagaattttatagaggttcagccccgagcagtttggtaatagcctaaacatcgttatttgtattgactcaagaacaaggagaaaggttgcttttcttacagctcttacaacaatatctctaaatatgaattcttaatagtctctttagggtaaaatctctcctcctttgcccagtgaacatgcatcactatttataggactatgaacttggagaagaagtatttcccttctcgttacaatggatataagcagaaagattgcatgataaatgtagaatacactgatcgtgagatttggacagcttgccataaatctgtgatctgatccccaagttatagggatttctttgatgactcacgatgcggaagctgaattcactaagtgttgattgctctgcgcggattgctgatcgctttgctccagacatgcctatgaggcatcctgttcggactataccctccgagcagatactcaaagttgactccacgtgtcaccatcgtgtgatgccacgtcaaagtgcaaaaagctcatgccaaaaggaatatacggaaactccactttgatgctgaaaagcagttgagggaagaagctaaattttggaccgcaatggtgctaaggctatagtaaccatgggggctatggctaggatgaattttgtttcttctcaacttacaaagaatgatgttgaggccacaaagaaggtacaagttgaagtgaaagctcatgcagagaaaatttgtattaagtctttggagattggcctctcttcacctgttttggaagaaagaccccataattttgaggtttctcgaggatgaagagcaggaatatacaagtaaggtgacagccatggaagctgacacttactttgacacttatggtgttgactttgataagtctgacaaggaatttgggggagaccatcctgcagaggttgtggagctttattcaaagactgatgttccacctagccaagatccacctatggacccactcaagatcccgctcagcattaattatgtcttccttcatctttttgctcctttctaatgttattttaatttatctatgggggtccttggcatcctcttttcttttgtagaggaaatttgattatgccttaactgcaaggcttcatgtaatagcttaagacacttttagcctacttttacttttatgagatgttatcctttgtctttttcctgtttattgggccattggataggtcactttaagatgcttagggcttttggttccaacggccagaactttagaccttatatccttttctcagaccagttctaagtcaccagtcgagctttagaaactctcagggagcaagtcccacttctggacgtcaacattttgaatgttttagtaccttatcatggtgcgtataaactttagccaatttatttttaggtagcatagaagggttttaagcttgttcccaaaacaccaaaggatcaaggagctcaattccgtttcgtacttttttaaattaactatttcagcatgatattaaatttgcgcatactaataaagtggctttcttacggaaggctaagcttccctgttccaggcatatctttatctcttacatgaaatataattccaactttgttcatgcagcaaggtttgttgcttaaaattgataaggaaaaggggctaaaagtgcgatgggttcaggaaatattttttacagaaaaaattaggctcaaaatgctttgagatttaggtagtattttctctttaataatttaaaataacaaagttgacttgttgcataacaaatttacttctttctaaaatgtggtaaggaagtagctgaaaatgtaagagattccaagaaaagctttttactcccactttttcataagattgtaaattaaagcaagagttttgggaaaaaggctaaaaatgcaacagtattcaggcaatatttcctataagaaaaaaggttgaaaatacataggagtttaggcgatattttccttctcataacaaaaataaacaaacataattaaaatgataagtgggcattgtacattttttagggcacatagctaagtacactacccctgattgagctgggaatttgggacgtcttcaaacttctgatcacttgtttttagcttgaggcccgagacaaaaataatttttctttgtaagtttcttttattttcattttattatgcccataggcgtacattaagaaagaaaattacaaaaatttacaatgcacccaaagagacatatagtcccggacacccccatttcttagataataacgacgtaggtggtctgcattccaagcatgtagaatttctgatccatccattctctttagttggtaagtgtcgttacccaccttttgttgaatttaatagggtcctttctattgggttttatgccct

SEQ ID NO: 263183 - DNA, 3355 bp, Cannabis indica
aaataacaaattattagatgttaaacctaaatataattaatccattaaagtgttgcaattactaataaatttgttctttatttttttttattaaaaattattttcaaattttgatatttaattagaattagttaaattttaaatattatttgaaattaaatttgtatgttttgatagtttaaccagatgagcatttttattaatttcgaagataaatttagacgaataataatttttttaattactattacaaagtataatactaatttttgtttttatttaaatccctattatgctttcaaatttcaatgattatcactacattgaatattattaattttaaaattatgatattaaaaaaaactaaaaattaaaataaaattaacatacgtgacttgacacaaaatatctatctagtaaactaaaatataacaaaactcaaatataatccaaataatcaaatactataattttataattaaaattattaaaaatgtaaaataatactttatattaatttattttaacattgtgagttaaaaaatttagtagttttttttttagtaaatattccaattctaataattataatttatattgccaaatttatacttcccttttaaccaaaaaaaaaaaattacaattaagaaaacaagttgatatttaataaaaaaaaaaggaagcaatatgagtaaagtacggtacaacatgtaaatattagttctacaagtcgtgttaaaactattctaaaattatgtttggtaagaaggatgaagagtaggatgaatggagagtttaaaaaatatgagaagtaagaggaagaagaagataattattttccttcctattatttgatattaggggtaaagttaaaaagataaaagtaaaataaatgttagaaattactattattttaatagaattatacattatattttttaaaagggtggaaaatacattttatataatatttcttatcttttcatagttctacatctaacccatttaacccaaagaatatcatgcttttctatcaaagaccaaagaatttttccattttgggccttcttaaaaaccaataccaccataagacttcggtaaataaacattttcacatgaagcaatttgaatttcgcaacgatcgattgccattttggctccaaaaaaagctccgacaaggcttttccacttccttaataacaattagcacaaaaataatcgtccggaattggtaattatactattgaaaggcagggaaatagatttcgcccttaaacatgtttttattattattatttagataaagctacaagtgcatatatgagttatgacgttaccaaaacttgagaataatttgattcaaaatatccatataactaaaccaccatggagaaaagaaaaaaagaaaaattcaattttcctttcaatttatatggtaaatttaaacatacatagcagatcatgatcatctccaaagaaagaaatggagaatgataaatataatatataaatatatatgtacaacttaatactgtagaatgaaatgtgttcttgtgtgacttataactaacataatagtatagagagtaacactaaataatatggtgtgttactctaaaaattgcaataagaagctcaaatttaatggtctgcaaggtccttattattgagagcaaaccaagatcttccaaagctttcgagttcttcttaccattttttgtacaccaatggcaacaaaatttggtagtaagaagacaggaggaggttgaacaacaattccagaggaagaagctcttaaagaagatgtttcagaggtaaatgaagctccatttctgctgcttctttttctaagataaaagcttctactacccacatctccgattgcatctgatttatccaaacctgaaataaatttacatacatgacctgttatcattattcagtaccatttgcccaattcaaatcaagttcataacttataagaacaataaagaaaactattaaaacatttgatttggttgtgttgtactagtagtagtagtgtttactttgaaggctgaaataggaatggtgcaattcaagggaagatggtgaatccttctcaagcttaggggttcgaccttcttcattgtatttctcaacaacatttttaatagtctcttccacacttgattcctaacttaaccatggtccgaactggtcctggactcccttcaactgtcacattaagaacaacctttgcatcttcttgtaatctggcttctgcattacaaaattttcaaatccattatcctaaacttccgtttaaaacaaataatgggtttactttactttacttcaaaaattgacacaagtaaatgaaagaaaaaaaaaaaagaagttcaattttttctttgtttttatacatgtgctcaacacctaaggcaatttcaaaattgttactagatcaccttccatccaattttcgtccaataatgcatatggctatgtttaatgaataaaatgccagaagattattaaataccataaaaacataatatgggcaatgtagaagtaggtgaaaatttatatccagtctaaatggccaacggtatattattacccaataatcgaagtttaatatatttttttttaattgatgatcatgtgcacacaaaatctatacaaagacaagataaagggcactagggtcagatcacactcttgtgaaataacataaccttattgctataattgaatgtcaaattatactaagaaaaaaccgctaatcatttatatatacacatgtgacacatggcagcgcctccttttaacgtatgaatttcattgatatgattgattaatgttatgattatttggcttcaactactaaatgatatataattacaaaattaccctatacaaaaagtgaaacttttacaaaaaaaaaaggaaaattaaaaaacttgactaacctcgtgattccttggggaggaggagaaacccaaaagcgaaggagaagaagcaaagatctccgtgcaagtatagggtcggagaagaacatgttccgatccaaaaatcctgcgacgatcgtcctcgttaccatcgctgctgttgctactactactgctcccgatccatagaaggggctcagacgagcaacgcttgagaatcttaataggtttggagtgcggcttaatcaacgatcgacgaggcggcggagtcctccgggaaggcgacggcgatgggttcggaggtctgcttctccggctaccggtgggctgagctcgacgccgtagacccctctctgacatgtaaatattaagtgaatatagaaacggaaatatatatatatatattgataaatttgtgaaat

SEQ ID NO: 263184 - DNA, 516 bp, Cannabis indica
caacaattcattatgtacaaatacatatatgcaaatttctcattagaaatatttatttgcacaccctacaggtcttacttcactttatgtgagtaaacttgcctggactgcgtcataatattttgacaaaaagtcaaatgtatgtcgataattctcgacaaatataatatcatcatctttgctatctcatgttagttattgcatatgcaagcattcaacatctatcattgacaaaaatttcattatatgataatttcctcccatatttacatagcttacagagatctctttaaattacatatttttcaaatatgtttatcatttataggtacctatagagaaccaattttggtattcaattatgatcaaatgtgttatatataacttctcttgggagcctcttctagagtaccgtatccatcacagttatcatttttaaatcatcaatgctttataacattaaggtatctctatgagtacctctatatttaacaacttcaggacatatcaaatgaa

SEQ ID NO: 263185 - DNA, 698 bp, Cannabis indica
aaaatcgcgaaacgattgctgaatgcgcaacttcttctcctcttggtagttaaatcagctactgggtctacgaatttggccccaaattgttcttctaggttggagaagtttggataacattttgaaaagcacaggcttgcttgctctggagaacagggatgtgatgtgaagatggaaccgtatatttcttcactaaagacatcatttcgaaactgctaacattattatgaggataagccttagtattttttttattaaaataaaataaatgaaatttaataaaccaatatgattgatagtgtaaatactattttgtactatgtattttgtaaaaattaacaattagatattttgttttgttaaatgataaaataaacactatattttctaaaatggtacaaacaagaccctgaattggctttttcttaaaattaaatttaataatcatccgatctaaaagtgttaagacaaaactatttatattttctatatcggttcatgttagaaattgttttcaagttggtcatattaaaaaaaaattatcaaaaattaaactcatggtcctatttttactattttaaaaaatacaaagtctattttgtcatttaacaaaagagatgatcaaattggtaacttttacaaaagcaacattagagagaaaagagttaggacagttgtcgtctacatcaaatatagtt

SEQ ID NO: 263186 - DNA, 626 bp, Cannabis indica
  modified_base (4)..(4): a, c, t, g, unknown or other
taanaatcctcaagaaagaatcaataccctgctagcaaggtcatctgcgcgcgcgtagtggctgcatgcagcctttcgtgtagccttcttgggtagcaacaccaccttgtgggattttttgtggaattttttcacaaattccgattttcccaatttcaaaccctaaaaaataaaataaaatattatttttaatatatttaaacttaaatatcaatattaaattaataatatttaatttttaatagattattattaatttctgatattttgaggtttaaatttaaaaattaattattttatttttatttatggtcagattttaaaattcagttaatttctttaatatttatatagtatttaattataagattagatattttaatattagccatattttaaattaaaagataacgttatccttttaatttgaaatattatattaaaattatcttataagacattaaataattaataaatttaaaattaacctacatatatattttttttaaatattctaatcatattattttcgaattcaaacataggttattttgtgaaatatttaattgtttataaattataaagttaaaaaaatagatattgtatatcattttacttatcatata

SEQ ID NO: 263187 - DNA, 600 bp, Cannabis indica
tttgggttcaccttcattgtgctaggcaagctaccttgagggcgggtagccatttgagtagccaattgccccatctgattctctagggctttaatggatgatctagtctctgtcatgaactgtagtagcaaatctatttgtagactagaccctccactagaaccttgttgctgtggctactattgattttgttggggttgatttctcagctggtaaaacccctgttgcaactgattagaggactaccgttgaaaattttattgccgaccccctccttgattgtacccatagttacttccaatggcttttgcttgattcattggcaaactgttcacatccacagggcatgtgtcatatgtgtgacggctctcgcagagctcacaagtaacttgagcctattttgtctaaacaaccattagctttgttaggacctcaacttgggctgtcaacttggtgatgcgtctacctcgtgcatacccacaactttcttagactggcttctttcagttggccattgttggttattcatagccatttcttctagcagatcatatgcctcatttgcacttttcctcaaaaatgccccaccaactgcgacat

SEQ ID NO: 263188 - DNA, 1470 bp, Cannabis indica
aacattagtaaccaccactcacaaaaactacaaactaaaaaaaaaaaatatataaaattactaaaaaaaaactcacaaactcattaccttactaataataataacataatatattattaatttaatttaatcaaaaaaaagaaaaagaaaataaagctagagacctcggttgaccatgtcgaagaagcgttgttcagattcgagtctctggagacgaatatcgttgttgacttttttaatgaaagcttcggctctcttgtttaattcctcttgactcattgacttttctctcctcaacgacaccctatcactgaaagtctccgactttctcatctcccgccgtgcccaaaccgccggatcatcctcaccgttcatcttcttcaaaccatagtcattttcatctccatcggctctcaccagccgcggcgccacgtcccaactctcactcttcttcagtttccttcccgccgagatggccttccatgtctcttcaagcgagctattatcctcttccttcttattctcgttgggatagtcgtcggattttgtctccggcgatgggttgccgagcaataatgaactgtctttagtgattaaattcgttactgatttctcttcagcttcatcttcttgacaatccactgttgggttttgaacggaatagtcaccggagttttccggtgatgggtcgccgtggaatagtagctcagtaggtacaacagtaaccgttttttcttcctcgattaaagataaagtattggttggagatttttgttgttgggattgggaatgaaaaattaagtggtcggtggtctttttgttattgtcgtcgttactgggttgataggtggatgaggcagcaatggcgacgataatgaaattaacgacgatgtagatgtaaagtggagacataacccaactcttaaacgacaaccaaatctggggaacagtcgagagagtcagatcaacgacgaaaggaatcactgccgcctttaccaatgtcagagtcgataccattccggctaaaagcagtaaaagctttcctgcccagattgtcgtttcaaatctggttttctgcaaagctctgtacgacatgtcgtttttatatatgataaagaaaaaagaagaagaagaagaagaagatcctcaaataaaaaaacagaggaaaatgcaaaagagagagatatcttaaatcagcatgaaaaaaattgctgatttttcttaattattaacaaaatcataagctaacagagatatgaaaccactgttatgtacatatatcaagaacagagaacggtagatattgaaaaaaactatggatctgttataagaagaagaagaaaagaagaaaaccaatcatagatttcaaatcaaagacagcaaaaaagtgatgatgaatttgaagagagagagagagaggtgttcatctgacaactcagaagaatggtaagaattgaggagagagcttta

SEQ ID NO: 263189 - DNA, 690 bp, Cannabis indica
tgagcaaaggtttcaaagacaagaaatgatgtttttgtggaatactaaatgtcttacaattgatacaattgtaaaaaataatcaaatatgatgtaaagactagacttaacttatttttgctaagtcaaaagatatagattggattgagaaattgtaaatagattccaagctttgttacaaagtgttgtttaggggtaaaacatgttttgtagaaacaatacttattattgtcaccaaattgaatttaaaaatttaataagttagtaattaattgtaatttttgtagaaacaatactttacttatcattacattattcaagttagtttgcgtaataaattttccataacagatgcacttatgatttctaatgttttacaagctcctttcaatttaaactcagcattttcagatttaataattgatgttgttagtcttttattcttttttcctaatgtaactgtttcacatgttaaacgttctgcaaataacgcggtcatggccttgctaagtttacattaggggtggatgagacttgtacttggttggagattacccctccacctatttaccctgttattgtaaatgaatttttgtttatttaataataacaagtattttctactaaaaaaaaaaacaaactaagtgtgttactccataaacatacatgtcacacaaaaagaatgtataca

SEQ ID NO: 263190 - DNA, 979 bp, Cannabis indica
tgataagattattgtcttaaattgcatccagagattagctgttttatttaaaaaacaagaaaaaagaaaacattgattaccttaaaactagtgagagttgtacttgcagggtgtgtatgttaggttcttacaaacgcttttatgttactttgttggaaatgattttgaacaaaagtttatgtgcagttaagctcactttgtttaattttttatgttgttagtagctacccttttgtgataagataatttatttggtgaagctaaaagttcagttgaggtttaaggagaacttaactcaatccttctttgtggttgtaatttgaatttcttatttttttttatagctaaggtgtttttgttgtgtttgcgttttttgtttttatgtctagtacactctatgcggtttaataatgggtaatacagatgattcctgatcatcttctaccagtacttgtttcttagtaaaaaaaagttcaaaaataaaaaatcagttgagctgagtatgttgtttaattcttgtagttgttgttaccgtgactataatcctaatcattcattctcttatccagggagcttactaacaatttactatttatcataggttcgtgcttctgctgtgcttattccagaattttcagaccttgaagattttgaggaaaaatatttgtttacatactctatccgcatgtcccttattcctggaggaggcaatatcaatgggatggcatttgactcttgtcaactgtattggagacactgggtcattcgtgctaataaccaagtagtgtctgatgttaatggtgaagctgtaattggaaaggtacaaattagtgcagcttactttagattaactatcctatttttattgtttattataacgtcatataaaaacagttaagttataatttctccaactatcaaaaatagaaaactcgtatatgacaaaagtgatgccctacctaagaatctctctctctct

SEQ ID NO: 263191 - DNA, 515 bp, Cannabis indica
cataaaatcttaacatgtctgtcataatcactccctcttacagggtccgatgtcctcatcgaccacacttccggctgggtcaaggctctgataccatttgtaacgtccccgcttcaagcctccattgagtccttacacccacagaatgaatggctcttatacacaagtacgtcactctggctgcttcattgactgacgactgaccctacaaaccaacacgagtgtttctagcgtgctttgtcctcactcacacgcttcttaggagatcacccatcctgaaattgtcccaagtcaagtacgcttaactatggagttgcatgtcgcgacccgcctaattgtaataccctaggattatgagattggattagcaaaaccctaattagataattatgaataattgcaaaattatattattatataatttaatatatgtgaatttatttgattaatgacatgttaagaccccattggtgagctaggagcattttagtaattttgacccgggaagggtaaaa

SEQ ID NO: 263192 - DNA, 1846 bp, Cannabis indica
agactaagacaaagaaaggaaactagtgatcatgtgtttattgtgttcgaagagctttattgtacgtgttaaagagtcgttctttttcttgtatctcagtagtgtacacaactcagttggagcttgtaatctcattgatcatagtggagaaacttcttgtgggaaaagttagattaggccttgatttcaagggtgaaccgagataaattttgtgttctcttgcttttctgttattatacttgttggtttggtcctttaatcaggttgaatttgtcttgtttaatcacaaggacatgcccatttcaatataataatactgcctataaaaggaaatagatttccaataaaaaaaaacatatatacagtaaaaaaaaatgtttttatgaaaaacatatttagtaccctatattttcaataatatttaattggtacctcatatttttaaattatacatattttgtactctaaaataaaatttaatcaatacaatttataaatttaaccaaacagttctcggttatacgtaaacaaataattaaatttggatttagaatgtataaaattttagacaatttgattgtcttgataaaattttatcaaaaaaatttaaatttaaagtaccaaatatgtatggttttaaaatataggataccaaataaacattattggaaacacaaagtacctaacttgtatttagataaaaacaaaagaacaaaaggaaggaaaaaccaaaaaaaaaaatatatagatagtaaaaaaaaagagccttatcttttattcaaccaaagtttcgtacacttttaccatagctaattacaattgaagtttacagaacaccgtgtgatagaaaagatctcagggcattcatataaagggagatatgcagcaaaaggttgacatgaacttgaggactttgtagcaggttactatgtatatgatctatactggttaattttatggtgtaaaatttaccaatgtactaagaagattagctcaatttggagatgttcttttgctaaaggaaggtgatgagttgaaaatttcctgaccaagctcctttatcttgttcagcagaagcatttgctcggtctcgagttgaaccatgtaatcatcttgcatgtcctcaaggctttccaactcgctcaaggctgttgacaattcttcaagattgccattgttggataaagaccgacacttgatcatcatttgtttcatctgaccagagagcatcattcgacaaaacatatgttaaccggattgaagaataatgaagtcattttagtaaagttgtaatgctagaatcatatctgggaacaggcatataaatttaggtgcatgggaagaggaatccttaagcttacatatggtttgggattgcttagattattgattggaatcaataagaaaggctgtatgactcgaatgctagcattactaagatcctacatacacttcaagaaaaaaaaagttaccgaaagaaaatccgcatcttacctgactagaaatgtcatgtgctttagctaacgaaggttcggaatctaaactgcttgtcttcagtaagtctggaacttttcttgtgacctgaatatgaatctctccccttgtcaccccttggaggggtatccacttgtcacacatctcattcggaggcaatctatcatattcgacaacacagtcacctatacttgatgtaggcagcacagcgttgtggtctttaacatacaaaattaggcggctgccattatctggaaactccaaagtctgattccactttgggttcaaagttttatacataacctgtaatgtatattcaagtatagcatgaaaagaatgcaaaatactactt

SEQ ID NO: 263193 - DNA, 670 bp, Cannabis indica
aaaaatacttaaatataataatatttaaatacttagatctccactatctaaacaattattacaaagtttttttttttttgaatggaaatttcatcttttattgaaaagttaaactctcacatccgctaccaaacaaggtagcaactcagttggaacagactcaaactgaaagtacgatcaggatataatctagcagctttggcaaacgtatgagccactacattagctgatcgcttaacaaaagacacaacaacattatgaaaagaagcaagcaattttttacaatcttgaatgacactaccaaacaaggatattatatgaattgaaccatggagagcttgcaccacacacagggaatcagtttcaatgaaaagacttgaggccattgtctatcttttaaccaacttagcacctcacggatgccaattgcttctgcaacagccacatttacttgagccgaggtaaatttcaaccttccttcaaccaataaaccagcagagtttcgggcaaccatacccaaaccaaagctcctaccatcttcaaaaatagtcgcatccacattaaccttgatgctattatcaaccgggggtgtccactgctcacaaacattagcagccataaggattggccaagatgaattcgaagatttctgagcaaatttccatagatc

SEQ ID NO: 263194 - DNA, 2296 bp, Cannabis indica
aaaaaaatgtgtatatatatataacagttttaatatgttttttttttcttaatgtaataataattataaaaaattccagggtgagtatgaagatgcaaaaaaagtgcaaatgcttgtatgatgaaaaatgtcactgatgctcgtcgtccactatacctggtatttttatattataacaattaattaataataatattaaaattacattataatttaaattactacattagttaataggatatatttttaaaaataataacatatagcatttaaataaataggataatattgtatttttccttaacaatatatagattatatgttggttacaagacgtaaaaaaaattaattatataattattaatgttacttcgcaaactaattatactagataattattaatacaaatctcttctcacaaaatattatttgtgtttggaaataattgtgtaattattaagttagtaattacactacattttaatatacaatgtgtaatgtgtgtttagatatgagatattgattagtatttatgtattcgtactgtcttgtttgaaaaaatagttagtaattatacaaaaaaaaatgataatttttaatacttaatatttaaaattgaaagattttaataattatacaatgtagatagtatgagaattggagagtataattgaggttttttatttatctctctagtgtaattatatgatcagacaaacacgtaaaaactgtataattacactcaatttcaattcccttctcactttccaaacacaccttaaattgaaaatatcatatttatatatctatatattttcgtaaataatgtaaataaatgtgtgtaggctattattatcatggctttggaaccagcaaaaaaggaagaagcagaaaagtattggaagaagtttgtcgatttaagaagtgagtttagtttccaacccatgtttagagaaagcatggaagagactgggatctttaaaatcactactagttttcaagagtttcaaaatgttgttaagcagcttctctacgacatcaataaggcacttttacgtaaaacaacatgaaacaagggtcggtcttaaggtacgtaaggccaacgagcaaagtgcgcgtcttgaatacccaatgccctaaattgtaaaataatattattagtagtatatataataataataaataataacaaattcaataaaattgtatttatagtgtaatggtagattaattaagtctgcaacaagatttagggtttgatttctatcccactagcttcttaatttttttagaactatattaaaagtgtgcctatatagagaattaaatttggaatttcaagaacatattaaaattatcaattaaataacaatagccagccataattattaatgggggcacaaagaattaattaaaagagtattaacgggataagaataaaaatatatatgtaaataattaacaatgaaaatataaactttagtgataaagaacattatgtaagataaaattaaaattaaaattgtgtaggataataatgataaaaatgatctatagatataatattatctttgatgtaatagttaagcaagattataaaaaggatagatagaggtcaagagttcaaattgttacttaaaatttctcccaaaatacatggcagttcaagagaaagcgaggtgatactaagacctacgccacaagataggtctccctaattattctcggagtccttcatttcaaaggataatgaaagattagtaatctccataagtatccagctagaccgcaagcatccctcgtctgtccctcttcgcaagtaaagtatattcggaggacggtacaggaggagtagtgaaagataacgtgtcactcaaggaccaagacattgtatatgcatttaatgcagcatgggaaaaaacatcaaacgccttaccctaacaagcgtgtttaagggtttaaacccatcattcgatgattacacgagccccgatacatcaatcgacggatgtgtaaatgagccgtcaagtcataatatgggataaatcatatcccacaaaatacctacagacagcctaaaacccatcataacataggcaattatgccctaaattagatttgggacattgtaccaagtatggtgtaattgaacacaacaacaatagtatggtgtaattaaattatgccgaacctacaatatgaagaaatacaacgaaattgcaaaattaattatttcattacttataactagttattaaaaatagtaacaagttacttagttactaaattatacata

SEQ ID NO: 263195 - DNA, 1948 bp, Cannabis indica
ctgccaagaaatagtaggttgtttcacaatcgtctacagagtttgagttcaagtactgcatgcagcggttgtgtggttgctttcctttcttataccaagtttcatgttacactggctcatgttcccatcatttaggttgataactagggagttgttgccttagctatcaaccgagtctttcatgtttgatgtaaacatatagagattgcatgttcatcaatttgtttgtgattttgaataatgagctttcagtatgttttgcgccgtttgtggaccaagttgttgatgttcttactaaatgtttggctaaagataagtttcagtacctctaatgatccaaactcaaagttgtcaccacccattatcgttctaggggtgataatcaactaattaattcaggttaatgagttggtcttaggcttagcattagttatctgtccgcttatatcttgtaacaaattatatatgttataacagaattcatttttttttattattttgtgtatataaataaagctatcctctcaaatcacactataatttttagtgtgttgttctgagttttcattcattctcttcttcctctttactttcttccagtcacgcatgaaacaaattattattgacattaaaattaatcaatttttttaaaaaaaattacccataaaaagaactttactagatttagatgtgtatataatacttaattaagtcttcaactttttctttttgttgagcctattaatctctacttttgagctcacacaacataatcagcccgatgctatatttcaatgaaggaattctaatttacgatggtaagaataaaattttaacaaaagataaatatatatagcacttctttttattttataattaatattatcttaataaattgacgttaatattcttttaaaatatggacaagcactaaaaaaaattattttcaattatactcaaacgtgcggtgtgtaaatacataatggtacatgagtaatcctttttcataaaagttccctatcatttaaagtcaaatcgatatatgatatatcccaccaattaagtttagtatgtacatgtacttatgatctacatgttgtattatttgtatatatagcgtattttcaatgtaattaacagttttaatttggatgatttgcatccacataactttatatattattattattgacgtagacactagttttagtatttttaaatggagcatgcaaattataatattaatatgtcaagacaattgacttatttctttttctttttctttttcgcaattgaatattagggttttgcattagttaatttgggtgggaactggaaaacaaaatatagaaggccctgaagttttgtgacattaataacttattgtaaagttgttttggttgcaaatcatctgagtaaatagctaagctttggtttagatacgtaaaggacaaggaaacaaagagcacgtacaaataataataataattaaaaattaaaaaaaaaaagtagtgcaccaatcaattcgattttagttaacgtgtatatcttaaccaacacaggaaaacgattggtgagcaacgtataccataccttaaataatgtaatttttgggttaatgatattcaggatagattggctttttttgttattgcaatgtttgtgaaatgaaatggttgtctcctgtcctaatcgaatctgtgatcagatgctcaaacacaacattcaagctggccgttcttttttttttttttaaaaaaaaagaaaaaaaaaatagaatgaaagaagttgagggaggccacgccatctaacttaatttaaggccgagtctgagagttctttggggctcttataatgggcctacctaatatcgttcataatggcaggccttgggcccaattcttagatttacataatattattatcaaaaataaaaataaaaagtaaa

SEQ ID NO: 263196 - DNA, 992 bp, Cannabis indica
ataacaccaggatttaacgagtttgagccatgtgcaatgctctacatcttagttggaacagcagcaaccatatctttattgataattgcttcgaaagttacaaactctgatagagattacatgacgaactttctctctgctgtttacaactctctctcattctctctctctctatatatatataaccttacacaacaaatttctctctcaagctctctctcaactgatgattttggattacaagggtgacaacaataaataggcttatatcggcactaaccgacttaactaacatcgcattttaagtctccacgtcagctccagcaacacgctcttcataagtaaacaagcattcggtacggacaatccagaatggtccatccaaacatgtacaagctttctgaacatgcgttctggattgatgacaagcagtcaaaaaggatgtccggaaggtcaccaaacttcccgtaactccctttctggtgaaacaactagcttctcaaatctaatttttcgaaagacaaaatttgtaaccataactaataattagttttagttattaattaatttgtaggtataataatctataacggctactttatcaggttgatcacgtggtggaatcactgaaatttccaaagaaaatattatatcaaaatttctttaaaaatgtttctgaaaaattatataatgatcagtatatactactcctacttccttcaagaaagtttgtacacgactacttaattatattagattatatatattataattgacttaagagagaatctaacatgtgagaatgacctaaaatttcgttctttgatcgatcaagaaatatactattattctaatttgtaagagagaggttaatttataatcatttggtcggtaaagatgtaatttggtcaactgtttattatcttaaacagttatatatatataatattaataactatatataatataaactatgtgactgctattgtttt

SEQ ID NO: 263197 - DNA, 2305 bp, Cannabis indica
agagaagaaatcggaccttcttagacatggtcaaatcaatgatgtgttaattatcactgccactgaacttttggagatacgcacttttggtggctacatacattttgaatgtagtactctcgaagagcataaggatactccaacggattatagaatgggacaaaacacagtttgacatatttctgtatttggggttgtcctgctcatgttcttaagcccatgtttgggaagcttgctcctaagactgaagtgtgtatatttataagatatttagacgagactcgaggtgcctgtttctatagtcattaagataataaagtatttatttctacaaatgctactttgcttaaacatgactatatgaaaagtcacaagtcacgtagtcaagtggttatcgagaaaataaaaaatgagatttttgaaccaacaattttagcaccattaattgaataaccgacagcggttaccacagttcttgaaaaaggaaaccccgatacatcatcttagtgggagggttgtgagacaacttgtctactatgaacatgaagcacatattcttatttctgatatagacaaggatgatccattgacttacaaataagcaatgtatgaccctgacttagacaagtagaacaatgtcatggatttaaagatggactccatgcgcactgacaaagtctcggtatatgaaactctacctgagaatattactcccattaagtgtaagtaaattttcaagaagatgaaaaatgatgaagggaatgtatagatctttaaagctaggcttgtggccaaaggctacacaaagcgagaaggcatcgactatgaagataccttctctcatgtggcaatgcttaaatcctttcgcattcttctttccatagccgccacatatgattatgagatgtggcaaatggacatcaagactactttctaaatggcaatcttgatgaaaccatatatatggaacagaccagaagggtatgtgttaccatggaatgatcaaaaggtgtgcaagttacttaaatctgtttatggattgaagcaagcctctagatcatggaatatcacctttaattaaactattaaagtgtatggcttcaaactaaacaaagaagaagcatgtgtatacaaatacattaaaggtaatgtagtggtattcttagttctttatgttgatgatattttacttattggaaataatgtagaaagattattagatgtaagaaagcggttagctaacaaatttcaaatgaaggatttggaagaaacaagttatgttcttaaaatcaaaatctattagtataataaaagattgaagacttagagaaattcgccttctctcctgaaatagtttcacatttcagaagaatttcttgaatctttaaagcttcaaccttagtggccttgcaatacaaataactatcatcaacgaatgaatgtgagatattctagggggctccattttctaccttacaaccatggagccaacctcttcgttgatactttcaaagtaacactgataaaacttcagcacacaaactaaacaagtatggagagagtagatcaccctagaaaatttcttgagatggaattattgattccatttcttggccaccatgagttaccatatagcaagttgacataacacaagttaataacagttgaacccaaccttcattgaacctggaattctgaagtatagcctctaaaaaattccattcaattttgtcgtataccttgctcatatccaacttcaattccatataaccatctttgccttttcatttccttttcaaataggaaactagaattttaccaaaaattagtctacctgtgatgaaggcactttgagattcagaaataataaataagtctattaatcttcacttttatttgtcacaaaattaatttttttgtattatatataatagttgaataaaatatttttattattcaatctaatcttgcataattagttataattttttatatattattttatcaaaatttttgtattaagaaaagaatatattataaaataataactgtaaaaaaaattactattcacaacatggtatttgacaccagtaaaaaaaaaatctcacatatttagggtgaatttgtttgcacttaatacttctgtaaatcttaattagtcagattttactccattaagttcatttgtttattaattttttaaaatactttttggcacttttttaccacttattcggttagacctatcaaagactcttaaaagttttaagacctcaattatattttattttacggtctaatcaaa

SEQ ID NO: 263198 - DNA, 2644 bp, Cannabis indica
cgaggaagcccgattacccatggtagtcaatttcctttgcagatcaaagcttatgtgggtttgaagctcaagattcaatggctggaggtatttcgatccttattcatagtgtatatatgtttgattaattccgcacttaatacttaaacatatacatttcagtttatatatataaatatctaacaaaggtttcaattaaagcgtacaccatgaacttaccattaattaagcttataccagatgcatgcatgcattgttagatttcaccatgcatctttaacaaccaaattaatctttgaaatttagctcgatcggaaaccccacccaaatctttaaaggaacatcgtacaataaatatttttatatgattctatgtgtatgtatacattgtagttatattacatatgtacgctttatctattttttttaaagaaaatatttgtatgtcactatcataaaattattatatatatattttgtattgcacgtatatatatatatttgagtaaccataaaaacctaactcacacaattaaagtgatcagtgaattgtgagcctaattgtgtgtattaatttaacttaattaggtaccaaaccttttcatttagctcgatcaccaaattaattaattataaacaaaatattagatataattaataataatattaatataatttgttggcatgggttgggttgggtcaagtcaaaatcatggggttggtgtcatggacagaccaaactctactcgatttggttaagtgatttagttagaacacatcctttcgaagcaaccctagctattaatattactttcattatataattaattagtttttagtttgatgagtaaaggcaagcaatcgtataattaaatcaatttttataatttcttcacacatatcgacatatatataattattatttactatattttttaccaaaaaatataaatcgcttatattatggttagtcggcatttgaaaaatattaatcattgcttataggaattaattagtaaattgttaatattacttaattagtataaatatgtaaagtcattttataaatgagaatcaattaagtttggcacagtgactcgatgagtgcaactcgatcgagtctatacttttttataatatttttttaatattgtatccatttagattatttataaatttttaaaaaatttcgaatagtttacagtactgaaaataaaatttaaacagttatttaccacgcttataaaagaaataatcacgtgtgtaacaaaatatgcaaatattattttttgtattataaattatacttagaattttttaaaaatttataaatgatactaaatcgctacaatgttatgaagatccaaaaaataggcctaatagcactgactctgtaatgctataaaggacgacatgaaaattttgatgactgagaaggcccaagactaagctgcgacttcagcttgtcagaggtgagctgcaacaaggtagaagaagccatggaacgtcctcaatggaagcgagataagtcgtgctaaattcgagagaagatgcagctctattttctgttatgcagtttgccttttggatctgagtataaaagacttataataattttgggtttcgttgaatgaaatatgtatgggttgtttaggagatttgtcctgttttgaaaagactcaaaaaaaaaatagactaaaaatctcttttaaatgtcgtaatagaacaccatttttaagagttcactatagacttactcgattatttatgtacgtgaatgaattgtcaatcatgtgcatataaagtgagtaaagaatattgataatatatattcaaaattttaattaattataaaccttttgggacaacacatatacatgtgtcaataataatgtccaattaattaaatctatataaatgaccaaatatcaatctcatttcagaattcccttgtgtgtgtgtgtgtgaaattgtacgtatagtgaaaatgtatataattaggagatgtcacgcaacatggcttattaattattttaccactcaaaattaaagactacgtgcacataataaaaatataacaaatattattaacgtacgtacctactcaataatcactatgtatatatacttagtaattaattcacacatattactaatcatcacaaatacatatatcataatcttttgctttgtttattaccttttctgttgtgtactcttgtagtacagattgtttttacttgcatttttaaatattcctataactaatgtgtagtctttaaaattctcaaaataattaaagaaataaaaaattttgcactatatatgtgattctttagtttaataaaatatatatatagggtttatatttttctttttcttttaaaaaaaaataataaaaaagagaacaaaattgatatgaccaattacagaggaagaacttgattccataattttatagatagagaaagagaaacagagagagagagagagggtatggtgtggggtctaaagctagaaagaaccatattaattaattaattaaagatatatggataaatagagacttgagttgagagatgaaaatgaatagttttgtggtttgagtgaaagagtatctttcttgggaatatcaatttgtgtg

SEQ ID NO: 263199 - DNA, 1135 bp, Cannabis indica
attcaattctgtataataattcaaaaaaaatttaaaactattcaaacattacattggaaatatatatagtcaatacattgaaaagagagcttgttctgattgagtggaatcaccattccttttgtccaaaaacaacgaatctcaaattaaatgtaaaatataataaaatatttcattataccacctcacaaatttgacttttcaaagttgttaaaaacttgctatggcaagttggtgaccgtgccacatcagcaataaaataatacattttggtttctatcagtggtgacgtttccattaaaaaatgatccaaatatatatatataaaaagactggtcttgttaaccaaaaaaaaatgaaccttttcataatttaatctgaaccggtttggtgggttggtagttttgagcaacaaatgggtttttttttctctctggaagttcttctcgtcgatgtgggtgggcgaagttcttctcgtcggaatttcttctggtggtgggtgggggaatttcgtcgtcatctcttggtggtgggtggggatgttttgctcgtgggtggtggagaaaatgggtttgaaaaccctaaaataaacctaaaagataaaattaaaaaaaatgaaaattacacgtgtcaaattacatggactacataataagagccacgtcagcaatccgttattaaaatgaacggaacaagacagaataccacaaatttaacattctcaaaaatttaggggaaatttttaatgtcaaaaataattcagtgggcacaatttgacaagtgtcaaagttcggaggaaaaaattacagctagcctaaaatttaatatgcgaaccaaattcacatgttactaaaacatgatttttttatcagtattttaactgatattaccaacatgtatctaaacttatcagtttttcattaaattaaagttaccaaattcattcatttataagatgcctaaaattttaaatagaacaatttgctatgtgtgcgaacttttaaagtacatgacaactctttagtttttaaaataaactaaatttcattaatttatgagatgcctaaaattttaaatagaacaatttgttatttcaaaataaaagcaactatttagttgcttatcatatcaatta

SEQ ID NO: 263200 - DNA, 826 bp, Cannabis indica
aggattgccgctgcaatgagaattgattttgtaattgatttggcacctggagctgaacttgtttctaaagctccatatagaatgattccgacagaactcaaggggcttaagttacaactgcaggggatgcttgatatcgtgtttacctgacccagtatatcgccttgggcagctccggttctgtttgtaaaatagaaagaaggttccctcacaatgtgtattgattatcaggaactaaataagttgatgatcaagaataaatacccattacccagaatcgacgatctgttcgattaacttcaaggaaagatagtattttcaaagatcgacctacgttcggttatcatcaacttagaatccgagaagaagatatatcaaacactacgttccgaaccagatatgggcactaagagtttctggtaatgtcattaggattgactaatgctcctgcagcctttatagatctcatgaatatagtattcaaggacttcctcgataattgtgtcatagtgtttatcgacgacatccttgtatactctcagtcagaagaggagcacgagcatcatcttcgaatagtattacaacaacttagggatcacaaattgtatgcaaagttgaaaaagtgtgaattcttgttgttagaggtgtcttttctgggacatattgtcaggaagaatgggattatggttgatccaagtaagattgagtcggtgaagaattggctgaggctgaaatcagtaacagaaattcaaagttttctcggtttagcaaggtattatcaacatttgttgagggattttctaaaatctctatgccactgaccgag

SEQ ID NO: 263201 - DNA, 709 bp, Cannabis indica
aacaacacacccgaacccgtgctgtgaagagtgttcaaaaatagctgcatcgacattgagtataggattcaaacgatattctattaatatttaaaaaaattcaaataatttatttaaaattttttgcattgtaatttttctttaaaatattttgaaagcaggtgtaatacccattataattacaattataatttttcacctatactcttctgttaggaaaacaaagtggtagtggtactataaaatttcttaatatatttatggtaggattatatttgtttacggtacggaaaaattacaatttatacgacggtatacaatataactatttaaaatcattcgcgaattcttatgaaacttcgaataaatacgatgtcaaaacatgcttagaaactactagttttacgtatgtataaaataagtttcaaaacattgaatacatttcttttataataattattattattattttatatatgatggtctaatgtacagttatttataacctcatacaaatttttaaaaaattcaaataatttatactaccaaaatatgaacaagttgatttgcaatctactttatgttaaacgaattgaattgacaaagatgaattcttattaattaacaaagtaaaagatacagcttatataggtacaatgatagagctaaaaatagaatggccaaactactctcctaactgagtctaaca

SEQ ID NO: 263202 - DNA, 868 bp, Cannabis indica
atctattctatatatctatatatcaatatggttttaattttctaatatttatttttttctccttttaaacttaatacatacattcattgcctagctagtttatcatcaatggttaatctattcggtaatttagtcttatatccctagctagatgttattcttactaaatcatttacagtttgaaagatttgtcaagttttcacttgaccataatttacaaaagtttgaaatgatattactttgaatttatttatttaaagattattgagtatttttctttctcacatcatatgtccaaacaaaatctcttctacgcacaatgtagttgaaccatccctctcacattattttcttcatgctttatgctaattaactttaagattaactcaaatatatattgaaatacataatcttattataaagataatttctaaatatagtgtatttgatttgattcaagatttgcaccttgtcagaaagtttgttaattatttctttaaatactacttagtgacatattttggagtaaaatttttgtgaagttgtggttgacttttttcaagcataatatatgcgtaaaggcttcaattctcaaaggattttgccggacaactcaaggcccaaacaagtctcaaaggactttgcccaacaacaaactattctctcaacaatactatgagtacactctaaaaggaaagtgaccactttttatgaatatttgaaaattatccaccaactccatggctatcacaaaatattttattggatgtttatgaacacaaatataaaagatcataattagaacaagcaataagttgcaaaacaactccagaatagagttattatgtacctgatgacgacacatcat

SEQ ID NO: 263203 - DNA, 521 bp, Cannabis indica
atgatcacaataaagcccttagattgttgccaatcataaattggacatttatagtattaaatgagtgatttggaggagctttgagctattagaaagactcccaaactttcaaaaatatatgcacttgtatgctaaaaaaaatagtaactaattactagttttttttttttttcagctttgatcaattcttctctaaagtattctaaatcactctcacttgattttgaactatttatgcaccttataaatgaataaatcaagtctccagtagctatattttcaatagctatcattcattcacatttataaataattagtaacatcttttactaatttaagagtgaaaaaaatgtgagagttacatattcaagttattattaaattaaaggatttgtaactcctattttgtgattattgtacacatattttgtaactccataatatatgttacaatttaacaaaattaataatttgtcacactaaattatttgtctaaagattatattatataaaataatata

SEQ ID NO: 263204 - DNA, 552 bp, Cannabis indica
tcctcatttccttgagtggcatttggcaatactgactcactcaaatgaatatatattttttataatgaaaactcctgagtaaagaacggccaaaatataatgttataatcccattgattatggcaataaaatataaatgtgattattgactaaactaaagatttgatatgatattattaaattcataaatcataatcatcagccacccttgtcttatatctattttactatagctattgcctattagctagagttggaggatttagtgatggaatggaacactcaatttccaaaatctaacttaaaaatagaagtggcccggtaaagagagtttgggtctcttaacactttgagtatttatcaacttgatacccaaaaagtttctttttttttccttttagaatttttattgttatgatttttaaagtataagtttgtaataattaagatttgtcgaaaaaataattttatgatattttttagaaaaaaaaaataaaaaaatatagaaaaaatagtataaagtaactaataattaccattttatggtaactg

SEQ ID NO: 263205 - DNA, 752 bp, Cannabis indica
ttttttttaagaaaatctgtattcaattaaataaaatcagctgttataggagtgctaataaatctaagataagtatctgtcgacaaataaactcgtaccaaactagtaacagatttactagtgcataagctacaccattcgcaacacgcgagatggcacgacaaaaaccaccaccaacagcaggtaaaagagaattaatctccttaacaattgatttaaaaacataataatagaatttagacaatttatccaaaagctaataacagaaaaatccgtctcaacgcgaactaagttgtaccctaatctgaccgctcaaagcatacccgtacacatgtgatgtgccgtgaaaatatattaatgtgataccatattttattgtctaataataaaatatatattatcttgtaataatataagatacatacatatatttttctttttatctgtctcaacatataatactgtagatgtatatatatcatgggttccatttttctttcttcaatttgacataaattaatatattccttgtgcatgttacattatacataaaaagttcaataaccttgatgtccttaattttgaccataaataaatagttacatgtatggaagaaaagaataatatatagaaggtgacttaaaaaatgaacagataaaatatacactaattaagtatttggctaataaatggattgatctattcaaaaaaaaaataaaataaataaataataagaaatggctccgatccac

SEQ ID NO: 263206 - DNA, 872 bp, Cannabis indica
gaacttaagattgaaattttatcttgcgtaataattgtgaaagttgggagggggaatgattttgtggtggtgtcattgtttttctttttttgttttgttttgtagcacatttgcttacatttggtatgattgtattataggcggcatggctggaagaatgggttgaatataatgtcatacttcccattcgcttaccatgttagcaatgagaaagaaacctatactggtgtggtggctgttaaaaaattatagaggaacatttgctgtagagtaatattctttgaaaatcatcccacaggtacacaatttctaacaagccccttcaccttgcaggtgagttgagttgagtttagtttatgagtccttttgtgtgcgtcaaagatttaactcactaacttattatatctgtaaataaaaaagaaaaagaaagaaacttgttatatcaccctgtttgttattgctattcttttattttttttgttagattttgtaaatagtgaaactaaatagtacttttggaatcgttgagatatgggtgtggtgtggtggcttgcagagttgtattatgtctcgtttaaaggtccaatcaatgattgtattagttagttgcgaatttcttttattatttttttgagaaaggtcttatttatttataaaaaagtaatacgacttaaaaagtaatcgaggtaacaaaatatagcctttgtcattttcagtacgttgccatttttaagagcgggcttcgaaggtctcttacccatatttttatatagattattttttaatgtataacttttaaaagataattataattaaatattaattcatgacaataagttttaatctaatcgatagtaaaagaaaaaacagat

SEQ ID NO: 263207 - DNA, 664 bp, Cannabis indica
aatgaaaatacttttatttgaaatcagtacaagtgcgaatattagattgaattagattggatcgtgcggattgaattggatcggctattttatgaacacccttacacaaaattgggttttttggttttgtcttcaaaaccttgtggctgcttcataaggatgtgaaagattgatattcacccctgaatcggtttgcaatcttttaatctttcaccattgaacttgtcctcctcaaattgtgcttgtgtttcttaatctcaaagaatttcttaatctcaaagaacatgggttcttgatttcttttattctcctcagctctaataccacttgttctttggtacctttccaaaagacttcattgtatgcccatccttatatacccataatcattcccatttctagtcaatgtaggactttgattggacacccaacaattttcccctcaaacatgaccatatagcctccgctcaacgatcttccatcttgcactaccgctatcatcaaacagaacacgctgcttgatcttcattgtgaagaagactttcgacacaaggtaccatacatatcttcaatcgtgaggttacacaaaagctcatcaccttaagaagattcaaagaattcattcacacggctaatgttgggatctgattctaataccacttgt

SEQ ID NO: 263208 - DNA, 733 bp, Cannabis indica
tgatttcacattcataaaatatttagatggcatttaaaattcagaaaatcacatagatcttggaatgagctttccaacaatataaagaactcccaaaacggagtcccgagtcaaaagttatgcccaaaacaaaattaagcattttccccgatacagtccaactggaattccacttggaacaatcctgaaccaactggaaatccgattgtctgggcagcaacacgaaaaatcataacttttaaacctccaaaacctactcaattcttccccaatcatcccaaaactttccagagcatcaacatatgacatattaagcatattctacaactcaaacacaataatttcaccaagatcaaaaagtgccattaaagcaccaagcttgagttccatgaactcaagcttactttacacaacaaaaatcaaacctacaatcagattttaaactcaatgaaaccctgaaaacgcctctaaatttaccaaaaacaaatcctacaattcaacccaaaatcatgcttaaactcataaaatccaagcttttgaacttgagcttaatttcaacatacccaaatgtttttttccagcaacaatattccaaacaaatcatgaattccaatcgagaaaataccctttaatcttattccatgctcaacaaacatatatcacagctaaatgaaggaatttacactttaatctctcaaaaacaatacaactcctacatacatgcataaacaag

SEQ ID NO: 263209 - DNA, 1084 bp, Cannabis indica
tcaagtaaccattgtggatacggctgcccaccttttttatccgcttgggacgttacattattcaagtcaccgatgatgcaccatggtaaatgagagtcagactttaaagcacgaatttgatcccaagttctagcacgaaatgaacgattaggctcaccataaaaccccgtaagcctccaaggagcttctctagccgtggtaatctttaaatcaatataattcaaagagtaacccaacaaaacaacttcatcactaaaccgccacaacaccgcaacaccaccactatgaccgcgagcatcactagctatcataccctcaaacccgatagtgactctaagcttttccaccaaattcttccgacataaagtttcacaaagaaagacaatattgggccgcttctggataacaagatccgaaatgaattgaaaagcccgtgggttcccaagcccccggcaattccagcttagaatattcataatgagcggtgggcctgggaaccagtacccaccaacagcccattttttgagccctcttcagtatcgtcttcaccaactaagatgtccatattgtcactatttcccaagcccactccagccggcccattagaacacatttcatttttccttcttcttttagtatcaattacaagcaaaggagaagcctcatttgtttccataatagttttcacgtgaataggatcagcaacaacattaataccttgaatatttgacttaccaatattcactccttcatgtttatttgaaataataacaggtaacttacctgttgatatcccttgattggtggtcataactcctcctaaatgtgaagattgatcttcaacgttaattgaaggcaatgaacctggaccagtcgcaccaccatggaaggagtcaacgtcgtcatcgccggttctgagccatttcgagccgatcaaatgattacgtcgtcgtggctgggcacgcataccagccccataaggtttgacaattttttcagcgggcatgacaaacaattgaggacagaacctatccgaatgacccaatatgccacaaataaaacaaaaggtagggacatattcata

SEQ ID NO: 263210 - DNA, 906 bp, Cannabis indica
aaaaaaaagaaaaaaaaaaaaaactttagagaaccaattttagagtgtcatatcattcatttttatttcttctatatatattgatttgatattttttaatttttttggaaacggtatataatgattgattgataattgttttattcgtaattatttatagttatttattcaaaaaccattctcaatgtcattaatatattttagtgtgtgttattatttttagagataagtgatgacaataatgaatattattattatttattttattccttaaaaaattctcttgagttgtatggttagttatggtgtgtttcattgttatgttattgtattttttgtttatgtttggcgactatatggaggaactatgcaccataatatttggagtcacttatatataagttttctattttttaaacttttatcaaaattttatagtgaatgttacttttattataaggactcattattaactttattgttattgtagggagtttcttagtcattcaagctcaaacaatagagttaatgtccttcactagtgtgcataagctagtttcagaattagctttggattaagttattagttaagggtagttttgttagttatgttttgttaatacagctatacaattctgttacagcattggttagattcaactaaccaattcttgattgtatcgagctatataagctcattcctccattgtaaaatcagttcaacaatatagaataccaaaggctctaattttcctatcttttctcatatggtatcagaagaactccggcccacagtttccatggccaggccaactactcgttctcaggatggaactacaccatcgacgatcgacaaccctgcagcagatgtcacttccgaccctatcgctgctcctcattcctcag

SEQ ID NO: 263211 - DNA, 567 bp, Cannabis indica
tcaatcagaagaggagcatgagttacatcttcagatggttctgcaacggcttcgggaatacaagcttgatgccaaattcaagaaatgtcaattttggctatctcaggtgccttcttagggcacattgttagcaaagatgggatcaaggtggatcccggaaaaatagaatccgtcacggattttccaagaccgaagacagtgacagaaattataagcttctttggtttaaccggtattatcgtcggttcgtggaagggttttctaagatttcaacacccttaaccgaacttacgaagaagaatcagcggtttgtctagtcagataagtgcgaagctagttttcaagagctgaaaaagaggttgattacagctccagtactagctttgccttcggacaaagaaaaatttgtagtttattgcgatgcatccagacagggtctggggtgtgtgctgatgcaagccgatcaggttatcgcttatgcttcccgtcagttaaaggattatgaacagcgataccccactcatgatctagagttggccgcggtggtttttgcattgaagatctggc

SEQ ID NO: 263212 - DNA, 578 bp, Cannabis indica
ttaccgtagtaacttacatcagagctatttgatctaatctgatcttttaacttaacatgaaataaaacaaattgcagacataagaaactgtactttaacgtggtcacccgacctgagttctttgtttcttttatcaaaatctttgggcgtagtccgcccagaaggccattcacttaaaagcaaatgttgatttaatacttgaagtggtcacctaacctggtactttattggtagtatttccttaaatgttctccattccagtacagtggtactagaatgagttgcattttttcgtcatacttacctaatttgtatgctccggagtcgagaacttcgaccacctcatattgtccttcctagttaggtcctaatacacctgtcgtgctgtctttggtgtttaggaataccctgcttaggaccatatctctcacgatgaatttctgagctttcacttgtttgttgaaataccgagccactttttgttgatgggccatcaactttaagcttccagttgctcatctttctttgatttcatcaagtgattctggaaggagtatatgattggtaccttgattgta

SEQ ID NO: 263213 - DNA, 682 bp, Cannabis indica
gactagtagggcgggcatatgaggaccacgaggggactcatatgtctccatgagttggagtactcatggacactatcgggccgacccagtagtgcgtcgaagattgccgccagaggttcatcggtatgtttcccttggcttaccggtatgctgcttgcacgggacgtggcctagatcctccaagcgatgttgtggtgcaccttggccatgagtctcaacacaagatgacacgggtagtcattcgtgggctagcttgcatgcacgcatgggacggatgcaccatgttggaaagggacaaaggtctaacgtatgcaactcgtttggtggcttttctcaagggcctgccaacatgcgtgggggcatggcgccttgaggattggtccatggacggatgggagtccttgagcgatgagggagattgttcggacaatatcaaattgggcatgatagaagcgttggcacgttgacatggtgttggcatcttgccacacatgcaaccttggtcacgagtgacaaggtgagcgtcggtgttaggatttgtcttaccatggtgggaacctatggacagtgcgagtatcttgtctagagagcctcgatgcatggatgcactcatggaggcttgagagcatgactcggcaggagttattcgagagacggaagtgtgcacaaggcacacggtcgc

SEQ ID NO: 263214 - DNA, 1758 bp, Cannabis indica
tctataaatacatattgtcttatcataattgtatacattttgataattagatacataaaaatacttttgatatagagatttaggaagagagatttagttgatagtattgcactatcaaattgagataattgatatggatcaattaagtatgtatacctaattcttatataattataattgtgctcaagattatatacaaattttgtatcacgatttatttaattttctaattaatacaacttgaataactcgactataccatacattgttacaagttgcaattaatgcgaatttaactaagatgtagacaacaatattaaaagatttagaacactgcttaaaacaaacatgattgaagctgaaaataacacaactaaagttagataagacaagccccaatgaagaatttaaaagtaacttgtttttgaagcttttgaacaacaatcaaacaatctagctcaaagatgatgtgatcatactcaaaaagctggcagtgaacatagcttttcgaagaacaaaagcccctgccactttcgggtcaaaacgaccttccagacgccaaactactaaagcaagaacactttcacaatggtcataaacaaccataccaagactagaacaggattaagatgtatcagtattaactttgagataacctatcgagagaaataatcataagcctaattgacaaccaaattaggtgacaaagaaaagttagcatgagacttattattattataataaataatttttttattaatattattttaaagaatacaagataataggcatagcttataggccctttaggtaagcttctacttatacatatatagataaaaatataagcaaagtaaaatttttaacttgatctaaccaagaaaaactattttttaatttggataactattatataaatattttttatataaaaatatatattttgtgattaagttaagaattatataaattattctaaatttaaatataatttttcaaaaattcttatggaaaagctaattccaagaggaacttctaagttagaaaaatgattttttttttatccaaacatctttgaaaataatattttaatcctgaaagctaagaaagaacttataaaagttaagctgaacaagacctgtacaaataattgttccttttatattgtataaacaaatacattgagtttttttttttttttgggaaattacattgagttattaatctcaaggagttagcttcatgttaaaggatttattatagttattgactttccatagatattttctttactttatttttgctatcaaaatatttgcattgataacaatagagtagaccacttttttgtgtggggttgggacatcaaactaagaattgaaattacacattttatgaatttttacataatttgtgcaaaaatataattttttgaattagtttttttttttttaagacaaatgataaactttattagaatgaactttcaaccattaaaatagataaaagatcagcaggagcattactctcactgaaaatacgatctgaatacaaacaagagctacgagcaagacagtgtgcagctttgtttacagaacgtttaacaaaattaatcgtgactaaaggtaaggaagccaacaatgtacgacaagcagacacatattggccaaaaggagatggaatgatgaccgaacctcggattgcttgaacaacaaccaaagaatctgtctcaacttcaacccgaccccattggtgtct

SEQ ID NO: 263215 - DNA, 688 bp, Cannabis indica
ggaggtgtacctgaggtgatctagtaagtaaaattgagagcctgttaggctcggggtaggtggtgtgggtattaatcttccactacctcagggctgagagcaagtgaatgctatgaggcaagagactacctgagtggccaggtagtagaacttacataattggtcccaggcagcgcggtgatggaaactgacactaagctggaccgattggcaaagtttcgttttgatggagtagttgctaaggctgttagaagggttaaatctaattgaaggtggaaaagagtatatcattcagaatgtagatgtaatggcgaagcaactagaagttgtctggttttatgctcaggtggttgagctaaaccttactttgggggtgcaagaactagatcacgaaagacataatatgaaaggagattcatgaaagtaaatgtctagtgttgaaacgggtaaaaagtgttaaccctaatgatcttaaaaaaaaaaaaaagttaccaacccatcagttatgggtcctagtaggagaatttaaggtaaccaaagtttctgacatggtgggaacaaaagatttgtaaacccatccagagggttgagatgcaagggacaccagtaaaatgaaagctacatgagagcttgcattcagtgtggggtagtaggcaattggaaaagaaactatccctggttatagtag

SEQ ID NO: 263216 - DNA, 978 bp, Cannabis indica
ctattgtacaggcttaaagttaaatttgtctatgttgagggtatgacagatgacttgggggtcaatcataatcatgtcctcatgcgaccaagcaaaaatgtcttgatttctcctgaggcaagccatgagcatctcactcaagacctctgtaaagtttgttccaatcttaacaaccttggtcgggtgcattgtgttgaggggaagttctttgagttcctcagttagaccaattctcgagttgatttccataaaataggggtcaatgtcatccctgtcttgggtgcaccttcaagtggcattaggagttgtctctatcttctctgtagtttgatctccaagggtattcgttgtctctccagcttttgtaggagtggccttgctcgtccccttggtgccattgcagcagaggaggtcttgtttgtctcctctaaagccataacaacagaggaggtcttgttcgtcccctctaaagccatagcaacagaggaggtcttcttggcgagtgataacgatgcgttagaacacttgcaggtcgttctttgattaccaaggagacaaccaatacctgctgtcgttgggaacttgatggacaaatggtatactgaggagatggctcgaaggtcgttaagagcaggctttccgagaattacgttgtacggagacttcacattcaccactatgaacgtggccatgatggtggtctgctttgaggcagtgctgacagtaagtggcaatttgatcttgccacatggattaattccagctccgcaaaaaccatacttaagctactcacatagttctaggtcttctaatgtcaaacccattctgattagtgcttgcttgagtaggatgtttgaggacgctccgtcatcgatcatcatcctgaccaccatcatattagctatttctacctcaataactaaatgattgttgtgagggtagctgacatgataagagtctgattctctgaaggtgata

SEQ ID NO: 263217 - DNA, 898 bp, Cannabis indica
ggagaccaaataggagactcaatcgtcactggcgagggaaacaagcaagaagcataatttgcgtaacacatataaatagagtcaatacagtgcttaatgttacatatagaattgtgaaccttatcattacgagtttttcaaatcatatccactacaattgaaacatacgataacaactcttagacatccactcacttatcctttaggctccataagaatttgacccaatctcatattcgagccccagaattcaaaactggcatgaccccaagagaagaacctaccaaaaataaaataaagttgtagtagagaaaagatgttctattattatttcttcttctttaccacaatattacaaattttattaataactgtttcataaattatattaattttattaaatgttaataattataattatcatggtaatcataatctgtgttttaatattaaccagcaaattaattagtcatgtgttatagacatgattaataactacataatttcttctgtattttcatgtatattatataatgttatgattatttatttgaacatgtatttaccacacaatatgcataatgcatctgaaaaattgaaatgctattataatataatagtagagatcaatttcaatagagtcatctcttaacatagaaaaacaaaattaaagaaaaaaaaagtgatcattaataaaaattaatcttttgctttaagaaaactcagctcctcaaattcctttctcagtctccaatggttgcttcgatttagttctgcatgcacattcattcaaattaattatcacacacaaatataattaatacgtaataattaaagtaccactaattcaaattattaagttatgaaatatttcataagatttgcatgggtaagagat

SEQ ID NO: 263218 - DNA, 3100 bp, Cannabis indica
taactttaattaatatcactaaacacaaaagacatatggggcaaaatgacctttttgcccctcccacataaaataacataaaaggggtacttaggggtattttgggaaactctaaaattcggactattcccgacattccaaatgtctaaatattgtctcgctatactaaaaaatactaagatgtgattcaagaagccatacaccgcgttccaatgttgccggacaccaaaacatgcaaaattattaaatttctttatgcgacataaaaatgcattctgaattcaaataaatcatcgtaaataattaattcaatattaataattaactttcataataaagtactaattatctgctaatttccaaattaaagctaagcggtctttacaaagtgcttatcctctgggttcacatagactgcaataattatgaatgagtattagaattacatcaaatattaaatttcatatcctatatagaatcagcttcataatattaccgtattgtaagtccataagccatttttattttctcccgacattaaatgctaatttttgtacgctaatggaaaatttcttcttgcatagaggtcaatctcgctaacaatctgagtcccagtctcaccatataattggctccattagttgaaattgacttccttttttttcctttgctcctgtcctttatatgtttcttgcctttatatgctccccttccttttttctttggttgaggttcaggttctggttctgcgtcaacttcaactagatcatgttcaggttgtggttctccgccgatggattgaccccaaagggaaaagtcatcatcataatcatcgtcatctacaatcaatgaacctacaaataaaaataaaacaaatcatatattaaagtacaacaaatttttttgattgattttaaaaaacatacaaataaataaacacacaaaccaatatttgtggattgatagttaaatcaatccataatccttctccgtcttcacgggatgatatgatttcgtccacgatggtgtcaaccataggtggtgggttaatttcaaatgtttgatcatcaagtgttagatctccactagactcttcacaattataatcttttggttgcgttgttaggataattgactaacaagtatctagttgatcactcatataaaacacttgaatggcctgagatgccattataaatcaatctggcttatgtcctatttgattcaagtcaactaacttgaatccaaactcatcatctttgactccattatcactcctcacccaatcacaaagaaaaacaaggatttttaaactaatgtaatctaactctcaaatttctttgattacaccgtaaaatgtcatatcacattcaataagatttttatcttttgaactagctatttggaacgtcctagcaacaataattacaccgctattttgtgttattatagcatcatcacgatctttggtgttgaattgagtatttatgtagtatgatttatactttagtacactaaacgaaggaaaatgtgatatcaaaagtagtgagtgagatacattatttaaggaatctctcgtttcaaaaatcacataccataaatgaagtttattaatattaaagtaaattattaaagaaaatatagccactttttgcaaaacaacataattatactaccttttcctttaaccatgtactaaaatttcgataatgttcatcttgcacccatttctggtttctcaacttactaggataagtggtcttgatccaatcaaaatatttccttcaagatatatttataaatcattaaaatttcatttgaaagtttttaattcaatcgaatattaaaatctaagctatacttacttgatgtatggttgaacctcgttaatattttgcaaaacgagtcgatgtgcttcatctcgatcttctcgacttacgtcgcaaacaaaaacacccctaccccctttacttatttcattatcaactcgaggaaagcatgacccaatgcttgcaacattcggcaagtagtttgaacaaaattatactgtctcttcaacaatgtaagattcaacgattgaaccttcgggcctacttctatttcttacataaccttttagaattttcatttaccgttcaaatggatacatccatcttaaatatacaggtcctcacaatcttacctctctcaccagatgaacagtcgagtgaatcattatatcaaaaaaggacgggggaaaattgttccaagtagcacaagacttcaataatttttaaatggagatgttccaactttgacacatctaccactttgcaacaaagagatttgaagaataaatataatctagttatagcatatcgaactttcttaggtaaaacagaacgaatactcacgggcataatatgttgaatcaatatatgatgatcatgagacctcaacccgcttaaaattaatttgtctgtatctaccaaagtcgagacatttgaggaatacccttcaggtactttcacctgagacaaagaactacacaaagagcatttttttctttagttaggccataacacgccggtggtaaaaaagttcattgacatgctaattgttattttttttagcttcagccacacactcaagcataaaatcttttcttattttttacctcggtcaactatttttgtaagacgcgttaactaacgcaaaaagtactttttgtagtagtgtattagcaatagtggcaaacctccaccgctaacattttttttaaaaaaaataaaaaatggactattagtagcggaaggagtccgccgctaatactgccattattagtggcaaagatgacccgtcgctaataattccggcgtaaatgaacaaaattgttgcagtacataagggtgcatttattttcagcagctagagaagttatattttaattttttaatttgtagttgttatatattgtaattataagggaatttttaaatttacggtttgggttgctcaaataatttctatgtgggtttctatgtgaactttagttggaatttaggttgctccattagtttctatgtgagtttcagtgtagaattttgtaaaaatacaaaaa

SEQ ID NO: 263219 - DNA, 508 bp, Cannabis indica
actatggaaaatgtataataaaacattgatcataatttgcgcattaccatacaaactattgtcaatatgtaattaatattttttggtaatggaattgctagaaattcaaaatgtatttttttggtattagataattatgagattaaaattattcattgaatgtgttatgcttacctgtcgtaagttttcacatgtcaattatcgaaaattgtgattcgtgttaatacttttctctcgtatcaatcacaattattactaagatccatacatgaaatttagtcatcctgtcgatgattttatggtgaaggaaacacattagatgtcatgaaccacgcaatcttttctacactatcggtagtggattaactgaatttggttatgacatctgaagtagttgtccttacttgcgtaagagtcatatatttcgtttaaaagactctagcatgacatgatcgtttccgttgatagatcattgagaaagctaagaaaacgagcagattgcataatc

SEQ ID NO: 263220 - DNA, 4989 bp, Cannabis indica
tgattaattgggttgaggttggggtttttttttcaagtgttggagctcttgttttgagtattatatgaaaggggtctgatattgagtttgcttgcacaattcatttattttccagattagacgatttggactctagattatcatcaccgtctgatacaggagggagaaagtgtggatttaacattgacggaataggtggttctcgacatgctagggatacaacgcctagatcatttaaaaaaggaatgataaagggttctgaaggactaaagtccattggtcgatttgcacgtgcagtgttccccgaagatcttaaagtttcggacaaaaagatatttgatcctcaagaccaatttctcttgctgtggaatagattatttgtgatatcatgtattctggcagtatttgtggacccgttgttcttttatcttccagttataaatagttcatcacactgtcttggtattgatagaaaattagcgatcacagcgacaacattgcgaacaattgttgatgcattctttcttattcacatagctctccagttccgaacagcttatattgctccttcatctcgggtatttggacgaggtgaacttgtgatagattctgcacaaatagctaagcgatacttacggggctatttcattgtcgattttttagctgttctacccttaccacaggtttgaaaatcgtatctgtttttatgggcccattttgctcttagttcttgccttttattgttcattttatatctaaactatccgttttctgtgttttgcctcagagttttgtatgtgttcttgcatttaaattaaaaaacaatatttcttgctggttttagagcccaaagtttattgtaattttttgttcatatctgattatcaagttgaatattctaatataagaaccaagacaagtttttttctctgaaatagtttcgtatacaggcttctctgttgacattttcaggaatgaggactctattttgttgtcttgatatgacctttaacaaattcagcctataatcatttcctgaaaaaaaggaagagtgttttttccaatatttatgaggtcaagtagaatccatatcaccatcgtcatcataaaatttccccaccttttctgataatctccagtcgtacattgttgtacactgtaaagttctaaattgatcgaaaattttgaaaagagtcacaagattcaatttctgtagattttttattaaagaactactgtagcagttaagttttttagctgaaagaactacctgtacttgcatttgtacaggcatctgaaatatgttatcaataacacgaacacatatcgaattttatttgtctagtaaagaagtttctgtcatttctgcaggtatgcttgcttagttcttattacttgattttacattacttagctagctgtcatcatctatgccaagtacctatatttttgtaaaattatatttctttcagttgtactcgtattgttttcctagctaaatagtaatcggtgtatggaggagtttctgccaacctaactctgtggatctttcaactattattttcttgaaactttgcattgttgatagtcctgtaattgttcttcaaaggtggaggtcttgatttctaactccttatctgtttttactctctgcagattgtggttttgagatatcttcagcacacggacggtgcagatgttcttcccacgaaacaagcattgtttttcattgtgttactccagtatgttccaagattgcttcgagtgttaccgttaacttcggaactgaagagaacagccggtgtatttgctgaaactgcttgggcaggtgctgcatactatctgctattgtacatgctcgccagtcatgtgagtacctatttagttttgtagcatttgtttcgctctgaattttcatattattcttttatttttattgtaaaagaattgatacgaaacaagtcggtataactatgatatatatagttgttgcattcgtgtcaaccgcaatgtaaatgctaagtgcaagaatgaaagcttagcttttccatactttggggtttttcctcttagagaactctcaatggcttctttatcctatcattgaaaatacatcaccgaaacctatttccaataaggagaggagttgaaagagaaataaattataaaaaattacagtttttggagtgatcttaatttattcatgtcatttttatccgatcccatttgatggaatgttttgaacaaatcttgcagatagttggggcgttttggtattttctagctttagaacgcaatgacacatgctggcaaaggagctgcaagacgcagagtaactgtaatacaaatttcttatattgcggcaatcaaaacttgtcaggttatgaagattggttcggtggaaagaatcaaaatgataccatgaataattattgctcaacgaagggagacagtttcgatttcggaatatatgaaaatgctttatcatctggtattgtttcatccaagaagtttatctctaaatactgttactgtttatggtggggactacagaatttgaggtaatccttctctaatggtggtttgtttagcatgtttatgtggctatacttgtgttttcatagttatattagtacgaaaaaaaggaataaattacattgaacgtatcagaccttgtaaagagagagagttagtctctataaagttggacaagtgcatcatacgtactgttttacgcattatcattaattagattcgatcctttgctaaattttcgatgactttgtttttcctatgattatagtactcttggtcagggacttcagaccagcacataccctggagaggtgatattttccattgcactagctattttcgggctcatcctctttgcgcttcttattggcaacatgcaggtattttagagctaattagttattttgttgttcgggaactgtacgagtaacgacggagcctttttcattgttggtcgttttaacacttcatttagatggaaactcctgcaactcagctttgtatgtatttttcaaggttgtggccccgtgatttagccatgttcgtcctcgtcaattcttataattcccgacacaacctgaacacgaactttgccttacattatttattttcttatttcagttataataacattgtcccttttaccactttgataaatttagtaaagccaaagcaaacttcatcaacggatgctgacattctggatgtttttatcatgacagacatatctgcaatcccttaccataaggctcgaggaaatgagggtgaaaaggcgtgattcagaacaatggatgcatcatcgcttgcttcctcaagaactcagggagcgagttaggcgttacgatcaatacaaatggttggaaacgcgaggggttgatgaggaaagccttgttcaaagtctacctaaggatcttaggagagatatcaagcgacacctctgtctcgccttagtgagaagggtacgatttttcgaagtatttcgtactacttttgccttgtgctttatatcatctaacctcttattatggtaatgtgttattattatttataggttcctctctttgagaacatggatgagagacttcttgacgccatttgtgagcgattgcaaccgactttattcactgagagtacttacattgttcgggaaggagatccagttgatgaaatgcttttcattatacgaggacggctcgagagtgtaactacagatggcggtaggagtggttttttcaaccgcagtttactaaaagaaggcgatttctgtggcgaggagcttctaacctgggcactggatccaaaatccggtgttaatctcccatcttcaactcggacagtgaaagcattgacagaagtcgaggcttttgctctcatggccgaggagctaaaattcgtagctagtcagtttcgacgcctccatagtaggcaggttcaacacaccttccgtttctactcacaacaatggaggacatgggctgcttgcttcatccaagcggcttggcgtagatactccaagagaaaagccatggagctgattcgacggaaagaggaggaagaagaagcaggagccagggccattgccaatgctggcacatatagtcttggcgcgaccattttagcttcgagattcgctgcgaacgctcttcgaggagttcataggaatcgaaacgcaaagactgctcgggaattggtcaagctacagaagcctccggaacctgactttactgctgatacagactgatttataatatagtgtataatggcaactcatttacatatcattgtttaactattttgcttaaaacaaacacataagaaagaatgtaatgataaagtaatatggttttttttcttttctttttggttctttagaatttgctaccaaaaaaaattgatgtattatacttgcacacgttccttcacattcaaagggattgattttgtgaggtttgtttagatgaaacaatttcaaagatgtatggtttagcattaatgactaaatacatttttgaaatagattattagcttttccaacaatttttttatttgttatttttgcttaaattttccaacaaattttgactctttgtttacttggttgtcatcaatcttacaatctagtttgtcacgagttttattatgtgtatatttttatccggaaaattaccactttattcttatgggtattaagactaatccattaaaaataaataatatattattttagatgtcaagagttaaatagtcattttctgttttttattgtaggtatactagtcattagtgaacagagaagaaaacaaaatatgggtgataaatgattattcttatcattaggaatattattgaagaaaataaaaatcttaaaacatttctaaccatgtttcctaaatatatatttttagctaaaatagggaggatgccttaaaaagtgagttacaaccataaaaacaa

SEQ ID NO: 263221 - DNA, 1048 bp, Cannabis indica
cattaagggtaatggatttttattatttttattttattttttaatattaaatatataatgacaattttgtcctttaaaatatgtcttgcaaaataactaccatataatatagtttaactcaaaagggcaatttagtcaatttaagcattccgattacgtttcctaataaagttaacaagataaatcacaactattccatttctaaaaaaatttagtaaacaacatattacaaatattgattccgattatttttcatttattccgttacatttctccattaatttattccgattctgattactgtatagtaaacgtgccaaatatactacaaatattgatttggattatttttcatttattctgttacatttctccattaatttattttgattttacatactgtataggaaacgtgtcattagggtttatgggaatgggaatgggccaaggaatgggaatgggaatgggaatgggaatgggaataggaatgggaatgggaataggtatgggaatgggtcgagaaatgggaatgcgaatgggaatgggaattgaaatgggctaggaaatgcaaaaacgaatgggatttagccagggaatgagaatgggaataggaatgggaataggaatgcaaatgccaacgggaatgggccagggaacaacaatgggattgggaatgggcggggaataaaaattggaataggaatgggaatgggaatgggaatgggaatgggactgggaatgctattaagggcatggggattcaaaatgggaatgggaatgggtcgtgaaatggtaatgggaatgagtcggggaatgggaatgagaataggaatgggaatgggaatgggaatgggaatgggctgggaaatgggaatgagaatgggaatgggaatgggaatgagaatgggaatgggaatggctcagggaatgggaattggaatgcgaatgggaatgggaatgggaatggggcaaggaatgggaatggggatggaaatgggaatgggaatgagattgggaatgagaatgggaataggaatggtaatgggct

SEQ ID NO: 263222 - DNA, 1191 bp, Cannabis indica
aaaattagactaaaaaagttttctggatgcctaaaacaagtagagggtgacacaatacatccattttaagggggtgcattgtagaatcaccctaaaataaatatagcataatttattttctaaccaaaataaaatagggaaattctataatgcacccccttaaaagggatacaccgatacatctctatttgttttagtattaaaaaataatttttttagtcattttttctcatggtcatctaaattatagttatttaaaacatcctgccaaaattttaagaaactcggaaaagtttaatgtaatatcctgataagtctaatggtaaataatttgggtttatatttatatgatgggttaattagataataagtgggattataattctactaatttctttcggcataaaatttaaattttgctataagtgagtaaataagcgtaatttgtaaattacggagatttatatagcatctgttaatgtaatatgagctatatgtggaataaaaatattttcaggttcgatgaccctgaagactcgatatgtggatagataagcataatttgttaattacagagatttatttgaaataaatggatataatatgagttatttgtgaaataaaaatatttttaagttcggcgaccctagaggcccgattggaggtcaaaaatgtcacaagggttttagttagaaatattgatgggattattgggataagttgattttagaaataccaaaatattttggggtactcggagttggccaaataccctaaaagtagaagtttcttaatggctaagaaataataagataattattaataataaaatttttattaatatattataattactattttattattattatatattataaatattatattattattattttaatatattaaacttgtaacttttagttatcaattttgttttatttatattacatatatatatattaagttttaacatataacagtagagaagaacgacgaacgaaaccttcttcctcttccttcaacaaatttttctctttttctatctattttctttgattttcaacctgaaacctagtgatctaagctctgatagtagcgggatagcaaattcttaaagggggaaagcttaaggtatgatttaatttcgttttaaatttaaaaacaattggtttcgtataggggttt

SEQ ID NO: 263223 - DNA, 627 bp, Cannabis indica
tttttttgttttttttttatatttttaggctatattatgttattttattgtttaagatactttgatgttactttttccttttctttagtgtaagttatatgatgtttcagatactattcaatttatttacaaattatttataaacttattaaaatagttttataaaaatagatttatttttatttaattttgtaatgtttaaatataaaaaataaaaaaaaattagtaacttatgaagttgtttgatatattaaattttatttgaattttaaatattatttatttattaacaaaatgtataagaaacttaaaatatttaataaaaaagacgaagaaaaaagaaaatgtttgacaagtttatcatcattataaaaatacactgtatatattatgagtcatataaagacaaaaaaaaaagtaatcaataaaaagaaaaaaaaaatgtaaatgttgaagcctagaagagagccactaaatatattgatatatgtatcagcctattttaaaaaaaaaaattaacaattttcaaaacaaactatcggtatgcgggtgtaaaattattacataatagttgatattttaataactaataataattttttaaataatttgatatttatgtgttgg

SEQ ID NO: 263224 - DNA, 600 bp, Cannabis indica
cgcgcctccaccatggcgtcaagatttttcttcttttcccagaactttgcgatcatctcctcgggtttggaatagaaggtaagcttgatgttctggtcatttgtagaccaggccatgaagacgccatcatcaaaacgcttggcgcaccggctgcaggagacaggagaaagaagctcatctctttttgccttctttaaggcttggtctttgaagtctttgagctccttcagctccgcggccaggttagccctggattccaagtttgcccggtgagtttcctctaaggacctcaccttggcagccatttcatccaaggcttccctggcctccagaagctctcgcctagccttagcagcagcttcgccctccgccctaagctcctcttggtgcctggcctccagcctatctctccgaagggcctcctcccggatcattgcctcggcctgcgcttccctccgcttggcctcttcctcactggccttggcagggcctcccggcgctcagcatcctcctgataaagctgccttttagcagtaaggtcccgaaggatcttcttaacttcgtccatgtccccaaatcagacaggacgaagccgtgatt

SEQ ID NO: 263225 - DNA, 498 bp, Cannabis indica
tctctaaaatccaatattgcattctagagccaagcatattgacataaggcaccacttccttagagacatatccaaagaggtgatattatgctagactttgtaagcaccgaattccaattagcggatatattcaccaagcctcttagtgatgagagatttagtttcattagaagagagctaggcatgaccaacttaaatgaaatataaggtttgctagctatgaaaaatttcatatctctttacttacttatttatgcataattgttccaaatatgatattaatgagatttatatgcatagatgagaaaatttattgatacttgacctatatgaactatacttgttgaaaactcaaaattataggtaattattttggtgaactttggacttgattttaaacaagtgaacatgtgaatttttgcatatttgattttcttgtgtgtctatatgcttgaatatgtgaaattgaatgtatttagtgtgcctataactttgttt

SEQ ID NO: 263226 - DNA, 1180 bp, Cannabis indica
aagcaaagttaaccagacattcaaaaaggggatagtaacacagcctactttcatgccatgttgaagaagaggaaggaagagaacaggattgtttcttttttgactgagccaggagacttaaatgatcactttcttgatgtggttcagtatttccttgaccactttcgaggcataatggggaatgctaaacccaccttcttggagttacagcctgagatcatagttatggggcccaaactcaatctcgatcagcaggttcatcttctaaaaccctttttctctcaaagaagttagagctgcgatgtttagtatcccgaagactaaatctcctggccctgatggatttggcttagggttcttttagccagtttggcctcaggtgggaaaagatattcacatggctatagctctttttttgataccaaccaattcccgacagagctacatagcacaacactctctcttattcctaagacctagagtccttctaaggctattgagtaccgacctattacttgttgcacaaccttatacaagtgtctttcaaaactgatccgttctcggcttgctaatcttcttccttgcttagtgagtcagaaccagggtgcgtttgtcaagggccattctattgcttacaatatccttatccttcaggatatcttgaagaattacaaaaggaagaactgctccccaagatgcacaataaaaattgatataagtaaagcttatgacatggttaactgggattttcttgagaagcttttggtggcctatttcatccctgaaaagtttattaagtggatcatgaactggatatgaaacacatcgtactcgtaacttatgaatggaataattcaggggatgtttaaaggtgaacaggggcttagacaaggggatcctatctcccccatcctctttgttcttgtcatgcagtatttgtcccaaagcattcaaaaagcggccagagataagaaattcaggtaccatcctttacgcaaaaaaaatgaaactcactaatctttgttttgcggatgatttagtgatattttgtaaagggaatgagggttctctcaatgctatcagagtattgcttggccagtttagcaaaacctcgggtctatccatcaactttgctaagtctcaagtttattttggtagaatatctaactcgattcctctt

SEQ ID NO: 263227 - DNA, 630 bp, Cannabis indica
tagtaatttagtttatttttttattttttttttaagataatttgatttattttgtttatatttatgtgaaagaaatattcttttgataaatattacataatatattaaaatgtaacaaatttaaaataattaatccatccgtacttttgcggattgaattgaatttgatttgagctattatacgaattagattagatctaaaatataaagtttgcacttagtgtgaattggatgtattataagaaaaatagtgtaaatttaattgaatgaatatccatacgatactttaagattctaaatatatactataaaaagtagtgtactgtaataatatatttcaatatttaatcttatacattttaatttaataaataatatgaaaagttgaactcaattattaaatgttagatcaatacaatgttagacaaataacaatactcatggatgatatatgtcatttcaatgttttactttctatccaagttaataaataggaagtgaacctgatgcttttacggtcaaggtgaatgtcgatggtgctatttttgaggctcaccaaaaatttgggttcggttgtgttgctcgcaacaatcatggtaagctctttgaagctatttctaagagtaggtg

SEQ ID NO: 263228 - DNA, 770 bp, Cannabis indica
gttaaaatatccccctaattaaaaaattgaatgtatccttcttcttaaagttttttcgtactcttgcactcgttagttttctcttaaaatctcaccctacacatctcgaaaaataatgaaatttcacaagcacaaagccaagaccattgtgcattacttttctgttagttatattaagagaaaaagtagttttcaggcagtaataatcattctaattgaaatagtgaaaattttacatttctaatagtgctacccctttgtgaaatgtggcccaaacccatctcgaaatatttttccccaatagccataataaattcgtactactaacacgtgaatatgaagattggtttgaagtttaattttgttaaaatgactcctatttcaaaaattgaaatattcttttgtttaggataaatttcagcaagttcttcccttacatttaaagtcgttagtgttctttcaaaatctctccctacacatcttgaaaaattgtgaaatttcatagggacgaagccaagaccattgtctatcacttttctattggggtctcggtttggggttaagggttcggggttttacgatatggggtttggggttcgagatttgagggttttgggtttacgatttggggtttgtggtttggggtttggggttttatgattacggtctttggcttttggggtttttgggtttgaggtttagggtttggggttttatgactagggtctagagtttaagatcttggacctagtatttggggtttgaggttt

SEQ ID NO: 263229 - DNA, 3161 bp, Cannabis indica
ttccttataagaaaaaaaaataagaaaaaaaaagaatattagacaaattaaaaatattatttagtcaaaagtaattttatataattgcactatatattgcaaaagtactaaataaataccaaaacacatcaatcacatgaacattaaaatttttttgttaagaagattcaatttgagatttataatagagtgatttgcataagtttgaaaagttgtcagaatcaagagttgagttggttttagtgtttttgaacatgtaaatgggtgattttgaagcttgaggtgtatctcagctgttgtattctttgattgagctatatacatggtttattcataaaaaaacatgaacattaaaaaaaatccaatcttaaacgaaataataatatagaagaagatgaatgtttaaaatctacaatttcaaaatcacaatgacatgaatagatttatgccaaaataagataacattgaaaatctgagaataagattgtaaattagtttgtcttgttgagtggtgggcgcaaattccttcttcgactacgtctgtcaaccataacccaatttgcccatttgtttgtcacgctaaaattcactgaaacaataactataccggtctatccaaggtcgtgaacaatgagagccatcttgagggttcggtctgggaaatgtggagaaagatctgggtacctgagaggaagaagaagctctttagagcatctccaatgggagttgtccattggagtggtcttgctacatatgcaatgtggtccaatttttaagagtaattttatgttaagtgttgctcaatatagacaatggtcacatgataatttttttcttttttttcttttaattttttattaaaaaagttatttttaacctaaaaagtcattaattcaatgtgatgtgggaccatagtggacaacttttagagttgtcaaccattggagtattttttttaagagaagatgacaaaacttatatggatgagagagaaaataaaaaaatattttaggatgatgtttgtattttggcaactataggtgttatccgtattttccagtaagagagacgtggcatgattagaaaagaagatttgtcaacctcccggactagcagagttaactaccaaatttcctcgcagaggtatcttggtaatctcggaggagatttatggatattcgatggggagagccatccccaactcaagcagcatctctgggacgcagaagaaccatattcgtccctagctccaagaagtcttggaacacaacttaagtaagtgacttctaggtgaagacttctacagattggttgcggaccgtaatcgttatctcaaggtgaatggccacgttagctccatatggaaatcaacctacatacggttacattttttttgacacaagatcagatcttgtctcccatgccagatcatagtagtgtgcgtacgcacctctagacatgccttttgcccaacgacttgtctaaaggatattccggaaagaagaaacctttgagcaacacgtgacttttatccaaatggtattagccactacctctgtgcaccgcacgatcaagaagattcttcaatgtcggacaaccagatttccagttgtattattttacccttgcaacaggcagtagtacaaaaccctaggtgggtaaaggggatgcccttattacccacatgtaagcttataaatactctcattttctatgtgaaagaggtgaacaatttcatacttaccgaacctctgctaaaattcatactaggtttcttcttcttcaagaaaaatagcaggaatacagagctagagtttatattgtaaacacttgtaatattcaaacacttgcctgtaaggctaatacaatggactcgtggactagggattattaacgtccgaaccaagtaaaaattacctgtctattatttactattttatatctttcttaagctctgttatattggtttctaaaaatctgggtaaacattttagtgctttcattgagagtagagaaaagtttgctagttgctgcaccacctcaattatggtgaacactcgaaagaacgtaagcaagaaaactcctctagatactgttatggaggaggcagactccctcgcctccggtctccagccaagtggtgtaagaaaagaaggtacaaccagcgctaagagccgaagagaggatgttgagaacgtgttcgatggcatcgatgatgaccaaaaccctgaagacagggaagaggaggacgacgacaatggttacgtgaaggatgggtattataaagatggttacttctatgaccatgacccgaacttgttgcgagcgaccaaagaactagaggctactcagacagagttaatagaacaaaagaagatcactgagaaaataaagagaatgatggaacgcctccaaaacaagttcgaggacttggtggagtttgacgatgaccctttggtgtgagtaattgccgaagagcgtgctcacaaggaaaccgagattaaaacctcgaatcctcgcaaggataaggttaaaggaaaggtagatgagccccacaaaagtctgctccaaaacctccttgaaaagacacaaatctggtcagccaaccctcgaggacgcagaaggccaccggtgctttcgagcctggacgcccttttgatctattgtggacattgtcccacattgaataaatggtaaagtattgagccatatataagaacatgggctactccactcatcactacttgattttgagatggaaccccatgattctcaacatggtatcagagctatatcccttgcaggcaagtgatcctatttgatccgcacctatacaaataatgaccatgtccactctgatacggttcaagattagtgagaaaaaaaacagccaccatcttgagggggaatattgtggacattgtcccacattgaataaatggtaaagtattgagccatatataagaatatgggctacttcactcatgaacaattggttttgagatggaaccccattcaccttatcacaaattctaacatggtatgagagcaaaaaaaaatctctagcaactatccgactcaaaaaaaatcgatcgaagtagagctaaaaataaaagccaccaaaaatccaaaaaaaaaaaaaaattaatccaagagccaaa

SEQ ID NO: 263230 - DNA, 1720 bp, Cannabis indica
ttttagtaatggagtgagaaggtagattaggacacttgtacattttctcgtttgtttttaaaaatttttttgttaatttctttatagtggaagatgcctaccgaccgaagttggatgaaggcgcaccgacgctcagcagagtttcgaactagcgttgacgagtttgttgcggttgcaatgaaccacgtgatttgtatcggattagctcgatgcccttgcatgtggtgtttgaatgtgaattttcacacacgtgaaactataagggttcatttatttctcaatgggatctaacctttgtacaacctctggtatttccacggggagactttttctcaccccgctattgaacttcctaaaaacgacgaagaggaaatggcagatgtgttggcagacatgttaagtggggatcctgagtttgaccaatctgccagcactactgattctttcaatgaacccccatcaatgaaaacaacaagtttgatggcttgtttaaggagatggagtctgagttatatcctggttgcaaaaaattggccctcaatgtgcttgataaagtttatgcactgcaaggttttgaataggtggagtaaccactctttcgatatgttgctgtccatcttgattgatctatttccagaggggacaaaattaccgaagtcgcattatgagtcgaagatgcgattgcgcaatctaggtttgggttacgactcaatagatgtgtgcaagtataattgtgctattttctggaaggagaatgagaagaaagagttttgccctgtatgtggcgaatcacgatgggtgaaaaaaaaggtagggtaaaaaagttcctcacaaagttatgcggtacttcccactcacaccgagactaaaacgattatgttgctcaagagacactgctgaggacatgcgctggcattactcacagagactgaaagaagacagtgtgcttaggtatcttgcggatgccaaagaattgaagtggtttgaacggcttcatccatatttcgtcgttgaacctagaaatgtcaggctcggattggctactgacagttttaatccattggggaacatgagcaactcttatagcttgtggccagttatttgtgtcccatataattttccacccaggaagtgcatgaattctaaatcattgttgttggccttattaattccaggtccatcatctcttggaaaagacatggatgtgtttatgagaccgttaattgatgaactgaatagttgtgggagacgggtgtcccgagatgcgtacaacagaactgtattttgaatgcgtgcgacagtgttgtggacaataagtgatttttctgcttaggctctaatgtctggttagagcacaaaagggtatacggtgtgtcccacttgcaatgaacatactccttccattggcctaaacagtaagattggatacgttggccacaaacgttttctcgaaatgaaagatccaagaaggagaagcaaaatatacgatggtaagcctaagaagagagcacactcctgtgtaaacgggggatgatattttatctcaattggaccaaattcaatttcgtttgcttggaaaacacaaacagttcaagggtgtgaaatgaaagcgttctgctgaagagctaaattggtcaaaaaagagtatattttttgaacttgagtactggaagaatttgtccttatgacataatctcgatgtaatgcacattgagaaaaa

SEQ ID NO: 263231 - DNA, 541 bp, Cannabis indica
ttttttgttttttcccttttatttttatcaatttacaaaatagagtgttctatttgtaattatttaaactaaaagtccaaactcatattaaaaaaaatagagtgacccaaaaatgtataaacactatacttatattgataatggttgaaaataagattacacaatttaggagaataatttttaatatgtagtgcatgtgatgcatgatgtagagttcaagtctccataaaaaatatcatgtccactaaaataaaataaaaattaaaaataagtcaattatcaaatataataatcaaatgtttatgattgtttagttgacataaaaagtacctagatttaatttaaagaaacaaataggctggatttagtgagatattttataataaatagttagggattcgatatattataataattattaattttaaaatgtgtaacagttgatatatttttttacactaataacggcacttcgtaataatattgagcataactaataacctttcatattaaaactattttgaaccatctaacaaaaaat

SEQ ID NO: 263232 - DNA, 517 bp, Cannabis indica
caaaattatgaaaatcactatatgacataaaatgcatttcagaattcaaataataacagtataaataattatttaaatatctataaataattttcataattaaacatgattaaatgctaatttccaaattaaactaagcggtctttacaatgcatctcgcaagttaaggcgttacttccaagcacatccgataaaggtgttagctaatcaacccctgagataacttttgtcaaaaccagacgcttctggaagattgataaaatagtctattgaactggggcagttcgatgtagcttatcacccaaggacatccatcaagggccaagctttggcaaatttcctgatagaagggataattccagatgaaaatccactttccagcgagacacagacacttggaaattatacgtggatggaacatctaatgaaaatggctcgggtgcaggggtgatactaatctcactagaaaactttaagtttcactatgctctaagatttcaatttgacacttcaaaca

SEQ ID NO: 263233 - DNA, 644 bp, Cannabis indica
attgcaacaatcaaacaacaattatatgttttgttatgcgaatacatctatttttaattttgtggattggttgtttatagttgtttcaatttgaatttgaattcagtagggagctccgatcaacaatgtctcgtatatttattgaatgatctgcaacattcaaattacaattttagaagaaggagtgatgatacctaagttctttatgagattatagtatagaatcgttcatacctctctgtaagcaaatttgatcaatgagtaattgctcttgatgaattcacctctattgatgtttgttttttgcttctgtgagtctgattgttagagtaggtaagttctgtgttgatttttcattgaaatgttgttggattgttgtttcagcaagcttagtcgagcatcagtggctgctttgttttttttttttcagtcggacgagcatcaatggtgttaaagaaactaaaaccgtattttatgtaatttaaattacacttactgtatataagttgtattttggggtgtaaccgtatttttgttaagtttttcctcttttagtgtaattgtgaaaatttcccttaaaaatatgatgtatatttatgtatactctcattttttctgaaaacatatttatatataaaaatata

SEQ ID NO: 263234 - DNA, 505 bp, Cannabis indica
ttgaagggtagaacggtaaatttgtccctattcaatgtagatcatctatagaggatccttgactattaggattgtaacaatggataatcataacgtatttatatcgtggtacatatagagcgttctatataactgagagtgtattcaattccaaatctatagtggagcaaggcggaattaataagttgagaatttacttggtgaattctagatctacttattgaaagctcggttatataggcccatggtcccctcactagttgagataatactgcttgcagactcagttaattgattttaattaatcaattataattctaaaattagactatgtcttatttaagaattttcactaagcaagggcttaattgtgaagaaaagaggttttggggtcaatttgttaattaagagactttccatggtctaattaataaattacataaatgacaatatcatttagtagttaattattattaaataaatatttttggcatttataggattg

SEQ ID NO: 263235 - DNA, 1037 bp, Cannabis indica
ttatccatgtttgaattagtgactggggctttaggatgttaatttttttttcttatttttctatcttttcttttttcctgcaagcctattttgtgtgcccaattcctttgcaagtttcacattaatttatctggattctctactcataaagaacatcaatgtacaccaacttttttttttcattctcaaagtttagattattatgaaggcctttggagatgtccatttcaatcaagactcgagcgaattggagcctatctagattcatagttgcttgatcttgctttagcatttttccaatcatattgactatttttaccatagcccgttctccctaatatttcaattcaagttgtctcaattgaatccataaaggaactttccatacttcctctctagtgaactttgaatcggggtctcaagccttcagaatcaaaggttttctatcaaaaaattaatatcctccatttagaaatgaatctctagcctcaactatgtgaaatcgaaccagaaaaaatccaatgagtcagcaaattcactctatctatcccttgttatggccaaacacgtctaaagaaactcggtggattcgaacccagaacataacacacaacaaatgagttcaagtaatgtattttatcaactatatcttcatcacaaatcttaacacatttgcttatttcatcgaatgtttctttttcaaattgcagaacaagaaattgaggatgagacttgcctgattttgattttgcacgaccactcatagcttccaagaaagtggctctgagctctgatatttagagcaattctatttcagatgatttaggagatagacaaatcccaacttcatcatctccggttatgattgcaccacctcaatcgtcccactggaagaagaatccataattgcatcctcaaactcagaatcagaaaactgaattgcgtcaacccccaacacttgatccatcgatttagtcttcttcccacagtcaaaagaagtcaactctcttttcttatgaatcacgttcttttttttt

SEQ ID NO: 263236 - DNA, 984 bp, Cannabis indica
ctgacgagttactagataaggtctgaccgcctatcgcttggcccacaggcggaacctgtgaccggggattgggcggctgaccgttcagagtctgagaagcgtttccagctggatcttcgtctgactcgcctagcgggatgctggttgcaggttactaattagtagcttggtaggctcttcgtatcagtacggtggcttgtcttgttcggttgtcaatggctgcttgttgagccctcaacatttccacttcttaatccctccattcagcgaacagacgcctttgctcttcaaatgcaaggttcactgcagcacgaagctcttcctgatcatgatgtagagtattattatggccttgcatgagtccaagagcatcacggaggttctggatttcggtgtcgtctccaacggttgttcggacatttgttgttggcggaactccagtactgggaatacctagattggctgctgaactggtatttccagtctcttgcacaccgggcgtgattccattcaaagaagacgtcacaccatgacccacggttggtggttgcatgatgggttgttcaggatttgtggctggtggaacccttgcatttcctggattatgtagtgcgggatccactgccggtggatctacctgatcgaccacgcctctacgaatttgtaccaccatcgtgtttatgattaaatttgaagtaaagagcaaatttatgattctttctctcaatgaaagcaccaaaatattgacctcgcttttagccaacgacaatgagtcttaattgtaagtgataagtgatataatttagatatagtatgaaaagataaataaagaacacacaatttttaaagaggttcagccctgagcagttcggtaatagcctactccccttgatttgtattgacttaagaacaaagaatacggtgattcttctcttaaagctcttacaatgacatctctgagtatgctctcttagataattcttt

SEQ ID NO: 263237 - DNA, 1162 bp, Cannabis indica
atcaacatctaagactctcatatacttttcccgtcattaccactaaggttttaatccctggttcatacgccaccattgctcctttacaatcatcacatcttcatatttggttaacccctctaaaacttattttacagtcaattatatagttcgttgtttaataaacaacctactttgtaaccacttgaatacatgcccattaaattgcatcccaatttataaaattttcacattctgggtgagcataccctttcatcattacttaataagataatcttttcttgtaattttaatagtcacctcatataccagattgaccatctggtcaaatataaaagcattctccatcattaccatatcaccctgaataatttaggtaatcttctttaccttaatgataccactactctccttaacattctgttatatgttacctttgtaacgttcatacttcgcctccattgggctttctccacacggactattggcttttatatacaagtacgccattttggccactttccggatcgatgactgacatttcaggccaacctgagtattcccaacgtgctttgttctgactcgcaagttttttgggaaaacttcctgaaatgaaatcaccccaagtcaagaacacctaattgtaaagttctttcgtaataggctaccaaaaacaagatacaccttgctattataggtattctcaatccacccattcaagtcccctacaactatgtagtcccatacctacatagtctctgaatcatcatatacgaccttctcctaggcgatgtgggattgtatagctcccagtctattccttgtagatcatagggctctgagtgtcgcagtttgactcatgtcccctttgatctcatttttcccttagtagtaaatagattaaccgacataattgtctcctttaattcacttaggatttcggacaatactcataaatcgtcccacctttactaatactagatcacttctaaacaaaagattcttttctctgaatcaattaaatggatgccttcattggctactcatgtcctatattccacttaggaatactagtaaatttaactcatattgtcatttccctaatctgtctaccccgtcaaatgagttaccactaactgacatacatgcacaatccatttag

SEQ ID NO: 263238 - DNA, 653 bp, Cannabis indica
cagcaggatgaagaaattcagagcttgaggtagcagggtcctcttgtcgtgcctccttagcaagttgctcacgcctagctccagcggtgccagcagaacaacatgttctggtaaccttatggagcccttatacgaaaggtttcgcaagcaagcacctccattgtttctgggaggtcctgatgtgatgaaggcagagcaatgactcacagtaattgagcgcattctaaaatttatgggagtggttgttaatgatcgggtgttctgtgccactttccacttccaggaggacgctgtcgtctagtgggagttgataaccctcacttgggacatcacggttatgacctaggaagaattcagggagttgtttaactctaaatattataatgaagacatccgcaatggtaagcggaaagagttcaccaagttagtgcaaaccgaggggatgtcggttactgattatacgacaaagtttgatcgtctggtcaatctggctgtgggtattgtgccaacggacttcagtaagaaagaaaagtacctggctggattgaatgtgaagattagtcatgatctggtgatcactaccactgaagcaaccaattatgctgagatggttgaagaagctctgagagccgagggtgctgtgaaattctttc

SEQ ID NO: 263239 - DNA, 2187 bp, Cannabis indica
tcccaggtgagggacaccagttcccaccacactagggcgtcctcctggaactaaaaagtggcgcaagtcacccgatcattaccaaacacacccataaaattcaagattcgttcaatcacagtgagccactactcatccttcatcacatttggacgtcccagaaacactggaggtgcttgcttaaggaatctttcgtataatggctccatacggttgccagcaataggttgttctgttggcaccactggagctacagcggcctgagcttgttgtggaggcacgacaagaagaccctgctgccttaatctcaaaatttcttcatctttttggtggattcgatgttgcatcttcgcaaaccactactcccaatccggaggagcttgtggtggatttacaggacgaccaacctgagctctaccacggccacagccgcgaccacggggattatggggaatttgatttccctgaccgcctccagtctcaaccatattaccctgacttcttatatttcgcagggcatccatgtaataggacttagcctgcgaacccataagccaggcaggttagacagcgatcataaaacttataccgctcttatggattattagacaacacactcaacaaataattataatctaatatgcttcctaacatactttaataatcacatatactacaaaacaagtacaggcttacttaaccacgagtcgagctttctctgatgaagattgtacatgtcttggcaagcttcagtagacaaacctagcggctctgataccaaaattataacaccctgatgctaagggacgctacagtgctttatcaattacactgttatccttacgaatcaaagatttttctcaaaaaacgtgtcaaattaaaacttttgatgataaatattaatcattataatttacataattatttacaaacaccgggatcccgtttctaaacttttatacaaaatgaaccaaaattcaatttttaggtcgcgctgcaactacaaaatataatccccaatgtcccgagaccgaacactccaagtcacgctgccacgacatgtacaatcccatcctagacagactcactcctgttcagcttttgcctttcctttacctacacatggaagcagaactttgagtcgagagacttagtaagaaaagcatataacatatcatataataccgacttgtatctaggcgcccacactcctatttggtaggttgaacagttgagtaagaacgttccatagggtacatccactatatcacatacactacgtaccttgctgtacaagtgttggtagggtttggttcgtaccctgagtaccactgagtgatataccacaaacaccctgtactttcccgtacttgtgccggtatcactgtaatgtactcttaaacaatattcgctataccaatgcattctgtaccataagtgtacaagtgttgctagtgcaactaaaccataagcatgcatttaaacttaatacatatatatactcagatattcatattacacattatacacagttcttactttctttcaatattcaagtgtgctggccaacctgaacggaaagtctcgtgctagatggatgccctaatcacataacaaaatcaggtaaattacatgatcaaaaatcctaatctgggaaacccaaacccaccactctaggttctgttatactctctagggattactctaactcaggaaacagggaaacacccaactaaggcgatgatattcacgagaattgagaaaatagaacattttgcgaaccatgcaaaaacccaaaaaattccatttctttgtcaaaaccccaccaagtgcaacaaaatcttccagagtacctaaatagggtgtaaacaacctactgcaccgagtatttcacagaaaaaactcaatgaaactcaacatggtattaaagaccaaagctttgtgttcaaaactaaaacttgcataaattcaacacaaagtggcaaaaccagctataagaacctttaatcaaccaaaatttaacataaaaattgaaccctaagtatttctaaccctaagagccaccaaaacgcaagggttctagggtttaccttagcttgatcctccttgaattcttggttgaaagcactaacttcaacaagaaaatcccaggctcctagctggttcgaagagagagagaaggaaaga

SEQ ID NO: 263240 - DNA, 554 bp, Cannabis indica
ggggctcctacccctcctgcatcaggctttagcaggggaggtagtggttcggccatggaccagaagaggaaaacatccactgcatccggtggctcggggcagaacaagaggttcccggggaaccagagtagaggcagtcgtcagggtggtgctgagacccggttttcttacccagagtgccccagttgtaaaaggcaccatctgggtgagtgcagaggtcagggatgctttcagtgtggcatgcccggacattacaagagggattgtccccagctcagatcagaggcaccaagggctccggcgagacccactccagctagggtgttcgccattactcaggctgatgcagaagccagcccttcagttgtaacaggtcagctctcagttaataactcattttactcagtgctgtttgattctggggccacacattcttatgtggcagccagaatctttagtaaattggatagaccgtgtgatagttatgaatcagggtttagaaccctattacctggaggagagttagttatctccaaaaagtggattaggtctat

SEQ ID NO: 263241 - DNA, 518 bp, Cannabis indica
gataactaatcagattgtaaagagttttatttaaggcataaaacccaacataggagactttacgctatggagagaaagtctgaaaggaattctagtgcaccaaaaggtatccaaggttcttggagatgagaaacttttggccgagaagaaactagtggaaaaagcataaatgaatgagatggcatactccatgatcatcactaaatcatttggttagcaaaagttagcaaagtaatttaaaaatcactataacccgcataagttagtgggacgttacacataattagcaaacaccaaaacaagcctcattctcactccttcttccagctctctcttggatatgttggttagtttattttacagtacattctctgaaaacctctttagtccacacatcaagttcctttatgagacaaattttggggaatacaatgagtaagactttgataccttttattaaagggctatttacaaaaatatgggaaaataaagataagttttgatatatatggcataaa

SEQ ID NO: 263242 - DNA, 788 bp, Cannabis indica
ctcttggacggttgagcatttttgttttgccagtttttcttgaaaccctagaaaagcaaacacactctcacacttgaaaaagattagacttttgagaaaaaggagagaggaatgaatggtggtgatcgtgggtaagtgggaagatgaacatatatagcatttcaaatttaattacccaaaaatcagaaaaataaaaaaggaaagcaacttccttaccttagacacaacgtggggagagaaaaaaaagaaaccaaaaagatttttcaaaaattggtcaatgttaccttaaatggaaaaaagaaacaacatatccccacaaaatctaagaattaaaaacccaaccaaatccgaaattaccaccaaaaaggaaaccacaaaataattaattaattaaacacaagtttcctaaagcaccacaaaaaataagaccaaatctccaaaaataaaggaaacacaatagatagaatgcaattaaaacatgtttccataaatgaaaaaaataaaagaaaagaatccaaagaatcgaaaattatgccccattttttctttaatttttcgaaatatgcctcccaaattttgttccaaagaacgaacaagacaacactaaaagacacataaagcaccaatcaacacttacgaggaaatatagtgtctaagaaaataatgaaactgaacaagaaaaataaaaagaatttttttaacaaagctcaattgacagaattggtcacaatttttttttttaaaaaaaaagacagaaaagtaaaataaccttgatatttttgcaacta

SEQ ID NO: 263243 - DNA, 776 bp, Cannabis indica
aattaaaaaattagaaaagttaaaaataattttatagaacatagttttgaaaaataattttactttttttaaaaacagaaaactgattaaaaaagtgttactaaacgccacctaaattattaacaacttgtaactaaatactatgttttagtcacaagtaactttttgttgtgactaaaagtcacatttagtcacaaaaaatttatgttgttactaaaaagttgtcactaaaagtaacagttttttgaatactactacgttgattcactatttttctatctcgcttctctatttcactcttcgtttctctgttttgatattatgatctagaatcaactgctaccaacgcagcaaggaacacttccttcccaaataacaaataaaagggctattagatcactataaattatacataatttttttgaaacttatatagctaatttatatctctattactcacaaaatttttctttctaggttgttgtagtggtagttataacattttaaactaaatacatctatttatgaatatatgtgcttctcaaattccattactaaatcacatccctctatctaaaagagttgatgtggtgactagtgtgctgataattaaattaatacacacctcagaagtattatctttataaagttatgatttttgaattattatattattgaactaaccagttgtgtcccaaactatatcactattgttcctctagaattttggacataaaggcctaatttggtagttgtaacagttaaaaaaaattaaa

SEQ ID NO: 263244 - DNA, 466 bp, Cannabis indica
tttttatatttgattataattattaatttcttaaatatatttacaattaacatgaaaagttgctaaaaaataacataaacatatcttaaataagtaaccgactatatgtgttactaaatagtgtttttttttaatttttatgttttaaaatttagttacttatctcttaaaaaagtatacaagaaactaaaaaatacttttttttttataaatggtgcctcaaagagcaaccagaacactacagaaacgaaacaaggtacaaatggaaatgaacaaaaaatagggggacgaagcccagctaaaaaatagagacagtgaataaaactaacaaaccaaaaacaaagcaattcgaattaaactaacctaaactgaaattaaactcacagccatctaccaaaccaatgtgcaagaaactgccaaaattaaacaaatcaatgttcctgaacctattgtatcgatttgccca

SEQ ID NO: 263245 - DNA, 489 bp, Cannabis indica
gtcataaaaaaaattatgttgtcactaaaagtagcagtttttttagtgattatttataggggtgttcattggatcacattcaatatttttaggcttatccagatccgatccaattatatattagatgttagattttaccacccgatccgatccaattaatttcagctatccaatcgatccaacatccattaaatattggattggatcggttctatccattgaacgtatttcgtatatatttattagtttaattaaggcttacccaatatattaaattttgtattttttagattggatcagatccatctaatattttaggttcagtatgtattggattggactggatccatcaaatccaagaaaaaaagagtaaaattttaatgttaatttttaaatatacatatactataacaatacaatatataattactcatccaaactaaatgaaaatactaattagtttgattggatgttggatgtattagattt

SEQ ID NO: 263246 - DNA, 632 bp, Cannabis indica
aatatattttttagttgcgatttgtcttcttatggataggacaattaatattgagtgaaaaattaatcataagaaaaaagttgttgttgtagacaaattataattacaaccccactgacagttgaaaatcattattatcttttttattatacatcaaagtagttgttgtatcattatttcacttcattttatttccactataaatataaatatgcaagaacaaaggttcatacaaaattaagtctaaagcaaagaaactcatcagattatatatattaaggtactacttgaagaagaagatgatgatgatgatgaagaagatggtaataatagtgatgattatggttaatcttgtggggtgctcctatggtcggtgtatggtgcctgaagaatactgcaatgctatcgaagggaagaaatgctgtgaaggattgacgtgtgaaggttggttgtcggctgttgggactggttattgcaaaccttattcaaattgtcaacctcaacttggcggtgaatgctattcgggttatactaaacttcatggatgttgctatccaaatcactgtagtgctcctagagaaggtggtccggcaacgggagtatgtctcgccccaaatagtaatgatattaat

SEQ ID NO: 263247 - DNA, 615 bp, Cannabis indica
ttcgacataagccgttccatttctttgcaagtatccaccggaaggagaaacacgttcatagcataattaggtagtgcttgggcaaccgtcttcaaaagtacctcctgacccgctctagacaaaaatcggccctcccacccttggattcttttgcgcagcttatctttcaagaaccccaagatggctgttttgcttctccccataatgctaggcaaacccaggtaagtaccattttcatcagcctcaaaaatgcctaggagatcacatatggaatccctcatggtgacatgagtatttgaactataaaacactttagacttagcaaaattaattcgctggccagaagcagattcaaagacccgaagcatttccaagaccatattagcctcttcctcggaagccttacaataaatatagctattcgtccgcaaacaacatgtgagaaacaaaaggcgctccacgagcaactctacatcccctgatcaaaccatggctttcatatgcatgaattaggctagagaaaccttcggcacatataataaacaagtaaggtgataacggatcaccctgtcgaataccacgaaagggtgtaatcggccccatagactttccccc

SEQ ID NO: 263248 - DNA, 4674 bp, Cannabis indica
aaaaaaataaataataaatactatttttttaacaaatctcattacaatgttgtagaagagaataaataaaaaattataatatcacaaggcatataagatgatgccacgtggaagacaacgtagtcctcagccaatcgcagcgcataatcacatatagcatacgaagttgccacgtggacataaaaggacaattgtgtcattccacatgtcgtgcgagacccatttctgtaatttggctaattacaagggtagtttggtagttctcaaactactacaagtctcctcctcgtttactcgtaccctgcaaaaccccttcactctctttctccctctactcttccaaagacgtaactcagagctctattttggccgtcaatggcggcctcggagacctcctcggggattgttttaaggaacgctttcggaaatgtcttctctgtcttcatcctcatcttgatcggtgtcctggcattctcgatccgactcttctctgtaagctctccgatcttgaagctttcctataatttgatagatctaatggctaaatactcataaaattcaattcacttccgcttggcctccaagaaaatggaatataatgaatgaaagttgtattctgagtcatacataatctaatgtatgtatcgcatatcttgacatttggagtttttgttgaatatttgttgtcgaaatggggtatatttattaaaatttggcttgaggttctgttttatcataactgtttctgataattgtagagattgaatatttgttttattatcattttcttttggatatttgtatctcctgagcaaagctgatggtgcttgaatattcattcagtgaatctgagcttaacttttgtgaactattcgtcctaatggtcacaatgcctggtgaatgatttacaggtcattaagtatgagagtgtaattcacgagttcgatccttatttcaattacagagtcacacaggtacgatttctttacttgaaaaggagattctttctttgtattgatgttttattcctaataatttgtttctctttcaattggattcgtaccattggttttgttgttgctttgcctcaatttcactctaaaacagtgttgtacactgaaatttcaatattttcttttgtgcttctcatttgatcgatcttgttatgtcacaaatttgtgaaacaatacgaagtaagtatctgctcatatgttcgtttcagtttctgacaaagagtggaatatatgaattctggaactggtttgatgatcggacatggtaatttttctacttggtaatctttagttgaattattatgtcaagttcttttagctttgcattttaacagtcttgatttttgtcacgaattctataaggtaccctcttgggcgtgtgattggtggaactgtttacccaggattgaccttgacagcaggatctatatggtggtaggtatttaagaacatattgttagcaaatactacagtttttttctctcttttttcatttttgccagccgaaataggacgacttgcttttggacttttttctttttttggaaattgttgcctgatgaaacccaaaatataatgaaaaagaatgacaaggaagccataaacacaaatacaaaaacaaaaggaaggtgtttacatctgttccctaagtcagtggatagtggatacttatgtgtctctacctactaattgcaggtttgtgaattcattaaacattccactgactgttgagactgtttgtgtatttactgcgcccatattttctgcttttgcttcctgggcaacttttcttctcactaaggtttgtttttctttcatccttcattattttttcaaaaatatttaatagttctctgatttgtaatgttgctcaatttaacctattttataggaagttaaaggtactggtgctggactgactgctgcagctcttttggcaatggtaaattacatagcgggtatttttaactcttttgttttatttttcctttccatattttaattaagacagaagatgtgcaacatcgatcttttctcattctcttggcagttctttgaaactcttactgttttatttttaagtaaatttctctgacttaaatttgctgtcagtttattctcatatatctgcgtattgtttagttatttatccgttagtgtagtatcagtgtatctctaaataaaactcataatggttttggaatatttgcaacccaaccctactacatgtatgtatattgaggaattcatgggctttgttcgattattttgtatgagttattaggcgctgtaacatggctgttcttctttggtcatttccgaaattgtatgcttgtctgacagatggagcttctagttttgtattacctttctttactagtacaaatgtcatacgatgtctttatgtctttattgatacgagttgtatgacattctttcacaaaatatatatcgctgcattctgctataacattaatagtgtcgtttacaagatcgtaaaaatctgtgcacatgacaatgctatttgcttctcttcttattctatttccaggttccatcatacatatcacgttctgtagctggaagctatgacaatgaagctgtggccatattcgctttgattatcactttctatctttatataaaggttggtgatgactcaagtatatttggcatttctcatctttttattcttttggctgggcgtgaccattttgttgttggtggtttgtgtcttttattcatttaaaaataggcttactaaaagaacaaagtactccagttcagttagtagtttgactgcatactttcacttttataatacattactaattatatgtattctccttctgttttcctctactgtttgcagacattgaatacaggatctctcttttacgctacattaaactccatagcatacttttacatggtatgtataatgtataatgcataatgtcttgtgtgtttttgttttagtttcattttccttctttctttcttatgccccattatattcatagttgatggcatattgttaatttttttcaggtttgctcttggggaggctacacctttataattaatcttattccgatgcatgttcttctttgcattgtgactggtcgctactcatcccggttgtacattgcttatgctcctcttgtaagtatgtgcaacttacaaggcttttaaagaattgaaaatgaaattaatttgtagtgtgaaattggagaaagcatgttgtatgctatgttcttggatataatatagaaaattaacagccaaagggaagccttaattttaacaattttacacttgaaaaacttgtgtgaccaacatctaatgaaaattgaaatttgggctttaatatgcagtactttgtcataacctttcttccattaaccaagtttgtaggctatactctaattaacaagaaggctataggctaatagctttatcgaagatgtagttattttcttgcaattggttgaatggcttagatccattgaaaggttagcttgcttttataattgtaactgtggttcgaactttgtgcacgttgtgaagtataatatgagtaaattgatttaactagttaccatgaaattggaaacagattaggtaataagttctttacaagaattcattcttgtgctactccaccactttctaatttataatatcactgtaaaagtaggtatctggttggatgtttccacaataaagcctacttctacttcatttgtggaagtcatgattgcaactaatcttattttgtaattgcaggttgtcttgggaacattactagctgctttggtgcctgtagttggatttaatgcagtcatgacatcagaacattttgcatccttcttggtaagtatttgtagaatatacctgaattcttatgagctttggctaacaattttcttctacaggttttcattattatccatgtggtggctcttgtttattatattaaaggtcttctgtctgcaaaaatgttcaaagttgctgtcacactcattctgtctcttggcctgtaagtttcatttactctctctttaacatattctggatgttgcaagtgtttaaaaatgacctttatgcttctctgttcattctctatcagggtactctgttttgctgtagtagctatacttgtagctctggtagcttctagcccaacaaaaggatggagtggaagaagtcttagtctacttgatccgtaaaacttctctactcttatctctttcttgtttgccaaccttgatctttttgaatgtgttaaacatgtggtcaacagaaactacggggtacttaatgttgattaatttgatttctcagttgtcgtaacctgtgagctaggcctgattaggttatggcattggttttgtttggccttaagtaaatgatactgttgttctgctcccttcctataaaaatatatgggtttttgttgtgccttgctgagacatgatccaattgttgttttatgttctataatgattttcactttcccagatttttaattattaaaaaatatgaagaaaatcagatttcctatgcgctttcattaatgatgaatgctagtttctgtcttttgtccagtaacatacgcaagcaagtacattccattattgctagtgtagtgagcatc

SEQ ID NO: 263249 - DNA, 539 bp, Cannabis indica
caaaggcctctgcccttccatcccttggatagatagacttcttattatttgaacaactacaatgttatcccaggaccctatagtacccattttgggaacatccaatgccaaagtcactgaatgagtaagtcgccaatccctaaaacagactatttaatgcattttatctgtacctatgttgtgttcaagggatatctatatgatctgatatgattcgatcgattgtgtcgaactcttctttggtgtcaaggtaataactatgaatagtcatcaactatcaggaaatgatagaagaatgagacctattatgggatatacaatgcatcaaaaatgtatgattattatgcttcaaccagattattctattattatattaaaacaaggggtgcttttggttggttctattggtgcttgaaataattttgtcttctccatattactatacgttgtcacatcgctcgtcacgctatgggagctttaattttattaaatgaaaatctcattctaaaagaaaaaaaaatgaaattttgaatagccta

SEQ ID NO: 263250 - DNA, 618 bp, Cannabis indica
ttaatcaacatacttgtgagtagatctaagatcctggtaaaataaattccaacaataacaacttcgacgaatattttaattctattttttttgcggcgaatattttattttaatggataatgactattttgtgtagtgtactgcattgatagttaagtcttgaagctttattttaagaagtttgtaactagttttattttggtattgtatttaatttgttcaatattccatacaatatatagaatacaaacatgtaaaattaatatataatttttggcatctgtaactatattttttttcattaagatagcaactctagcagaatatgctctcattttattttctacttcttttgcggctaatattatgctttagtggacattgaatattttggtagtgagttgatggtctagtattggagtttctcaaattgtaattggttttaatattagtattatgttgatattagttttggtaataggttgatgatcaagtttttaagcttataagaaacatataaaatttatatgaattttggtgtttgtatagctgaatttttccttaaaaaaatagttttgattatacagaagaaattattttattaatttattgtcttac

SEQ ID NO: 263251 - DNA, 518 bp, Cannabis indica
attgtatgtgaatcaggatgtttttacggaagacctaccaggtctacccccagatagagagatagaatttgtgattgagctggcactgggcactgcaccaatctcgaggggccataccgtatggctcctaatgaattgaaggaattgaaggctcaactacaagatcttttagacaaggggttcatcagaccaagttactcaccttggggtgcgccagtgttgttgtcaagaagaaggacggtagtctgcggatgtgtatagactactgggagctgaacaaagagactaaaagaacaaatatcccttgccttgcatcgtagacttgtttgatcagttacaagggacgatcgtcttctcaaagatcgacttgagatttgggcaccaccaattgaaagtacgagaggaagatatcacaaagacagcatttcaaacactgtatgggcattatgaatttctagtaatgtcatttgggttaaccaatgccctaacaaccttcatgaatttaatgaatagagtat

SEQ ID NO: 263252 - DNA, 530 bp, Cannabis indica
aacaagaagacaaacctctaaaaggattaaccttcaataattcttattaggccaccatgtagatgaagatactgagtgaagacgccaaggtcaaggcaatgatagctggactaatagtaatgagtccattctcgaaaaaaacttagaagctcaaattagtatacaccattcaagagcttctagacagagcttgacagtttcattaagctcgaaagaagccggcaagaaggtcaacggagtcgctcaaccaggagcaaccaattacactacttatttatttcctgagtcttgaactcaaattgacaaggaaggtgaagaagaatcaacaactaatgcctctactgaaatagactcttcttctatttcccaagaagaactcgagtaggtagatagtaatgatgactcccctactatttctgaagaagatctcaagcaaaaagaagtgatgaagaatctcccccctattccccatgatgactcaagaaaggggcagtgacaaagattctccttctatttctaaaattatcaag

SEQ ID NO: 263253 - DNA, 2096 bp, Cannabis indica
ataacaattcaaaaatattttttagtaaatgtaacacgtacacgtcataatagtcgttctttaaaaataatatatataaacactttctgttttattgttttaaaaaaacaataataaaaaatatattaccaaaaaaaataatataaatatatatatttttgaattatgtaaataaaatgataatataaatatttttttctacaatgaatttaaattcaaattttatatagtcatatttaatataaaataaaaatttaaaaaataatgtagtgaatttaaatttaaagtataatattttaaaaataaaagaacaacacttttaattatattatatatatttttatattttgttgaaggttagaaagcatgtgcgagatggaagcggaatttcttttcagccggtgggagagaagtacttatcaaatctattcttcaagttattccaacttatatgatgagtgtctttaagctttcggtggaaacttgtgaaaaattaaaatctattgtgcgacaattttcgtggagctcatttggagatcaaaggaagattccttgggtaaaatgggaaatagtatgtcagcctaagacgatgggtgggcttggttttcgggattctcaactttttaatcaagctattttggctaagaaagtatggaggctatttatatatatccagattcattgtctgctcggattttgaaacataaatattttccaaattgctctattcttgaggccacagaaaatgtcggttcgtctcatctttggtcgaatttgatctgggattggagttgcttaagtgcagtcttcggagatctattacagatggaacacaaggtagggctgtcaagaaccaatcacgaggagaattaatgatgattgtcgagtgagtgagtttattcttccatctggtacttgggaaatggagaagcttcagtagattttcttgcaaatagatgtggatgtaattttgtctattccattagcaaggcgtgaggcagaagatggctggtgcttgcactacgatagaaatggggtttattataatgtcatgaagagtggctactcgctggcctggtcactccaagttgaggagggagtgaagattcatccaggttaactcgttggtggaatggagtatgaatctcaatctatcaccaatggtgaaagtgtttttttggcgtattgttccatttggcattaccagtagcaacttaacttatcgcctggaaagtttgggtacatatttgctgcgtggagaagaagctgaaactccgaagcatgctcaattttttgttctgatttgattccagtgtggcatcgattggacgtgcatatggaccaatgcaagaaattctcctattacgatttgacaggctatcccgaggcttttgaattaatgatgataaccctttggtggctgtggtatgataggaattcagtattatatggtaacaagcagtcaatattggatattcttccagacttagcccatttccatctggcagagtttaaggggtatgagcagcgaggccttcatttggatttgggcctagcgaacccagttgtaaaccgaactactcaatggatgcaacctcctcctgaatcctttgctctagcgacggatgctttggtgattcggaggaggggctttgtttgtttgggaggactaatacggatgcagaaggtgtggtttggctggtgtgatcatcacgtgtgttaggtgatttctctgttaatgtggcacagctgcttgtcattcgtctgggcttgactctttcgcatcaatttggtttcaatatctccattattaatagttattctactgtgacaattttctggattaataagcatttcattaatttgagttattagtctattttattagatatctattctgtattacctgtacattgttgttgttggtggttcttgcagtgtcattccgcgatcagcgaatggggtttctcatacactggcaacctctgttattagtttaggagattatgtttggacagatgctcgtctgcaatttttgagttcttctataacaacggatttttcttaataaattttacattttttttacaaaaaaa

SEQ ID NO: 263254 - DNA, 1147 bp, Cannabis indica
attgactaatctacttggtgcatgtgacttagatcgaaaacaaagagaacagctgaattggggcactcgggtgaacatcatactgggagttgctagaggccttttatatctccatcgagattcatctttaagagtgatacatagagatttaaaggctagcaacattcttttagatgagaagatgaacccaaaaaatatcagattttggattggctcgcattttccaaggaacactagatcttgcaaatacacaaaaaattgttggaaccttgtaagaatgtgaattattagaactagaacaagtaatggttatgcctaacaagcactaatgaattactgtttcgattaagtacagaggctacatgtctcctgaatatgccatgggtggtgtcttttctgaaaaatcagatgtctttagctttggtgtattgatcttggaaatagttagtggcaagaagaactctaacttccattattacgagcaacccctaagccttatttctcatgtgagttcatattataattttctcttaagaattaatgtgcactatatatattctaacttcgttatgactgaatgaattcaggcatggcaattatggaatgagagtaaagggctagactttgtggatgatgcattgggtggctcatgcattgcatcagaagcaatacgatgcttacatgttgggttgttatgcgtgcaagatcataccacagatagaccaagcatggcagatgtagttttcatgctcagtaatgaaacaaatcgtcctcaaccctttcaacctatatttactcttcagagctctccgatatcacaaaaggctagtactacatgctgtgaatgaggccacggtctcaatgattgaagggaggtagaaaaaaaaagttaagaaaataagagaattttttttctttttcttttttgaaaagaaagtgttttgaacctactttctcatgtaaaatgtttgtttccgtgtaaacacaaatcatgtcaatgcaatatataattatgtaatgttatagcattttcgcctacattatttttgaattaattgtttgaccttattaatgaaacaataaattccctaagaaaatgaaactactactcataagtactatttcttatgcagtttaagaaaaaaat

SEQ ID NO: 263255 - DNA, 799 bp, Cannabis indica
ttccgcctggaaccaatgcccagacgaccatcggagatgctactgagttacaaaatctctgcgacgctctcgggctcatgcagggtcacaacaacaccctgcatcatgatcaggacgaataacgtgctgcagtagatctcgtgttcgacgaacaaaggcgtatgttcaacgaatgcagggatagagagatggaggcattaagggctaaccatgcagagattgaaaatcgtagtcagcaagcgaccgtgctgatacggaaagcctaccaaactgtaggtcagcaacctccgaacgtcattcccctgggtgagacggacgaagatccaacgatgaatacttcccaggctgcaaatggtcagccgcccaatccctagtcacgagttccactcgtgggcctagcattaggcgagcagaccttgtttggtaattcttcaggagaagtcatacctgatggttccaaccatatcaatggtgccattccacccgtcaaccaagcgaatcaatcgctaaggcaaccaagcacttttgtattcgaaaggttggggacgacccatgacctaaggaatgatctaaacagaaggaggggagtagacgaacagaatgtcacgacaatcgtgcagcccggaacccgtactcaaattcgcgctcagaaagatgttgacgtaattcaaattgaccagaatatcgagcaagttagcccagccgttcaggcacaggtagacgagctgaaaaatatgtttcatggcatggctggacaaagaaacaatgatcttgaactggaccgagcacgaggaactcc

SEQ ID NO: 263256 - DNA, 1350 bp, Cannabis indica
acgaatagcctttcaagattgagcctaatcataacaggattaagaacatttgatctaggatcaacttggcgatattgacttgaatagattttacggtaagtttaattaaatctaagtcaaagttcaatatcggtcccttccgatgcatactccatgcatccaacctgagctttactttaaccaatgctctggaaagaacatagcacttctccaaatgcaagtaaactctgttgtagattatcatatcagtaaaaccctatgtctgataaatctaggaaactttattcacatagtcatgtttactttccaatgtgttgacggcacaataaacaggatcaagtatgtgaaaagggtttcagatgaatttatacattatgtacatataatcatgaaataaatcatgtgaaccatgcaacattaaatgttatttctgatctatattaataagtaaatctgattatattgaaatgagttttatttagggcataaacccaacactagggtagtgtttgatatatcacttagtagtactcagggtatgatacaaaccctaccaacactcctgcaatgaggtacattgtgcatgtggtacaatggttgtacccctagtatggaatgttcttactcatttgttaagccttgtaaataggtgtatgggcgcctagatagaagtcggtattatatgatatgttatatgcttttcttactgagtttgtcgactcacagttttacttccatgtgtaggtaaaggaaatgcaaaagctgaacaggagtgagcccgagctgggatgaggttgtacatatcatggcggcgtgacttggagtgttcggttttgggacatctggggttgtcattttgtagtcgctgtgcaacttggattatgtattttctatattttgtaaaagtttagaaacgggatctcgacacttctaaataattatgtaaagttgataaagtttcatatttaatataaaagttttaattttacatgatttttaagaaaattctttgattagcaaagatagcactgtaattgaaaaatcactccagcatgttttagcattagggcgttacaataaaacaatgtcaaacaatatttatctaaaccctaattaagtgtttaggtaatcatgttcttgtaagcaaaatcacacatattaacttaaaaaaagagaagaaaatagagaagaaaagaatgcttaaaaccctctaaaaaaacgcctccagtattgcacttgatctctgaaattcgtactccgtattctactatttatttccttcgaaatttcttgcccaaaactgttgaagtccacttcttttatagtcaaaaaaattataaaataaaataa

SEQ ID NO: 263257 - DNA, 587 bp, Cannabis indica
acctggagtgttcggtctcgggacatttggggttgttattttgtagtcgttgtgcgacctggatattgtattgtgaatattttgtataaaagtttagaaatgggatctcggtacttgtaaatgattatgtaaatcataaagtttaatatttaatataaaagctttaatttaacacgtttttcgaaaaaaattctttgattagcaaagatagcactgtaattgaaaaatcactgtagcgtgccttagcattaggacgttacaatttttgaccgtagatgatgatctaacggtgaaaattaacttctgaggttgatagtcattttttggagtccggcgggacccgttgttggtaactcgaagtttattttcataactccattgggtaatttaaggtcgataactttagaaatgagattgaagtgtgagagatgactttatagaacattgaaatatcttcaaaatgcaagttgaattacgtcaatcagatgaatattgagttagttatggctgttttattgaaggcagttcatgacctagcgcccaagttgacattccagcgcccaagttgacatatgacatgaacctgg

SEQ ID NO: 263258 - DNA, 637 bp, Cannabis indica
caatacatcaattggatcatatctaatcgaatgactcaatttgattagattggatcggatgaaaaaatataatatctaataaataattaaattggatcagttgagtccaaatttattagatgtgatccaatgaatatccctaattgtaacaatacgtgcacttgcataaatagaattttcataacaagtttttggcaccgttgctggggactatatttaggtaatattaaaacaactatttttttttttctaatttggttctcttttcacgttttgctaattttattcttgacaatctttatctctcttttcagctacaagtattttatgcgacgttaatgaccaactgcaagagtgcctctaggtcctaaaatagagaaaacttggtgacaaaagagaataaataagaggttggaaagaggttgtctcagaggggttgaattataagaatttatgactcataatgaaaataatgtaggtgtagtggatcagggtaatggctagaatccacttaacagaagcctaagagactatgtgctacccacaatgacgagagttcagtcttgcactactacaaaccaagcctttagaggcacttttttaagcataatattaaagaaccgacgtcatagggttg

SEQ ID NO: 263259 - DNA, 719 bp, Cannabis indica
gcacgctaaacatgtaaatacatatgcatactgttatactaatcttaccttgattccaaattcaggtgtgccggtcaacttgagtggaacgaactgctcggcgaattataggctcctaaaccataataatcacaacaccgataagtgacatgctaaatcacttcccggggacttaaactagaaactaaaagtttccctatcgacaaaaaatatggcaataccctaaacaacacaaaaataggaagaactagggttcccaatttttccccaaccggcagactggttctacaaccggaattctggttctgggaggaacccagaacaccaatcggaattctggttcctacaggccatactgaagcggaattccggttcagtgcaggaaatcttaaaaattatttctcaatcaaaacaaccgcaaacttcatgcaaccttccagacctgctctaaataccccaaataacataacccaagtaataaaaccaagcttcatacacagaaatgcatttcaccattaaaggttcaagattgagttcaaaaactcaaaacttgactaacccctcgaacagccactacttcatgcacaaatcaacctattccaacataatttaactccataaaacacaattaaactataacaacaactacagcaacaaaattcatcattttaccttgaaaaccaaagttttgggttcaaaactccatactaagttaaaat

SEQ ID NO: 263260 - DNA, 2957 bp, Cannabis indica
cgctaaatcttctgcatgtgagtgtttttttcttcaattcgttgcaattttctctcaattgctgctgttttttagtgaggctgttttcttttaatttgttctgttcataagtatttaattcttgcattaatatcagctgcagcttcagatgattaccatagttttccagaaaaccatagcagtttacagagttttggtgagttatagtgcctacaacttttgatcctaatttcttttcggaattatttcaattttgggtattcaatgattgcctctgtttctctgtttctcctctcagtggatttgataatgtggaaagagatatcaagatcagttttcatctttggaattggaacattcactataatctcatctgcctatactagagatctcaacatcaggttagtaagttctgaaccctgatagaataagaacatggtgaatttggtcatgtgtaaaagtaatctaataaacagctatcaattcaaaccatattgtaagaagtaaaatcatagacaacaattgtagtgcttattgagaaggtattttaattatttagttgagtaattaaaccatttattttaattttttaaaatgtaatgagaataactaaatcaaccaacaaaaaaaattccaatattttccttgttcaagtatatctcttctatctaatgtgttacatgagcaaaatagcatgtcctctgtttctaaatagtgctcagaactaaaattttgttctggattcctcttctacagctttatttctgttctttcctatatgggccttgtttatcttgctgccactttcctcttcagagctattatctgcaggtaattccttattacatcaaccattaacaaattgatcaaattaactttctcatgttgaccaaacaaatgacatttgcttttcttttaacatcaccaggggagttatagacacagattataaaagatatgtactgggtgaagaagaagcaatttggttactaaaacttgtgcttccttacttaaatgagttcctgctaaagctcaaggctttattttctggtgatccttctactacaatgaaggtaaagaccttttcgttttcttcttattttattattatatttgaatctacttttgtcttaagaagactactaaaaggatgggaatctgtgacaatggcagctggcagtattgctctttgttttggccaggtgtggcagctccataaccatttggacaatggcgaaattgggtaagtttgataagaataaagtcagtttttcatacacaatcatttctagtgtgaacaaaagtttgtgttttaacttgaccaactgaacatttaaaagtttcaaccttgtttttaccctttttccagttttgttgttctctttcctcattttgcttaactcccacaattggataattcaactacagtaccccagaagttactgtttttcaacaagtgaatttcttttcctgacagccaagtagagatccatagaaaaatgccaaaatctcccaagaaaacttttaatgttttactgacactttgttgtgctaaatgtcacaggattttttggggtgttcaccgtaccaaaagtctgttctctgtattctgctcagataagtgcatacggtaaaattcctggaaagttaataatatctttgtttgttagttcaaagcatgaaatgactcatatgattcacacgtacaccttgtggacacgtggtccaccattattggactttcagtttctgcataatcaccagtgggtgtgacatgaaattaacattaggtaaaaaatttgttttttattttttctaaaagaaaaacataggggaagatttgatgggtcccaaaatgagttggctaacaaaatttgattatatgctatcataaattttttgtgagcttatcaaaattcttaatgatgttgtttttattttttaatttaatgatgttcaattatgatatttgagtggtcacatgacataggtctttaactctacatgttcctttgtcaataaagtggacttttaattgagatcctttactgttgattaacggctataagatctagattgatctaacggctaaaaggttacattagagtttgttggagagcccttgtggtgttatgtcacactctgtctgtggttctttaattcttgactcttaatgctgaaagtgtagtcctccacctcaacattgagaaaataaatgttttttcttttggtcgattgaaaataaatgttagaaattattgctattgtttgtattgattttttttatgagaaactaggtgtgtgagtaccactttttttgttttgaaaaaaaaaaattggcccctttcaaaaataaagacataattaaaataaaattggcttttacttttagtaattctaagctatttgtctgcatatagtttaatttaaaagggattctatgttaaaaaaaaaacattattaaaattttatccaaatgactagtatgcatcctgtataaactttaacactttagactaacattattttggaaaacaatactaaaaaataaaaatctaatttaaataatatattaagaaaggattgtagtgaatataaataagatgggtgaagttgttgttgtggtcccttccttctataaacataaaggaaaaaagtgtgtttttctttgaaaaaaagaaaagaaaatggttgcccattaaagtctctatatctagattcatcctcatccatcttcttcttttttgccctcattgaattggcattttgcttcaaccaactaagtccaagactagctaagtttgtacaaatatagttaacatttaaactcattatccacactagagttttttttttccaaaatttgaccttaaagaatttttaaattaattgcttatattgactacacatatttttattattgcagtctaaattttgggttcgtacgcttttcgcga

SEQ ID NO: 263261 - DNA, 631 bp, Cannabis indica
agccaaaaatagagataagtggccggccatatgcttagtagcaactctaatcttcttaaatccttgttgattgaagctttaaagacattcgtgtacatattaaaccgagttccaacaaaggcagtctcaaaaactccttttgaattatggaaaggttggaaaccaagttcaaatcatgtacgcatttggggatgttcatctgaagtcagaatatataatccacaagagaagaaattcgacccaaggaccataagcgaattctttatagggtacgctaaaaagtctaaaggttacaagttttattgtccatctcatagcacaagaattgtggaatcaaagaatgcaaaatttcgtaagaatgccttgattagtggaagtgatcaattaagggacttaggtcctgagaaatatccttcagaaccttccacttcaaaagcaagattgataatggtcaacactcctgtagttcaaacgaatgttgaacaaccattaccaatcattaaagatccacaagttggtaatgataatctagtatatcaagatgttcaagagttgcttgcaactattgaacaacctgctgaaccagctgctgctccccaaaagcctgttggtgaagtcttaagaagatcta

SEQ ID NO: 263262 - DNA, 953 bp, Cannabis indica
cgagtgctaattaataaagttctcaagctctcttcttcttcttgcttctcctctacttggccaaaataatagtttgagagaaaaagaggtgggaagggacgacctttgaacacagttgattttcataatggcaagaggtttagtgggtttgatctgctgtttcgcccttacggtggtcatctttacagatagtacagcggcggtgacacatacggttggagacactacaggttggaccattccttcaagccctgaattttacaccgacacttgggaggataataaaaccttcaggattggagacaaattaggtgagtaattgtttctttatttcttcttttactttaattattatagttttaattacttccttcataaatatatatagtaacttctgttgcttacaatatgttcatcgtgattgactttgtaagctgattcactaattgtgtcagttaattgttactagagagagatcaaggtatattgttatgtagttcttttttttttcttaattcaatctgattgattatttgtaaggaaaaagaagaattaatcacaaaatatatagtgaattactaaactaccctgaagaaaatatgcagtaattacttctttactaaataagaatactatgcggttcagtatttaagtctaacatccaaatttacatattttaattaataataatattaaaaattacttagcagtgcatcactacagtttgtttttatttaataatttaagaaaactagataataaattgcaaagtgatagcgatacatctgagtggtagtgctcaaaatccatacatagtaaaaggttttctagtaagtactaaaataatgaaaaagaaatcaattattgatctccattatttagtgagtgtgttttgtttataattaatcacacgataaagtagctattagctttctttcttttcttcatttttt

SEQ ID NO: 263263 - DNA, 802 bp, Cannabis indica
aaattttgagaaattcggaataatttacaatatagaaaataatgtttaaacagtctattttacacgcgtataaaataaaatagtaacttgtgaaacacactgtttgaacgcagtttttggcgtgttaaactttttcgatttttttaaaattttgcaagatgtcttaaacaactataatttacatgatcataaaaaaaaaagactaaaaaattatttcagatactaaaacggatagagatgtatcggtgcatcctttttaagagggtacattatagaattttctaatattttgctagcaagaaaaacttttaatgatattaaatttagggtgattctacaatgcaccccccttaaaaaggatgtactgatacactctttacttatttcggtatctagaataattttttagttctaattttttttattagtcatgtatgttatagctttttaagtatattctacaacctttctctctctcacttagccgtcgcccgtaaaggtcaatttgtatgctatagccaaaacacgggtgcctacgatagttacacatactgcactccaaactcccaccaccacctttctctctctcacttagccgtcgcccgtaaaggtcatatttctgacctttttttctcttctcaagttagctatatatatatatatgtaaatatggcattactaaatttgtttcctttagcttgtccgtaacactctgcgcaatggtttagttttctttacttgattagggtaatttggaaaatgagacttgggtggattgcttcttccagttgtacaactccaa

SEQ ID NO: 263264 - DNA, 3122 bp, Cannabis indica
aacaaactttcctgtttcaaaaaaggaagaaactatacacatcagtacaataaacaagacagagatacagatcagcatcatgttcatattgttactccatcaataaaaagaagatttcttataaattacaatgaataacacaaactaggcttaaatctttgcctttgtcactgtgattccatcaattgattactttgaatcctttttcttagcttttttcacttcagaagctgcagcttttgctaaagaagtaggtttaagaacacttttcggattgaatgcctttcggattttaaacgcagtccatgcggtccctatggcatgtccagctgcatcaagtccttcgttcgttgcctttgctgcttctttcccatacctgtgacgaaaaataaaataaaaaatcgaacatgtcaccatttctattgccttctaacttaattgttttccacatctctatatcactttgtgaaatcattttgtatactgcttttcgggatcaagatgaattgtacctttgggagaccagttcggtcgttacagttgaagatgttgacatgacattttttccggatacttccacagcatcacagaccttgcctgtaacattaaattgaaactatgaatatggcacataggaaaactgcaaagctgtccagtagatataatattcctcttctaacaaaattgtcaaatggttataatatcctcttacaacatctagggaaaattacagctagtatccaactcaacaacattgacaagaattaggctacagctgatatcagaactctcgaaactccaattggaaatcgtcatagcgaaaattggaatttgatttgttctaaatgagattgcaaaaaacatttgactaatcctaactgaagttctcaatcggttgggagagtgagtatgtgtgtgtgtgtggtacgggggtacaaggtcctccataaacttataaaaaagaagaagaaaaaatcagataaactcgtttcaaatcatatgaatggagatggtaaattttaattgtcaaatacaggaggaaaattgataggtagacgatagacatgagagacatcaacataaaatgcagaatcatacttcatatcaatatacactatacaaagaaccaaaaagagagtgaaaacaatatcttatttcatgagtagaaaatcagataatctacttactaaagccatcgagtgacgcaagtacaatttccccaggaagaaggccaaaaaatttcttccccacttttgagtttgccactgaacttgtaaagaatccagatactttcacaactcctgagaggactccatttgctactttctctgtcattttggtcatcctcttgaccctgcacggacagtcaagctgaggaattgtaatgtattcaaacacaaacagaaaaaaaaaacaacttaaaatgaaacagtgagaaacgaaagtatagtgtctgtgacaactatatttcattatatttgaagttcaatctaatgaaactaaattaaaactgaagctacaataagctagcatggaaagcaaatacaaagtccaatttttggaaaatgtagcatgggaaaaggagggatcaagctccaaactttaatccgactgctgaaactagcatactctgtttttataaagggaaaaatataatctgaaaagtgtaccatttattgtaccaatcctagaaaatgactatagaatgtacgaaatcttcaatacaaaaacagtaagaaaatccatttttcttcagaacgctttgtaaaaatagtcttttatgaacaattttattagtaaaataactttctaaaaatttattagcaaaataactatgtttggtcacacgagcaaccaaaaattacactgcgcaactataaaacgactataaatggtcaaatttacactatgggaccatattgtgtaaattcaatacggttattttgcaaatttttcattttctaagttgttagtttgacaaatattcctttttttccatttaaattatagaaatagtcagaacaagacacacaaacccaatataacaaaggataaaaatactcaaaacccaaatgaaaagataatatctttaccttttaatcctcctcatagtttcaggactaatctccctctcttcactcaaactcattcttcttttcataacttcattcccccatttaagcctatccacagtcacatcaccacaccacaaaattcccctgatcacttgccccgaaccagcagcaatgagcttcgccgcggtgccactatactcttccacattgggagcaagagtagtccagtaggccgcactcctatcctccatcaactcctttgtcttcttctccttcttcaaatctgccggagaagtctcccttgccacagacccatccaaaacctcagacccctttttcgccttttccgaaacctcttgcaccgaaaaacaactgtaatgctgcaaaattccatccaattccttaaccaaccgctcttgccccttggaagcaatagtcaacccgtaattcaacaaactctcagcatcatttgcagcatttttccccttctcatcccccgaatcagaatccgattccgaaccgtgttccctcggtgtcctcagcgaaaagaagtaatgcgaatcatcaagcttcacggctgcttcatccttagccaatggccattggatctcatccccgattcgtgcgagaacagcaacgatgttaccaccctgacgaagctgaaccactgtgaaatcgcctgaagcaagctcaacactgtaatgcttatcgatgagatgaagaatggcgccgggaattctgacgatggtttcttcaatggcttcgggtggagccgtgggtgcggagggttcggggaatagattctcgactaggtctgtcatgtcaatggtggggtagagatttgaagaagaagaagaagggttagggtttggagtaattggatgatcgggattggaggtgttgacctccggatacattgaatttcttctgtatgtagggttttgggaagccattgttgttgattttgaaattgatttgaggaattggggattagggttagggtttgttaattgatgaaagattgaagctttgggtatgggagttagt

SEQ ID NO: 263265 - DNA, 954 bp, Cannabis indica
gcttctttctctcttcttgagagctctactaacgtttcatactttgtcccaacacctaaacatcttcctgagaaatctaaggtctctcttactgtcatctctccatagtgaagatcatgttgactaatgtaagcacatgttctttgaggaataaactcattcatttcatggccacagtatgtcacttttccagatacctgattataattatatatataataacaactcagctcattagcaattcttattattaactaacattattataacaaaaattaaaaatgatcaaaacatacccttaaatctagatcaagctttcctgctagagccaacaataaggtcgttttccctgaccctggagggcctagaagtagtgtcatcctagaaaattacaaagttcccaattgataaaattaaagaaattatgacttttttcatattgttatgatatttgttattattatttaattaacatacgtttacacccatacctggaaggcttgactcttccactgacatttttaagtatctgaatttttgtcttctttgatggaaatagcccaatagatccaagaatactctgcactctcaaaaaaaaaaaaaaaaaaaaaaaaagcacacacataatcaaacaaatcatataaattagtaaatctaattaaaaataataataaaaataaaaaaacttctaaaattaatacataaataaaatatttatatacctctagagtgtttaaggtagaataaagcagagtaggaagtgctctgcttccaatatacacatctccttcaatattcaaattctcataccgaatttcgattttgggaatctcaattccagctctataaaaattaaaaaaaaaaaattataaataatattaaaaaaaaattgaaaagtaaaataaacaaaaaatgtaattagtactttcaaaaaaattaaaaaaaaaaaactgt

SEQ ID NO: 263266 - DNA, 705 bp, Cannabis indica
ttctttatttcattgaaaaaaaataaacaaagaacaagaaagtcaaggttgtgtttggaagaaatgagataatgaaggttctgaacatcttataatccttaaggtataattttttttgctttatttttctatatctcttttttaaaactgaataatgatttctgtatataatatattagacataaacacctacttgtcttttcacctcgcaaagctcttcaaagaacgatgagtattcctgtatttaataatactgactgctctaacttcatcagtttatagttctaaattattcgagcactaaattattccaaaacaagttgattgtatcatgaattttaattacttttgtcattctataaaaagttaaaagttttaattgtatttttagacatccttataacaacacaaaattggtaaggtattacattttattctttttatttgtgtctaaaagtgataagaaagatagatacatctttcctataatagtttcagttaaataatgttcatcttatgttatcatacacatgttttcaaattgagattaacttactatatgagtatgaatatattaagattagcttattatttattattaataacaatgtgcatatcataggtttatatacacatggtatacttatcaagtcgttcaaataataattcaaaattagttaccaaattctaaaatgaaaaattcac

SEQ ID NO: 263267 - DNA, 1215 bp, Cannabis indica
aagccttttttttttcttttctagtggtttgtttgttcacttgaatatcctatgctatttatagagtttttcttatcactcgtcatgtgcatggattaattatcttcacctaacattataatgtcagcatccatctacgtacaatataggtgatcatcaattaaaatttatttacatatatacgaataaatataaattaatttgtggaataagatcatacgtacatgtcaagaaattatctcttaattaatttatatatatttaaataatttataaggattgtaatcttttgaaactacacataaggaatataataatgtttccccattgtcataactaattacagttaaataaaatccctactacaattctaccctttagtgacactctttagtgactcgcacttttgtgcgggtcactaaaggattaagggtaagtattagtgacacacacaaaaagactttaaaaatttagtgttagtaacgtataatgtgtgtcactaaaaatatgaggtgtcactaaagattaactctcatagttttattattttttaaaaaaaaattattgacctatagtgacgcgccaatcgggattaggtaaatatatccgacacactttgcatgtcactatatcataaccataatttttttaaaaaaaaaacctgactgtaattaatgtatttttatttataaatatattatattttctaaaaattaatataacaaatcattattaatatacttacttttcttaggtaaagtaacagtagactattttaaaaaaattacacatgtcagatttatattttattacatatacggctctctctctcttaaatcaataacattaaaaacctttttctctctctttatcatacagagtctctccattctctttctcattaaaattgttaaagggtttaataaaaaaccctagctgattacattttcccctctcgccacctcatcttcttgccctctctttgatcatgtttttcatcactcggcagctgttgctactcaggcagccgaagactaaggcctggctccaaaatcctaaggtgcagctcgcttctctctatctcgatgtctctccgctcatcgtcaccacctcgctcatgaccacaccacctccgatgatgcagatctgagatcctcaaccaaagtcccaaggtcgagatctgagataatctatctctattcgcgtctctctctc

SEQ ID NO: 263268 - DNA, 1466 bp, Cannabis indica
aagagacagtcccatgtccataacatgtcgatgctttctctcaagtcgaccttgctgctgatgtgtgtgaggacagggataacgaaagttaattccaagagggtcaatgattgatttcaatggcctatattctccactccaatcttattggatttcttttatttttgtattaaaatgtagtgcaacataagttttaaactgataaaaactagtagtaactttaggtttgactttcataggatatagccaagtaaatttaggaaagtcatttaactttggggctgagcattatttaggaaacttcttaagatccttggagaagcatgtccaagtctatgatgcaaaatttgagcttcagcgaatgctccaagactgttgttctttatgcaactaaaagtagtaggggtggtaatcaatcttttattgtaagtagtagaaggtgggaccctagcttgtgagagatccagatgataaagaccatgtttaagagagccctgaagaagtacttggcccgtagtcttgtccttggtaataagaatcaaaaagtaaaattatgttattatctgtgggtctgtgtgttcgacgacaagaattttgggttgggattcaacgccagagagtgagagaaagtattttttttttttaatgtaaggctatttttgcgaggaaaagatattgaaaatatagatattctagttctaaattgttaaacccacataatccaacacaaaaaatataataataaatgttaattaattaaaattatatataaatataaaattaattataatttttacctcttaaactttgacatgtactaaatcatgcttcttgaactattaagttttaaggatgttaaaaaatccctgaactattgtgattgttagatttaagtactattgtctaattttagtaaataaagtctaacatgggtgaaagttcaggggacataatttagtatatgttaaaatttgagggacatgatttggtaaatatcaaagtctgaggagcatgctttagtacatgaacaatcatcaaattagcaaaattgaatgaaattggacaaaatacttaaatttaattatctcaatagttttgaagaaatttttaacggttaaaaaaatctagagacataatttggcacatacatattaaaatttataggacaaaaattttaattagcctaaatataatcgaatcaaatttagttgactataagttgtattatatatttgcacatcccattcaataaccaaccaatccaaattagattttaaaaaattacattccatcaaataatttttggtggtgcgtagtaattgaattgattatattttgcatggacatctatatacttgtcctatttttttttttttttaaaaaaaaaactatatatttattctatttgtcattttcatcttcttcttctttgttgtgtcgttttcaatggttaataatagtcaatt

SEQ ID NO: 263269 - DNA, 1364 bp, Cannabis indica
actacaagcaaatccagaattgcttccttggaactgaaatctggggccaacctaggtgtttcagttcgcccctcgacgagcttaataagagcaacaacacaagcaaccacaacaaaaacaacagcaagagccacagaagcagctgaagtcaagctcaaagaatcaatcttttctaatgcacaaaggggtgccagaaaaatcaccaaaacagccaaaatcaaaagctttctatggtcccaaaacccatgtcccaaccactgatcaaacacaccaatatgatgaagagaaccggacatgacatcccccataatgatcaaataaacaaccaatacaccaccattattcactattatacaaatctcagacaagattctggcgggtcttcctaatgcacattgaacaacctcaccatacgaagaggccttacacaaaactgaaaacctcaccaataattcgacgctaatttcagaaacaatccccatcaaaattattaacacaaaacccaaaactaaaccgagtaccttcatggttgcaggcagtgccatgatcccagccccaataatcgacgttgtgagattaaacaccgcccctgacacaccagacccatgattattagaattagagccatcaacaatgaggggataattatcgacatgaaactcaaaactatgatcttcatcaaaaccatccacatcttcgaataattcatgcccattactgttcttggatcctagataactttcctcatctaaaggtagcaacttgccatgagatctagggtttcttgggtcgtcgtcgttcttcgtctgtaattcgacgtatgaatttttgggaattactgagtaatccattgaaggtgaatcaaatccaaaacgaaatagagtggtgaaggtgaaacgcagatctgataaaagccaatgcgcatcagaaatgttgtaacttgaaaatcaaaacttttgaattggggataactctggtatcctaatcccctagatctcaggtcaatgaaatattaatgaagcaaggtttaagcaacggaatggtttaactttacgattcctttccgaaccaattttcgttcggaggagaaagaatgagttaatcttgtaataaggttttctaattggtgtatttttcaaaacaaaaaaaacacgttatcaatgctgacgtggatttaattagaagataagaactttgaattcattgttttttagtataatgatattattatttatttatttaacaatatcatgttttttgttttgaatttgtcaaaaaaaaatcttgggtttgttgatagtaatactgaatgttttcggcttaaatagcattagatttttggtgttaagttttttttttttttt

SEQ ID NO: 263270 - DNA, 563 bp, Cannabis indica
caggattaagatcttttgatcttagatcagccagtaatattgactcagaaagatacaacagtaagtattataatatatttaccaagatcaatatcggtcccttccaatgtatactccatacatccgatactggtaaactttgccaatgccctggaaagaacataacacttatccaaggtgtaagcatacctattgctgattatcatgctagtctaaatccaatgaattgacacattaggcaattaaacttttgagcatataatcatgattatattccactgtgctgaaaacaatgtaatcatgaacaaatacatatgttctagacctaatagaattgcagaacacacagcgaggaccaacaagaacatgtttagtacgtagttgggaacgagttagtaagccccccgagatagctttccaagcaatacgaagaaccttgggggggacattaactttccatagggccctccacagttcagactccaattgaaggctccattcacctttcaattcttggagatggcgataagaactcttaatcgagtagaagcctgtcggctctt

SEQ ID NO: 263271 - DNA, 1055 bp, Cannabis indica
ttgaaccaatatgcagtaaagatactaataaaattgctaacactttttcaagatattcaaaatatttgtgtcaagatgaacacaagctaacatagatgtgattttatcgagaatgtctagcaatcaaataccaatattagagctgaggaaaacgcaagcattctttgcagtgtcttagacaagatggtaaccgtgcagatatattggctgaaacggtggaatttgtttaagccaaaattttgatatcattgttcgactagactaatggttactcctttaacagtcgcctcaaactgatctccctaggaagaatggtcaattgctagctaaaactgataaccgatctagtaactaacaaatgatttgtaaagaattacaatttcctttgtcacaattttttaaatgggcaagtgaattcaagagaacaattgtttgagccaatattttgttcatcagccacaatattggctaaaaagcacgatattggatgatgacgaagagacttgttgggtaatattttaccgttttcaggctttcgatcaacactatccatatagttaaccaattggggtcagactttaaccaagataaatataaatgatggagtacatgtcttaaatcatttttagcttgaaacaaaatttctccaaacatgaacgggctttccatagtggtaggattaatttcttgtgtctccttagacaatgattgagaatgagaagggtaatgtgccttcgatgtgctagcttcttttggtattctacctcgagcaaatagacattagactctttcattcttgagctctttttctaattgcagctcaaagtctctggagtttaaagaccctagccaagagagataacatttctctaccataatttaatggctatttgacttcatcataggccatctgtaatgacagtcaaaataacgacttgactttctttatcaaccttgtttgcaatgtaagccagctccgtaatagtttcatagaacctcttgttagaaaaaaaattacaataataaaaatgataacacctgaggcgtgcaaacaa

SEQ ID NO: 263272 - DNA, 4775 bp, Cannabis indica
ataaaattaataaaaactattttatgttataaaaattaaaatttatatataaataatctaaataatttatatatatatatataattatttttttccctaatggtttttatttatttttttaaaagctctatgaatagtttgttcactaaattatgataacataaacacatgcatgagaactattcattggcggcattttttgtgatgatgtggcttgacaaataggcatgtgatgtggctattgaaatgagaaatgctaaaaggcaccagtggtgccaagcaccatcctacgtgtcaatatcgctattggtctaatttagtatcgggtcccatatagtttaatataataacttttaaagagtatcgctagctaatcgcaaagcgacacctcttaagagtgctaggctcctattgaaatagatttggaaattaaatgatgtggtttcatttctggcacctcaaacctcaaaatgcatctgggactaaaatttaagaattatcgtaattgtacaatgaaatgcaacaagaatgatgcacacaataagtattaaatattaaatattgtatatatacttttaatgtttgggtatagtgatattcctagttggtacagtgataaatataattataaaaaaatggtattttgccaaggaccgctacatatattgatcctttttagatttacatgttgtcttaactaacctcctaataataatacaattttgtgatcttggggaaaactaaattgaatagtgtaatttggtcaaaacatttattattagtaatagtatcacctactattacttggttactcgcatgaaagctacttgtaacttgaaaaaagaaaatgttataaaattagcaaagcaaaggtaccataaaaacaatatccagaagaaatatatttttatttttattttcttaaataaaagtactatactataaatacaactcaagacatcatccacatagaaacgcagattgtccatttaagattctatactgttttgaaaactaacccaatttgaccatgttcggataacaagtcgaaaagccaaacatgaacaggaatccacctctgtcaagtatgagagtacatgaaaacaagagcaaatatctatacaagtcagaatttagaagctttagtattgaatcatacccatttagcatcaatcggtgatgatatttagtctaccgcgaataatgagcatcactgaccaaaagcaccaattctgacatcaacagctgcagttgcttcatgaagaaccaatatcttcaatcttttgggcagtgttcaagcaagattagtagttgtatctgtttaacactaaaattcacaacaatagctgttggcatgatatcttaaagatgattaatagaagcttagaaaaagaatggttttttttcactccccatgactagaaaggactctaacccattaaagtatcttactcccaattcacaattcacaatcaaaagatgtttttttttcctatgcgggcatgtgcatagactctaatggattacaaaaatttccccccacccaaaaaataggaaaaaagtcaaagatatttctcaacaaaaattgatcaaaacatgtgataggtgccggccttaaattagaacacttaaaaatctctaattatttggaaaattaattaactctgaaaaaatgtacttacaacatacaagcctaaccttcataggcttgattcacattatgattaggaaaagttcttttaactttccagcaaaagatacttgatcggtggcaattcaagacaagatgtggttagaataacttgcaaagttggtaacaagattttcttgttaaccaatttgcctttctcatctaaggggactgacaacccaacctgttatcggactctgccttcgagctctaatcctcctatgagaaccaccttgcaaacgatcgagaactgcatatgttattgaatctggggttaagccttgctgcttaagctttgcatacaaatcaacagcttcagcagttctcccacatctctcaagacagtcaagcaagatattgtatgtaacaatgttagggtagcatccctcagcaagcatctcatcaaacaaccgacaagccatttcaactctatctgtcttgccaaaacactcaatgagagtgctataagtaacaacatcaggactcaatcctttctcttgcatctccttgaatctcatgtgtgcttcatctaggtgaccatttttccctaggtaattaatcaaggaattgtaagttataatatcaggtttgtaatcactgttttcaagttcttcaaataattcaacagcctcttcaactttcccagctctaccaaagctggcaattaaaatattataggtaaatatgtctggggaagggccatcctgtttcatcttctcataaagttcttgaagatgggatatttgcttcgactttccaagagctgagaatacagtattatacatgatagtatcggtggttattcccttttcatgaattttactcagaaggtccacagcttctgtcgttttacctctagtacataaactctccaacatcgaaaaacacgcttctctgtcacccttatcatgaaaactccacatgttacaaaacaaacggtgagcttcgctagcatggcctagtttactcaatgtctttacaagaaatgcatatataggcttagtcatgtacttcattgataattccactatctcatctaatctaccaagcttaccttcaacaacaagagcattcaaaatcacactgtaagtaaattcattaggcctacaatccctttccaccatttttgaaaagacaaagatggccttttcaaccatcttgttactagcaagggcctcaatcatagtattgtaagtgattaaattaggagtaaatccctttgttatcatttcctgaaaaagtgccagtgataaatcaactttacccgattttccattcattctgatcataattgtgtatgtaaagtcatcaggctcacaatgcttctttctcatgtcttcaaatatcgtatacgcgtgatcaatctgccaaaaagctgcacatcagataatcaggatccaacaaccaaaccactttgaaatacaaaagaaaaaaattgagtgtcaatgttcaaaactttgcagcccaagctccacgtaaccgagttaacaaatcctgtttactaatttgtctaatagccattaaaatatccaatcttgattcattctagttctttcccaaaatcatttctccatgaaatttcaaattttccatatagtaacttaaatcattgatgaatttgtcaaaacaacaatgcgagaaagttaaattcagatagtcaaaacaacaatgaatttgtaaacatgatcgatcgattggaaagaacttaccttatcattcttagccaaggcatgtattagcatattgtaagcaaaaatatccagtttatagccacggcgtcgcatttcccgataggtttcgaaagctttggttgaatcatgagaccgcaaataggcttgaagcaagcatttgtaagtgtaaggattcattctcagctcccatttcttgaccagacctaaacacatttccaaatcctggctatggccgaaaaggccaataagaatattaacagtggagattgttccacgcacaccggaacgctccatatcaacgagtacggaacgaacttggtcaaggcggtcggcggcggcggacttggagagaatgaggaggagtcgggtgtaagtaaacgagtcatgacggaaattgggagaaagcgaggagcaaaactggaagaatcgaagggccaggagaggagtgtttagggatttcaggatttcggaggcttctgatgaagttagggtaacggagagggaggcgaggtaatccgataggtcggagaaagggtcagaagaggattggcggcggaggaggattcttgtggccgtgcagatgagttcgtggcggggcagtggataccctcgggcgtcgagaggaagaggagagggcggtttaacctcggcggagagtgatcggccggtgggggaagtcgaggttactttggctgtgtatttggtggcgtaatggcggcgcgtggagaagattagtttcgggaagtagctgcaatggcggtgcttcatgttcatggcgtcagtaggtgacttcttctttcagtggttcagttcaggctccttctgtatgtgactgagatgaacaaaacgacaattagagccaaatatggttttcaaaacgacaacaatggaaaacgacaagagttagagaataacgacaatactatgatacctattttgtatgatttcccatttaatatgtaaatatgtattttttcttttttttttgaaaaaatgcgtttataaataaaattgaagttagacctcatagtcattacaaaatatattaacaggtatagtagatatctctaccatacccgtaatattattggcaaacgcccatttggctacattatgggccgggtagttatagtttctagcaatacaagaaaaattacaattagtcataaaagtagagaggagcttgcaatgacgcacatagttctcaatccacaaatagagtcatcccttttaagttcttgataacaatctctgaatcactctacaccaaaatatgtgtagtacatcactactacaaattgactagttaggatttattttttgtatcaagtcgtgctcgtgctgtgttgataagctcagcccatatttacatcactactacaaattaattagtt

SEQ ID NO: 263273 - DNA, 538 bp, Cannabis indica
gtaatggcctaatacttagtcgcactacagttatttttcaattaaccctttgctaatcaaacgatttaattgaaaatcgtgtcaaattaaaactttaaatttaattgctaaactttataaacttttaaacaataaatacataagctgggatcccatagttaaacttttacaaaatattcaaagtgtaaatagtcttgttgtaatgtcctaatctataaggatgccacatgtgtgattttataaattattttaatactaatggattaattaattactaaaaaccgtgataatattaaaaatttgagcaaagtaaaacactaaaaatagacattataacggcataaaaagcgtgttccgggaattcctgttataaaaatttttggtaaagaaatatatacgacaatcattgaaacacaaagtcaaagtacacattagacacaaccagcccaaacaactcctggcaactcgacgcgcaggccggtgaggtcaatatgtacattgctggagaatactttcacttcatggttgatcaagcttt

SEQ ID NO: 263274 - DNA, 822 bp, Cannabis indica
ccactgcggagaaacattttatgatcccatggttcgcacagaaatcagtgaaggattgactgtcaaattatttgtcattgtctgagactatcttgtatggtagcccgaacagacatattacatttttcaccacaaagtcttgcactttctttgatgtgatggttgccaatggctcaacttctgtccatttagtgaaataatcaactgcgaccactgcgtactgtactccacccttgtctttgggtaattgtccgatcaggtcgattccccaaatggaaaaaggccaaggactttgcatctgagttagttcgttgggcgatgcacaaggtatctttgtaaatttctggcacttatcacattgaaatcttcgatcatcgtcggccagaaataaccttgccttagaattttcttggataaaatatgcacagctacgtggttgtcgcagaatccatcatgtacttcagacaaaagtcatgcagcttcttcttgtgtaacacaccaaagtaatggcatggagaaccctcttctatacatgactcaatctacgatgatgtaccgtatatcctttcttctcatttttcgagcttcgttcctattatctgggagttcccagtattgaggtaggctgctattggatctagtttagagatgtgttaatcatttcaatctccttcgtgccagtgatactaggtttttcaaagaattagatggggattagattagccttatcatttatgttgctactcgcgagtcaggctagtgcatcaacagtcgtgttttcttctcttagaatttgcttgagaacgtagcttttgaattgtg

SEQ ID NO: 263275 - DNA, 1425 bp, Cannabis indica
cagtgatgagtaagtaaatgttagtcatttccatttaagataatgaacaaacaatttcatttccttacactaagtgactaatataaatctttgtatataccagtccggatcaagatcatgatttgtccccatatgctcaaaaaatcagctacattctcaatcgcctcactatgcagctgaatgtgatcagaagacaactgggtaaacgggttcttctataatcactcacaagtgacaacttttcttcatttcctttgttttgtttttcctactgggtgtgtgtttgtatatgcagctgaggcagagtcttaccagagaccttgcaaccgtatctgtgctcgacctgttattaatgtattactatctttatttattttagtatgtcttatgagatatatatatatatatatataattaagttcctctagaaatataaacttttgttgcttgactaattgagtgatgctatttgggaatttctatgcttctattctgtgtgctagtttattttagtttattttcctctcgttagtcgcagcactcgtatattagtcataatgaaatattaataacaatatataacagaacaacatgaacacattatatgagtaaaataatatgatttacatgtttaaagagacagatgtgtctttaatttttatggtagataatcacatataggaattatgttgggtagttgagataatttttatatttctaggtcacacttaattaggagtgttcatctaatttaattccgattttatatttgaatcaaattcaacctcataatagcctaaattcaattcaatttaatcggcaaaaaaaaaaaaaaagaatgctgattaggtaaattattttagattaattattttttaatattaaattatttaatatttattaaaaaatattattatttgttttcaaaaattgacagtaataatttctaatgtgaccttgggaactaaataaaacgtgatatattagtcttcttttctaatagatccgtttactaaataaaaattatatttttaattaaaataaaaaaacactaaaataaattaattaaaaacaaacaatttaaataattaaaaaatcaaaaaactttaataattttttattttctcttttcttttattaaaattaaaaataaaaaatttaatccaaaaaataaaactaaaacatataattcccaaacccacccacccaattttctttctctttcttcttcttcttcaaaccatagctttcttcttctgctacaatttctctttaacaagaaccacgtacatctatggtctgcattctaaccaccataaaattctcccaaccacatatgaaccttccaagctacatcaatttccctcgctcaaaatgactacgcatgcttcgctctcgatctccaaggccacaacagttccgaca

SEQ ID NO: 263276 - DNA, 749 bp, Cannabis indica
ggaccctgtgttttgcaaaagttatagattggactctgtattttgttaaatgataaaatggaccttgcattttataaaatagtaaaaataggaccctgagcttaatttttaactacttttttttaatacaactaacttgaagacaatgcttaatacgaacagatacaaaaaatgtaaacagttttatcatagcacttttagatcagattataattaaactttattttgacaaaaaatcaattcagggtcctctttgtactattttagaaaatacaaggtccattttgtcatttaacaaaacacagggtccaattggtaacttttgtgaaacagagagtccaaaatagtatttacccaataaaatatgtaattttattgtttatttgtttaatgtatatatatttaaaattaagagtatatttcacatgtataataaattgtaaattattttcttgaacgtatgatataattaattaatataaagtatataaatttttaaatattccatctcagtgcctcctaaagaagtaaatttcatcaaaaacaaaaacatactcacaatatttggaattatactattataaaggagttttttattgttgttttaattatttgattcttgaaaaaattattaacaaattaattttacaattaattattgtgacaaaaatacatataaaaattgcgggccaagtctttggcctgtgcaaattgcctttaatcggggtcattgcccaaatccgacccga

SEQ ID NO: 263277 - DNA, 1003 bp, Cannabis indica
aaaaccacgtttctgcccagactttctggccgcggccatggaaatctcgccgcggcgagatggaattttctacttcgatctcttttagtaaaatagtcataactttctcatactaactccaaatgagctgatttaagatgtgttggaaagatacaaaagagatctaaaacttttatgttttgactttttccaaaatatgatcagaacatagtcgaatttaggcttgaagtttcagctttattttctttcacaattttctctattttctagaccactgttttccgaaatttgtccaatttatacatcccaagtgtagaaacctgaaaccaaagaaaacaagcgtaattctactccaaaaataataataaagaagaaaaacaactataaaatgtgacccaaaacttaggctaaaaatagcctaacagatacatgatttaccatcagctgtgagtcactacagatcttaatgtgttcggcctttatttccttggctagcttaagtccaacgattagggcctcgtgttcggcttcgttgttagaggccttgaatccaaatttgactgcagcgtgtaggtgttgccccaaggcgtgactagggcaattcctgcagcagatagttgatgtgttgccgacccatccacatgtagtttccaggtcggtttgtgttcaatattacttggctgtggtactggctcgggattgctttctggtatgctttcttttttgcctgtgcattctaccacaaagtcggccaaggcttggcctttaatagctgttcgaggttggaagttgatttaatactgacccaattctaccgcccacttgagtaaccgtccagaggcatctgacttttgcagtatttgtcgtagtggttggtctgtatacacccgaacaggatgagcttgaaaataaggcctcagcttccttcttgctagaataaggccgtaggcgagcttttctatcaacggatatcggccttcggcctctacaagtcttttactga

SEQ ID NO: 263278 - DNA, 2451 bp, Cannabis indica
attaattatacaagtaataattttttagtagatacgtataagatgataaatagcattaatctttctttctcctatacatatatggtcaatgtagagaccaatacaagaattggtagcaatagtataatgacaactattaggagctacacactgcttagtacaaggtatgggaatgtctgtgtatgaattcagcagggaaaaagcagcaacatactactctgagtctgaatcaatagggcaaccatcatctacattggcaagagggtcatatgttggggaactaggatctgtgcatcccattacgagattaagctcgcaacgatcgccctgcaatcacttatcgatgtgaaaaataagcttgaattgggacaaacgaaacactgagatgttgaaaatggttaagagtttttcttaccccttcagctgacaaattcccaatcatagcacatcttgttactactatgcttgtatctggaaaaattgctctgtcacatgcaccatctttgctcaactcctctgctagaccctgtcattattacatagatcatcacccagttaaacccctcttcatcaattttgtttagacacaaaatcaagcaactgaaattccaataaaggtttggtttgccaactttgcaactgcactatctactgcatcattacctcattaagaattcaattggcttgtttcgccaagatttgggaacctgaaattggagtctgtaaggaccatcccaatcaacaccatttgtgaatgaaagatcagttttagctgcaaaagatggaaatcagtagttggaatcaaatatcgatatctaaggtaagcaaactcgtagaagagtagtcaccgtgcttgggaacacatattggatactgtataatggggaatcagcttttcctctagtttcttttgctattgccctgggctccccaccacacataataggctggttaaaacctcctcgcaaattaaccacttcagtaatgacaaaataagtcatctaagtgaaatgataaattttcaagtctctctaaccattaaaagcaaccccgaattcttcgttttggaacaagcttagttgcatctggattgtagaagacctttactctttctccctattaaggttttttaaatgttatcaataagagaatgatgactgaaaaaaacacaaacatattctatgaaattaacagaagatggcatacagcagtgggaggaagaccattcattgtcttccaatatacaggggcctttccaagttcaaacatagcccagcttggcaaagtgaacctacaaatgaatgaaacatatgaactataagaacatgtggtccatttctcaatgtcaaaacattgataggaagagagaattggaagtcatactctttgatttcctccacaggacttgtggatacagctgcagcagcatacactttcccattaaatctgagaactttcttcttattcttctcagggagacttcttgaaagtgaagaccccataaaattgctagctgcatcaatacatgtcctatgctaagctaagttcatgaaatcaactaaaccaattttatgtaattattgcaaaaaccagttcataattgaatctaataaatattgtccaatgaatagtaaccatgttcatctctttaacttacacaaatcaaaaacattaatgaaattatcctcaattgaacaaaaaacataaaaatctggttagagggtattaaggacggtggcatacctagtgggttgggaacaagttgactgcctttattggcagataaagaactcacagccgaaaaggtttgggcggaagttgcaaagattgacccatttgatgtagccatgaatcccactcactccagaaatgaaaggcaaagaacagtgaagaaagaaatatggggttaaacctctccactaggtactactagattgttgtactgtttaaagagaagaaagagcaacaaccatagaaacaaaaagttaggcagaaatatctatcttatattcattaccaaacaaaaatcttaaatggggtattatcttaaggataaaaaatatctggatcatattactgaacccaactataaaaggacaagaaaccaactttctcatctaaaatctcaaccttttgtctctttcttatatattatcattacccaattcaacaatttatggaatttaaacaaacctacaaaaccacaaacttttttcccgcaatttgacaagaaacccaccaagaattcaagcttatattatatatcacacacaatattatacaatttcacacaaaaagaattaaacaaaccttctccattcatggctatgcttacttctccaccgtccaaacccaaagcccatatttttatttctctccaccgtttaagtcaccagcctagagggaatgtagcccctttcaggccattaccaaaggtttcaacttttccaa

SEQ ID NO: 263279 - DNA, 483 bp, Cannabis indica
ttatttttattctctaatgaacatccttacatgccatcaagagtaaaactattcattctctcatgaacatccttacatgtcacttgagaacatatcatacaacacaaaaaaaataaaataaataacaaacaacaaggactagggtagaagatcttatccaaacttctctttagttattcacattctttcattgaatgttattatgcacataaaacttatttctatttaatttcctccataaagctacaattccattattatagtttcgtggttattactctagcaatgataaataatagtcccatgacgcaggaaaataatcacttgtgccctttaaaaattccttccatataataattttaatgatccattaagccaccaatcagtattggataaaactcatttaggagtatgctcattgcacttgtctttatttcccaaatagcatagacattaattcctattgtagtctcttgattcttt

SEQ ID NO: 263280 - DNA, 565 bp, Cannabis indica
ttatgagttttcttgcaggactctcatctgaatttgactctagaaagtcacaggttatttatgcatctgatgtctcttcttcacgagatgtttttactcgtgttttttgtgcataaactacctctgcagctcctcttaatagtgcattggtgagtcgtaacaattctacaccatagaaaaactctactccaattggatacaaaagaagtaattcacaaggacttatgatctaacaccaaattctgggaggattatgtgcaactattgtaagtgttcaggccacaccaagtttgagtgtaggaatttacagttcaaaaattagaactaatgatgcatcgatccttatttctgttgatgaattcaccaagttcttgaggtatcaggaaatacttaagtcttcatctccttctatcactacaattgttgattcagataactctaatgcatgccttctttccacatccttaaaatgggtcattgattttgatgtcatagatcatatgtaggtaattccagtctcttttctaattttcagtctcatggtcccacttctactattacctta

SEQ ID NO: 263281 - DNA, 553 bp, Cannabis indica
accactcggtttaccgcccctcaagatactattaactgtttccctgtgaaagagatcattgagcttccggacgtcccaattcccgtcaggtaaaagcagatccgacacaaattcagatgttccctggtagttgtgcttgggcttagggtaaaaatccctgccatgtatgacccatgggtcattccaaatgcttaggtttggctctttatactataatgaactttgtgttcttatactattgctagtttggctctaaattgtgtatttaaaaggtttaggttgaacgctttcagaaacttacaatgtagttaaatttatgtgtaatttgatatgtttgtataattgtgtaattaaaaataactgagggatttcaattactcttcaattctcataatctctcgtgagaatgagaattgaatgtaattatactttgtaattactaaaaaaattattttaaatataaattattaaaaaatattatttcgtgtgtaattactattagagttcccgctcaaatgattttaagatcattattagaagtttttacaagttt

SEQ ID NO: 263282 - DNA, 759 bp, Cannabis indica
acggtgcgcgtagctaacacgcgtgagagtaggagagtgagacgttgacggtgttgacgggctcttgtcgcttttgcttagatcggacggtgagaaagagcggacgtcctagtcagattgtcagatgtaatctttagctaagcagtctttgatattcgtgtcccctttaatactttaaaaaataaataaataaaagaaaaaaaaggcgcgacttttgcctgattttcgtgtgtagtaatacagcatctccaataatattatctgataataaaagtttacacgtcataaaaaaaatataatattttattttaattttgttccatattatttttagcactcttactcctaaaatacttcaataaagcactttttaaaaatactatacttataatttcacacattattatttaatatatatcctaatttttagctacaataattttttagcttaaatattttattatacactaatgaatagcattgatgctaaaatgacatcctcttatctctaatagtataatattttttaacattttaccacataatatgtccacctcaccaaatatactctaaaattttaccattaaagatgctcttagaggtctaattttttgacatggtacaatttgagaggcacgaacacgattagaagcaaaaaaaaagtttaagtaagatacggtacaatgttataaattcttgtgatacggcacgaaaaatatggacacagtacgataagccttgcctaaaaccgagtctgag

SEQ ID NO: 263283 - DNA, 1187 bp, Cannabis indica
ttattaaaattaggaaagggagaacttgattaaataaaggagaaaagaaagggagaacttcccccaccaatttcgtaaggaatgtcattcggataatggattctaattatttttattttttttaatgttaaacatataatgacaattttatcctttaaaatatgtcttacaaaataactatcatataatatagtttcactcaaaagggcaatttagtcaatttaagtattccgattacgtttcctaataaagtaaacaagatcaatcacaactattctatttccaaaaaaatttagtaaacaacatattacaaatattgattctaattattttttatttattccgttacatttctccattaatttattgtgattctgaatactgtatagtaaacatgccataaacgccaaaactcgcaaaccccaaaccataattcccattcccattcccattcccagacccattcccattcccattccaattcccattcctatttccattcccattcccattcccattcccattcccattccccgacccatgcccattcccattccaattcccattctcattcccattccccaccccattccaataacgattccccaaacgccaaaactgcaaaaccccaaaccccaaaccctaaaacccaaatcccaaaccccaacccccaaaccctaaaaccctcaaatcataaaacctcaaaaccacaaaccccaaaaccccaaacatcaaaccttaaaccccaaaccctaatcccaaaaacagcaaacctaaaaaccccaaacacaaaaacaccaaaccccaaatcctaaaccccaaaccccaaaaccccaaaacctaaaacccaaacaccaaaccccagacttaaaacctcaaaccccaaatactaggtccaagatcctaaactctaggccctagtcataaaaccccaaaccctaaacctcaaactaaaaaaccccaaaagccaaagaccctaaacaccaaaccccaaacccctaatcccaaaccgcaaaccccaaacctcaaaccccgaaaccctaaatcccaaacctaaaaacccaaaaccccaaactcaaaaccccaaacccaaacaccaaacacctaatgtaaaacaacttaaccccaaaccccaaatcgtaaacccaaaaccttcaaacctcgaaccacaaaccccaaatcctaaa

SEQ ID NO: 263284 - DNA, 661 bp, Cannabis indica
atttggtcatgttcgattgttgttgtatctgatccattatttgtccaattttgcattagatatatataaatattttttttcttaatagcactcgtaccatctcagaaatgaggcaaatgttagtgtaacctcatagcgggctagcaacacgcatatggtttgtgaggtcaggtggaacaactgtcaatgcatgctgcatgtacattaatatttttggcttaggttcgatgttagtgacgatttcttggcctaatatccattaattaaaaaaatatttttcactagatgattcttttgggtgagaatagcaagccaccaaatcagtcaatgttcggccaacaacaggctaaaattgaaaaacaagttcatctctcatgtgccccaaaaccttgaaattaatctccatctttggttttagctcttcgacatatgtccccgattgaatgttgacacctgatatggtaattggtaagcaaccattaacacaaatggttccattttctgttcgatgtcagcagagaaaagttaggcgcacactaacctcctcttagtttctctaccacggtttgacaaggataaacatgtcacaaggtttgtcaaatagcctaatgtaacgcccttacttacgtaaaataagatgccataaataaactggcgttaa

SEQ ID NO: 263285 - DNA, 692 bp, Cannabis indica
ccttggagaaaccgaggatgacccaacggtgaatgcttcccagacaaacaacggtcagccgtccaatccccggtcacgagttccactcgtgggccaagaggtaggcggacagaccttgtccgagaattcatcaggaggagtcatgctcgatggatccacgcaaaataatggagccattccacctgccaaccaagcgaaccaatcgctaaggcagccaggttcttctgtgtttgaaaggttgggaacaccccgtgacctaagggacgacctaaacagaagaaggggaacagacgagcagaatactacaactaatgtgcagtccggagcccatactcaaatccccgctcagaaagacgctgacgtagcccaacccgaccagaatgccaatgaagtcagcccagccgtacaggcccagcttgacgaactgaagaatatgtttcatggcatggccgggcagcgtaacaatgatcttgagttagaccgtgcacgcggaactcccttctcgccagaaatcaacctcctgccactacctcacaagttcaagatgccaacgtggaagatgtacactgggagagaagatcctctatctcatctcaagtatttcgagatgcaaatggatctacaaggggtgcgaggagacgtatgttgcagaatcttccccgcaactcaatcagaggccgcacaacaatggt

SEQ ID NO: 263286 - DNA, 640 bp, Cannabis indica
atattttattatttttcttagaaattaaatagaattaatatttaagttgattttattcaagatacttaattatttgtttatatttcatgaaatttaattaaataagcaaaatatattaaagttgaaaattaatttattaattagtttttgaacaaacaaaaataaaaaaattttgttaaatattaaattaaaattaataattaagttgattttattcaagatacttaattatttctattttaatgaatttaattaaatagaaaattatatttatgttggaaatttttcaatttcaaatcaacttaaattagaataattttcagaatatattttattttattttaataatcattttcatacgtaattttgaattgcatttatttattttaaatgcagatatttcgaaattttttaattttgaaaattaattttaattaattttatatcaacttaaatcaagtaatttttattatttatttaaaataagtagactaaaatctattatattttaattagaaaattagtaattagtttatgaattatctagatagatatattctagataaactttttagtatgtttctagatatgtttaattaaattagaaatttaatatttaagttgattttattctagacac

SEQ ID NO: 263287 - DNA, 1415 bp, Cannabis indica
agtagcatcaatataatagcataatattattatttcaaataaacaacctacttaaggctaggcataggcctaccccatagtcccggcctatatataattaatgtattacattttatttcaaatgcaaattatgtaagaagagaatgaaaggcatgtaatattgaccataaaagtgtaaagtgaaataaatgaaccatacaatgataaattaaaagaaatatacccttaccaaaaataaataaatatatacaatgtaaataaaatatcacaccaaaaataattctcaaataaaaaaaaaaaaaaatccaaagatctagatgatcaattcgaataatatgaagcaagctaatgtccataacaaaaattaacttaaatagaaaaacatgaaatttctttattgtataaacctatcaataaaatatattttttcttgaaattaattagtatttatggagtattgccacggtgatcagaacactgaacaaagacaccaacaagctcgatggaaggatcgtcatagcattcgccttgttcggcggagatacctggttatcagatgcctgcggcgaagaccccggcggagaacctgtagaccctgctggggttggagtcggctgctcaggcgacagagacgtcgaagatggtggtgaagccgacggagcttcagccggggaattttcaaacggcacaggagagcctgtcggagctattgatgattctggtgacggggttggcgcagaggaagttggtgaaggcggagatgacgacggagctccagccggagaattggcagacggcaccggtgagccaatcggagctgttgatgatgctggtgaaggcggagatgacgacggagctccagccggagatattgtcggagacccagttggagattcgtaaaccggcgacggcgaggtcgatggagtttgcgcgggagaacctgccggagcttgtgaggttggtgaaggagatgaaggagctaacgtaggtgcctgcgacttgggtgacggagcggaagccggagttgtcgacggagaaggaaaaggggaaatgggtgttgacccggctgggggagtagccaccggaggacgagctccaggtccgggagagggaagaggagtagtacctggttttggtcttatggccaaaacgacgacgattagtttctgtccctcgttacagtttttcccactaatgaaataaaaaggaccagaacgatcaaactcgatttcagaatccccatcttcatatttcttaagaggattttgggtgttacacttttcgtaatcgtctttgttcaccaccaaaacagagtccgatcctttcttgtacttaaaatcttcactcaaagaagaaaaaaaaagaatgatcagagagaaaataaaaagaacgtaaaaacaaaattaaaaaaaaaa

SEQ ID NO: 263288 - DNA, 583 bp, Cannabis indica
aatcacaaacatatatataaaaatatgttataataaatatttatttttatatatttttaattattttttataatatatttgataaaataattttttaatatttttaaattatatttttatcacttgtaaaagaaaaaaagtgtagtttataagaaatttaattgatattgtttgttaataataaatataaatataaaatattttttaaaataaaataaaaaattgaaaaatttaaatattatttattttaaatattttttgtaatatataataaataattaaataaatttttagtaaaaaataatttattatagtcttttaatcaaaagatctttttttaaaagttgagttgtactagctttagttttttcataaattttttaataagctgttttttaactgattatcaaacacctttttgtcacagttttttaaaaagccttttaattttttcaaaaactgtgccaaacggaccctactatgactgacaatgctaacaataatcaatgtcgttcttcaaagtcggcgaacgttaaggattttgtccaaagtcgcttttatgatactagggaactaagccgcg

SEQ ID NO: 263289 - DNA, 939 bp, Cannabis indica
ctatatcgtggtacatatagagcgttctatataactgagagtgtattcaattctaagttctgtagtggttcaatgagtaattaatcagttgagaatttactttgtaaattctaggtctactattgaaacctcaattatataggcctatggtcccctcactagttgagataatactgttgcacactcagtcaattgattttaattaatcaattataattctaaaattagactatgtcttatttaaaaaatttcactaagcaagggcttaattgtgaagtgttgacctcgcttttagcaacgacaatgagtctaaataataagcgacaagtagtttatagcgattgaaatataataaagcaatataaagacacaggaattttatagaggcttagccccgagcagttcggtaatagcctaatcctcgttatttgtattaactcaagaacaagaagaaaggttcattttttatagctctgacaacaatatctctgaatattgattcttagataacatctctcacgtaaaatctttcgaccctttgctcagtgaacatgcatcactatttatagggctatgagcttggagaggaagtatttcccttctcgttacaataaatataagcagaaagattgcataataaatacattatacactgatcgtgggatttagacagctttccatatctctgcaatctgatccccaagttatagggatttctttgatgattcacgatgcaaaagctgaattcactaagtgttggtcgctctgtgcagattgctgattgctttgcctcgagcatgcatatgaggtatcctgttcagactatatcttgcgagcacatactcagagtcgattccacgtgtcaccatcatgtgatgccacgtcagagtgaaaaaattgggataacatttgcccccaagtctgtacgggacttccaaa

SEQ ID NO: 263290 - DNA, 706 bp, Cannabis indica
actagatgttttctttccaattctttgcttctttccggtcttccattccctttttcattttcacatccctctttttctttgtctttctccttgtctttgtcattgtccttgctcttgtccttgtcttgcatttgacgatcatttctattcttccttacattcccttttcttctttctttcactggtttatccccatcagaactagacaaattagtttctgtagtggtcaagtcatcaatcatctcctctacatttttctcattatccatattgctagaaataatttatactgcacaaagcaagacaatgacaatagttaggttaagacttttatgccttttttaattctaaactactaactactgctaaaactactaactctaatattaaactacttgtatatcctcaactattctaaacatgataaataccttctataattgttatctttttttttctggaatcttttggcaaaaatactaaatcatattttttttaacacgcaactctgataatcacaattcagtagtaaaaataaagacaaacagaaaaataaagtagaaatacataataactactaattagctttactcaaatgggacaaatttaacacattgttgttggccttaaccttatcgaagacacaagttcaattatgaattttggattttgaagaacatcctaaagatcaatatctaagttactg

SEQ ID NO: 263291 - DNA, 1037 bp, Cannabis indica
aatcagatcaaaatgcatccaccagaccaagaacatacaatttttgaatagatataggtctatattactacaaagtaatgtcgtttggtctaaaaatgctggagcaacataccaaagattggtaaacaaaatgtttaaagaccagatcgggcgaaatatggaagtgtatgtggatgacatgctcgtcaaatcgtggaaggctggggggcacatagatgacctggacgaatgcttcaaggtcctcaggaagtacaacttgaaactaaatcccttaaagtgctcctttggagtcagctcgggaaagtttctgggcttcattgtcaatgaccgaggaattgaagccaatccaaagaagattcaagccctcctggatatgaagttgccaactaaaaccagggaagtgcaaagtttgacttgtcagatcaccgcactcagcagatttgtttcaaaataaacagacaagtatgtcccattcttcaatatcctgcgaggaaacaagcaatttgagtggatggaggaatgtgaaaaagcttttcatgagctaaaagcacaactcgcaaaacctcccgtactctcaaaacctctggtcggagaagaacttggaatatacttagctatcacggagcatgctatgagtgtcgtgctattcagagaatagaacaacatacgacacccggtctattacatcagtaaaagactcattgaggccgaaggtcgatacccattaatagagaaacttgcttattgccttattctagcaacgagaaagttaaggccctattttaaagctcatcctgttcgggtgtatactgaccaaccattatgcaaaatattgcaaaagctagacgcctctggacggctactcaagtgggtggtggagttgggtcaatacgagattactttccaaccctgaacatcaatcaaaggcccggccttagcagactttgtggtagaatgcacaagcaaagaagaaagcgtagcacaaagcaaccccgagtcggtacaaacacctcggccaagtaacagtgaagataatc

SEQ ID NO: 263292 - DNA, 694 bp, Cannabis indica
tccctctcatctgcccaaagatcccgtcgccctcaacccgaccatttctccgtggaaccccaaatgtctgccatggaagcgtcctccatggaagcttgttgaagactcaaaacgtcccactacaaagttcggaggtcggagctcgtagcttaatgagtaagtgttttttaaaataactttttaaataattttaaaagtatactctatttttcattagattttatgtggttgttgtttgtatttgtttggttttgatgtattcttcgctgaaatcatgagatctaattttcttaagtattctgtgtgttcgcaattttctcgaagctttatcgatacgttctcaacgagttcttgatgcagatgtcccaaggtcagggaagacatttatcaatagttttttgatagttcaagttttctaaaaaaacttagaatttttttactatcgattgattatcgacaggtttttgatagattatcaatatgagtgagaattctttttgttgtcgttatcttggttattctcgcttgattattgataaattattgactgattatcgagaagttctcgacatgttatcgatagttcaagttttaccaaaaaataagaaattttgttattataaacaggttatcaataggttctcgagaagagtgagaattttatttttttgttgttatgttggttattgttgct

SEQ ID NO: 263293 - DNA, 886 bp, Cannabis indica
tcaggggcaacatttaccccccaagccttgtttaattatggagtgaacaaggcttgcttagatgcctccggttgcctcctcggtttcctgacacgtgctgtgggcgcgtgatggtgtatttaatgaccatcattactgcagttattcactttttgcaggcgtcgattcgtttcttgtccatttattgatacggcacattaatgggtgtcagacgggtactcaagggtttctaccgccttgatgacgattcaatccaaccgttggatctatagaatgcgaatcgattgcattcccagccgttcgatggtggctgatcacagctgtctcacacatgctttgtcctataaaagccaaccttctcatttcatttggttactttcagcacttcaccaaattttctcaagttttccagagaaaaaagaaacatttaaacaccatagatttcttactcattttccttgtcgttgccaatcaactttttaccagcgatcaacaccaacacccagttcccaaactttatgtaagtccttcgcatcttgtactttagtgtttgtttacatagcatgctttactgttcatctgcttttctgggttgtatgttgaatttctgggaatttctattttgagtttctgtacaacccgtttgattcctccttttttgtgtttgaattacttcttttcatcatgttctttgtcgaggacccatctttgtctcacgtaatgacactcaagggtttagagtagatttcgtcttctcgatttttaccctttgttttcttttctttttgcttattcgtaatgtcactatctgtgggattcttgcacccgactcttgtcaaggaagaccttttgaggctttctttttttttttggcaagtgtccggag

SEQ ID NO: 263294 - DNA, 930 bp, Cannabis indica
cattcccttcttcaacatcttgaagaaatgttagaaattcgaatagtccaacgagtgcgaggaggcattaaaaaaactgaaagagcacatggctaagccactaatcctatcgaagcccgttctcgaagaggatttgttcctatacttggttgtctccgagaatacggttagcgcggccctagtatgagaataggaaaaaaatcagcatcccgtgtactatgtcaacaagcgcatgataggagcggagacgcggtacctggtgattgaaaaactagttttttgcctcctaatgacttcaagaaagttgagaccttacttccaagctcaccaaatcaaggtattaaccaaccacccgcttcggcaagtcttacaaaagccagaggcatccggaaggctcctcaaatgggcaatggagttaagccaatttgatctacactacactccacgcatttccataaaagggcaggcgttagcagacgtcatcacggagtgcaatgaagctgaggctaccgtaaacatacccacgccaccagtcccgacgtggaaggtattcgtggatggcgcctccaacgagaacggatccagagcaggggtcgcaatgatatccccgaacagacttcgactccaagcagccctacggttcgaattctcagcttccaacaatgaggccgaatacgaagccctatagtagggctgagattagcaaaaactgtgggggataaaagagtagaagtctacagtgattcgcaactggtagtaaaccaggtgtcgggagaatatcaaatgcacggagaaaaaatggccgcatatgtggcgataatccgagaactgctccacgagttcacgaactataaagtagaaagaatccccagggaaaagactcacgcggactgtctggctaaattagcttcagacagcgaaattgagaaa

SEQ ID NO: 263295 - DNA, 801 bp, Cannabis indica
aagacagcaagctatctcatcaatagatgcccttctgcagccattgagttcaagaccccacaagagaaatggacagggcatccaccaagttatgaacaccttagggtgtttggatgtactgcctatgcccacataaggcaagacaaactccaaccaagagccttgaagtgcctatttctaggatatccagatggagtgaaaggctacaaattatggtgtttggaaccaggatacaaaaaatgtattctaagcagggatgttgtctttagagaggaagaaatggcaatgaaatccaagacagacacaaaaccaaatgaaaactctagtactgaaccaattgggtttgaggtggatacagacactacagaacaagcacctgaagaacaggctgctgatcaggttcaaacagaagaacatatgggagtagagactgacatgagtgttgatgattaccaactcactagagatagagaaagaagggttcatagagcccctgccagatttggttttgcagatttcacagcttttgcacttgcagcagcagaaaagctagacaactcagagcctgaaacctatcaagaagcaatcacaggtaaagatagcaagaaatggaacaaagctattgatgatgagatgctatccttgaagaaaaataagacctggattgttgtcaacaaaccagagggtcaaaagctagtaggatgcaagtggctattcaggcacaaagaagatgaaactggcaatggtgaagtgagatactgtaacgccctaaataatcaagcacgctacccaaaatactta

SEQ ID NO: 263296 - DNA, 900 bp, Cannabis indica
atgagtagttaaaatttctaccacatgttgggtttaagtatttttttcaagacatttggatgccttgtttaatactttcccttagcgcaagccgttagtattcagctttatgcgctagtcataacttttgaattttttttcttgtcagataggttataaatcaaaaattacagttgtttgatccctttctcgtcaaaaaggtttgatcaaggcgttataacgattcgatccctcttccatcaaaaaggtttggtcagggagttaaaacagttctacccctctttcgtcaaaaaggtttggtcgaggccctttttttcaaacgatgggtttgcattgtactatgtatttccaaatcaattccggttaatcattatatatgcccctcaagtaattttaaagggtttacactttataattacttgtttgaaagaaatgattattttattcacaactggaattcaaaatatttcatctgtaatgtgattttacaatcattaatctaattaaaagaattttcccagttcaatttcttattttatcaatcttccaggagcatctggttttgataaaatgggttttgatgtccagggccaatccccaacatactcccacaattattctaatattcagagtcaatccctgacatattacgaggttccaggtaatgtaatcctgtttttagttgtttgtctttgactgctattggttgatgtccagctttcctcgcggcagcttaatatgtcaaccatagtgggccgatatctactcacgtcacaattcttttacacaattgctttaccggagtaactgccctttgtattcttatgacccgcttcttctcgagatagccaaagtgtcccttcttctcacggaagaaggttataatcttcagtcactcga

SEQ ID NO: 263297 - DNA, 393 bp, Cannabis indica
aatgaatattctcttcaagtaaaaaaaaaaataattatggagataaatcttacctaaatcatttgttttaatggtttttcatgcagatattagtttattattttatttaacaattgattccatctaattgttggttgttatttctgagattttatgtgataaaactaaaagtaaatgaaagaaaattgagaaagcccaacccaaactccaattggtgcaattccttagcccaaaccaccccaacataagctagacacactacaatttcacctaactggcccattgctaagtagagcagccattaaaatgtatgttcaaaatatcatttttgatacaattttaacgtttatagttaaattactttttttacattatatttttactattttttat

SEQ ID NO: 263298 - DNA, 516 bp, Cannabis indica
aaagagttataaacagaaattaatataacattgtatattgtagttataaacagacatctcaaatactcaactgtttttattaaaaatctgaaaataatttacataccatgtcagaaataaagtttaaataattttattaagtgtttttatttttagcaacagtaaataattacaaaatttactaaaaaacaattagaatgcttaatacaaatataatgtacattattgtacaaaaataattaaaatataaattttttaggtgcaaaaaagtttctacaacagaagcaaaactgacatacttataattaatttttactttttttttataattctaattattttttaataatatatttatatatatataaacatgcagtttaaaagattattaagaggttattttgaggaagctcgatggttgaatgaaggatacatgccaagttttgaggagcatttaaaagtttctttggttacttctggttatttcatgttgatggcttgctctttagttggaat

SEQ ID NO: 263299 - DNA, 867 bp, Cannabis indica
ccaactaacacccgttctacgaaaacatagtccgtttgccaccagatcttagccatgagacgctccaactccctacaagtatccaaaaggtaacagaaaaacactcattgcatagctaggaattgattgcgcaacagatttcagcaacacctccttccctgcacgagacaatatcctcccttcccatccttggattttctttttatttatctttaagaaaccaggataacatttttatctttcccaccgaatatggaagtcccaaatacgacccattctcatcagcctcataaatttctaacaactcacaaatgatatccctttaagaggtactagtattgtggctgtagaacactgacgactttgaaaaattgatcttttggctagaagcaatctcatacgtatacagtaactctttaacattatgagcttcctcctctgttgctttataatagatgttactatcgtctgcaaataacatatgtgaaatagcagaagcgcttctaacaactttacaccgtgtaattaatccactatgctcgtaactacgcaacaaactagagaaaccctcgacatagagaataaacaaatatggcgataaatgatcaccctggcgcaaccccatttgtgcaacaatagggcccaactcctttcccccatgagagatcgtgtacgagacagtgcccacacaatgcataatcaaattaatccatctaccatcgaagcccattctttcaagcatagcccgaagatatccccattcaagtcgaccgtcagccttgcttatgtcaagcttaagtgccataacaccatcccagcctctcccttcctcttcaaataatgcattatctcataagaaatcataat

SEQ ID NO: 263300 - DNA, 579 bp, Cannabis indica
gctaattcatttcttaattctagggtattacacttatgttgtaaattacacatagaatttgcattgaacaaagaaatcttaattgctacatagaccatacaattactttcgtctaatatcaaaaactatgtctatttcactatagcataatcaatacccactttatagatttgaattgaaatcataagcaaattattagtgatcagaaaattataagtattacacacgaataaaatagaatgacataaggaattggacaaaaaactagaattgcattaaatcatagtgatatattaaaaaaatatccattaaaaactctaaatatgagtttaactcacaattgtcattctaaaaaattgcaaataataaattggaaacataaattaaaatatagaagagaagaactgatgaagaaccatggttgtgcttgaaaaatccccctttccaccctaatttttttgcctccaaagttgcctaatggaaaaccccttgaatttcgaactagggttcaaaaaccctaatcaagtcaattttaagcatgcgggccgcgacatgataaaacccatgtcgtggcccgtt

SEQ ID NO: 263301 - DNA, 868 bp, Cannabis indica
tcagtataccatcgtactagtgtaggtagggatgaaccgcaccttgagtactgttaggtattgtagcacagacaccttgtaccatctcgtacaagtgttggtaacaccacgatgtactttcagacatcatacactttactaatgcactctgtaccgcaaccgtacaagtgttggtagtgtatgaatcacaacatataagcatgcatatacacttaacatatatatacactcagatattcatattacacattatacacaatttttaccttctttccagattcaagtgtgctagccgacctgaacggaaagtcttgcgctaaatggatgccctaatcacataatgaaaccgggtaaatcacatgatcaaaaccctaatccgagaaactcgaacccacactcctaggttctgttatattctctaaggattacactaactcaagaaatagggaaacacccaactacggcactgaaatggacgagaattgagaaaatgggacactcggaaaccctgccaaaactggctaggctagccggttttacaggtactggtaaaactggttagctggtttacaccagttcacccaaaaacccacttcttgcttaaaactccaccaaatacaaccaaaccttccagagtacctaattagggtatacacaatatactccaacttgtaattcacagaaaaacacaatagatcaatttatgccattaaagaccaaagctttgagttcaaagctcaaacttgcacaaaaccaaatccatacatcaaaatcagctgctagaagctaaatataactcaaatcaaacttagaatttgaattacaacctaacataatgttgggttttatgccctaaataaaactcatt

SEQ ID NO: 263302 - DNA, 979 bp, Cannabis indica
cacagtttcaagcacaacccatgaaatggcaattagtaccacaagaataggaaacaagatgaatactctatttcagggtgaactctttacggtttcagaatcactatctacgggaacggttgttgcattcacaacagcattgattctcaacctgctaaagctggacattcgttcaaaagctcgattcaccaatgcattttcggcagcagggccaggagtagtaggtatggattccacaaatgaccataaagtagaagagaatcaattattgttaccaatattttcattgccactttggttttgagtcgattgcaatgaaaatgtggaagtattacaaagaataaaccaaaaattaacaaaattaagcaatgcaaatatcatataactaacaaaagttctcttagatactatgttttttttccttaaaaggttccattcaatgatacatgtgaaaagggaagttgttttagaagagggcttttttaaagttggcccaaaatcccaattccacatagattttgtgccacaggaatggtgttcaacaaccaaatacacaattcagttaacgtgttaagtcatttgaagttgtgcaaagaaaatatctgcaaacattatacctgaagacgaattagggtaacagccagcatcaaactctgcagaagtataggcacttctctcttgattatctggcaggaactgatactgatggttcatctggtttgcaatatcttgatactatagattattcattgggctgcaccttctaaatacatatgattatttacttggcctgcgcgttctaaatgcaacagacttgtatgttggtctgagccttgtaaataataaagattactattttgatctgcaacttcaaaatgtagctgactaacagcctcgtcttcgcaaccttgttcagaatttcttcaatactgatatgagtttaccacattttgctatagggaatgaacgtattgatgtg

SEQ ID NO: 263303 - DNA, 517 bp, Cannabis indica
actgtctgattttgatataatcccgggggattttctatctaagtatggagcgacaattgattgtaaacagaagatggtggtgtttgagcccgatagtgctaacccgacggtgtttatgggtaaggttcaggggcatgcataccaagaatatcattgttgaaagctagggacttgatgagcagaggttgtctgggattcatagtcacaatagcgtataccagccaacctgtgacatcaggacctgagaatacaagatttgtatgcgagttccttgacgtctttccagaggatttactaggattgcctcctacccgagagattgaatttgtaattgagttggtcatgggagcagatccagtatctaaagcaccgtaccgaatggctccagcagaactgaaagaattgaagatacaattgcaagagttaatgaatctgggattcatccgaccgagctactcaccttggggtgctccggtgtagtttgtgaagaagaagatggaaccctgcgaatgtgtat

SEQ ID NO: 263304 - DNA, 1126 bp, Cannabis indica
gggggcgtcgggcccggttttgtccatctacttcggcctgtagtgcacgcagttggtcctgaatcgcagtatattgatcagtggtgagctggatgattccctcggataccactgccggagtgacggggggaaaatgcatggttgctggtggtgtggatgtgtccccgacttgagggtcagttgtttctgggaacaggttgagaggtctgatattgcttctccctactccgccattaacgacatccacaggcggcattccagctccggataatggtacgttcatcatcccaatgttgatggacccgttgttagctcctccgtttgtttgatttccagccatgatggtatttttcttgaaatgaataaaatcttagttctcgtttcccacagacggcgccaaatgttgtcgagtgaatttcgcaacaccaaattatatgatattattagtgacaagaagcaatttacgtgaaaagacaagtgcgagtattcaacctagaatggcgagtactcaactgggaatgagaaataattaacaaaaactggaaaataacaatgagacagagaattatagtggttcagtcagattatggtctgcttagtccactgtagcaagagattcgtaggtgccatttcacggtggatcacccctttatatacaaagcaggtgtccgatcagttatacaaggattgcatccgtttttacacattgaattacaataattaaactaagcaacgttaacattaataaatgaatgacagttactaagttcatcaacgtatgcgtcttccgaatctgcgagttgactgttcatattccgatgtacaactcgcagggttatcattatgtttaggatgtctgcgtccttaggtagtcgcttcttgtagacatcgtgtgtcgagctgatagaacctagacatgcgagtctatattgcattataaaggctgcagggttcttaagaccaactcgtatttacagagaatcgttctcctggtgtatacaaggacaagaggaggatgatcgcatatattcgatatatgcgatctactctcttgtctcggatgcgattagacttcggtcatgctcgccacctctcgctggttataccttaagcgaggtttaaaact

SEQ ID NO: 263305 - DNA, 994 bp, Cannabis indica
tatcgcagtgttgctcaagctatctctgagctcacatggctgcattctctgttcactgaactgcgcattacactgtctcgaacaccagtactctggtgtgataatctcagcacagttctattgacagcaaaccctgttcttcatgctcgaacaaaacatatcgagctcgatttgtactttgttcgtgaaaagatctctcagcaacttgttcgtgtcaaccatgttccagccttagatcaaattgctgatggatttactaaagccatttctagcttcagatttgctgtcttttgtgacaaacttggtcttgctgtatgcaacaattccaagtttgggggggagtgtgaaggagattagttagttatgtctgttatttccgtttcttgattagttacagctgttagttagtttgttagttttgctgtaactgttttctgtttcatcagctgtatatatatcacaccttgtatcaattcataatatcaagaagctattctttcagctctgtgttttctctctttcttcctctttgtcttcttcctttcgttcttcatggctaggtacaataccagatcaaacaatatctaacactttttaattttttatttgaaaaataaaaacataacatcaatatcattgtatggtattaatacacaaattttaagaatagtatttttttttatcctcaatggtatagtatctctttattcttccacttaaacttttcacctcatcaaacatttttcacaatactacaattgaagatgctcttaaatattggagataagcattgctactgccaagcaacatgaagttttattttatttttttcttaaacttgattggcttataaaagtaaaagaaagggacaattttgggtattttgagcagagccacttagatagtttaataagatgattaatggatcatgaagttgatcataaaaaaagggaaaaaacaaaaaatacaaaaaggaaaaaaattacaaaaatac

SEQ ID NO: 263306 - DNA, 1359 bp, Cannabis indica
atttgtctgaactttaacatcgtcacatctcagaaaatggatcgagtctaatacatattttttcagcatggagacatgaaacacattatatactccggacaacgcaggagttaaggctagctgataggctacctaacctatttatctcaataaataggtatcaaatatttctctcgtaccacacttatttaagtacctaactaatagtacatttaattataacttttagataaacactttgtcaaaggaagagattattctaagataatctaacctttatgaaatataccaatgacatgtttctaatattccattgatattctcaggttacccacctttcaagaataaaacatcatactatttttgctttaatctccatggttctcactaacattctttaattcttaacatcatagccaaagatctcaatcttggaatttcacaagattagattattccttcgtaggaattccatatccttatttattgtataaattatctatactgatagatagcatattaactcagtatatccaatcgttactactcagtcaaaatcataagacctcacaatacataattcataattatgtctttccattccttatatgggacctcctaagctgacctagtgacttagtttaataacaagttaattattcatttctgataggtattcatttagagcatttcttatttccacccactaacataaactcatcttgatatcttgtaaatctttacttgttaacacattctttcctcttacaaatctctggaacgactactaattctacatcctatatgaatctttctagtgtagtttgtcctcactcgtacgctttctgagatgactccccagaagattttccatcttgagattacccaaagttaagtacgcttacctccaaggtaagctcgtggtgggttatcagaaagtagatgcttcttttgctgttcctaattgtatttcttgctttcatccttccattaataaaattcaattgccaacactcccttcattaacctcttgcaattcctcatcaatttttttgttcacttaaacttcaggaattcccatcttattgtcaacttgaatcttgttcatttctacttattttaacttgcataaatttctcttgaactggcacaactttaaaatttcccaatcacttacatttaactaccgttataaagtgaattaatgtaacctatacagtagaggcaacattgctcataccaggtacccataacgaaactggaaatacacatttcccgaattctcaattaataacaattaatcaaagatcattccgtgatcttgaaatttcttttatgtgtttggtagagatcttgatg

SEQ ID NO: 263307 - DNA, 1925 bp, Cannabis indica
tgaaacaatttaatgtaaatacataaaattaaataatattattgttaataaaatgtagaaacaaacaataataatttctaacaataaaaaatacgtaatactaaagatgaaagaaattatttaaaaaagcaaaaattataagcatatattgtattgagaattaaaatcaaaataaatacttaattatacactagatttcatatcgcccaccttaataataaggaaacttagaaatctataagaaaattaactataaaaagttgcaaactaacactgagcgcttagagcattttcttagaattgttctttctgaaactgtattgaattctaaaatcctaagcttttatttataggaaggtaaaaagactaatacataattaaaatttactaataattgcatggggtgaaaatgtaattgtccaaaagtaaattcagaatgccacgtgtcaagctcagattggaggcctttaatgagtcactgccacgtgttgcatggatgaaattgtatatggtgcaacttggggacacaaagagggagagcctcagttgcggagttcgcgtgtcgatgaaacgagtggcccatgtgggccggttgggtctcgcgcacatgggaggaagaggggataaccccctactgctgcctatgcgaacgaaggggacagtgtttcgtggcgttcttgtctcttagaggaagaatttgggccctttttaggccggctctttttggctgttcggctcatgtatttgggctacttttttatcatattttctttctttttcctttcttttaataaatgctatttttctcaatcaaacacaaataaaattaattctaaacaaaatatttttaacataaaatatatcaaattaatttcactgaaaatatatatttgaagtctaattaacttttcagaagaataatgtgttttcttatcttttttttttcaattattccataaatactagttattatttataaacaaagataaaattaaatctaaatagaatattttaaacatacaaataataactttaatttcatgaaaatattatttaaaatttaattaattttgtatttttacactataaaatatataatattttaatatttaatagatagcaactttgtggtgaaatgaattgcttgcttgttaagctctcctctctttcttcatatagtcaaacacttctaaggtttaggttttccttatttaaataaaatcttattaagttaattaagaataaaaaaaaagacaaattagggaaaaaaaaaattaagagcttggctgtgtgccacatctagtaggcccaaatcaatttttgccatctagaaaatcttgacttaaaaataaaattttcttttaccagttttatttatttaataattttaaataaaataaatttattaattagatgacaaaatatcattattaacaaattaaacataatctctcttttcttctcaatttaatacagtattagcgtaaattctcaaatatgacatagtctacttatgaatttttaattgattaaccaaatcaatttattaagttctatcagattatattatcccagattttgtggggtctatgggcctatataattaagctcccaataaattgatctaaaatttaccatgtaaatttcttaacttattagtttctcatgactccactatagattcaaaattacactattgattatatagaacactttatgtctctaatatggatatgtataaattatctattgttacaattaaaacaatcattgatcttctatagattatatacatcgagtagagataaaattattgttttactcttcaatgtaatttatctttaaacacttaattttgaatatttcaatgaactaatataattacaaaaatgagtactccaacacttaatctcgtttagccaagc

SEQ ID NO: 263308 - DNA, 7349 bp, Cannabis indica
agttatttaactaatgggcttaagttacttaagctgagaaaccaaaataacatccttttgggtcttttagggcataagaaaaagcccaaatacgaattcttttctgggcgcacaccgaagccattttcacgcctcatcagattagaggagccttacacgtgtgagtcgtacgtctctttgctccatacaaaggcgcacgccttagtacgaaaaattttcacctcagattgaggggcacctcattgcgctcctcacaaacgcaattttaaacactgtgttagagtgctatttgaagtaagaacttgaaggataatattgtgagtacgttttagtgtgagaatttgatacaaagagatgtacgccttagtgcgaaaaagtttcacctcagattgagggggcacctcattgcgctcctcacgaatgcaatttttaaacattgtgttagagtgttatctgaagtaagaacttgaaggatatgtgagtactttttagtgtgagaattggagctgagcttcttggaactctaggccacttcaattttccaattaccctgtaacttctttttctacttttggattcaatctcatactagtgctttgcttctattgtttgtctgatctagctccgaggagccatcaatttagcatgagagccccttttcgagcttatagctggtgcctaaatagatggcatcaatagaagagcgggttgttgagtacctttatggtggaggatgagcttaaatggttttggatactttaacgagttacatgggtggtgaagttaaatactatgtaggtaaataagtaaatttttaatcaagtttagtactaaggtatgtttggttgggaggaatgaaaacacaagaatagaaatgaaaatgagaataggaatatgaatagagtgaaataaaatttaaacattgtaaaagaattgattaaattttttttttcaccttgcattgtgatgatctttttttctatttcaaaatggaatagtcattccaccaaattggtggaaaagtcattcctattggcgtttccaatactttaaattacaaccaaacaaaggaatggaaaaaaattattcttttccattccagtattcctaaccaaacacaacctaagtgtagagatcatagacactatgcttaagaatcaatcaaatttaagaggtttcatccgcagttaggttgctttttaaatcagcagtgtccaaagttaagtgtaaacctgttgacagcaactgaacactttgatctactttttgtaccaccattccatgttcgaagatgatataaaattttggacgtaagagtttgatgatgactactttgatcataagttttggtacttatgatgatgaataagaatgccaaggctgttggaaatatttatttcttgatcattatgcattttttttgaaagaaacgtgcataggttgatcattatgcatgacattgagaaggtcacagtccatagaattttttagaagtcttttctttgatggtttataaatttattttggtttgtttcatgacatgttgttatttatgttgtttgggtatgcatttttcgttcaacatttgtagatattctccaaacctgcttcgcaagcttgacatatttgatccccatggtcctaccatacatatttcagtgcaatattttgtttatgcaatacttattattattttattaatttgttttttggaaaatccatgtgctgtcccatgtcaacataactttgtttttgtcaggataaattctagtgggaatggattaatatggcattacttttttttttcttttcacatagagctgctgttagtttctattgggtttccacatcatatattatcgaggtttaattatgatatgtacttgctctcaagttgcttgtttctttttgattacttttgttaggtgttctgtggaaatgggggagagaagcttttggttttagctgaaggtttaattaagaagcatgtagcatcccatagcttgcatgagcctgaaggtatccatgaccatgtttttttctgctctattgttaattggttatatgctaaaaacctggaattagtgcagctctgatggtatacatttctatattggagcaacaagcaaagtatggggatgctttggaaattcttactggggatttaggatctctgttaatgattgaagttgataaattacgcatacaggtactttagaagatttgtttatacagtgtgatgtttttggcttgtcacctacttatgaactcatgaatattggttattacatcttgtgaaacatattgcacatctttcgtgtttttaggattaagagttttgtctttgtattattaggatagtttcagtgttaagcctgattattcttgaaacaagtctaacaatgtttaggtccttaaacaatcctagcttatttggattcttattctctaactgctgtctttgtctcacccctctttcttcttttgtatacctctgctacaattattttcattatcaaaaatttaacttgtatgtgctatccctggtatttgatactcgacaaccttatttgctatctttatcaacttgtgaactttgacttcaagttgacagggaaggcttcttgctagggcgggtgattacagtgctgctgctgatatttttcagaaaattttggagctaaggtatgccgataaaaaaataaaatctttatagcagaatattttttcgtattattctttggcaattgatggcagttcattgctggctatttcattgcctaggggttcacaaatcatgcaaattttgagagtattaaccatccttttgggttttattttttatttatttatatattgttagagcatctcctaccatattagctaaccacactccttagctaaaatagggagtaagtctcaacaaaatgaactacaaccataaaaaaaaaagtggctccctataatagagaatggttaggagctctctaaatgtagagagcttcctattttttttgccaaatttttagtagtattttaatcaaaaagcactactagtttttcattatttaatttaatttataataaacaaattcaatttataaaaaaatattaaaatactcaatcttaactaaagaaaagaatatgattggagcaaaattaaaaaaattgttctctattttaacaatttagctaagaaataaagtgttccttggaggctcttattgattgccttagctccccatctcaatgtttgaaataacacttttaagcctcgaggtgtttttttttgaggtgaggcataagccttcaaggcgcattgaggcgtaagcctcaaatatttaattgaaaaatatttttaaagcgcctaaagatatcaaggatgaataatgtcttataaaactcaaacataccataaattgtctcattaaactcaaatgtaccataaaatgtctcataaaactcaactattttaagcctgctaagtgctaacccgaaataatatgttttagggcttttgttggcttttttatattttgtttgagttttattccactttttaaagttatttagctgatgtaacatcatttggttacccaaggtgggtagctcaaatggtcaggcatgttgtttgctcccacaaggtctgaggtttgagtacctcctgggtacctacatagcaattgttatagtttcttagtcccgaaatattgttgggttagatggggatcctagtttcaaaaaaataaaataaaaatatcatcattttgggcaaaaaaagccactaagatctttttttacccgttagtgttattagaggcgccatgtgatgcatatgaaaacgcatgctttagtgcaaaaatgtagcgcctcagtgtgatgtgcgcttcacaaccataattttaaacattcccttcctccctctcctgcccttctgctctttgaataatatgctgatgatagtattgtagtgtgctgtacatgacagtggccaatgatcgttgtcactgttatgtaccttagaagaaatacttatgcaaacaactgaaataaacatatataagatgttatactttgatttagtgtgaggcgaatgttttatgttttggcctggagttcaacattattcaatggccttaacaatgcttgttttttacgtgtaatctttcatttgttctactttaattttgtttcttttcatttggcagcccagatgattgggaatgtttcatacattatctaggctgtttgttggaggatgacagctactggtccaatcaagccttgaatgatcaaattcatccatcaaaatctgttgattacaagattttacatttggaagatgaagcagtgtgtatttaaatccagatgtcatttactatttctgtttttgtgttttcatttattttaaagcgttgccttggtgcaataactcaatttctcttttgcaattgaatgtgcagtttgactctcaaatatcaaaggcatcagcttttgtacagaagttacaggcagatagtgatgagaatattgtaaggtgtccttacctggcaaatattgaaattgaaaggagaaagcacttgcagggaaagggggacaatgacaagttaatagagcttttgatgcaatattttgttaggtactatataaatttgacatcttatttgcattttatactaatttacgaaatcttgtaatggacctcccttgttataagaaaaccacgacaggactatgatttttattctggcatatgatttttgttgtcgtctaaactcaggtttggtcacttagcctgctcccctacagatgttgaaagtttcctagatgttttaagccctgataagaagatggagttcctgaacaagttgaaaagaagctttgactgcattactagtgtaccaaccaaaatgcttgggcagtcaattactctattcaaaattcaagaattggctggaaatatgtttgatctttctgtaccaggtgcgttgtataaaaaaaattcaaaaattgctttttttctccctttaattttattattaatatgatttgtttattttacttaattccttagtgctatcacccttagaatttctgctgttattgctttgtggtgattatgtgcggcagaactgttttcaaataaaatctggttgttggtgaatttttgtcaccaattgtaacaagatatcatcctcatgatgttcagtaccctacactagcttatttttgggtttatatttgcatttttatttccctagtttatttttaaagttcttttattgcgacttctgttacttagttgtctatccaatccctcttcaattattcttctgtagaacttgattctgtgttaccacgggtttcctcctcacttattccataagtgaggctcttactttttccataagtgaggctcaattaaatttgggaggtcagtctaagcatatgacctgtctctttttcaaaaaaattcttctgcagaacttgagtgtcatgctgtacaaatggtaaagatatattatcaaaaccttccactatcaaaggacttggattcacaagagagtatgtatggtgaagagctgctatccatggtgtgcaatgtattgattcaggtatcatgttcacatcgcatctacaatttttcaatgaagaatttacaaattccaaattttgcatgcttctactatcgaagggagtctcatacaatgcttttgtagttattctggcgtactaggaatgttggttactttatagaggcaattatggtcttggagtttggcttgaatatccgaaggtgagaccttgttttcgctttgttattaatggttgtcggtttaatattgttaacttcaatatttgattgtatgtgcagatatgtatggcaatacaagatcttattattgcacttatattcccactggggtgctatttcattagcacatgaacggttagttatttgtacttacatttattgcttcaacataagcagcatttggaattattatgctgcagcatgtttacctattaagaggagcttctttttgttaggtacaaattgctggatgtcaaaaacatcctgacggaaactgtttctcaccacattttaccccagatgttggtttctcccctttgggtagatttaagtaatctgttacaagactatcttaagtttatggatgactacttcagagaatctgctgatctgacatttcttgcttatcgccatagaaattactctaaggtctgtatggttttctgttagtgtgttattttatatttattttatgtcggaaggtcgaatgttatttcaaagcatgcaaggatacaaatcaaacctgattttaggatgcatgcatatttgcacttccaatatatcaaggtcaatagtgtttagacctaattacttggtaggcgtttcataaaaaatacatataataggtgtaagaattcgtgtggtagtggcccgaggccgactagcatgcgtcgtggcgaagggtgtaatgatttgtattggggtgttttggtttcgtttagagaattggcaaaggtgtataggaagtatgagggcagtagacgagggcatcaagtcattttgtatgagctgtggacttttggagagaatcgggtttctcaattacctaggaagttatactcttaccctgaaattcaatacacattcctttcatttcttcttacagctctatcacattactatttgagtacatcattacacttatcaaataacaccttaatgtattgggattgtgagtgtatagttgctgaatcatacttttgtattttacaggtaattgagtttgtccagttcaaagaacgacttcagcactctaatcagtatttagttgcaagggttgaagcatcaattctgcagctgaagcagaatgcagataatcttgacgaagaagaggtaattacttgctttgcaacttctgccgtagaacatgcctactgaaaacggtctcatttgcatttgtgattgtgtttgtctatcatatttaggttgtgcttgaaagcttgcaatgtggagctcacttccttgaactatctaatgaaattggatccaaatctttgacctttaatgaagatatgcaggcacgcccgtggtgggtgccgacaacagaaaaaaattatcttctaggtcagtattgtctgtgattctaaggttttgtcatagttgaagggatatatatacttttcttttaaattcaaaattatgtctcagaaaatatttgggattcatcatttcatatttagcatttatgattgggtttttctgtctattacatgtcatttattcaaatagttgaaagctatcttttgtttctagg

SEQ ID NO: 263309 - DNA, 850 bp, Cannabis indica
cttttgcccctgttgcaaagtttgatacttaaaaactcatgctcgctattgaggctattaacaattggtctctgtaccaacttgatataaacaatgccttccttcatggcgatttaaatgaaactgtctatatgacactcccaaaagggtacaaacccaagggacaaattcccccaaatgatgtttgtaagttaaccaaaagtctttatggcttgaaacaagcctctagacaatggtacacaaaactcagcaattatcttctatctactggtttcaccacgtctctttctgatcacacactgttcatcaaaaatgataaaggcatttttctcgccctattaatctatgctgatgacattgtaattacctctaataatgatgatgatgtttcaggttttaaatagcaactcaactcagtgtttcaacttaaagacgtgagtcccttacgttttttcttgggattggagataggtcggtcttcctctggaatatctgtctcccaacgaccttttacccttcaacacttaactgacacaggttttttaggaacatcttctgctcccacaccaatggaatccaacattcgactctcatccgatgttggagaaccacttgacaatctcaaaacctaccgcagcctcattggtaaacttctttacttaactattacacggcctgatatctcttttatcgtcaataaactaagtcaatttttatccaatccaaggattccccacctcaccgctgctcacaaaatattacaatatctcaagggtaccactggacaaggactattcttttactcagcatattatactaacctatctgctcatgctgaaactgatatgtc

SEQ ID NO: 263310 - DNA, 1196 bp, Cannabis indica
aaaaagagagggtagaagaagatattaagtataaaaagtgtacaacgtcatgaataacgctacacacttgggggcaaggggggaaaagaaaagaaaacttttctcaaattgacaaggactagctacccttggtcgacaaaaaaaatgcacttctccctacaaaagttacttagctaaaagagatctggaaagacactcatgtcattatgctagaaggagagggatgcctctcaagcataaacaaacattcatgagcatacgcaatagtgaaaatacactcggccatgacatttacaaatgtcactcggccatgacgttctcaatgtcactcaacaatgacatttccaaggtcactcggccatggtctgacaaaacttagtaaaattctcccaagtaagaagaaacatacggtcacaaggacaaggcgtgcatgggaggaacgtatgaccacgccttctataagctctaaaagtaagaaggtacaagtatcggtagcatcacacctggaaggtctgaggagccgaccaagagtacactatagacaatacacctacaactcgggaccacttaacaatagacaagggtacgagacacaaaactacctcctgcacctgcaatttgcagcctgaaagcaacaacttatccccttttggaccactatgtatctcaggccacaaaggcctataaatactccattctcaaatgtgagaaggggttggaaagttagatttgtaatcttgagcttgaaagcaatagaataaattttttctctctattgtaaaatcttattgtcatttgagtttacacttcatcaccatctccatcttatttctgagtttaaggttagatttcaattttccggccaacaaagttagttgacgagttctcaccgccaacaataacttaaataactcaatttaaactcaattaaaactcaattacaactcaaatacatctgatgaatgtaagacctaacccaatgatcttgattttttaaaaaaactcatgaaacctagaataaaaatcaatataaaaactcaaattcaaactaagaaaataactaattagaaacagagaaagtaagagacataaccctacgaactttctttttagaaaggaaaataaaattaaaaaaaatcctgaaataataaccgcaaaacaattcaatcaatacactaatacaatgtttttatttt

SEQ ID NO: 263311 - DNA, 793 bp, Cannabis indica
aattattacaagttttattttcattctgtttattataaaagtttaaattctgcgctattttgattagttatcccatttaggggattagggtttcataagtattttgggtagcgtgcctaattatttagggcgttataatttagtatcagagcgccaagatttttaaacttcctgcagactggctgaacatgtacgttcatcgtcagaggcaagcttgactcatggtgcagtaagtattgagagtaaatactttactgtttgtgtgatcatctgtttaccgctttccatttaggcagtatgcaagcatctagagtatgtatgtgttatgtgatgccatgctttaaatgttatttgtttatgtgaatattatatgagataaatagatgagttagggtttaaggcaataaatgcgtaagtgtggtattagtgcttaactcgtttgggtagttgattacaggggtactagtaatggactctccgcaatcatctagaccacagtgtgagcaactagagctcggggctacccgaaccgatccaccgacatcgcctccacctccgcagaatctgggggataatgcgggggttggtaatgctaatcctcctgctgactggtagcagatgttccaagaaatgcgaagtatcatacttcgtcaagaagaagagttgcaacgtttaaggcaaccagctgccccagttgatcaagggttaccaccagcacctgtgccagtggtgggtaaccatgggtttattatgccgcaccggggacccagtgtttgaatggtttgtgaagctg

SEQ ID NO: 263312 - DNA, 1508 bp, Cannabis indica
ctttgcaaaaattttattttgcgtcctttgtgctttgagaacttgaacgtcttgaacttgtttttgttctttgggtcggtttttgctagaacacaaagatttcgaagggcatttgatgagtaaatcttgtctgctacaaactttgcctagttttttggattgcttcataaattcttggacaaatttcttctgggagaatattttttcaagggcctttaagactagttggaaaatttctccaattagagcatttgttacgctttttcccgatccagagagtagcctaaaagtttatttaccaagtggctctagaatagatgaaaggaaggcttgctttagatttgtatcatcaatgccacttatttggcagaatcgtttagtcattcttttgtaatgctttttcaagtctcttttgtccattgaacaacacttgagattgaaaaactttgctctaagtctttcagttacttgtgcatcttggccacaaaactcgatatagagatagcttagggcatttacgacagatgggagttgcaagaaagtcatctgtctgtacaagtacatgttagataaattagttgtatcattttgtaacatatgtaaagttatttattgctatgagtaacctttataattattaccaatattaagggtataaatattacacatcttaaattgaaaattcttaaaagttataggaattatagttgttggagtatgagttttatactcatttaattgaaaacataatatccatggaatatcatgtgttagaatttcaaatagtgatatgacaaaacactataggagtactaaagtattcaacttagtgaccttagttttctataaaataaacattttgactaaaaaactttaaggctagcttaataattctcaaattattttctagagagttagagatatagataaataaatttttagacaaaaacattatttaagtcataatgattatcattattctacactcaaaattgtgagttagtattcctttcttgttcttcttctacttcttataatcaatctttaatttttatattatattaatgtaatcagaattataatgtcctgatttttttttattaaataaaaatctcaaatataaatttagttttgctttatctaaaagattcttatattgtaatatgcttagatatatgttagagaatatattagtttattatccatttttcttaaattattccaaattatgatcaaaaggatccatgcgacacatattaagccatggtaagatcccaaattcaaatattaattgggccaaaagcggttagcaaccagcgatgaatattgaataagttttttcaacttaatgagatgagttagaaacacatgcagataatgcaggaataattacataagatactatttttttttgtaaaatatttatatttttacgttcaaagaatattttttttacatttttacggttttccaaaaaataacacgaaaacaacataaaatcaacaaga

SEQ ID NO: 263313 - DNA, 1008 bp, Cannabis indica
ttctattcccattccaaccccaaaggaatccccgacagagtttctcaacctcctttgtgacactatgcggaagaatgaatatactcatccaataattccttaacccaagaagaactaaatgtatgagttgagccctaccggcaaacgagagatgtctagtagcccaagtgtggagcctttgcttgatttttgtgattatcacaccacaatccccgcttttcattttgttggtcttaaggggactcccaagtacttgagagggaagtctccttcttgaagggacaactctttcaccattttttgcttaacatcctctttcacacccccaaagtagagatgggacttattgatgttgatagcaagccctgaagtggcactgaattcatctagaatctgcttaataacctgaatcgagccaaggtctcctttgcaaaatatcatcaagtcatccgcgaaactcaggttaattatttttagattcttacaaagaggatgatacctgaatttggattgattagcagctagaagaagcctcatagtcaaatactccattattaggacaaataagagcggagatagaggatcaccttgtcttagccccttcttgccttggaaactcccttgaactctcccattcatcaagattgagtaagatgtcgattttaagcaagtcatgatccaagttatgaatcttcccggcaagttaaactccttcagaagcttctccaaaaactcccaattaactgtgtcatatgctttacttatgtccaccttgatagtgcatctaggtgaaatgttcttccttttgtagttctttaggaggtcttgaagaatcatgacattatgagctattgatctcccttgcacaaaagctccttgattctggtttaccaatcccagaagaacctcagagagtctcaaacaaagtaatttagatatgcatttgtagattgttgtgcagcaagcaatcaacctgaactccacagctttagtcgggttttctgtctt

SEQ ID NO: 263314 - DNA, 515 bp, Cannabis indica
gaatcttgaatgtgtttgtaggcactcttaacggaataaaagccagttgcttccttgctccaataccaaacatcttcgtgagcttgattgctaagagggatttgtaaaatgatttgagcatctcttaagttaaagatgtcagaaattacctcattatcccactctctttgattaatcttcataagttgattaactgtgcatgcttcaaggctcggatgtgatgaggtaatacatggttgagggtcatatggaagccaaggagtattaagaacagccgttgaagaaccagaaccaattcgaattctagcgcccactttcacaaggtcttgtgactcaaaaatgctcttccaaatgaagcttgggttactaccaagtgtagccgtgaggaagcttccttggggataataacgtgccttgtaaacacgactcacaagggattgctcatgggtgagaaggcgccagccttgtttgccaagtaaggacagattgtaatcgcgaaggctacgaaaacccat

SEQ ID NO: 263315 - DNA, 3060 bp, Cannabis indica
aatgcagcttacgactctgcttgaggaggttccggagcaaggtctgaatcattttgagcagatgctgagtcattttgagcaggttccggggcaagttctgcatcaatttcagcaggctccgcgtccattggagcaagctctgagtccttttgagcaagtttcgtgttctctagagctagttctatgtccatttcaacagcttcttgggcaggctctaagtccctttccacagattcaggagcaagttccaagtccttttcagcagattctcgagcaagctctgagtccttttgagcagattctgctgcaagttctgagtccttttgagcatattctggagcagcttctgagtccttttgagcagattctggagcaagtcctgagacttcttgaggaggttccgagactttttgagcaagttccaagtcattggaagcaggttctattgtttctgacaccctgcggcttgcaaaagactccttcaggagttttgtttcattctccaaattcaacaacttgttggccaatgcatcaacactctccaaattacctgtgaactcgcaagaccaccaatctccaaagttattaaccctcatctcaatttcgagcttaatccttctctcttcttcttcacgtttgagacgctgcttctccagttcaatggtgcttaaaacaagaccaccagacccagcaacatccttataaagcggttcatcaagctgtggacagcgttctctgtattcagcaaatgccctatgtgtttccttaagagccttcttataaccatccaccagactgctcattagatacagctctcgttcaagacgataaacctccattcgtctcttatgttcctcctcataactgaccttattcatatgctgaatcatgttttcccgcttctgcaactcatccattaaaatctgctgattcacattagcctcctgaagggcgtgctccttttcagcagaagtactctttagcttcaccaatgtctgaatcatttgatcaaaatcactatctgtatcagacgatgacttaccattatcccaagaaccatccatcctcaagcgcttattagcattgagcgggtgatgagagccatcatttatcattccaagctccctcttactaccatttccaaaatgagatgtcattggagtatcatttctaggaggaagaaaatcccctgctaaagggtcacggagtggcatccctgaaccaagacttatatcagctgcatcaattgattgagcaagacctcctgaagccaaaccatccattcccatgcttttcggcgaaaagtgaaaacatccatcctgccctccttgctcctccatctcttcctcctcatcatcgtcctcttctggttcaacaacatcttgatgttcttgctcttgtcctatttctaaatcatattcttcatgtttcccttcatcctcaacatccaactcctccttaagttcactatgattacattgtctcaaaaaactcactcacattgttcttctgatccataaaccattgaccatgctcctcttctttacatccctcaaaatccattgtgcttacatctgcaacttgtaccttttgggcatcaggtttctcaaccatattatcctgcccaagactcaattcaatgttgtgttcttctaattcatggcgactttcttctaatacctgaatgctgtcttccaatgactggctgtgttccatcacttcgtggccatgttcctgtaattcatgactgctttcctctaatgcttgaccagcctcctccaatccttgaccacacaaatcgccttccccagacattttgacatcctctttgtgatccccctcaccttccccggatattttgacattacctgtgtgatcctcctcttcctctttgaaatcatccgtatcctccttcaaatcaatatcaatctcaaccttaggcacttcactcaaaagtaaatctccacgctgtgattttatcaggcgctgcaagtgagaggcgtaataacaatcagtaagcgttggcgcctgcatcaactccttctcgatcatgaaccatatcattccagcccagtcaactttctcgaagctcccatctttaatagcttttgtccaattcaggatctcattcggcatcatccatagctcgtcatgtaaaagaagccaattggaaacgaactcctcaagaaacgcaattgattcctctgtcgctatcggagcctcgtcggtttcatcagatactgctactttcttcaccggaagcttcaaagcacgcgccaaatcggcccggttgaccaaaactcgagccccacagacatagctacatcgctgaggaagattgaaattcgcaatcaattgagcaagcaaatcgcctcgtataaaccgatcaaactccatgtgaacgaaatcccacaagccaagccgctttaaaagcttctcgtgactcgaaaagtccagacttttaacgggtacaaagggaatgggcctgagcttttgtttgagaacttcaagcttctgcaaggacttcctctcctgaacccttctcttattaccaatcttcttccgcttcgcaccacgacgatagacagaggtaatgctgggtgtagctaaggcagtagccgccggtgagggcatgagattgctctcgctggttcgaggagatggagccggaaggtcttctgagtcgtcgacctcgtcgtcgttttgatcgagatcaagagggttttggcgattgcctgggtcttggtgggtctgatggtgatctgggttggggggattcggggattctagagttatgattttagatgattgagagggagtcggggattctagggttagggttttagatgattgaaattgagaaattgagtcaacctgagagtcatcgttttgaggtggatcagggttttttgaatgcaaggtttgatcttgagactgagaatgggttggagaagtcatggcgaggcggaatttccctcacactaaaatctctcccagttccacacagtcaaagtcctcacacacccagctaagctactaatttgatctctcgtgtcgtgt

SEQ ID NO: 263316 - DNA, 1335 bp, Cannabis indica
tacccccactccaacaagaaataaccctccgatgcgaacacttccaataaaaggataaatgaccatggtggggaccacaataatactaagaaagggaggactaaccaacctcttacacaatcttcacaaaattgactgaaacgccagaaactattttcctcactaatgagcaaactgtgaattttagagttccggagccaatgaagggaatcagaaaaaatcgagatacctcaaagtattgtcgataccacaaagacgttggccacacaaccaatgagtgcaaagccttgaaaatagaaattgaagatctcatccaagctggaccacttgctcgttatacgagcaacaagcagggggcaaatgcccaagcacaagggcaagtcaaaactaatgcccaagctgccaaacagtgcacaagccccaccataggaccaaagtgtagatatggcaccaccattagaaggagatgatatcttagtaattactggagatccacactttgctagaataagtaatgaggcccaaaagtgctacattaatgaattaaaaagtagtaacaatgcataagtgccaccacctcaatgtcccgcaaaacaaccacgtacaaaaagtctcattatttttattggggaagatggagaccatgtacagattccacataatgatcccttggtgataaccacccaaatttccaaccagagagtggggaaaatacttattgatgatggaagtggggtcaacttattacacaagtccacgcttgaaaagatgggacttgagactcacgatttgaaaccatgccccacatatctatatgtatttactggcgaaggcataacaagtattggaaaaataactctccccttcacaatgggagaggccctgcaaactgtgacaaaaatgacagaatttatcgttgtggacattccatcaatttacaatgtgataatgggaagaccattacttatcgcattaggggcaacaacatcagtgagacatttggctgtgaagtttccaacaaactatggaaatggcatagtacaaggggatcagttggcagcaagagaatgcaacagcatggcaatgaaaggacaaccccaacctgagactcaacttttccaagccacagcttctgaacacgcttgccaagacaataaaagtggctaggagaggccacgtggagcctcccttattagattttatttatgttcccaagattgaacattgttatgggttttagtttttaagtaccatttcaaaagtacgacatttaaatttcttttttagacaattggttgctgattttttaataaatgtttgtactttttacaaaaa

SEQ ID NO: 263317 - DNA, 619 bp, Cannabis indica
tttagggtgttaatcaacatacttgtgagtagatctaagatcttggtaaaataatttccaacatgagctttctcaagttattttcaaacttaacagattaaagaaagttctaaagaagtttaataatgatcaagtgggagatgtgacacaacaacatgaaattgccctttccaaaattcatcaaattgaacttgatttacaacttaatccttcttctcttcaacttttacaagaagaaaagattgcaaaagaaatccttcaggttcatgccaggaattatgcaagtttcttaaagcagaaatcaaaaatttcttggttgaaatttggacatgaaaactcaacctactttcatgcttgtctgaagaagagataggaagagaacataattgcctcttctattgatgattatggaaaactattgggttttgtgccctaaataaaactcatttcaatataatctaatttactaattaataaagatcagaaactacattttatgttgcatggttcacatgatttatttcatgattatatttaatgtataaactctattaagtccagaacatatatatttgttcatgattatagtgtcgtcagcacagtggaatataatcatgat

SEQ ID NO: 263318 - DNA, 617 bp, Cannabis indica
tatgtttttaggtcttaacaacatccaaatacaaaggctaaatccaaaggcttggaagctccaaattatggatatgtttagttatattgtaatttcttaaattttttgtagtttatacccattttgatttagttaagatttttatttatttcctgtgtaaattaagattatattgtaaaataatttatatttttagtataattcagtgtaaccacataaatacacagaaatttattgttattattgaatctaatatttattattttgcagttttaattttttttaagaaaaacaaatataaaatatataatatacattatttattttgtttttaaaaaaaaatatgatatggagacgttctttgagtgtggttgttatcaagaaaattattaaaaagagaaaagatatagatatagtgacactctgtgagtgtggctattgtctttagagtctgacaatgtgagtttttaaaagtctatagtgacgcgcggtgagagagtctaaaatattttagtgacttgtactaagtgtcactgaaaattacatttcctgacagccacattagtgacgcgcaatgaaatgtcactaaaattatttagagtctctcaaagtgggtc

SEQ ID NO: 263319 - DNA, 737 bp, Cannabis indica
gagctcattaaaagttttgggctctgagtccacaaagttgccacctcagggttgaggtgtttggcacacattgaaaccgctgcttgttccaatatcctttctggacattggagattgagatttctccacctggttatgaactcattagcgctttcactggtttgttgcttcgtttccaccaggtcatggagacttattgtcttcgttgagctcacgaattgtgccagaaaagctttttgcgtgtcatcccaagtatttatcgatcctgggggtaactgagtataccatgtgaatgctacttcttttaacgattgcacggattgtcgaatcaatagtgcatctgattgggcagattcaccacatgcagaagtgaaatatgcgaaatgttcatggggagaaccattaatcccatcaaaattttcaaacttttgtctgacgtcgtctggtggaaatggaatttggtcatagtaagtcgggtatggctgatgatatccaagaataggcattgtgcagcctcatattcccgaatactctccatgataaaagccttcagattctactaaggttggacaccagctagtgttggttgcacattgagtggtggcgattgtatattgcctataggcggcgctgaagacgaggaatgttgcccaacctcactctccttttgtctcatattagcttgatgagataattgtgttgagagtcgggctacttcttcatccctctcggccaat

SEQ ID NO: 263320 - DNA, 640 bp, Cannabis indica
taggagacctggtcgaagtcaaacaaagaccaggcgagcctctccgagcatacatcagcagattcatgacgaaagcaactaaggtttctacgggtaactgaagacggaaagttattcgcgatactggaggcattgaagtcattggtgagctttggaaggacataaggaagaacggttcggtagactcaatgagcgattttctcgaccgtgctgaaggcttcatcaaacttgaagaggctacccatcgagcagaaggtgagcaaaaacctagtaagtcaaaagctccttccactggaaagttcgcccaactcccccattacccaagtaattcaagctcaaacggtaaacgttccagcaacaacaatagacaagggaatcagaagaagggaaagtttaccggcaaaactgaacaagctccttgggagaatcagaccaagtacactgcatttaccatcttgactgaggatatagaaagtgtttacatggccgatcaaaattagaggggcgataataaccaagacttgctacctccaccagtagatgggcatctgcaagtcatcattggaggcccacacatagctggagattcgggcaaagttggggagaggtatgcccgaacagcacagcacgaacaagaaga

SEQ ID NO: 263321 - DNA, 570 bp, Cannabis indica
ttaataaaagaattttgtatttagttaaagaaaataacaaaaaaaaatatttcatgaaaaaaaagaagggtataaatacctctaaaataattgattgggagtaaaattaaatagggtataactattaaataatcagattttcttttttttaaaaaaaaaaataaataatgagatattttttttgaatggataaataatcagattttaatttaaatattttagtaaatatattaaagggtataaaaagaaaaaatatgaaaacctaacccccaaaccttatttgttgttcttcttcctcccgcctcttcttctatcctctttctctggcctatcttccgagcagctctactcattggatagaagtgctccggtcaccctaggtctcaatcgccacaaagatccccacaccagaaacccccaaactcgacccatttcctcccactcgatcccacctttctccctctcaccatccctcttgtctgatttgggcacctcacaagtcttaatgatttgggacacttcaacgccttcaacgcctactaaacttggcttggcttgttagcttcgcat

SEQ ID NO: 263322 - DNA, 676 bp, Cannabis indica
tttatttattatatatatatactcggtttgacttagtcaaaccgagtcttcacattcttccccccttaaaaaaatttcgtcccgaaatttgaaagtgcaacctcaagttaaaaattaaacaagtgaggatacttcatatacatctcagactctaaatcccaagtagccccgtcttctctgtggttcttccataagaccttgactactagaatctctctgttccttaacacttttaactctctccccaagattttgacaggttgttcttcataagtcacatcttcctgaagagggatagcctcatactcaataacatgtgaaggatctggagtatacttcctcaacatagacacatggaacacattatgaacatgtcccaactgtcctggtaagtttaattggtaagcgacctcccaaatcctctcgataacctcaaaaggtccaaatacctcagggctagcttacccttcactccaaatctcaatataccacgcataggagtaactttcaagaagacataatcaccaacatcaaactcaacttcccgtcgatggagatcggcatagattttctgacgactctaaacaaccttaagtctttcttggattcccttaatcttttagttgtactagggataatctggggtgcaatagtgacatgctcatctggttctgcc

SEQ ID NO: 263323 - DNA, 507 bp, Cannabis indica
gcataaacccaacaagctccacatactaaaaacttaaatgacaggtatctcaagttccccaaactcagatgcttaatcaaaccataacaatgattagagtcatcctcccactgaaagtaagcttcagtatttggatgaagatctaaccattcttcatttttcaaaacctaatctatcttcctgtaaattctcacccattgtcttgattattagttcagctgtaatgagatccacttttcctcatttcacttgctaggcctaaattaaggcatttatttgcctcccaaatttccccagagctaacacactttccacttatttgatccccatagttgaaaattgagttgatgttcccacaaaggacccaaggtttaactggcatggataaacaaattaacctttgccaaagtacttgcctctctgtctgcatattactctcatagactattgttaggcaaaatgtgacagtcagtagcccgtgatccgtaaggagaaataccgaataag

SEQ ID NO: 263324 - DNA, 891 bp, Cannabis indica
gtgagtcctcaatcatagtgtgtaagactgtgaagaatccaattcaagtgaaggagaatcgggctcagatcttggtgatactctgctatagaaaggatacaagggttttaggatgttaaaacaacatacaaggtagtaaatctagatcttggtaaaataatccccaacaactgacctcagtgccatgggaatgatttactttcatgaaatatggatttaaaacgatgtttgtgtttatttggatggtttcatgttggtttatgtgcatatttgatgattgtatggaaatcacaatgtatattgtaaaatattttttgtttcattctgaaaatattttaactggaaagtagacgaaaaattaataaatttcggcttttcttgaaattaatttggattttttatgaattggttataattttttaaagtttgaaaaccaaaatatctcaagggtgcacattcgcgcgcgaatggggacacgatgtgcggctcgctcgaaaaaaaccccttcacatgaccgtgtctcctcgcccatgaaggctgcatgtagcctcctgtctcgaccaaaccctccattctgtgcgtgcagggggtatgcattgcatactcctatgccccaattttatttttgtgataactttttattaaaaaatcatttttcattgaaataaaattcaaattttggtagaattttgtgtagaatctgaattttcaattaaaaatttaattatcagaataaaattaatttttattaacttttaattaattaaaattattttagatattagtagcctttgaatttgaaaatttgattttttaacaaactagccttatggttaattttaaaatttttgattttttttattttaattataagatcagatattacttatt

SEQ ID NO: 263325 - DNA, 2975 bp, Cannabis indica
taaagcgattagataaaataaataataaaaaataaaaagaataagataaaaagaataccacattttctagaggttcggccccgtgagaatggtaatagcccactcccctttcagttgtattaacttgagaacaagaatctctaaaactcttacaattgatccctgagtaattctctcttagatcacttttctctcttgagtgttcttctgaactaaatttccgtccccctcaatagtaaaattatgccactatttataggagcttattacatgaagagtggtttcacttaatttataataaataaaataaaaaactgcattaatttcataattacaatgcaaagaatgggaaaccaaggtgcattgcctttattctctgacctaatcccacgaatgtaaggattatctttgtgtcttggaagcgacgaggcttatctctgaaatttccaactcacatatcctgcccagtgcatgtgatcacgatattgttcttgggtcaaatgtcccttgattactctgctcggacatcctgccatatgctgacgaccgacatttatatcaacctttgtgggctgctaggagtacttccttctgcccaggtaggaaaatgtaagacacgtgtcatccagctcattgtcacgtcacagtgcaaaaaataggataacatttccccccagactccgcgggaccgtctagtcgcatgtggacttcactcggtcaggagtcttatccggatgggtgatgcgtgtctttgatggttggtactaatctacatgacttcgattgacggtctcttcagtgtctaagcatttaatacctcttgaaagttgttcctcaaatcacggattgatggttgggtgactgcatgcgtgatgattttacttcttgtaatgagtactaaagttcacttttggggggaaacacaaatatttaaattttcaaacatgatttttccttttctgattgcttataaaaggagatcaaagcttttggtaatccttttagccattttcactcttaaagaaccagagcaaaagttttcatctaagctttccctcatatttttcaaagaattcgctggaaaacctttgacgataacattccaagtaagtcaagaaagattcgaatcagtgagtaagtcattcatcccttttttttagataattgcaatggcatgtatgcattatttttttaattctttgctatagattttgcctattcttgaattgttcttggctaattgtagattaactagttttagggtttggaagtttaaccaacatttaactataacgtctaattatctgattgcgattcaattttgaccttaaatcgttcattcccattggttcataaggttctgaaaaacaccagattccaactgaagttttgaactactgggattggaaattccaactctgggtgaaatcttttcttttgattcttgattaggcctggttggcatataaaatctatttttcatttgttacccaaccaactcttattctcttgtctcccaccttttgtagtgaagcctggtgatttctagggaggcaagcatcatattgaccaggacttgcttcaaattttgtacaaagatcgccctcatcttcgtgctaattcatcttcgtctggtgatgatcttttgaattctagttttgaagactgggaagtgagcaacaagcatacaccttccccggagctcgaggtgcaacatcactcgtatcccaaccaaatacgtggtgaaggatacagtcgtttcatctgggaactgaagaaagattggaggcattatcttcctacgaattggacatacagggtccatccaagcatggtcgacactctgcccgatggccgtccaatcccaactgccaaaggaaactctattgatgaattttttatgattgttggaggcacacctcttacaaaactctgcttagtcgtgaaatgatggcgcagaccaagtagattgttagaaagccttcatcctctgacccccatattgctcggttggctgccttgtccagggcaagatccgtcctgctactcctcctgaggctgggggcaaagaggaagagggggtagcccgggtgctgccctttggaggcttcaatgaaaagggggaacctgtctctgagaccggtgatgtcttggaagctagcaagactatgtagaggaggagtataccgaggctcatcccataaacaggaggggtccaaggggagctcgatgggtttctccaccatccattttgactttcaagagattatccaaactctttgaggatggtctcctggggcaggtcgaatgcttccttccctctcctgggtagctagcaacagaccctagagaaggttactgcacgtggtcagttcctcacaccaaatagggtgcaatgctgccattgcatctatatttcaaggcgatagccaattactacaacatcagtccgacccaactcactcctaagggcattaaatatttatccgctctgttttgtgttgtatgcttctcaaggatggggtcagccatccgcccatgatactaactggctgtttgacctgaagtccagtcccaagcaaaacagattttggtatttctacttctcttagatcaaagaggcatgaggtgaccaaaattggtgttatgtggaggactattacttcatcaagggcatggacaccaaccataccagttttcaacacattctttcctattgccgacctccgttcactctgggacttagagaaagagcccaagagatactccaactcccctcggatgcttgaaatattttcctcttggccaccgaggccaaatttattgagtacaagctctacccatatgtaatggacaaggggtcagacaggtagcaagagagcttatgccagcccaagaagaagaggtcaaattcgaacaggaggctttgagaaagaagaagaagaggaggcccctcctgttggaaattattttac

SEQ ID NO: 263326 - DNA, 1144 bp, Cannabis indica
aaaaagaaaagaatggtctcttaatcaaactaatgactcttaacatagttttcatcttgttagacaactagagagtttgaggtttcttcttcttcttttcttccttctaatttttgaatcctattcttcttcacaaacaaattcaagccttagtgattgagtgcatgcccacccatagcaagttagtcctcaatcatactgtgtaagattgtgaagaatccaaacaattgaaggagtgtcgtgctcagatcttgattatactctgcgacaaaaaggaacaagtgttagagatctcagctgaatgagtcatttaattttgctccaaccaatgtaaggtttcttataccttttatgtgtttattttcatcgttttagaaatttatatttaggatattaaaaatatacttgttagtaaatctagatcctagtaaaatatattcaaactattcttattttataaatatcttcattgtctcatattgtaaacactagtcgaagtttttatttttcgatgtacaactaaatgttgcatttaaaaatacttatctatcgagatctaacactattatcgatgtctaatagatgacaacaatgaagattcgaaattgaaactgtaacaattaataagagaacacaacacgattcaatataaattcatacacaataagaaattatcatacattttgcatgtaataaagacatgtgaaagtacaaaacaaatacatcttaaataattttcgaggtttccaataaactgatacagtgtcccgtttaggcgagagtcaaagatataattcattgaatagagtagtcaactcatctaaaatggataccattctagcaaccttttattcgatcaagataagaatccagcattgtcccgtttaggcgagagtcaaggacattctatcttacgagcttccaccttttttttatactttgtaagccctactcttagcaaccactcttggggtggacgttactaagaataaaagacttacaataatacttatctttcgggattctatggcgttaaattgctcattgttatacctgaagttcagctagcacatcagaggaggacacctgtcaaattgggaagaatacaaaccagcaaatggaattatatttgaaaatggaataa

SEQ ID NO: 263327 - DNA, 532 bp, Cannabis indica
aataatgcagaagttcaaaaatgtagttgtatctcgagtaccgcgtgctcaaaatgcccacgcagacgcattggcccgtttggcctcaactagagaagccgaattactcgatgtgattccggtagacgtactggctcacccaaccatagatcgagaagcaatcatggagatagatgatgttcaggagattacctggatgactcctatcctcgcatatcttgagaaggggctcttacccgatgataaagtagaagcgagaaaattgcgacagcgagcagcccgttatgtaatatatgaccaaaggttgtatcgcagaagttttagtcaaccgcttctcaaatgtatcagtggagaagactgtggttacatacttcgtgaagtacacgaggggatttgtggcaatcataccggaggtaattcccttgctttaaaaattatgcggcaagggtattactggccaacattgcgacaagatgctctcgcgtttgcaaagaggtgtgatagatgtcagcgaatagccacttacacccac

SEQ ID NO: 263328 - DNA, 891 bp, Cannabis indica
ttggttagaaaggggagttaagtcccaggttaatcagtccgtttaagtttttagaaagggaaggtcgggtaacttattagctagccatactccctgttttatttagagtttacaacatatgcttcaaggttttagaaatacaaagtggaagaaatccatatacggagttgggagaatattgaaattcaaacagatttgttatatgaggaacaatcggtacagatttttgaacagaaaagagaaagtgttgcggaaccaagactatataactagttctagtgctgtgaaagaacaataagattgaaaggcaatttttaatctgaagtcacagtttcgagagctgtgtctcgagttgtttgaataaatttcgaggacgaaatttctataaggaggggataattgtaatatcctgagaattatatcgatatttatttggccatattttattaaatatgtgattatgtgggtattagagtaggattataatcctacttaaactaatcatgatttgattagggaaatatgaattaatgaataataaagcgtaatttattaactacggagattgtattggaatatgtgggtatcgtagataccatatgtaatatcctggaaaataaataatatttaaatagacatagtttattaaatatgtaattattttggaaacgaagtaagattatgatcttacttgggataattattgagaatttatctaatgaaataaaatattttcaggcccagcaattgtgaaaatttagcgctgtggttagtaatgtcacaacattaatggaagaattattttgggaatatttcgtactacgttagaaatattggaatgtcggtttaatggaattagcaaaattaccaaaatgtccctaggttattttg

SEQ ID NO: 263329 - DNA, 952 bp, Cannabis indica
aaattttgcatctcattttttaatgattacttacataaattatatttctacaagagtaaaaatttagatgtttcaaagacaatcttaagtagataaataatgcattttgcatattaagatagtgagatcaaatataaagtggagaatactacattaaaattcatgggtatggataaactcacagttcatttgcaaagtttctttaaaagcatgggttcattaattgcccaatacatattcctagtacacccaaataatggtctgcgacagttttaagaaactaagcattgttggacatggggtggagcctacatagcaaacaccaaacttttataaatatttgttgattgatactcttcaatgggagtgtacatatcgaattatgttctaacaaaaaatgtttcttaaacgtattttgagttgtgataaggctggaacctgactttatgatatgtacacattttaaaaatacccatgtacagttagagtacaattgccaaatgaaagaactgggcccaaataccataaatgatcatttcatcataaatgctataaggtataagggtaacatactttattatccatctcacaatactagaattgtggaattaagaatattaacttgatcagtgggagcgatcaatctaggaatctagtttctaaaaaagatcatttgttttatcaaacttctacccaacgtattatattcattatgatcacaacaacccttacatttaatggttattgagaatcaatgactaatcattaataatccacaagttattgataaaattctaacaagttaagttatttagtaattgcttacgattgctaaacaacatacatattgaaccatttgtcctttaagaaagtttgtttgcttcatccttaagatgatttattagaaaaaaaaacggaatacagtggttttagttgattactaatatgtaca

SEQ ID NO: 263330 - DNA, 789 bp, Cannabis indica
actaccaagtacgtatattaaatcaacgtactcgccctaaaaaaaatacaacgtacatctatagattaatagatatattgttatgggtatacactcattacatgaaatttatttgtacaatataattttatattaattaatctcacatattttaataaaaaaaaagttgataatgaatatcagtatgatacctaaaactacatagaattgttatatatcataccgttgatcactagtaagatacttaaataatctattacactgttcaacaccttaaagtgttttaatttaataataatattaaaaactattgattaaaattttagctaatatatataattataaatatatatatgcatgcgtgaacacataattgatcagtgtatatattgtcatataatatgtatttttgtgtttattatatgctttgaagaaaatataggtaataactggtaatcagtttgttaattacgcaggcaaggtttagcttcggaacaacagcatatatgtgttttatgtttgcagtgacgacgccaatgggaatagtattaggaatgatattgttctcggcgacggggtacgatgacagtagcacaaacgccttgattatggagggtttgttaggctctttctcttccggaatactaatatacatggctcttgttgatctcatagctcttgatttcttccacaacaaaatgatgacttctgtttcatggttgaaaaaggcttctttcattgcacttgttcttggctcaacctcaatgtctatcttagccctttgggtct

SEQ ID NO: 263331 - DNA, 567 bp, Cannabis indica
gagtacgagcgatgcctgtgccatccaccatgaagtactcatcagcaaactgcccaatcttgctgatggtcaagtcgtccgtgcccgtcaatcatttgaagcctggttgagagaaaaagaagtaccccgacctaccttgcttggcagtggacttcagatcaaagaaccaggcaacttcgtgaggagaaggcgtaccccactcctgggaagcgtagaggacgaagagggtagacaaatatttgatgcccttaggagtgaactgggtcgggcaaaggcaaaagaagtccaccacattcttgaagtattgatgcaaaggcatcaatgccccttgctggccatgggcacccgaccaggcgcacatccccctttcagggtttgtggcataattgttgtgggcgggaatgtagtaatctagttcgcccaggtatccgccctggtcgagagtccgaaggcgcgcctcagtaaccctcgacggaggtttacccacctggcgcccaaggcacccttccttctatgaggaaccacagcagcaagttcctcactcacgtagtctacgccctcaaccag

SEQ ID NO: 263332 - DNA, 1149 bp, Cannabis indica
gtcctaactgactccgacatacattcaactgcgccctcagctcgcagtgctttttccaccatctcagcataggtggtcttgtcgtctgtagtgatcataaggtcatgcttgatattcacattaagtccatcaagatatttttccttcttactgaaatcggttggcacatatcccgaggacaacctcgccaggcgatcaaactaagttgtgtattctgtcacactcatattttccttctgggtcaggtgggtgaactctttcctcttggcacttctaacggcgtcattgtagtatttcgcattaaagagttcctggaacctttcccaggtcatagtggtaacatcatgaatctagcacaccatgtcccaccagactaaagcgtcctcttgaaactgaaaggtggcacacaccaccctgtcattcccggtgacacccataatattcaatatctttgtaattaccgttagccactactcggctttcatgacgtccggacctcccaaaaaaatcggaggtgcctgcttccagaacctttcatacaagggttccattctattccccgctactactatctcggcctgagcaacaggggcaggtgccacaggaacttctggcacaggcactgcaggagcaccctgctgtcgcagtctttgaatctcattatctatctcctctattctggcttgcatttcagcaaacctaacatcctaattctgggcttcttgattggcttgggcagcctgggcagcctgtggcgggttaacatcaccccgaccgcgagccctgcccctaggacctctaccacaacccctaacattcgggggaaactgagctccttgattctgatttgatcggaccgagttgccctaattcctggtgttccgcctggcgtccatctagtctaaacagcctacgaaaccaagagtttacacatcaggtcatgatcaacgagagcttactaatgcaacttaatttggaaattaaaaacatgcgcctattctactatcaggctactaacatgcttcctatcaggcttttcttatttcataataattaaataaactactaaagcaataaaagcttactgaaccgtagaacgagctaactgctgatgatgattgtacatgtcatgacgatcttcggaagaca

SEQ ID NO: 263333 - DNA, 1359 bp, Cannabis indica
tttgcttttcttttctattgatttgcacatgtgattgtgtttaccatagaccaaatttattcttgatgatgaacccacatttacattttaaaaatactgcaaaataataaaacatgtcgtgtcaatccaataaaaaatataagctataactgtaattttgttagtttgagtccgttaacttagataatcactatgatgataacacatgtcaccacttaattaagtcatttcatctatatatatgacatagcccaatcaaatagtaacatgtgtcattctagtcattaccaaaagttaaccattcacagaaatagaattacaattttaagaagtttaagtagttatctcagccaattactaacatatataaagcttagctagttatgctcaaaatattcctattcttttaatttccccaacattgaagtgctctatgctcacaaactgtcttatcattcatgctaactattattaattccagtctcaaatttctgattcatatataatcaattgagatgatcgaaacttttaattccactctaattgatcaatagaaactaactccagttattaagattcaacaaatacttaaacacttcaaaactttctgaattttgattctatctatcatccattctaatctcaacaatagtaagaatattaattaaacaacttctctcttgtaattgttcatgtgatcaattaatgagaactggatatcattagcaaaaatttcattatataattaatgttgggttatcattataattaagaagatataattgggttatagtcgagaactgaatatatataggtacgtataagagagttctatacaagtagataagactaagtagtttttgttcctatgtgatattcaattcaataactgaaaatgaaaggtaataaaggtatgaaatttttcaagttatagaaagaaaaagaacaagaaatggtatatgatatatctaatcacaaaggcaagtaattctttaaacattttaattaattaatataatggcttttggtcaccatatcatataacttcaagtgtatatatagtactcaaatcaaatgaaaagtgtaaatatagtttgtaaaacatgttatatactaatctcttctttaattttgtgtgaactaatgagctatgtgagtaggagttactaatgggtactcaacatgtgaagaagaaattgaatagttatagttgcaattagagtatgtgaagtatagatatatatatatatatatatatatatgtatgtgtataatcaaagaagaataatgtatagctaaatgaatttgtgtatgatatgatttattatggtgaagatataaattgatgtaatatgtaac

SEQ ID NO: 263334 - DNA, 614 bp, Cannabis indica
aaatttttacggcacacttgaaaaaattatggagttcacttatttgaaagattgcagtgttctcttatttttttgtaagtggtttgacactaacgggagtagaatggatagtgacggtgttattactagcatctgcgtcaaccgacagtggtaccaaaatgaaccgttcatacttgcatctcaagcaaaattgatctactacattcctgatttaaagaacggtaaagactggctgattgtaaatgagtacataccgcgcaatgtttgggacttcccggacacggatggggagacaccctttgtacacgaatcagctgaaaccgttcgttgttcaacttccacagttggatgatgttgactatgttcgccatgatgtggacccaactgaagttgcaaacatccatcgtgtgaattcacagcctcaacaattagatgatttcattgtcgatgatgacaacgagggtctaaataccgaagaagacaactccttagaattagagagtgacagtgatgataatgctgtacatgtaactgatgatgaggatgatgaattgtaattgaaatagtgttttaaataaaataaaaattacaaaccttctactttaatatgtttg

SEQ ID NO: 263335 - DNA, 1496 bp, Cannabis indica
ggtttgggtttctaaaatggtttatccggtcgtttcaatgtgggttgatatacgatttattgttgcgatttaggttgcaacgctagttgcaataggagactctatgtagaattccgtaaaaatgcaaaaaaaaaaaaaaatgttttgaagtgtaaaaataaaaaagtctctaaaattataagaatacatttactacatattattttttaaaaaatgtatataataattaaattaagttatataattttattagttgcatactattatattgtaactgttgaccgaggttttcggcaaccaattaaataatgtatgagaaaagctgtagaaagtgtaatacatgagatttttatgtggttggggcattaatgagccttagtccgagtcttttgtatttatgaagagtgtttattacaagaatgttcttggtggtattttttttcctattttctctcttcgattgcttaaataaaatcgatcgaccccttttcagtctatctgtggggtatttatagtacttttctagggagatccctaggaatggatcacttgtccttctgtgttagcttcataggggcacatattcctagcaatacaaaataagaaatacatgacatataccgtaggtctcttaggagttaggtggatataatcttttatcctctcttgactgatgtgattcctcataatgtagccatcactagactcttcgattgttgtgtaatcgccgtaaaagggggcttacgccatctgtcacgtcttttatggaggtttcaacacgtcttcccccatgcgccattaaatgcgaagtgattgttcaagtaatctctttacctccgagaactttattagcatggctttagcctcccagagagtaaagatatgtcttatgctctcctccgggaggcacattccctgaggtgttccgtttttgtccaagacttagttgattttcgtgagtgatggttctttgagatccacgtgtcacccttatctgcgtccacatgttttgggaaaaactaaaggcaatatttaccccccaagctcgtttagtgaagggtaaatgaggcttgtttgatgcctccggttagcttgttgatagtactgcacgtgccttaggcgcatgggttgtatttatgatggtcatcattaatatttatttcttttgcaggcaacgattcgcttcccgtccattgagaaactgacgcatttgatttgggtactcaaacgttttcaaatgccttggcccccacttatctcacccgttggatttgtagaatgcgaatcaattacaattcccaccgtacgatggtgtctgatcccagctgtcttgcaccttttctggtctataaaagccaacatttttccttcattgggttactgttgctatctcgccatttcgacccagaaactctgagaaaatttcagaaaccatagatttcttgctgctatttcttcgtcgttgccagttcacattctaccgtcgatcatcatca

SEQ ID NO: 263336 - DNA, 457 bp, Cannabis indica
aaatgctagcgagaatggagtgtgtcccgtggcttttttctcggtagttctgagggcctagagcacctgaggtagcttgtcaacccatctggcatcgtctaacttcttcttgatagtatcctttatagttttattaacggcttccacctgtccatttgcctgaggcctagatactgacgagaagcttttgataattttattcctctcacagaattcagtgaacaagtcgccatcaaattgggttccattatcagatactatctttatggaaattccaaacctacagataatgttcttgacgatgaagtcaaggactttcttgcaggttatggatacaaggggctcgccctccatccatttagtgaagaagtcgactgctaccactgcatacttagctcctcctcacccactgggtaatgccctaatcaggtcgacccccatatagcaaatgggtagg

SEQ ID NO: 263337 - DNA, 511 bp, Cannabis indica
gagcgaatacattgcaatcagcaacgggtggttctttagttaggctagtttgtccaacgacttgtctaagttcggctaactcgagatcttctcccaagtccacatggggctcgccagttgcaggttcaccaactctaggtcctatttctataacatagtattggagacaagatctggctattgttcctaagcattgtcgaccatgagtccttccttcagtggggggcaccaatggatttctataaataaaaaaataaacagaaacagaccaaaactcacttttttacaaaatgaaagaaaaagagctattttattacaaattcgacagtgcctgctatgaaataagaaaaaaaaattataattatattgagttagaaaaccaaaattaaagagaaaaagaatgaacaatttaagaaaatttagacttaactctatcaaactaagacaacgatattgaagtactttcttcttgatacaatttcgtactttttttttatcttcttgtagatcc

SEQ ID NO: 263338 - DNA, 627 bp, Cannabis indica
gtgagagttagggggcctttgtagtgggtacgacatactgaacccagccccccctcacatgaactaccccaattgtgaaggcccatttgccttatttaaataattgtattaggttaattatattagtctaacctaattaaaattgaattagcaacataattaacttttaaaatatatgaaatttatttttcattgaatattttaaagttaattttagaaaaacacttagttaattgagatatattctagatagttatttctagttacttattattctaatatttaattaggaaaatattttaagttggaaattaattgttttgtatcaacttaattaagaatatttaattcttggatttaatacatttaattaaatcaaaaattgaatatttaagttgaacgcattcttgatacttaaatattattatttttcagaatatttaattaaatataaaattattttaagttagaaattttaatttcagaacaacttaaatttgaataattttcaaaatatattttatttttattttattaatcatttttttacatagaattcgaaaattacattttttttatttaaatgcagaaaattttgaattttttttttaaaaatagattaaagtt

SEQ ID NO: 263339 - DNA, 1050 bp, Cannabis indica
ttctcacctctcgtgtgttggaacattagcatgttgacgttaatggggccaatgcagaatgaaagtatcagcgggaaaagatatgtaatggtcttggtggatgactactcttggtttacctgggttgaatttcttagagacaagtttgacacatttggatcattctttgccttgatactgagactgcaaactgagaaagactccaaagttggaaaagtctttagactgagaagtgaccatggaaaagagttcgaaaattcaatattctcagagttctgtaatggaatgggaattcatcatgagttttcagccccaaaaactcctcagcagaatggagttgttgagcgaaaaaacagaactctacaagaaatggctcgggtcatgatgcaggccaaggatatttcaaaacgattttgggctgaagctgtcaatactgcctgctacgtgtgcaatagagttcatcttcgcactggtacctcacaaactgcttatgagctatggaaaggaagacctcctaacgtgagccacatgcacattttcggatgtacgtgttatgttctgaacgatcgagatcacttggccaagtttgatcccaggagtgatgaagggacatttctggggtactccaccaacagtcgagcttacagagtattcaacaaaaggactctctctgtagtcgaatcaatgaatgtgaaatttgatgatttagaaggacatgaagaagtgtggatcgaagatgattctcctgttctctctggctctagaccagtcctcactaagtatcctgacacacctacagtgtctctaaatacagcaccaggtgtatcaggtgacaatcaagcaagtgtcagtgatccaggaagaggaaatgaagttgatagtgccctgaccaaagaaccccaacaagccaaattacataaaaattgacccccatcctgggttgagaaagctcatcctcaggccactgtcataggaaatccgaatgataccatggtcactagacgaaaactgtagaatttgttagcctttgcctgctatctatcacagatt

SEQ ID NO: 263340 - DNA, 808 bp, Cannabis indica
aaaaatactgtcaggcagtattttttacttttatactgtgttttttttataagtttcgtactacagtatactgtgttaagtttttactggtgttctactggtgttttttagttgttttattgttttgagttgttctattttgtgttttactagtgttttataaaaacacagtatttttgaaattttttatgtgtgacagtatttttataaaagttaaccaaaattctaatatttgtgtaagtttccctttttttgggctctgacctaggtagatccaaagtacaggtctagttcgaccatgtttagggttaggcttgaggtagaatgctattacttggtactacatcacacaaaaagtgaactcactacaagcaagaaagacatgacacgtaaacatgtataatctattcttaaagcgcaacatgttaacaaaaaaagtcatatttgataatagcaatagtgataatttgagtatttattagtaaatattcaaattttaatacttttaatgaattttttacatgattttatgttaaatatttttgaaaaattatataaaaataattaaagttataaaaaacacactctaattatctcattaattataagaataaaatgtaaaatagtagagtataaatttgagctagtataagaaaacagatcaatttatgtaaatcacgtcacgaatccgagcacaatacaaatctcagcacagaatgacacgtcccatatttttttatggcacgaaacgacacgatacaatccgtatttttttatgacacggcccgtaattttttatggcacgaca

SEQ ID NO: 263341 - DNA, 621 bp, Cannabis indica
tattaaactagtttataaaatcacacacgtggcatccctatagattagggcgttacatataatgtctcgagtttctttctttgatgtaactccgggattgtagttacatcgtaatgacagaagcccccttgagcgatactttgccaaaaatggtgtgcctcaaccaacagtaccataaccaggcctgattgaaggcccaacgagcgtcgacggtacagatggtctcccctcaaccaccactatactggatcagtttttgaccaacttcatggttcagcgaaaaggcaagggaactagtcgttggcaatggatctagcccttgttaggctatttttagcctaagttttgggtcacattttatagttatttttcttctttattattatttttggaatagaattacgcttgttttctttggtttcaggtttctacacttggaatgtagaaattggacaaatttcggaaaatagtgatttataaaatagagaaatttttgaaagaaaataaagctgaaactttaaacctaaatttgactattttctaatcatattttggaaaaagtcaaaacataaaagttttagatctcttttttatctttccaacgcatcttgaatcagctca

SEQ ID NO: 263342 - DNA, 867 bp, Cannabis indica
atttttttaattttcaattgttttattttattcacaaaaagtattattttaccagatagaatcataagtatagtttagtagtacttaatccaattccctgtggttcgacctcacttgcgtgagatactacttgattgcgtatacttgcgtagtaatcataattttcgtaacaagtttttggcgccgttgccggggaattgtttaaagattaatattacacaaaattatactaacttctactttggtatattttctcttgctgaatttctaacctttctcttgcaaaactgttcttatctatttcaggtattttgagtgcatgcgccgccaagggcaagcagttatattacccgttgaccctgaaattgagaaaacttgtaggagaaaccgaaggaacaagaggcaagaaagagtttcagcaactgctgaaacatcagaaatcatggctgctaatgtgaatgctaatgctgcaaataacggtaataatggtggtgccgttgaagatcaagctaatggccgtagcttgagagattacattctccctactcttacgggagtgcagtcatgtatcaggccaccgacagtggatgctaataactttgagatcaaacctgccatacttcaaatggtgcagtcctcagttcagtttggtggcctcccttctgaagatcctaatctgcatctctcgaacttcatggaactttgtgagacttttaaagttaatggagttagtgatgatgccattcgtctgagactgttcccattctcgctcagagaacgagccaagagctggttgaattccttgccacccaactctattgccacctggaatgatttggcaacgaaatttttgtcaaagttctttcc

SEQ ID NO: 263343 - DNA, 715 bp, Cannabis indica
tgaccttccccaggcggtgtgagattgtataacttactcggtatttccccttacggattacgggactactgactgtcacagtaacaatactaagattgtgtcatgaggcaacaacgagtaactgttacctgattaagtaacaaccttagtttgtcttattaaataaatatttgtcaatgatgaacattgtcgttaaatagtgtaatttcctaattatgaattgaatatatgattgtctgattttgattatgtgaatatatgtgcttatgtttgcatactgagatatactgtttatattttgctttttttattgattctttgtgactcacgggtgctttgtggtgcaggtaagaaaatgattgagctaggtcaacaatgagttaaaggtaccccgacaaatttacatatcagcttatctagctagcaatatcgagtagtcatgattttgatttatggcgactttgataagtataagtactttgttgtaaaaccacaatggtcttttataaaattttaaaagggaattcccaatcctattttttttttattcaagaaggaaaatttcattaattgactgaacaagtataagcaccaataaaatacaagagaacaagcttcaaactccaaataggagaagaagacccaaccacacaaaaactaactaacttgcaatcttagcaaatagttttcttcatgagtagtcagtttccttgta

SEQ ID NO: 263344 - DNA, 503 bp, Cannabis indica
aaatttctttgattagcaaagattgcacaatgattgaaaaaacactgtagcgtgccttaacattagggcgttacataatcaatagaagcccatcaagagcaactgaaggtaaaactcccgaggagaaatggtcaggtaaacctctaaatctttctcatttaaaagtgtttagatgtgctgcttatgcacatcaaagtataggaaaacttgaacctagggctttaaagtgtgttttcttagggtaccctgaaggggtaaatgggtatagactttaggtaaaggaaaaagggggatttaaaactatgaatagtagagatgttatattccaagaaaatatttttccttgtttacctaatgaaaagtctagtgcatgaatggaagatactaaccctgcaggtacaaacctaaaagttaaataggttcgaatcaggcggaacaaaatggagacacacctggaatggttcaggtggaaccaaaccaaaccagcagccatgacaatggtc

SEQ ID NO: 263345 - DNA, 635 bp, Cannabis indica
tgaaataaaacaattgcagaaattagaaattgtacgttagatggtggtcacccgacttgagtactttcaattttgtccgaacctttgggcgtggtccgcccaaaaggccattcacttaaaagtaaatgttctttttgtttagtacttgatatggtcatccgacctggtacttctattggtagtattttcttaaatgttccccattccaataccttggtactaaaatgagttgcattttttcatcacacttacccaatttgtatgctcctgactcgagaacttcgaccacctaatatggtccttcccagttgggtccgtgtacatgccgtactgtctttggtgtttaggaatacccttcttaggaccatatctccgacaaagaatttttgagccatcacttatttgttgaaataccgagctactttttgttgatgggccatcaactttaagtttgctatggttcgcttctcttctatttcatcaagtgattcggcaaggagtacgtgatttgcttcttggttatacgtcaatcttctatgggatggtggctcgagttctacgggcaacattgcttcatatccatatgccatggcaaatggagtttgtctggttgtcgttttctcagttgttcggta

SEQ ID NO: 263346 - DNA, 736 bp, Cannabis indica
atattcgagttttgaaagaaaaacgcacattgggattcaaaacttaccttagccagcctaggaggtcttgcttgagacctggctggccctaaggcttaatcatgggagttggccaactttagggttttaccctataaagctagcctattcatgcctcggtttggtgaccttggctagttcttggctgagtcacgggaccctggccgaccctttcaaggcttgagaaccttggccggcatgggagttggccaggtttagggttttaccctataaagctaaccaattttctgtcctcttttgacttcagcaagagtccatctctgtaggcatatacaaccttagtctcatatgtggtttccttggaaactttgtatgaaacttaatggtgagtatattatagtcgatttttcaacttaagactcaacatgacttggaacctataaggaactctaccttagttgtagcccgatgttggaattattttaacaggatctagaggtttcggctaggtataggaagagaggctcaaattttaactgaaggaatgagatgcatcatcttttcccttaagccatcactacctatttataggaaaccacctagagttaggttaggtttatttggcattaaaataatgaaaaaataaatggtaaatttgatatagagtggccggccatgaatggatattgggcctcactttgggattttgccattttctcatttttccatcttattt

SEQ ID NO: 263347 - DNA, 2905 bp, Cannabis indica
aataatttccaacaagtttatcaacaacacgaatttggttcttattccaaaaaaagattgtccatcaggggttaatgactatagaccaatagcgctatgcaacgtcgcctacaagtgtatatcaaaggtgctagctattcggctgaaaagtcttctgcctcagatcagttcgcctgcgcaatcggcctttgttcaaggaaggttgattgctgaaaatacggtcttggctaaataaattgtccattctatggaaaatagaaaagggaagaagggctacaagatgattaagctagatatcgaaaacgtgtatgacaagatgagttggggttttatcttggaggttttgaacaacttggaattcaatggaagctttgtaaattgggtgccaaaatgtattgaggttgagaaaatggggttgctcctaaatggttctgtgcaaggatttatttacccttcatgtgggctgcgacaaggagatcctctatccccagtgttatttataatagcagccgatgtcctttctagaatgctcatggataaaaatgctactggggtgattgcaggcttcaagatatcaagaaatggccctgctattatccacttaatgtttgctgatgacattatgttgtttggaaaagcctctcgaaaagaagcagcggctttgctcaatgcattgaagattaatgtgcttggtcgagccaatcagtgaacctttcgaaatatactgtccactttataaaaggagtttcaattccattggctaaggagatttcagaattgcttggcacgaaaaaaatgagtaaagactcatttattctggactgcctctgtttcgatcgagaaaaagaaccaaggatctccaattcttagttgacagggtgatgcaaagggttaatagcttgaaatcaaagttactctccaaagtgggaagggcgtgcttgatccaatcagtaggatcatccattgctacttatgtggcggcttcagatgttataccaaagtcaattgctcggaaagtggataaggaattaagggacttttggtgggaagatacaaacaagaaaaggacgatccgtacgatctcttggaactctctatgtcatccaaaactgagaggatgtcttgggtttagaaaggtagaaaccatcaatcaagccttcctgatgaaattgggttggaaagctctcatggataaccaaagcatttggggacgaattgtgcaagaaaaatatttgaaacacaaacactttatggatattgagtgtctatgtggtgactctggcctatggaaagctattgtgaaaactcgctctcttctgtcagaaggattatgtagaaagattgggaatggtaaaaggacctcaatttggattgacccttgggtccctcagctgaccaagtgtccgactccaatgctagatgcaacacatggggtaccttgggttagccaatttattgatgagaattttagatggaaggttgatatggtcagggaatggtttgacagagaggatgccaaggaaattcttaatattcctctgccacatgaagatacacaggatgggtggctttggctggcagaatcgattggaaatttctcaataaaatcagcatgtaagataattatgggatggtgtcggagtgatgcaacaaatgctacttggaaattgatttggaaatcttgaattcacccgagattaaagctgatatggtggcaacttgagagagatgtcttcccaactagaggtaaatttgctaattttattgaattatccattgtgagctgtccaatctgtggtgagggaatggagactgctttccacttactatgggaatgctctcttgctaaagccctatggtttaactctgggctgggaattagagtggacagaattgatgttagggaatggcaacaatggtgcacttggttcacaattcttcataatcggcctcctcatatttcttttgaggaaattctgattgttggcctgtgtatacttgaaaccatgtgaaaagaaaggaatgggatagttcatggaagagatagatccaatctgaaggagctgattctcaatttgaatcggagaatctcggagcatagattagtagccactggggatgtggtggaggtctgtgtttggacgccatctcttgtttcttggttgtgctataattgtgatgtggctatgagtgaggacgggtctgtgatagctactatggttcgtgatgagaatgggtcaatcttcactggaaaagctgaaaataaacttgtaactgacccaaagattgctgaggcgcatgctgtttgtttggcagcggatctctcggtggagaggaaaatggggaaggtcatattccaaagtgacaatctgagagtggtgaatgctttttcagctgagtttgaaggtgcagctgacttcaacttagtcaatcttcgcagacgatttcttagtatctgcagcgcgctgaatgaatggaaaattgtccatgttccgaggatgggcaactttatggctcataatatcgctaagtgggcttgcactactggggttgtggggaacactcatcttgctagccttgacaggaatgtgctgaacgattatgtggagtggagaaagcatgctgggtaatttttgtagcttgtgtctgaggtagcagcgggttggagttgttgtagtagttgttttactttcagttagtgttgtagtatttattttactttctgttggtgtcctgtttttatgtttacctttgaacatttgttgctttgctacttgctgtagtatgtttatttctataatccatcgggtgctttagcaccctcttttccattaaaaaaaaaaaacttaaattagatattttccaaatcttgaaaagatacttatttaaattgagatattttcta

SEQ ID NO: 263348 - DNA, 658 bp, Cannabis indica
gatcaaatgaactggggtttgaaaaaaaaataaagtgaatggtctgtcagaaaaaaaaaacatgtgattgccatgttgttcatgattcaatcattggataggtctattattgttcagacaaattatttgaggttgtacttcattgttgaattgagtgagcccaagtaatttttggagatacaaagaccccacttcacattatttaaatcagtcttgggcccaattatttggtcaactgggccccagcaagtttgaccagtccaattaatggtcagcccaccctcaaccctaacacattcagcatcatcttcttcatttctcttgaccagccgaaccagccaagcaccagccgaagcctccttcacccaactcgcacctcaccattcacccaccaagttcgaacccacctgaacccgtagccacgacgtcgcccccagcacgactcgaatcaccatctcagcccaagctccacgaaccaacaccagcaactctacattcactaacccatcaatcctctcgtcgattgaacctccgagaacccaaaatgaaaactcagctgtctacaccatagcctccgttcacgccaagctcgacccagccgcatgaccactcgcaccaactccaagctcttcgaacagcacccaatcgagccgagccc

SEQ ID NO: 263349 - DNA, 914 bp, Cannabis indica
tgttgctgaggtaacacattccatgtatggcttgtatctttcaacggtgttcaaggatagagtttgcaatttacgagatgttatttaagatatttattctcgctatagcctttctagggaaactcttagacttagtcttttgagattttgaaataagttgtgctttgcttatttcccttaatctttcaacatactcatgagtatgtgggtcaatgagttgcaagtacttaaagatatcattatctaaccttttcagcgatacaacttcaatctgttacaccagagaagacttctattgttatcatctcgccatacattgcttttctatcaatcttactattattgtgaccaaaatggtacgttttacaatatgaatcatagcgaaaggtcttcattatatgtcaagtattatcttctttgtattacgatatatttattatatagcaatgtattttatgtgacaatatacttaagcgaacaaaccgtaaacattatgtttattctgctctccttacgataattttctcagatgaaatcaaggtgcacgtgaatacaaaaaatatagaaattagagtttcactaaaaaaatttagttgtacatcaaaaaacaacataaggggtaactaaattctatatttactttatgatcattgaatttgtgttacgacatggatttagtcaaggagtttgccctggactccttgatctactcttagccgtattagcctctaattcttgtggtgattctttggtaggtcttcgccttccaaataagttagcgaatctacctctatttaagtatgtacacatactacctctttcttctctcctataaccttgtggtggatgtggaggacaactagaccggttaggcggttcattatttgtattttcattatttctttgagacgtct

SEQ ID NO: 263350 - DNA, 626 bp, Cannabis indica
tttcatattcatgtacgttataactatttaagataacctacaaaattttgagaaatttcgaataatttacaatatagaaaataatgttcaaacagtctattttacacgcgtataaaataaaatagtcacgcgtgcaatacactgtttgaacgtagtttttggagtgttaaacttttttaaatttcttaaaattttgcaggatgtcttaaataattataacgtacatgatcataagaaaaaatttgactaaaaaattatttcggatactaaaataaataaaggtgcatcaatgtatctattttaagggagcggtagaatttatatatatatatttttggctgacgacttgccccaccacgaaggcatctttcaagtaatcagttattagaattgttttatttgttttggcccaatagtggcccaatgggcttctattttactctatatatatacacacttatcatgtacaaccttacacatatattcatttcaatctcagcagctatttttcggctgaatataatgaaaataagagagataatttctctctaaaagaagttttcattgcttacgactctcaccaaatgggaaccccaatcaagccataagtaccaactctagaatat

SEQ ID NO: 263351 - DNA, 579 bp, Cannabis indica
aacgaaattagaatttttagaaggaaaaaaaatcaatcttttgcttaaacataacaagtgaagtgaatccaaaaaaaaatccagaaaatgaatccaactaatttgaattaagctcaactacaacagaattattggacaataaattgtatagtagtgagctgaaaaaccatataccaaatgtcaagtaataaatggaaatcaaaatgggacattaagaaatattatggccatgtcttcaattaagtaatgaaagcaaaaggggaaaagcattaaaaacaaaaaaaaaaatcattttgtttttgaaaaaaaaccaaccatgaagttccattccatctagtctcaactttatggaccatcaacagtatcaacctattattcaatacattcaaaaatagataataaagaataatatgacatcattaaagacaattcacagaaaggggccagaagaagcacaataactagtgtgcaagcaaggattgaattgaagtgattcaatcctaaacccaaataagagcaattatccctttgttcattaattattaattttaataagaaacaattactggttccccattt

SEQ ID NO: 263352 - DNA, 794 bp, Cannabis indica
aaatgtgattaattaaaatttcctatttaattaaaacttataatataacatacaaaatacttggggatcccatttacaaaacactttacaaaagtctactattcatgtacaaaatatttgtcgcccagcgactaacaacaaaagccctgatgtcccgaggatcgtacgctccaggcctaaccgccccgacatgtacaatcttcatctgctcgtcctcacggttcctcaactttagccttgcccttacctacactataacatagcactgtgagtcgacagactcagtaagaaaagcataaatcatataacatacataaatcccgggttatgatcagacgcccatacccctgaccataaccataatccctttgttcccaccacggtaccgtagtcgtcgtacgttacgtttacgtacgacgtaacttttacgtttagtatagttaacgtaaaccctaaaccttaacttaccggttaccgggtaccgtacgttacgtactaacttaccttacgtaccggtaccccggtaaccgtagttggtcgtaccttaacttaagtactacgaccgtaccttaacttaccggttaccggtaacctacggttcggtactaacttaccctaccgacgtcgtcgtacgttacgtactaacttaccttacgtaccgtccgttaccggtaaccgtagttggtagtaactaaactaagttcgtacgaccgtaccttaacttaccggttaccggtaacctacggttcggtactaacttaccgtaaccgtaacgtcgtacgttacgtactaac

SEQ ID NO: 263353 - DNA, 519 bp, Cannabis indica
agaggtgcgacaccttggctggaaaaaccatatacgggctggagacagggagttaaatctttgagttggagtcccatcttttcatacgtggtcttgaataagatgttagtagaggctccgttgtctatcatggttttggccaccatatttttggctatctggacttccacgaccaacgggtcattgtgcaggaaactgatattgatagcatcttcatcataaaatgttatggtgggctcccctgcccgtggtatgtttgatttcctttcttcgacgacgaagactacttctttttgctcatgttgtactgttcaggcatacctttcctgggcttttcctgaatctccaactatgtgcggacctctaataatgagttgcaggtgtccatctactggtggtggtagtaactcttggttgttatcgtccctcagattttgatcggccttgacatacttctgtacgtgcggattatttttcttattagaaattcaattttccgctttagattgttgcattcat

SEQ ID NO: 263354 - DNA, 1685 bp, Cannabis indica
ttagtttgtagggtcagttatcatttcgagaagtagacaaaatgatgtagccgtgtatgagagacataaatctatagagggaggctcaataaaaacttgaagcacaatgagccctgggtgcccaccatgcgcccactacaaagaagcttccccaatctccaaaagtcaactccagcatcacaagagaagaccgaagacccctggccgtacaaaggtgagcccagtgaccactgtcatcacacacaccgagggcaacagggtagctccacaccagctccgacaacttcttcaaccgtcataaatatgagctctgcttattccacactagaagtcataaatcatagacactttatttatgagatatttaaattgtaattttattatgagaatggccctaggccagattagttacagggcggcctaataagcaaattgactcatgatgtaactctataaataagagatttatcctcttcattattattgaggcacacttttcatactgatcgattgaaacactgtgcaatagtaatcttattctaaagcataaacaactcacctagaccacgtctttgtgatattttattatagactagtgaataaaaactctaagtggattagttcattacctgaaagggggtgaaccattataatctcgtgtctgtatatattaattgcactctcaacatttattttttattgtggttggctattttcataatcaacagtcttgtaaaagtattgtaacttgtcttttccatacaaacaacaaaacgaatttcaaataaagcagaataaatattgggattctcacactcattgcatttgttaagctatttttagtctattgtccgaatcatttttaacagatgtttttttcttaaatgtcaatttttagaataaatttacgcttattttctttggtttcaggtttcgataatttggattgaaaatttggtcaaatatcaaaagaacaattcaggatcaaaaactgaagaaaaatttgcagttggtgtgtcagtcgtcgcggcgaaagtctgtcatgcggttgccgtgggtctccacgacaaaattttacagagccaaaattgatttctcgaggagctagctcatgtcgctgcggcgaggcttggtatcatcccggcgccgcctctgtatggagattgggcagttttgtcttttcgcaatttttggctaaaaattctattcgaaataaaaggggggctttaaatttttattgggatggacaaaaacgaaccctagaaaaagaagtagaagaagaaactttgagcgagcgtggatgattcgtggcagtcccctatctaatttcctactctttctctttaatttaaaggcaaacacagagaaagagagaaagatggctcgagaagaagaaaaaaattagacttggagaaaggaaaaaaaaaaggatagtgagtagttttataaaagaaaagagagagagaaataaataaaggctaattaacaatttttctcccgaactttgatatgtactaaatcatgccccttgaacttttttggccgttaaaaattcctcctgaactattaagattgttagatttaaggacttttatctaattttagtaaaaaaattctaacatggatgaaagttcagggagcatgatttagtacatatcaaagtttgaggggcatgatttggtaga

SEQ ID NO: 263355 - DNA, 614 bp, Cannabis indica
tgttgacctctcttttagtcaacgatcgtgagtcaattaataagcgattaagaatataattaaaatagggcaaaaacaacaaagtaataaagaataccaaattttaaacaggtttggccccatgagtgtggtaatagcctactccccttgaattgtattaactcgagagaaagaacaaagtgtttttccctctaaaagctcttacaatgaattttgagtaattctcttagatctctctctctgaagcaattctttcaatccctttcacggtgaggctaagccactatttatagggccttaatgcatgagggaaggtttctcttttgcttacaatctataaaataggaaattacatttattacataattatgatacatgaaataggaaactagaacatgttgctatatttctctgattcaatcccacgattgtaaggattgccttcgtgtcttggtatcgtaagattacaatgaagtgattaactttttggaagtagttcggcaatccagaattatactttctcagatgatctatctttcatcctgctcaggtaatcaaaggttatacatgttgacgtacaatatggagtcagttcggaacattcacctctgccc

SEQ ID NO: 263356 - DNA, 568 bp, Cannabis indica
taacatgaaccaaatgacacacagagtgatgaaaaatacttctgtttctttattgatatttaaaagataattgaaatggagttttattcagacataaaacccaacatctagaagatctaccaatccccagtccaagaggaccacccgctccaagagggcccaacctgaggattgtcccagtgctcggaccacacatccccgaagaactcaactcgacattggtcttagtacgcggacaacgcgctcgaggagaacttagagtgggaatggtcagaatccgaggacgagggatgaagagcccaaccgtggaggtgcccaatctgtgagaaaaacagcttatgaaaccgaaagtcgctgcctgagatgccctctggaagaggcgcaatgtcgaaacactgagttagaacgagaggcagcctcggccaagaaggcgcaggggacgaatgctcagaatcaacctgaacttggagtgaaaagaccacgaggcagacctcgtggctcacgaaccaggagataggaaaaggcccgggaagaacaacccggggaaaatgagacaccccctgagaat

SEQ ID NO: 263357 - DNA, 514 bp, Cannabis indica
aaggaagacacttctcgagatatatcatccacagaagtgaccactcttccatcctcacacttaagctttcgaatgaaattagttttcctcctagcagtggctttattgtgaaaatatttggtgtttttatcacctgcttgcagccaatggatttttgatcgttgtttccacagaatttcatctttatagagaagagaatccagttgagattgtaaggcagcagcctcctgaatctcatttctggaaaggggaaggttagaatgaatggcattgattgagttttcaagagtactaatcctacgagaaagactattaaaaccaacattccaatttttgatatcatcaacacacagttgctgcttaagcaagaaagagtcaagggttagggggatttggttgggagagccatggtgccaacttttcttgacagtttcgtaaaaagatggctccgtgagccaaaagttctccaacaaaaagcgtttgtgcttcggaggcatcatactctcatcattga

SEQ ID NO: 263358 - DNA, 831 bp, Cannabis indica
cttaaattaattaaatcaaaaatcgattttttgaaataaataattcaagaatcgttttttaaaatagatataaattaaaaatagaaaacgtttttcataaatatggcatatcctcatgatattagattctatactccttttatattgtcttctcttaattttactctcttttctaaagtctatcatttttacctctttttttaaatattgtaccaactttgctcttatcatttcaagatattcttcatgtaactcccttatgtcaaggtatttttgagtacagtacatataaaacccttatgtcagggtattttgagtacaatacatataaaaaaaagtatgttttaattaaatataaattagaggcagatttagttaattgataaataaaagaggtatttttcaatttacccaacatatcataaactataaaatagtttaaaaattaaaaatatcatgaaaaatagccaaattcaaaactgccatatttaaataaaacacttccaaaaagccatattaaatgtaaattcttcatctgaaaacccaacttaagaggttgggtggcccatatcaacacacatatgcgtaagcccaaacccaaacgcgtctgatccctaaaaagcccaaagctgccatatattgccacgtgtagaagttgactcgcagcgtgtggcgtacgtgaccattgactctgtgagagaaagactcttgacatgtggaccaggtcctggggtcgtggggtcccacatggcctttggtccatgttcttcaagctctatcaattctctctccctttttatattatttgattataccataatctttttttat

SEQ ID NO: 263359 - DNA, 1135 bp, Cannabis indica
cttgttggaaacctcacttggcctcaaacctcgtacaaacccatctttgtctacgacgaaagaagcgacgccgtttcgcttactgtggccgaaaccgacgtcgatttctaccgtctctcgggtacaaatgaatttttagaagccactgaataccaccctcttataccaaacttggaagtttctcacgaacgagctgcggctctggctttgcaaatcactctgtttcgaaactgtggattttcaattggaatgtccatgcaccatgctgccctcgatggaaaatctgttcagttgtttgtgaaaacatgggctgacatgtgccgatcacgtgattgtgatgacgatgatcgatcaaaaccattgtatgacagaactgttattaaggatccaatggggctcgattcaatctttgctaaacagcttcgagatttagacaatggacctgacaatagaagcttaatgccttggagttttaaacaagttccctctggttcagttcggggcaccttccaattgacacgtgtgaatatcgaaaaactgaagcaaaatctgatgacaaataatattgaacaagttcatttgtctacattttctgttacgtgcgcttatatttgggtttgtttaaataaagcagaagaaatataccttagcagccaaataagtgctcttgggttcactgtggattctaggtctcacttagtggatcctgtgcccgaaacttactttggaaactgttatgtgggcaaggttgtttttgcagatgcaaaacggttggtggggaaagagggcttagctgtggctgtgaaagtcattggtgaatctataagtagttttgagagtattaaagggtcagttttgaatggggctgaaaatttggtttcgagctttattgagtctttttcacgaaccgaatattctgaaggtatagctacaactcctagtagaccgatagtatactacattgctggttcgcctgggcttgaggtttatagtagtgattttgggtgggggaggccgagaaagacagatgtggtttccattgatagagcaagagcagtgagtctttcggagactagagaaggagatggagttgaagttgagttggttttgaaaacacagcaaatggaagcttttg

SEQ ID NO: 263360 - DNA, 1243 bp, Cannabis indica
acttgaattaatatacatgtatccctctttaatatggatctataaactgacttttttattaactgtttaacattcttatgtaggaactaggaatatctttattggaactttgcattggattgttctttataatcaagatgttcaggtgggcacaacctatcataaagtattacaagtaccacaaagaacttgaagaaagcatgagaaatctcaagaccattttagaaggtttatatataaaaaaagatgatatagaacaaagattacacactaagcagatctctgaacacgaacaagaagctaaggaatggttaaaagaagttgaaaatgtcacaaatgaaattcattccattgagcaaaaacttggagcaaagaaacaatatctctcgcgtgtatgtcttggaaaacttgttgatgaaaaaactacaaaagtaaaggaacttctccatagaggaagtctctatgaatcccttgagaagtttttcaagtacatcattcttggaggcggtgtctcagctggttatgcagcaagagaattcgccagagaaggacttaaaagaggtgatttggcaatcatttctaaagagccagtggccccttatgagcgtcctgcccttagcaagggttacttgtctccagaaagtccctcgaggcttcctgtttttcatgtttgtgtgggaagtggagggcagagattgcttcctgaatggtatagagaaaatgggatctcattgctccttaacacacaagtagtcaatgcagatttgtctatgaaagctctcaccacatcaacagggagaatcttcaagtatgagaccttaatcattgctactggttcaacagcagtgaacttaacagattttggtgtagaaggagctgatgcaaaaaatatcttctacttgagagatattggtgatgctgaaaagcttgtagaaggtattagatcaaaaagaaagggaaaagcagtcattgttggagggggatacattggtcttgaagttggagcagccttgagaatcaacaacttagatgtcaccatggtttatcgcgaagcatggtgtatgagtaggcttttcacattagaaatagcagctttctatgagagttactataccaacaaaggaattaaactcgtaaagggtacttcagcaattggcttcaatttaaagtcaagaagtggagaggtcaaaggagtgagattgaaggatggtaaggttttgcaggctgatattgttgtagttgg

SEQ ID NO: 263361 - DNA, 785 bp, Cannabis indica
gtccaaaagaggcccaattttgtatttctttgtgaaactctatgtaaaaaagacaaagttgatagacttcgagtccagttaaagtttgatggtgctatttcagccgatgcacaaggaaggagtggaggaatagctttgttatggagaaataaagatgatgttactttgcttagatacactcacgattacatcgatgttcaagttaatgcagctgatggtattacttggcgtcttacgggctgttatggagaacctaataggagtttaagagctcaaacttggaacatgctgcgtactctatcagccgacaatacattaccatggtgtgttattggagatatcaacaatgtattggcccatgatgataaaaaggagggacaccttatcctagctggctcattgaggggttcaatcaggcgttaacggattgtggcttgtgtgatcttaatctctcaggctatccttatacttgggagaaggggagaggctcttcgaattggatagaagtgaggttggatcgtgctcttgtttctgacagctggcttaacatctttaactctgcgaaacttctaaatttggaggtgagtagttcggatcactgccctattttacttgaacctactgtccgaaattacaatactgaagttaaacactttagatttgaaaattcatggcttcgggaaccaatgtgtattcaaacggttaaagatagttgggaggttggcaactgtaacaccctaactaccttaggcgtattacgtgagttttaaacgtactgtgcagct

SEQ ID NO: 263362 - DNA, 1271 bp, Cannabis indica
atgctttagcgaactttgtagttgagtgtacgggcaaagaagaaagcttttcaaaaggtaacccgaagctagtacaagaaccttagtcgagcaacaatgaagacaaacctacctgaaaattacacgtagatgggtcggctacagatgaactatctggtgtatggattgcccttgtcacgcctgggggcaacacctgcacagggcagtcaaatttgggttcagagcctccaacaatgaagcagagcacgaagccctcattgccgatctaaaacttgctcgagaactacatgttgaacacatcgagatctgcagtcactcacagttggtagtaaatcatgtgtctggagagtacgaggctcgagggaaaaatgatagcctatctaagcaaaatacatgacctacttacataattcaagagctacaatctcaagcaaattctaagagaagaaaatataattgctaatgccttagcccgacttgcaagcaacaatatagctgataaggctaatcatatcccaatccaattccatgaagaacccatcatcacctgtgcggaagaaattgaaatgattgacacaactccaaactggatgacaccaatagtagcctacctcaatactggggaacttccaagtaacagaaatgaagcacgaaagatgaggagaaaggatgcagggtatatcatcgtagaaggagtaatgtacagaaggggattctccatgccactactctgatgtgttacacaagaagaagctggatgacttttgtctgaggtacacgatggattctataccaaccacacagcaatgccgatgaaagaaaatactaaggcaaggatatttctggccaactatgactgaagattcaaaagcctatgttaagaaatgtgataaatgccaaagacttttaaagataccacgtgcactgcccaacaaactaactcaaatgcaaagtccttggccatttgctatttggggaattgatctagtcgaaaattgcctaaaggtaaaggggagtacaatatgcaatggttccaggggattatttcactaaatggacgaaagctgagccattggcaacaattacatccaagaaagtactagacttcatggtgaaaaaattaatatgccagttagactcccgtacaagatagtcccagataatggcatacagtttgatagtcaattgctcactgatttctgtgcaaaccatggaattgtaaagagtttctctgcagtggcgcacccctaggaaaatggtcaagtcgaagc

SEQ ID NO: 263363 - DNA, 595 bp, Cannabis indica
tgtttcttcattgataaatgaatatttaagattacattgaaatagagttttagttaggacataaaacccaacaaactctcacttgaactaacataaaataattagtacatttcaattaatcctagattttgtctgtgtttttcaaatccagtctctgtcaaagtcttagtgaatgggtcggttaggttgtcttcagtatcaacattttctaccagtacgtctcctcttgccatatgttctctaataatgtggtatttcctctcaatgtgtttactcttcttatggcttcgaggctccttactgttggctatagcaccagtgttataacaaagtaacactagtggtttttctattcctggaacaacaccaagttctatgaagaacattcttagccagaccagttccttagcaacttcagcgaaaactatgtatttggcctccatggtagagtcggatattgtagattgcttgacacttctctaaacaactgctccacccccgagagtgaatactatcccagatgtagactttctatcatcaagacaagcttgaaaatttgacttggtatagcctaagggatttaaagcaccaccct

SEQ ID NO: 263364 - DNA, 520 bp, Cannabis indica
aaattaatttccaactttaatctaattttcagaattgaaaattttcgaaatatctacagtaaaataatacaatttgaaattttatgtgggaaaatgattattaaaataaaataaaatatattctgaaaattattctaatttaagttgatctgaaactatcaaatcttcgacttaaatatatttttctatttaattaaattcattaaaatagaaataattaagtacttggaataaaatcaacttaattatgaattctaatttaatatttaagaaaaatattctaatttaagttggtctaaaattaatcaataaattaatttttaatttaaatatattttacttatttaattaaatttcatgaaatagaaataaaatattaagtatcttttgaatagaattaacttaattattaattctatttaagttctaagaaaaatattctaatttagttggtccaaaaataatgaacaaattaattttcaacttcaatatatttttttacttaattaaatattagaaa

SEQ ID NO: 263365 - DNA, 737 bp, Cannabis indica
agcatgtcatccatatacacctctatgttacggccgatgagatctatgaacatcatgttcaccagcctttgatatgtgacccctgcatttttcaatccaaagggcatgactttgtagcagtataggcctaggtctatcatgaagctagtgtgctcctgatctggtggatgcatcttgatctggttgtaacctgaatactcgtccatgaaactcaagacttcatggctagctgtggcatctattagctggtcaattatgggtagcgaaaagcagtcttttggacatgctttgttcaggttggtgaagtcaatgcagactctccacttctttttgagtttaggcactagcactaggttggatacccactgagggtagaatgcctttgttatgaagtcattggctctcagccttttgacttcatctttgagcgcttgggcgagctccttgtccatcaactgccttttttgttaaataagtcagatgcttagatcaatgttgagtgtatgggttatcatggaggggtcgattccgaccatgtctccatatgaccgtgcaaaaatgttcaggtttacccttagaaattttatcaagattgacttgatttttggagccaaacctttaccaatctttagtcttcttattgggaaagtgggatcaacctccacttcttctaactcttctataggtccgaagcttcctgcatgatccccaaagtgagtatcaatgatgtatccccg

SEQ ID NO: 263366 - DNA, 1346 bp, Cannabis indica
ggtaatctagttttaccatgaggagcaatgtcagctcgcatgaaaacatacatgacctacttgcatggcttaagatctcttagggagtgacccactcttttcaaggtctatttgttagaacattgggtgatgcataactattaattattacctttagtgccatgatgtttgaaatttcattgaccctatctaagcttgactgctcttggcccccaacattgatctctttgtgactagggtgaaaaacttggaagtttgtgtgttaaagctatctattgtgagtgagataaactattgttgaggtgtagtgggttattgcctatgtgattggtgcttaagcatgagctcacttcatgatcataagtgagatgaatcactgtcgataagtagtgtagaaaaaccctccagatcttctatataggggaaaagcacttgtttttaaagaacctggtttgatgattttgatacgtagaaaggaaaaactccaagggaggaaaaataaaaaagaaagattgggttaaacccttgagaagtacaacatcccatacttaggaggagcttagccactaaaagaataccacaactggggcagcatcccactcttagagggtttccttcaatcaattagaaaatcccttctagatccagcgtcctacttctagagagctttctataattgatgatgcttttttttttgtgattcgagtaggaacacttgcaccaacactttagatttataaactcggtcgttatgttcttgttagacctcaagagtttatatcataatagttcttaactttgttgtgcaaatagtttgtacgtgcggttattcaacttaatgaacttactagcactcgcaatagcacttcaggattaagaaactcaattactagggataacgtcaacattttattaaactatagaaatactaaccaaggtgtgtgaattgccactacaacccatggctcttgtataccaagttgtatgtgacatacatggctctcgtgtaccgtgttgtgaattctcatgtaacgtgcatagctcctgtatactatgtcttatttacccccgagtgatcgaagaaatgatttcatgttggaatatattttaccaggatatagatttaccaacaagtatgtttttaacatcctaaacatgaacttctgaaatgatataaaataaacacataaaaggtatgagaaaccttacaatagttgcagcagaattaaatgactcctcccgctcagatctctaacccttgtatcctttctatagcagagtatcaccaagatctgagcccgaaactacttcctttgtgtttggattcttcacagtcttacacacta

SEQ ID NO: 263367 - DNA, 490 bp, Cannabis indica
tctgggcgagcagtcactctgcgctttacttctttttcagcttcttgactttcatgctttgtattttccgctggtttgtgctaaccacgctgtttttgttctgtgcagacatgtctcggcagatgatcgacactttaaggaagaggatgagcggaagctctagcgcctcctcttcggccaagaagtctaagggcggagaggggtctttagagaagaggccttcgagagaggttattgacctttctgaggagctgactactgtgaatccttccactcccaaatctgccaagtctaaggagtctgggccactaacatctgggtccgaactggtcaggaggattcctgagcaggtgcaggtaccaactccacctgtgctcgtgctacctgagaccaagaagggcaaggaggtgatggctaactacatgaaccggctggttcctgaggtcggtgagaaactaaatggtcctgacgactcatctctggatgtgtt

SEQ ID NO: 263368 - DNA, 1248 bp, Cannabis indica
ctgctgtattttgaattgtattttgaactgttgttgtatatcgtcttttggataaatcttttataacagggatttccggaactcctttttactgccgttataatgtccgtttttagtgttttattttagtcaagtttttattatcctcacagtttttaataattaattactatattagtattaaactagttttataaattcacacacgtggcgttcctatagattagggcgttacatgtattatttgtgttctttgacttgttcgttaaggctgactaattggatcggcccaatacttatatcttgagaacatggtagtgcaattgagcgggagtgctaatgatagatatagaatttatagcttctataactatttagaagtgaaatgatgatttcctttgagcttggcttaacaaacataaatggaagagcttttatttcagtaattatattggtttactcaaatatcatttattggaagctaagtgttttaaggataaaatacattgaggggtacaacggtaaattatccctattcaatgtaaatcatctatagatgatctttgattatttagattgaaacaatagataattcatagcgtatttgttcttggtgaatagagtgttctatgtaattaggaaaacaattctgaatctattgtggagtcgggaagaattaataagataggacatttacttagtaaattctagaaatacttattgggagattgattatataggctcactgtccccacactagttgagatcataatgtcttgtagactcaattaattagttttaattaatcaattagaattttgaataagactatgtcttatttgtgaattttcactaagcaagagtttaattgaaaagaaagagaggattagggtttgttgacctcgcttctagccaacgacagtgagtcaggataaagcaattagataaaataaatattagaaagaaaaaacaataaggtaaaatagtgagattatgccactactaatatgagcttattacatgaataatggtttctcttaatctataatgagtaaaataggaaactatactaaatctataattacaatgcaaggaatgggaaactaaagcgtattgcctttattctctgacttaatcccatgaatatagggattatcttcgtgtcttggaagcgacgagacttatctttgaaattgccaactcacatatcctgctcgttgcatatgagtttgtactttagtcagatgt

SEQ ID NO: 263369 - DNA, 841 bp, Cannabis indica
tactgaaaatgatgaaaaaggtaatactaaggtaaagcctgaactaaattggactactgaagatgaaaaattgtctggttataataataaggctctacatgctatttttaatggtgttggtgaaggctttattaaattaatctcatcttgtgattctgcaaaagaagcgtgggaaatccttcaaactcaatttgaaggtaccgctgatgtaaaagatcacgttttaccatgttacaaactagatttgatgaattgagaatgtcagaaactgaaactttgtctgatttttatgaaagattatctaatatttctaatgagttttttgccttgggagaaaaattagatgaatctgtcttggttcgaaaaattgttcgtgtgcttcctgacaggtttgacacaaaataacttgcgtttgggaaggatggagacaagtcaagctttgcttctcaggaagatgtacaacatcatgaaatacttccgacccgatgatgatgaataagtggttcattttttttatctcttgctttttatttatgtatgcttgaacttatgactttgttcatgtttttttttgttatctttggctccttgatagacaaaaagggggagtagtattattttttggattttttggattctatgttacaactctggacccttgtttttagggggagttggttgtttgtggttttgcacttttccgtttaaaaagttgtcttatttcggtttgtaagcttttccgtccaaaaaaagttatatgttttatgtgttagagtgctttcatgcaggggtagtattttctatactcttttatctttaaaaagctatttgctttggtttc

SEQ ID NO: 263370 - DNA, 1132 bp, Cannabis indica
tttcatatcaagctagctattattcaataatattaattaatgacctcatagctacacataattctttaaaagctactatgtcgaaaccaaacaattgaaattgatcactatagttttgaatataaatccagtcctaacataagaaggaaataaaagaaaagtataatagaacgtcctaggggcagctacctgtctcatttgttttaataaaaagaaaaagtttatatgtgaataatttaataagttatgtgtataactcgattcaatttaattataatcaaccctgaaatacatatttgaaatctaattatatgatgggatgagataaaatgttattttttaatatctaagtagatcaaatcggttgatggacagaatatttaaaaatctaactattatttcaatttgatttggatgagttaattatattttatattattatgcttaaattattaataatataattttacttttaaaaaataacgaatttaatctaattaaataaatattgaatttaaaatattgaatgaatcaaattcaataaaaataaaatacttaatctaacattagataaaatttgaactaatttgtaaatatatacataaaatacatctcactattaaaaccaactaatccaatattctattgaatttgatcggtcagttaagataattaaaattaattgaatcggcgcgtgtaacgtcccgcttcaagcctccatttggtccttacacctatgaaataatggctcttgtacacgagtacgtcactcaggctgcttcatggactgatgactgaccctacacaccaacacgagtgtttccagcgtgttttgtcctcactcgcacacttcctaggaaaacttttcaggaggtcacccatcctaaaattgccccaggccaagcacgcttaactgtggagttctttcgtgatgggctaccgaaaaacaagatgcaccttgttgatataggtgataccaatcaatccatttaagctctattcaactgtgtagtcccatacctatacagtcttaaaatcatcccacttgaccttttccaggcggtgtgcgattgtacagcttacccggtatttccccttacggatcacgggactactgactgtcactgctcgg

SEQ ID NO: 263371 - DNA, 507 bp, Cannabis indica
cgtatagcaatataaaatctaatgactcatccaacctaaataaaaatactaattagttcgattagatgttggatgtattaaatttttggacaccatatctaacatctgatccattaattcaattggatatttaaaaaaacatccaattcgatctgatcacaataaaatatttaatatttaacggtcacttataattgaatccatcggtcgttagattgaataatttattaagactccttatgccaatgagaacaagatagcattagagtggtcatttattggtgcattaataaataataattattggatactatttgccacgtgaagcaacgtcaacttgcacgccagaacatggaaaagtcgccttcaattcctttgatagtttttttttactaaaataaaaaaaatgattttttctttttttttctttccaaaatttataaaaataaaatactctagtattttcttttacttcttttggatatattaaaaatttaaattaaaaaa

SEQ ID NO: 263372 - DNA, 1140 bp, Cannabis indica
tcatccgaagagtcttcttgctcctccaggacggcttttccttttccctccataggggtcgttggccgagcaggcacaccaggttccctaattctaatggcacgctcaattggcgcctgctcagtcgggagagttttcttcttcttgcggagcctctcctgctctgaatattcttcagcatccttctcctgctttgaatattcttaagcatattgtttggctccaacacctccctttaacttagcctcacacttaaattgaatgagctctttctcctgctcgacatcctcagcttggctcgacctggatttcttcttctccttcacgggctgtggtacaaaatctgctgggtaaagtttgttctttacaaagttggcctctatggtcaagaaagtgatattctgagcatcctccgccagttggtgaattttctgggtcctctccctaagcttcagcgtgaaaggaggacgacaatatgcaatgatctgctgaaatcgagtatgagtagtctccatgccagccacgaagtaatactcattaacaaaatgccctatcttgctaacctccgtgtccacggtgcccttcagccacttgtcgtccagctgagagaagtaaaagtaccctcacttgctctgcttgggagtagacttcaaatcaaagagccagttggtgtcgtgcggagatggctcaccccatccttaaatggcatagaggatgaacaaggcagataaatacttgatgtccttgggtgtgaactcggtcagactaaagtagtagtagtccacaatccttttgaagtatgggtgcaatggcaacatcgccccttgttttgtgtgagcacccgaccaggcatagtatccttccctcagactagttgcccggtgatttggagaagggaggaagcattcaactccgcccagatacccagccttctccaaatctcgtaaattgtcctcagttacgatggacggaggacacacccacctagccctcaaggcacctagcctcctatgagggaccacctcgacatactcctgagtgacgtaatcctctacctcaaccaggacaatcaccaagttccagacactggctctccgggcctcattatagccccctaaaagcgtcagaggccaagcaact

SEQ ID NO: 263373 - DNA, 762 bp, Cannabis indica
atactcacagtagtatacatacagaagactgaaaagatccctctcactataatgtaagtgttagttttaatatgcttagtattgccattaatagttttatatgtgatacatagatttttgttaaaatatgtttcctagaattagagcctcatctgtagtgggtgcttagagaaattaagagtatattacctcttatgattgattacacttttacgaagaagatgaataaattttatatttctttattgtcttgaatttaaactaggtaggacagtgttcctttcttgaaaatttagaataaattatattaggaattcataagactttgtttgataaatagaatattactagttaagcttgacaacattaagtttagatatgtacatgaaatcttctctttcaataattgaactcttttgtttctattaaatcaacctttcttgtaagagctcacacatgcaactagaagatcagttagaatcaatgtgaaaggaacgaccaatagaggtgggggctaaggatgtgtgttccgctgacccacagatggttgatgttccagagaacccaataatagtaaggctaacgatctaatagaggcattggaaggactacgagcatgattaagatgatttgttgaagaagttttcacaggctcagcgcaatagatcaccaacactagtagtggaacttgaagcacataatgaaatgtaccaatagccaactacgcatatattttcacctatctatgaatggttgaagaag

SEQ ID NO: 263374 - DNA, 536 bp, Cannabis indica
agtcatcattaacatttatttcttttcgcaggcaacgatttgcttcccgtccattgagaaatcggcgcatttaatcggtgtgtaagaaaagtactcaagcgttttcaaccgccctgatgagcatttatttcgaccgttagatctgtagaatacgaatcgattacgattcccaccgtacgatggcgcctgatcataaatgccttgcacccattctggtctataaaagccagccttttttcttaactgggttactttcaccattttgccatttttgccttaagaacactttcgagaaaaattccagaagccatagattttttactgctgttcctccgtcgttgccagtccgcattctaccgtcgatcaacaccagccccagttcgtaacttttgtgtaagttttctgggtactttatactttcgttgttcacttgcatgctagggtagaatgtttggttaagtgcttgattttctgggaaatgactttggcgaagactgtcgtagggtgtacttaccctcttttttttattattattt

SEQ ID NO: 263375 - DNA, 552 bp, Cannabis indica
aaccagctggaattgatcttctttctgtgagttctgctattatttgttatgaagtatatgcttattaaaaatctgaagttttatgtatttttatcattctttaatttttggtatgcagaaactgctgtgtctgaatccaaaagaaagaattatggcttctgaggcacttaagcatcgctacttctatggaattgaggcaaagaaacgtgtgcctacaccagctgctgctgctgccgaagtgggcaactcctctgtggggccttttgctgcagaagtgggcagctcctctgcggggccttctgctgccatggacagcttggctgctggtacttctgctgttgtgggcagcccggctgccagtgcatctgttctcgtggaaagctggattgatatggtttctgctgcgctggacagctcggttactgatacttcttctgtcgcggaaagcttggcttctgatgcttcttctgttagaaaaataattacaataataaaattgataacacctgaggcgtgcaaacaagacactgtccttaaggatttacaaagtaa

SEQ ID NO: 263376 - DNA, 499 bp, Cannabis indica
cttttttctatttgccttttttaataattgtaacactttattttgtcttgcagacgtgggttttgaagatattatggactggaaagggaagaaaacggggaaccaacccaggggttcctacaaatgccgaggtggaccctttaaaaacgcaaaagaaaaccacctcccataagagaagacgttgtccgagcccattgacctcgaggtctctaaaaccgagatccatgaacagactattccttcggttgatcccaacaccagcgcacctcctcctgagacaactcatgcctctgccgccacgagccaggccatgaaactttgtcagccacagcagggaatgctggctctaaatttgcccaggtatttgggtttgcctgctagcggcaactcaaggctctccacgattgggatctaatcaatctcgggaatccagaagagactctttcaaggaacttgcaccataccctcatggtaagtttgttgtatttttttttttgtt

SEQ ID NO: 263377 - DNA, 592 bp, Cannabis indica
tgttaacttcatgaaggtagatcatgcgtgttttatattctcaccccaaaagggagtttataatgaccaatttactctacaatataatctaattgcttggctcatatatcttgatcaagttttaatttttgaattttttggtctcctttctgagaataacaataacgtttttatctgaattctgaatgcttccagacatggaaacgagatgtgaaaattactttaggcataatagatttggacttatgccttcgagaagaaaaatatgctgatcttactaatataagcattgttgcctcaaaaattcttcatgcacaatggaaaaattcaaatcgtcttagtctcattgctatgaaaagttcaattcctgaacatccattgagtggtttgccaaacaccaaaaatgtcaaagaatttttcaatgctgtagaaaaactatatgacactggtgaaaacgctgaagctggacatcttatggatgaaatgacaaccattaagtatgatgaattaaaaggagtgcgagattttattctgaaattggtgaatgttcagtccaagttgaaagatcataatattcctcttcctgactctt

SEQ ID NO: 263378 - DNA, 1719 bp, Cannabis indica
ggaatgccattccaatactttaaaatgcaaccaaacaaaggaatggaatgaaaattattttctttccattccattccattttattacctccaaccaaacgccaccttactttcgctataaatcattagctaggttaattaacgtatagcatttaatactattaaaacagcataatatattatattaattgcatgcatgcatgactttattttaaagaaagaaacatgtatcataaatattcattaattctatctatatataattggccaagcaggaaggttacatggtgcccccaagcaaaacagccactccagtcgaactcgatcgccttaagaacaagataatcttccacgatggccgccttgtccaacgcccggacatactcaatgccatcattacctacctctggctacccttcggttttatcctctgtatccttcgtgtctacatcaacctcccccttcccgagcgcatagtcccctacacctacgccatgctaggcatcaagctcaagatccgtggaaatcgacctccaccgcagagccccggaattctctacgtttgcaaccaccgtaccgccctggaccccatcatttgcgctatcgccttgggccgcaaagtgtccaccgtcacctacagtgtcagcaggctttcgcgcttcctctcgcccatccccgctattgcgctcacacgggaccgcgtggacgacgcgcgccgtatctcggcgctgctccagaagggagatttagtggtatgcccggagggcaccacgtgtcgagaaccttacttgctgcgattcagtgctttgtttgcagagatgagcgataagatcgtgcccgttgcagtgaattgtaagcagagcatgttctatggtacgactgtgagaggggtgaagttctgggacccatacttcttcttcatgaaccccaggcccacctacgagatcacgttccttgatcaattgccggagagtatgacgtgtaaggccggagggaaatcgtcgatcgaggtggccaatcacgtgcagaaggtgctgggtgatactctggggttcgagtgcactggattgacgcggaaggataagtattggttgcttggggataatgatggcaaggtcgagtctatgtataataataagaagtgaactagtgaattgattttgggtttgggtttactattttgttggaatcctgccatagtttattattattatctctatttcattttatttttaatattataacaataacacaaatagctagtgcctagttgtattttatatctttctttggtaatgacaatgattatgtgataagcattgaatttcttctctttttttgatctagctatatatttatgctctcttttttccttgtttagtttatatccatgaacgatgtaccatagcagatcgattgggtttcattcaaagtaggcgttttgaatttcctttttcttatattgtagaagtaaaaaatactatattacttatttatatgcaaattgaaaagtgagccttttttttttcgatgcaagaaagtgagcactttcagtcatcttattttcttacttaggttaatgatcattgcagcttctacggaaacggaatatcactgcacagtgagcattttatgttgattttatttttaggctttgccaacctagcacttaccacaataatatatttaatttgtttttttttttctgccttgtttaatt

SEQ ID NO: 263379 - DNA, 476 bp, Cannabis indica
cctcacaaatgggtctttgtcgtgaacgccctcaagcttggcgagatgttgaattgatgagtgcaaatgttcaacttttcttgacttcgaagaattggcatgatggatgccaatgtatcatgccaatggtggaggaggaggtagtggccaaaaatgatctttataagtgtaggcttccatgactaatggctcactaggttgaggaatggaaactttttgttgctgaattttgtcaaaatttgggtgattttgctgtgacaatgctacaacattatgagcagcaataaatgttgaccaacttggaatgcttgcttcctcatcttttttttttttcactactttggattgaagtgagctgttataattcctcaaaatttttcccaagtatctccaactcattatgtaacgtccccgcttcaagcctccattgggtccatacacccacggaataatggctcttatacacgagtacgtca

SEQ ID NO: 263380 - DNA, 735 bp, Cannabis indica
gacttagattagttacaataaaaagttcttagtatagtccaagtgaatcctggtcacagaatagttcttagatccattgatagaaaatggatattaataacttgtgaaagtcatattgtattgtccaatgtattctaggaaactgaaatttaaaatttctatttggaatctaaaatttaaagtgaaagacttaagtttatatcaaatatatttcgagttttattttagcttggaccaccactactatctaactctaagtcaagttgccttaaataagtatatacaagtacaggattttctaagatcgaagattaatatcatttcgggatagaatgtctggaatgtagtcatttacgccattcaatttcataaaagaaaataggatgacatcataagcaaatgatgtatactttctaagcaatttctaaatgaaaaagctaagaggaaaaataaaggataatttcgattaaaataagaatccaatcatgtcccggtaggcgagagtcatagttattcttattttataaatctcttcattgtttcatattggaaacactagtctaagttatcatctttggatgtacaactagatgttgcatttacaaatacttatctatcgagatctaacactattatgtttgtctaatggatgacaatcctttcgaattttgtcccattaaaaaaattaagttggaccaacaatgaagactcaaaatttataactacaattaataa

SEQ ID NO: 263381 - DNA, 599 bp, Cannabis indica
cgagagaacgaccccttgttcagacaaaaaatgcccaaacgggtgaggaacctcgcacagatgtctgtccaaaaccgcgtgcacccctaaaaacaagggcatccgcgcgtgtatggaggtgtcacacctcttgattttttttttattttcaaaaattcataactaattcaaataaaatcgaaatcaagttctgtaaaaagagaattgcttaatcttttccaaactatccaagaaaaataattctagaacgaaattctaattattttatgtaaaaattttgcaaacaacaatcaatcatcaataaacatataaatcaatatggatcacatccaaatcacacatacatcgttttagctgatccattcaccaaagttttgactataactacatttgaaaagcacagattgaatttaggttaatttaaatgtattgatagttttatgttagtgcaagtgggagtttgttgggctttgtgccctaaataaaactctatttcaatgtaatcttttctattcaattatcaataaacacatagatcaacatgaatcacatataagtcacacattcatcgttttaaatccatatttcttgaaaataaa

SEQ ID NO: 263382 - DNA, 999 bp, Cannabis indica
tccaccacttggccaacttatgggcattaccacctaacttgtaacgtgccatcttagcatgcacgttacacttaacaccctattaatgtgtaatattattattagtgtaaatcaatatcaagtattacatattttactttaataaaaattataaaaaattattaatcaattataaaacttgacaccttgaagacccataccaaccatcttttctaaaaagaaaattattgagaatgaaagatttcagtaggcttgtacagtgataacttgaattttttcttttgttttgtaaagaaaaagtgagtttttgagatttatatatatatttagaaccagcttttccatacacggaccaaacacgcccttgacacgttccaaagggctcggttttgaacaaatcacagaaaaccaagctaataaatatgacacatcatcattcaccgttgaatttattttgatcaaatatccaccgtccattttaaataacgcaacaactttacttttccacacatccccataataccatacaactcacctcaattcaactgtcactcgccgccgtacagaccacctcatctcactcttcttctctccacgtggcgccacgtgtaccattcgatttcactgcacgtgggaccctccactgcgactccagactcagtctctgtatctttctttcacacgtggcaccctccagtctccgttggcgcgtaaatcgtaaatcgactcgcctttctagataatctgaaagtgacggatgggtgtggtgggaccaggtgctgacgtggaagaggaagtgactaaactacccctactggccaattccatgttccaactagaaataaaaataaatagaattaaaatagagaaataaaagctatttatttgtggttataaatttcttttttttaaaaaaactatttatttgtttattatggaaagtttaataataatgacttgaatgtgatgaattatataatcatcaatatcaacatgatt

SEQ ID NO: 263383 - DNA, 3249 bp, Cannabis indica
gtttcggttcaatctaccgacgggtccagtcccagaaaatcagtttcggtagcgaatttcgtcttcgtttgttcaagttctacaatcaaactgggtttgggtaaaggtgtaaagggcatcgcaggccttggaagatacccaatcagtcttcccttccaattggcctctgctcacaaattaagcgctaagttcgccatttgcttgccttcttcaacgtcagaatccaaaaaaggcactttgttcgtcggagaaggtccttacgtgtatcgacccaatattgatgtttccaaatctctcatctacacaaaactataccaaatgcccagattatttctgggtacttttcggtctagtccagagtcttttactgaatatttcgtcaaagtcaaatcaatcaaggttaacggcatagctgttccgttaaacactagtttattaccagttaaaagatcattgaatcttggtggaacaaagatcagtaccactgtgccttacacaaagttagagacctcgatattcaaagcagtggtcaacgcattcgtcaaagcaatgggtaatattccgagagtgaagccagtagagccttttgaggcatgttttagctccaaaaacatcggcagtactccttttgggcctgcggttcctaagattgatttaatgtttgagaagaggagtgtgtcttggagtatgtttggggcgaactcgatggttcgtgtgagtgacaaggttatgtgtttaggatttgtggacggcttcgacatagagagtatgaggtctgccattatcattggagctcatcaattggaagataatcttcttgagtttgatgtagctaattcacgccttggtttcagctcttccttacgatttggttcgaaaaccacttgctctaactttgactttcaaatttaaaagactcattgtaaagcttcactatattttacttcaaataagttccggaacacctatagctatgctctgtttcggcgagaaaagaagaaataacctgactacaaaagagtatatgaagaaaacatttaaataaaaacatcaataaaataactaacatttacgggatcatcaaacttgaataaatacttatttaaaaaaggatgaagaatttgtttcacttgttcatttttttttaatacaaactgaccaggatttctataaatttttcaattagatttttaatttcgtgaagttatcatactttttgttttggtctagtgcaaccaatacagaggctgtgaaaacatcatagtgtattcttatgttaaattcatttatagtaagatcgagtatattatattaaaataatatttacttgttaatctatattgaaataatattaatatagtgatagcatgcctactttcctatagtaatagcactcatgactccatttcacttaatttttaaagggatttttacacaaattactattttttttttacattttaaacattcttttattaagaaagaagaaatttattaatcacaagcacaatagaaactaaaatcaaacaatgccaaaccaaaacttacaaagagcaaatgctcgattcaaaacattcctatcattaaaactctataaggaatatcactttttatcatatctacaatatgattcacactaaaagtaaaattctcaaaaaaaaaacaagtgtttctattggtccaaatgtggtagatcactactgctaaaatagcagctgcaacctcatttttcatcccttttttcgaaccttcaaaccacctgatctagtcttgatacagctgaggccagctactcttgcaccaaatatggactctatataaaacctgctgagaaaatagacagtagaaaaataggtgcctgtgatctttttttgttgaatcacaaaaagctatcaagttgtatgttaattctttgaaactaatctcgagtgagaagtttagcattaacagcctgccataagataaaacgatgttttggcgcacaaattttattccaaacaaagtaatgataattcacttctcaagtttaatgaagcttttgtacaacttagccacactaaactttccaaggtagcttgcatcaataatgtcttgttgagaaaaagttcttctaatatggtacaatttacgctgatatgaactagcatcagttttaagttgataccccaaaaattttagccctttaagtagatattatgaattcatctaacccaaatcaattcttaatttatgctaattgtctaaacatacttggcaattataactttattccacttagctctcttgaaaaaaacccaaccaactataggctttaggtaagcaaacatcatcccaagaagttaagtgaaatttactcttcaaaccattattgtcccacaagaaccatatgcacatcttatctatctctttcaccatactttgaggatgtaagaaaatactcatccaaaagtttttcaatctcaaaagaatagaattgataagttgagatctacctgcatagaaaagatggcgactagctcatgtgtgcagcctcaacttgatcttcttgatgattataccacagtcctctgtctttcatttagtaggcctcaagggaactcccaagtactttaggagaaatgaaccctcttcaatttgaaggatttaaattagcttctctctgtcatgattggttacccctccaaaaaaacatttgagatttgctctgattagccctaagccatgtactgctgcaaaactcatcaaaaatgaccttcacacacttaacacactcaacattagctttgcgaaaaattatgagatcatccgcaaagcatagattaataatcttgaggctcttgcatattggatcaaatttgaaattactctgtctagtactagcttggagcaaacaagtgagatactctatcagtagaacaaataacaagggggaaataggatctccttgccttagccctttagttccatgaaaacttccttggaatttaccattcatcattagagagtgttaggtccttttttggcaatttagttgtcaaaatatttcttaattaatgtgcattttattgagcattcaatttgtttttatcaactctagaccctttttccagggggagttgtgtttggtacttgtgaacttatttggtttaaaagttagcatgtttctttagttattgttggttttcgattgtgttactcagggggagtagtatcttttgctcttgctaactttgcattgcaggtacttta

SEQ ID NO: 263384 - DNA, 787 bp, Cannabis indica
atttccgggggcagtttttgtcccatgtggcttacgatttgatttctacagctcatggttggcaaaacatgcccttcggttagacgatgagctatcttggttcgaggaggccgattgtggtttgctgctttgttaagcatgtgtgactctgttcaccacgtcaaaaaaaaaagtatatagactattaattcctattcaaattgtgttcaagtgattattttaaaacaatgtcacatattatatataaatatgagattaatatatattatgtgttgaaggttatattatatcatatatagcataataatacacataaaattgtaacatatgaggagttacaaatctgaaaatagattgtaacctaaggatcaaaattgataaatatgtaattatgtgagttgttacatatgggagttatgaaattaatgggataagtttctagctgttagaaactgttacaatactcaattatatcttttaaatgggtattgggacattgggaaaagatttaactcagagaggagttacattttgagttctctgaaaacagttgtttaatagttgtttttatgttattttatagttgttttcgaatatttggaaccagatttttaaaaacgttcataaacgtatataaatgaattgagcttgtttccagtagggctgtacatcggtcgatttagtcggtttatactacatattttctaacccaacgtaaagatcggtttgtaaaattctgcatacaacctacccaattaaaaaaaaaaatcttaacccgaccgacggt

SEQ ID NO: 263385 - DNA, 1703 bp, Cannabis indica
gtcgacgaggacgtcggaccccccgtaaggtcggtgattgagacagtcagtagttccgtgatccgtaagggaaaaatacccggtaaattctacaatcttacatggcttcaggaatgtcaagtatgatgattttgagactgtgtaagtatacaactacacagttcatgaagatgacttaaatggattgatgtgtactatttatatcaacaatgtgcatcttattttttagtaatctatcacgaaaaaaactccacaatcaagtatgaataattttaagatggacaatctcttaaaaaattttcctaaaaaaaatgtgaatggagacaaagcacttatcgtttgtgccttttaatgaaatataaaagaagctaactaaaaattcttaatataaagaggatcgcagatgcctctaatattcttattaactagatgcttagaagacaaatataatggcccttcaatggaactatatatactaattatgttaataacactttgattattaaataatcgtgttaaggctcaatatgaccttattccttaatacatgtgactcgaaaaacatatgcacgtccgggacttctaattaaaacgacaattgtttttcacctaataatccttctttaagaggaaaatttaacaccgaatctgtatataaataatataatatgtatatatttgactagctagctagtgtgtcacaaacacatatacacatttggttatataaatatgactcatgtttgtccatggagtagcttcatctaataatttggacacgtttcaacaaacccatgtggagttgatcaaggaattagtagtgatcacaatcacaacaatggaatctctcctttaaggaatttatatatatgtatattttcaccttgaaaaagtttggtatagtacttgtcatgaaatatataatatagtccagaaaattggcaaacaatattaatatatacagtatgggctcatgtgtctctctcacactgaattaatcctattgagtgagtgaggcacagtactgtgtgaaagtgtttctggtaacatactccatgtatatatacatatacatacatacatatatatatatatatggtgggtccaaagggattcatgatcccttgttatatatatatatttatatatatatataattatataccagaatattcagaccaagtaattaagatcttaatggaatccaaatccactagactaactaatattactggaatataatcactctatatcttattatgccactattccatgaacaggccaccaaagaaaataatggcacaaaattaatacttctttcaacttgatcaaaaaatttatgtaatgtcaattttgtacagctcatacttaatttattttcatcctatcacattaattaactcttattctatactgattttcagttcatgatataatttatatatttagtgcatgcatgaattaatatgtagagagctaaccctgttaatcccagaagaaagagtctcagaaagaggtttaaagttgaatactacgtggctcttcatcaattctgcacaaacaataatatatatgaacacaaaacaatacaatacatacaaatatatatatatataatatatatatatatgaaacactaaagaagagagagagagagagaaaagaagaaagtagtaaaaaagtataaccgtgtacgttttcga

SEQ ID NO: 263386 - DNA, 615 bp, Cannabis indica
ttttatgccatatttttgtaaaaaaagatggaaatcctatatttgtaaaagaataataagtttcgccgaaaaatcgctggtgtcttctataacataatgaataaaaaaataaacacaaaattacttaaaccgattataatttaaatataaccggttctataacataatgaataaaatagataacacaaaataattcgaaccagttataattaaaatagaactggttctataatagtgttacaatgaataaaaacaaaacacgaaataactcaaaccagttataactaaaatagaatatcagttatataacatagtaaatgagtatttttaggctagatatggtatgagtgtaattatttagtaggttggaatatgttgaatgaatgtttttgtttaagttatttatttaactggttttcgtgtgtaagttttcatcttagttgttttactgaacctgttttttgtcttaaatttttaactagttgataaatataactggtttttttatattatatttgagttattgtgtgttattatttgtgtttatttactttgttatggaaccaattcttttcatatttatgtctcaataatttttaaaattgatctctattt

SEQ ID NO: 263387 - DNA, 1307 bp, Cannabis indica
atttccaaataagcgacattagtaagtttttctttgatcacggtctgaccagactagctcttggttatgcatgctattctaattagtatggatggtaagcgaaacactaggagccaggataattccgttggatccagtggtggtcagggagctcagattccccttaatatccgtggctaaggtagaggtcctaggggcaggccatgtggccggggtgatgttaacccgccacaagctgctcaggttgcccaatattgggaaaataggtctgcaacgatgcaagccaggatcaatgaacaagatgatgagattcgacggttgagacagcaaggtgctcctgcaatgcctgctccagaaataccattagctcctgcccctgctgtgcaggccgaacctatggttatagtgaaccggatggaacccctgtacgaaaggttccataagcaatcacctccagttttcctgggaagtcctgatgtcatgaaagccaagcaatgcctaattagtgattaccagaatcttgaattttatgggcgtcaccgacaatgatagggtggccagtgccactttccaatttcaagaagacgctctggtctggtgggacatggtgtccatgattcaggatgttacgacaatgacctgggaaaagttccaagaactgttcaatgccaagtattacaacgaagtagtcagaagtgctaaaagaaaagaattcacccaactgactcaaaaggagaacatgagtgttactaaatatatgacccaattggaccgtttggcgaggttggcctcgggaattgtggcaaccgatttcagcaagaaagagaaatacctggatgggttaaatgcaaagatcagacacgacttaatgatcactactgatgacaacaccacctatgctgaaatagtgaataaggcactccaagctgagggcacagtggagtgcaccttagagtctcgaggggctccggttattggcggggctcctactcctcctacatcaggctttagtaggggaggtagttgctcggccactgatcagaaaagaaaggcacctacagcatccagtggctcgggtcagaacaagagaatctggtggaacctgttgggttttgtgccctaaataaaacccatttcaataaatcagaattactaattaataaagatcagaaatcgtattttatgtttcatggtacacatgatttatttcatgattatatttaatgtataaattctattaagtccagaaaatatatgtatttgttaatgattacagtgttgtcagcacagtggaatataatcatgat

SEQ ID NO: 263388 - DNA, 561 bp, Cannabis indica
tggaatcataactgaattggacccggacccagacctagtaccgaacacagacctagcctcagacttaaactaacactggaactcgggccaggacatgatcgtgtacccagaccggcactgagacccggacctggacctaaatatgggacccactccataacactgacttggacctagatagggatccagatacgaacttggactcggaccgagacccagactaggatcgaaatgctggacctcgatcttgaccgagatcctgatccagacacaaacttggacccgctctcgggacctcaccttggacctggacccgaacctagacccagattggggtccaaacctgaacacaaacacgaatacagatttagacccaaagtcaaagccacacgtagaaacagacccaaagctagacttggacccggacctaaactcgaacccagaccaagatcagaaccaaggacttagacccagtcttgaatacagactcagatcgagattggaatttgggactcgcaccccacctagaccaagaccgaagacgcgaacccacacccggag

SEQ ID NO: 263389 - DNA, 536 bp, Cannabis indica
gttttcaatctcgtctttgagattcttgcattcgttggtgctatgaccaatgtcgttgtggtactcgcatcttttgcttggatccctccgggagctatctttgtacaaaggatgtggtctccggtagtgcgtattttgcctagtggcaaagtacacacgctcttgggagtccgtcagctccgtgtactgggtgtactggggagtgtacccccttttctggcgcttctcccccgtccgggtgctgcctttggaggatctcttactcctcgagccctgggaagggcctgccaggctagcggttggagcggagtgcgagggagcttgcccatttatccctgagggatttccaaaatgggatgatgcgggcgccaaagcctggccctgactatacccgggggtggcagagaactgtatgccgcttattggtggagccgcggtcgggacagtacccgagggcggtgctccgggcatgtaccctgctatcccggtgggatagtatcctccataggccactatctgggcttcttcaaggttga

SEQ ID NO: 263390 - DNA, 2278 bp, Cannabis indica
aatttaggtagttttgcccccaaaaaattgatttttgtggttaagtgttaaaaatttaaagttcaagtggtttagctgccaatatcctaaaataatttaataccaactttatcatgccccaacaaaaacaatatagattaaataaatatgtatacctaacacaatatattcaactcaatataaatatcaaactccatctagaactattttcatacagtgaacgggaagcaaaaaaagaaagagacaataaaatttaaaaaccatttttcagtaaaacagaaagaaagaaatatagtaaaaatcattttgattcactcaaattataaaataaactataaacaatcaaagaaaagagaaatgagattgtacctccaccatcgtcgtcctccattatatacgactggtttctgagtacttttattgttctctcttcaatctttagggatttagcttaggaatgaggatcaaatgggtcgatatggacaaaatcgactgaattttagtaactacataatttttgtcttcgatttttagggatttagggatttggatattgggtgtcgatgattgttaagggtataaaaactgttgaaacagttggtgatgttggttaggactgtttgttaggtagttagtctttctaactactttctgttggttctgttattctgttagtgagttgtttcagctcactctttcattgttgtctgtgtatatatacagcatgtattctctctctctcagtaatggaatcattcattctttcctcactcttttctctctgtttcctctgtctttgattctctttgttcgtttcttgttttcaatgtctaagaaacttcacatggtatcagagcttgattttccgccattaatggcaaatgtcgttactggcaatgggaagagagtcgcctccgcagacagctcacagcagaaccaacaggacacttcaaaccaggttcaaggtcttcaacgtgctcgaaggaaagactcagatgactcctctccaatttacttcagtcacagcctctcgatcaagctgaacgatcacaacttcttactgtggaagcagcaagtgcttgctgcaattcgaggcaaccgcctgcaacgatttatctttgattccgatcctccatcaaagtttctcagtgatgaagatcgaaccaggaaaatctataatccagagtttctcgattgggatgctcaggatcagctactcgtgtcatggcttctgtcatcgatgactccaagcctcttgactcgaatggtgggatgtgaatctgcaagccaaatctgggccactctggagaagtacttcactctacaagtctctgccaaaatcctcgagtttcaaactaaattgcagaatctcaggaaaggatctatgtctcttaatgaatacctgctcaaagtcaaggaaactgtggatcttttggcatctgtaggtgatgttctctctccaagagatcatgttcgagctatttttaaaggcctacctagtgaatatgacacctttgtcatatccactaatacaagacttgaacaatattcagttgctgagattgaagctctgcttctagcttcggaatctcgaattgaaaagcttgatcgtgacattgatcacagtgctcatattgctaccacagaaccagatccaactattgaagccaatcttgccaactatggtcgaggtggatacaagacacaacccttcagtcgattcccaaatcactttggtcactttggccctggaaatcaatcatttggtagaggtaatttcaataactacaatgcttttcattctcctcagtttactccattcagaggcaatgttagctttggtagagggaatcgagtgccagttactcataacaaacttcagtgccaattgtgtcttaagcttggacatactgttcaaagctgtttctatcgttttgataagaattttccaggtcctcctagcagtagcaacactgctaattccaatgctacagcacctcaggccaatatccttacatccacaaatgagtgggacatgacctggtacccagattctggtgctacaagtcattgcacaccagatcctgcaaacatagctcaaagcactgaatacactggtcaagaacagctctttgttggtgatggatcaggtttgtctatccaacacataggtcaaacctttttagaatctaatctatctactcagcctcttgtgcttaataatttgttgcatgtacctgctataactaaaaacttgcttagtgtgtctaagtttgcc

SEQ ID NO: 263391 - DNA, 1038 bp, Cannabis indica
tagagtgttcgatcttcggggcaacaagctttattttggtagtcgctagacgataacttttgtaactaaatatgtcgtaacagttgtaaatttttaaaacggatccctaaatgcataaagtagtttaattaattaagtttataatgtttaaataagaaattttttaaattattcatattttttcataatcactttaattgattagcaaaggtgttcagatcattaagaaattacaataacactcctaatttaatagggtgttacaatgtatacacacttgctatttatattggcatttaataaaaaaatttagacagaataaatttagaaggtttggctctaaaaaataagtttgtgtaacaaaatgaatagttcagccgctaaaatccctttattttatatgtatgtatggaggttaacttcaaatgcaaatatttctacatataattccaatattaatttttctgcacaaatattttccttgtatgcttaatcccaaaaggagtgacatcattatcacataaatccaacccatgccaaacctttctaggtaagtaccttcgaaagtaaaagaaatgagaatcatgagtattaacataccctaatgccctaacttgtacaaacccaggtctccaatcatcattgccagacaacttaagatacaaataacagataggtgatgatgatgatgatgatgagtagtcaaggcattgaccctgaaccctaaactggtcaaccatgcaagcctgaaatggtgtacgaggaacatcatcaagaacatcagggtacaaagggtcaacctttcttacatgtttgttgttcagatgcttaatcaaaacctcattcccatttttgtcgccgaatcttatgctgatcgggcttctcgtctcagctccttttgtacatgttgtttccacggtaactgtatacgtgcaatttttctgattttattttttcattaattaaaattagtcatgaaataattaattataaaaataaatgtggatataatttgtctagataccaaaaaaaaaaaaa

SEQ ID NO: 263392 - DNA, 572 bp, Cannabis indica
cttttgccgcaaatatcccttttctttttataggtgacaccttctaatacttaaaaagcaggtggcatcctagtaagaagccacgtggaattctgaagaagctactatagtatcgtgcactacatacagacaagtccaaaataagagtacgaaaattgaacgagaagaagagtctatcaacaaaaaatcaactccactgttgtgttttgtaggtttggttcgggttatagtttatttttaccaatctatatatttaattgtaatttgtccagtgagaaaataaaaaaactgtaatcctctaatgatttttgtcggtcgaattagcccatttaaatagaatctttattttttattttttttaattattattagtttttagtgttcaaataattgatttaaaaaaataaatacatggtatatgatttttaaaattaaaatatttataatttaaattaatgttaaaaaataaatatgaattgaataaacatttaattattaaataatatttctcaaaaaatagaataaaaaaatatactcatatgtaaactttaaattttaactttaatatttaa

SEQ ID NO: 263393 - DNA, 691 bp, Cannabis indica
gtgattgcaccaaaattgaccaaagctggccagccaaggatggcattgttagagttgggcaatctaccaccacgaaggtgcagtacttaaaagtactctgaggggtatccgggcacagggtgactggtagtctcacttttcccattgggataagtgttgtcccattgaatcctgtgagctgggatccgtttggcgacaaatccctgtccgtgaggcctatggctgtgaaggcttctttgaacaacaaattcatggaactcccattatcgaccaatattcttcccataattttattggcgatgggagtctctatgaccagagggtcatggtaagggaaacgcaccagtttgcaatcctcttccgtgaatgtaattggctggtccatgagtcggagcctttgtgctaaaagttgagtgacttcccacacttcatcgtgttttatggctccagcatagcgctttaactcttttctggtggttcccccattatggggcccaccggagatcatggccactctcccattaggtcttggtggtagcctagggacctgttgagggattgctcctccagggggtacaacgagtgctggtgctctaggtataccccttggtcccccttgaggtaacgggcctcctactggaaccgggttgagatggggtagccggttcttaatccattaatataaatgacc

SEQ ID NO: 263394 - DNA, 623 bp, Cannabis indica
ttcagtgtcacgcgctcacttttcctttgcttaattcttttctttaactaaatatcaaagcaagtgagagactttctttgagtaccaagctgtgttgtctttatattactggtctttttttttgttttacaaaatgagctatgtcagtaagagatattactgtcatatttttgtgtgtgttttcccattttttaagttggtttttgacttgtgtattatgagtttgtgtggattgtttctaattttccagtgtggtcaagttgagaactgaacagttatcaaaatagtctcagtttggttgggtttgaaatggtcttgattttgttccatttttaggtttgttgatttttgtgctttgagttttgaggaatgagaaaattataccattttttaattagtacttataaaaaataagttcttatttgtttatttttattttccctttttcaattgtgttggttttgtttatttattataaaaaaaggaaaggtctattcagttcagctttagttacatttttttcatcgtacaattttaaaaattgcatatggctccttaaaatttaagtaaattataattcttgaattttttcatacttggaaagaggatcaacatgacaagtt

SEQ ID NO: 263395 - DNA, 689 bp, Cannabis indica
aataccattgctgagcggcttcccacaaagtggcagagaagaatctgcagcatacatctccccgtaccccttgaaaatccatttgcatttcgaaatacttgagatgggaaaggggatcttctctccccgtgtacattttccacatcggcattttgaacttgtggggtagtggcaggagattgatctctggtgagaaaggagtttcgcgtgctcagtcacactcaagatcattgtttctttgtccagccatgtcgtggaacattattttttagtttgtcaagctgagcctgtacggttgggctaacttgtttggcattctggtcaattacgtcagcatctttctgagtgggaattggagtacggactctaggctgcatgattgtcgtaacattctgatcatttgttcccttcctcctgtttagatcattccttaggtcatgggttgtccctaacctttcaaacacagaagcccctagtttccttagcgattgattcacttggttgacgggtggaacggcaccattgatctggttggaaccatcaggtatgacttctcttgatgaattaccagacaaggtctgctcgcctaccgctgggcccatgagcagagctcgtgactagggattgggcgactgaccatttgtagtctgggaagtattcattgttggatctttgtctgttccacccag

SEQ ID NO: 263396 - DNA, 564 bp, Cannabis indica
gttgccccagcattcttcaacccaaacatcataactttataacaatagagtcccatcttggttacgaagcttgtatgctcttgatctgtgacatccatttttatctagttatatccaaaatatgcatccatgaatgacataagctcgtgcccagcagttgcatccactaactagtcgatcctgggtagtggaaaataatcttttgggcacgccttattcagatcagagaaatcaatacaagttctccaagttccgttaggctttgggacgagaactggattggctatccatgtgggataaaacacctcacatataaagtcattaacaaacaacttatccacttcttgttttagttctcattgtctctcggaatctaagggtcttctttttctgtctctttactgggtaggttggatcaatatttaaatggtggcagataatgttagggtcgatctctatcatatctccatggctccaagtgaattgatcctggttcgcctttaagaaatttattatctgctatttgagctgttcgtccaggttcttccaaatgtataaacattt

SEQ ID NO: 263397 - DNA, 917 bp, Cannabis indica
aaaaagaatatgttcttttattattcttattacttacgtgctttggttatactgatgagagccatgttgatcatgttcggtgcatattgttgtttcacgacctagtctctatgtcatcataggtagatcaggtgtgcactcacctgtaggtgaaagacctagaatctgtacagggagtgaattaaatctgagccccggtattatggtggatatcagatgcgactacccagttttggatgtcattttctatgattggtattgagagctaggggtctagtggacggtgtgatatgcatttgacgtttgatttgtgattatttgtggtctctctactttgtttatacattttgatactggtgatgagatattttatttttacaaagctaaccatgcaggaattttattaaaccaagggtcctttgatattagttgttttcctactgggctttataagctcaccccctattttctcccattccaggaactcagtttgatgctagtggatgaggatggtaccgttgggaaaggaagtcgttattagtttagtcttattctactctttaatcttctaatgaaactgattttgtatttaagctgaaatggatggtctggatgacttaaattagctatgtactagttaaaaatgaggaatgatggatgctaggtattattttggtattttattgacttattaaatttatctatttggtgattacataactgtagggatattattgttcttttatattgatgagaggtcccaatatttgttactaatattttcttattaatatagaagttaatccattacttttaaattagtattttgtgatataaatacaaggatcatttataaaatttatcttccttcaagggtcaaagtgtgacctttgaccactcaagttatggatattaca

SEQ ID NO: 263398 - DNA, 479 bp, Cannabis indica
atgtaattcgccgagcagttcattccactcaggttgatcggcacacctgaattcgaaatcgaggtaatattagtataacagtatgcatatgtatttacatgtttagtgtgcatgttaggaagcctgttagattacattagatatgtatgttggcttcgtaccattcgacaatatcacatcggtacgactagagtatgactagctgattagagcttaaatttatacatttgacacctttaattatgtatataaaattaatttaattaaatattttcatttgttttaattgtaaagttatttcaattagatatatttaacttaatttaattttgtgttatttttcagatttgaggtacaaatcaaatgtcatttttgaaaattaaaagaagaaggcaagctcaattaagcccaatactttcactcagtgctattctctgtaccaacaattcataataaaatgacaatcaaagcaatacata

SEQ ID NO: 263399 - DNA, 699 bp, Cannabis indica
gttataatgtctcaattccggagattttattaaactctaggtgcattatttgatttatatgtgaattatgttatttttgtaatttttgctcggcgacaacagaaaatgcgatggatggctagtttgatcacatgggtaagtttagaaccttatttcttagtggaaaatattttagagaaaataaaatattgggattaagcggggttatggaatttgaccattttacccctagcttttgagataccctagttttatgagtaagggcaatttggtcatttggttaaatggtgtaaggggtggctgcctattagagtgacacctagcaagcttttacttcagccaaggttaaggtattaacctttatttccacttagggaaattagaagtaaaatcaaggaaaacaaaaatagaaaatcctctatctctttctctctttctctctttcggctgaagcaaaccaagggggatttgttgctgaaattggtattttcagcaaggttggaggaggattcaagcaaaggtaaaaccctagaacccttaagtatgtgttttgaagctttttctttaatttgagtatgtgatttttgaaaataggggctgttaaggtttaaagtttgtataatctgatttctaggttgattttgagttggttttaagatttggatattagttttggtgtatggagatggaattgagtat

SEQ ID NO: 263400 - DNA, 860 bp, Cannabis indica
caaaaagatgatatttaaaatagagaaaattgtgcaagaaaataaagttgaaacttcatgcctgcattaaactatcttctgattagattttggaaaaacccaaaacataaaagttctagatctctctcttatctttccgaaacatcttgaatcgtcaaattccgagtaatatcgagagagttatggccaaaatactattagtcaacgcagtaaaagactcactatcgaactccaacacgggacgcggcccagctttagcatgccgcggcccagccccctaaacagcacaaaaatcgtatttttctctcacgtgggtggtgagggtttcctaattcgaataggcatttaacatgtgcgtttttctatctttttagtccctgaaagcctatataaagggtgaactggagttgattttagtgaagcaattttagaggaaaaaaggagtacgaattttagagacagaagtcaatactagaggcattctgcagagggttttcagcattatttaattctgtatcttcttctctttcttaaagttaatatgtgtgattttgcttccatgaacatgtgtagctaaacacttgattagggttagatggatgttgtttgacattgctttatggttttaatatgatttatttcctccctaatttctatgtattctatttcattcgtgctcaattaccttttaattgcctggccatcaattaactgttttatgatttcgatgcgagatctgagaagtgagtgtcgattatgctatagtgaaatagaactgaatttcgatataggacaagagtacctgtatggtttagatagcttataaggtttctatgtttaatgcctgttgcatgttaaat

SEQ ID NO: 263401 - DNA, 606 bp, Cannabis indica
gataactctgcttcccctcgtaaaaattccaacactgccttcgctaccaagtcaccaacactgtcccaatgcttctgatagaacatggcattgaaaccatcgtctcctgggcttttatctgccggcattgaaaaaacagctaacttaacctcttcaacagtaaaggggagcagaaggtttgaattcatagcatctgtaactcttggttgcacaacagagatcacagcctcagtatcctcatcggcagggaaagaagtcatgaagagggtagtgtaatattgttcaataatattcagaatgtcatctccatcagagcaccaaacccctgcttcattaatcagtcctaacaaatccgaaaagtagaactgaattagattgtggaggaccaaaggggtgctatgaacaccttataaaaacataaagaataagactcttacaatcatagagaataaggagaaacttcagcactatttattaaactaatgacattcttttttatacattgatcaactaactgatttgcatcctaatattccccaatcaaacttaccaggaagaaacccaaaattaatacaaaggacacacacgagaattataaatctacat

SEQ ID NO: 263402 - DNA, 1684 bp, Cannabis indica
cttcagaatgtggcagcaagactggggttgggcatctgatttaatgcaacatttttctcctcatctgatccagtccaattagtaattggatttgaaaaatcatcatttgatctgatccaattagacctcaaaatctaatctaatctgatccaattactaattggatcaattttttaataggatatccaattacagatctaatttttaatattaacttaaaaatatgaagaaaagtacataaaaattaaatatcactatttatttaagtttaatactccataaaactatcattattacaagtgtaatgcaatcaaatttttgaaatgactaaaacaacaatattactaataataaaatagaacaaaacatcatgaaaataaatatacaatataagcaaatgttacaaatttaacacacacaccaaaaataatccagtaaatatataattaaaatatgtactttttattatacataaataaatataaattatttttaatgtatatgaatgtaattggatttgatcggtttttaattaaattttgagaatgacatcccataaccgatccaatctaattagaatccaacttttaacactcaatccaattgtatttggatatccttttttttttttttataattagcttggattggattaattccattcaattggatttgattggatgttgcctacccctaagcgggaccttaagtttcataccaatttagtggagatttagaagaagaagatagcatgttctccaatatttcaaatggtccaaaagttaaagcaaatgaagaacgagttaaagagaattaatcaggttaattttagagatttaaaagttgtagaagctcgtgcatatcacagtctgttgcagtgccaaatggttttgcagcaaaatctaattaacaaagagctggtggagaatgaaaaagttgctcaaattcaatatgtagagattcatgcaaattacatttcttttcttcaataaactcagtgcttatatcaaaatattattacttggcctaactgataattattccaaagaaaattcttcagagagtgaatgcaatagaagctttctctagaaaggattagtagaggctaatggccttggactagtggctttggatgaaatttgtagaccaaaaaatgcaggggattaggattcagaagagtacaagaatagtttgaagcagagatatggaatattgtttgtgcaactaaaacaaaataagattccttatgggtcaaatgggctcatgtcgtgtacctagaactaaagatttggagggagtatgaagcgcctataccgagtagttggtattgaaaacaagtggtgaatgtgaaaaagaaattcaaggcaataaccactattaacttctccaatcaaagctatcaaatcaaagaaggttatactgctttatgctctccccatcataatcaattatggcaaggaggtgtttgggatagactcacaattccaagacataggtatattctttggctcatattctttggcttactattacagactgtttgagattgaaaaaaaattatttagattcaaaattgttaaccaataaaatctgttattggttatatgctgaagttagttatctgtcagggattagctagtttgttttactgttattttctgttactaattcctttgtacttcag

SEQ ID NO: 263403 - DNA, 1754 bp, Cannabis indica
ggttttttcatgggaacattcgggcataccagtaatagacccagcaattataacccacaaattaaatgtgaacccaaactatatccctgtcaaacaaaagaggaggaagatgggagcagattgaaacaaagctgtgaatgacgagattgagaaaatgctaaaaaatgatactattatgcaggtacaataccctatgaggctcgccaacccggtagtagtaaccaaaaagaatgggaaatggagagtttgcatagactttatcgatttaaataaagcctgcccaaagtatagtttcccgttaccctacatcgacatgataatcgacgctaccgccagacatgagttgatgagcttcatggacgctttctcagggtacaaccaaataatgatgcaccctcctgacaaggaaaagacatctttcattaccgagagagggacatactattataaggtgatgcccttcgggcttaagaacgccggggcaacctaccagcggatggtaatgttctctcagcaattggttttaaccatggaggctttcatcgacgacatactagtaaagttcaaggatggatcgaataacgtcgatcatctccgagagtgcttccaaatcctccttatccattcaatgaggctcaacccggcctagtgcgctttcattgtcggctcagggaagttcttgggccacctggtaacccgaagaggagtggaagtgaatctagatcaaatagaagcatttcaggcagcaacacaatctcagaccgtaaaggatatacaaaaattaactggaaaaatagtcgcgcttcgccgcttcatctcaaagctttcagataagagtttaccattatatgtcatgcttaagggaaaccgcgaattcaattgggatgataagtgccaacttgccctggaaacactgaagagatatctaactaccccaccaattttgtcgaaaccagagccgggaaaaaccccatactcattaatgtatggaatgaaagcagtcatcccgacggaaatacatgtacccacttcaagaaccgagttaagtgacgaagaaaacactttcctactactgtagggcatcgacgacatagaagaaagaagggaactcgccttatctcagatacagaaccattactcataatggcaagacaatacaacaaaaaggtcaagcctaggaacttcttcttgggggaatcgctccttaaaaaagtctttcaaaatactgaggaatctcgggcaaaaaaattattaactaactggaaaggcccatttcgtatagtaggttcgacgggaaaatgagcgtataaattagctaccatggacagaatcgagataacaaggagctggaatgcaaggtacctttagaaattttatgtataataattataactagaactatgtattatcctgtatgaaaaaagagttacaaataatgaaaagggaggattaatccaaactgggtatgttaagacctttcacgaaaggacaaaaaatgaatgaaccgcattcacaaaaataatacggcacctaatgaccaaagtacgatcaaagaacaagtcgcctccacgcagtaagatgacacataaatgaagtaattcgtgagtacttaaaaaattatacaaagcaactaaaaagagaaataaacagtaatgcataacaaagtaagcaaataggataggggatattggaggctaaaccaccctaacttttaggtttgtaacagttaaccacaaaaactaaaattttggcgg

SEQ ID NO: 263404 - DNA, 788 bp, Cannabis indica
agtttaattactgttatgttaattttgaatcattgctcaaccattttcatgttatttcctcttactttaagttgtaattagttggttttacatcaaactttgtttgcaatccctgtggagacgatcttacttatcactttattacttgtttgactgcgtatacttgcgtatataattttcacaacacccatttttgtccaatcctctaagtttggcaaaatgatagataccaagataggtaatagtggtaggcagtagcccttccttcgggaatgattctgtatcatcttttcctccataaatacaaagagaggtaagatgaggtaatgtttgccaattccatttcatcctcaaaaatatatcatatgatatttcaagactagacaaattaacaggcagaccaccttcaccttcaaggaaactctttatcaacggacaacctttgatttccaaatacttcaaagctgagagggaactcatcttctgtggcaaccacttcaatttatggcaataactaatctccaactcactcagcttgggagcaataagtccaccatttggaaaagatacaaaactatcataaaaagagataattaaatatgttagttcctcaatagattttcccatctgacactgagagtagacttcgaaagtaggggctggattcaatctcaagagttttgagattgggaaataaatccatatggagggatctaacgatgatccacaattcctcaagttaagagactgaagaggagggtaatggtaatgtggagaaagagtggaac

SEQ ID NO: 263405 - DNA, 509 bp, Cannabis indica
attaattaattcattgtatatattataatatataacacagagttcggtatatattttgaattagtatatgaataaagttttctttctgctaaaattaatgaatgaaagttgtgtatatatatatagttatgctatatacatgcacaacacaagtacttgatatttatgcttctctaataattggataatttattagtcgttggattgaatggatcacaaagtgcgtatataatatatatttaatggaaatacactcatcatctgtacataaaatatctacgtttgtaataacattaaatcattacataatattatgagaatggtgatcgtcattaaatgagaatggatcatcttaaaaacatttctctatattgaaatgtgagattgattttaatataagcttaattatatttttaattttgtctatctattgttttatttgaaaacaggtgaataaatggctacaatatacacagtgtaaagtccttttttggcaagttaggtgacaa

SEQ ID NO: 263406 - DNA, 781 bp, Cannabis indica
tttttgtttgtttgtttatgtctgcctaaatcacaattcacccatatttcctcattgatatcgtttctaatatatttagcatcgtcttcctcaattttacgatcaattctaataactttttcatgaattggttgcccaacactgaagtcatcataacataaatcaacattctcttcatcctcttcattctctaagaacctcctctctggtgtcgataaaacaacagaccatttatcattatccggatcagaaatgtaaaaaacttgaactgcttggctagccatgatgaatggatcattcttgcttcctctcttacttaaatcaaccaaagtaaaaccaagctcgtcagtttttactccaacattattgtcaaccaaacaacatttaaaaagtggaatttgaaacgcaaaataattgagctctcacatttcatcaataaccccataatacgtcatagtacctaaaatagggtttctatcttttgcccttgtaaaatttatgctttctacgacgatacgtatcccactattttgaacctcttgagcataatttcttggtttgtattgaaacgtttaccccttacaatgtacgcttcgtgctttgctaccgcaaaagttggtccaagggaaatacgactcaacacatcagatactctatgatttagttcgttcaactttgctataatggtattccttaaccacgcaatgaaagtttgacgatgctggtttgcaacccatttttatttttatttttatgatttcttggaaccattgattgtaac

SEQ ID NO: 263407 - DNA, 697 bp, Cannabis indica
tcttaagtaaataatcagtattgaaatgtatgtttaagaggtttagaagttttagaggtacaattaagaagctgggatatgttttcgcgaattaaagaggactgcaatatacatgacatggatatgcctggaataattgatggtatgataagtatgaagttaagtgatacctcagatggctagtatattagaagaagcaaccattgaacataactatcagaatctattgacattacaaattcaaacttcaccaatatagtaaggtaataccaaagtagataaaagttagtatagaaaactagctaatccacaatcaattcgacttgattgaaaggattaatagaggataaggcaccagcagacatattagcaaagaggttacagtagagtggtataagaatcaagagactacaaaatgaaccagaaaatattatcctaaaaaaatggaaggtatgacaagtgcaacaaatacatggataaaggaaattaagaagtaaacgttagacaaaaagatggtcgaaatagatcattaaatatttatatatagaagaccttttaaagagcttccatgtttaattttaagtgtcgtcaacacagtggaacataataatgattatatgttcaaaagtttaattccatagtgtgtcagttcactggatttagactggcatgataatcggtgataaggtatacttac

SEQ ID NO: 263408 - DNA, 827 bp, Cannabis indica
ttaaatttaaggacttttgtctaatttcattcaattttactattttaatgattgtttatgtactaaatcaagcttcccaaactttgatttctaccaaattatgtccttcgaactttgacatgtactaaatcttgccccctgaactttcatccatgttaggcttctttactaaaactaaaaaaaagttcttaagtccaacaatctcaatagttcaggagtcatttttaacgactttaaaagctcaggtggcataatttggtacatgtcaaagttcagggagcaaaaatcctaattattttggcttaatagtaatttcagagatcactcatgaatcaattggacttatacattgttcttgatatggttgccaaccaaagctggatactagagcacacaaacacttgttactcctatgacacgtttaataaactgagaataatcaatgaaagaaatgaatcgatttacaatatgaactaattggaagcaatatttgttatgttgtttactaaattgatcggaaaagaaatcaaaattattttattttattcacataacaagcaaaggtaatcagaacattttaatctaaataaattgttattattagaacatgtaattattttttaggctaattaggatttttgtcccttgaactttgatatgtaccaaattatgcccctttaccttttttgtcgttaaaaatccctcttgaactattgagattgttagatttacggacttttgtccaattatagtaaggaaagtataacatggatgaaagttcatggggtatcatttgacacatgtcaaagtttgagggacgtgatttg

SEQ ID NO: 263409 - DNA, 1734 bp, Cannabis indica
tagtaattctcttcatcaaaacatggtactctttataaaaaaaaaaaataaaaaaaaaaaaaaaaaaaacaatacacagtacattgtgaagggtggtcctatcctatccatatttttacagatgtcacttagtggtccctaacgaaaagtgtgaactctaaattctttgcaagtaatccaaaatggcccccaaacgacaataggtcgtggtttttattttttctttttttcaaataaatatggcaaaggaaaatgaacaagtgaaagaaaggaggaccacatttatttccccccacaaacaaaaattaaataaataaataaagtgggattggtgacatcatcttctccttttcttttcttttttatttggtacggtatggaaaatctattgatgctaatgtcagctggtccaggttgatcgatttgcattgcatatagagtgttatatagaaaataatggttagattaagcaataacccacatgtgcctcctcattatgctcaaactcaactcactatagctaataaatatacaatacatgtgggtgaattcaggctttcacagcctttaaattttaaaaagacacagtgggattcggcttttggtgaaaatatatattaatatatatttatctgatttgagtaataaaagaaaagattatgagatatagtcagaataaagatttaaagaaagggtaagtttcaagtgggatggtggttgctcagttctctttcttttctttttttttttttactacccctttttcagatatttgtattttgtagggtgtgccaaattattgagcagtttcaaacctagtttagtatcatatgttatgataatgtatagaatgataaaaaaacttttcaccaaatgggctagagtttaacctcatttgaggccaaaataaagtaattgaagtccttaaaaatttcgtaacaagaatgataataatgagaacactacaaatagcataaccactatataccactcttgtgtcaatttttcttttttagtgtaacctaatagtattttacaatcatatattagttttaacttaatagcttgaaggtcttaagttcgaacccacgacctttccctttttccctatctcatccctcccactctctgtcattattagttataaataaaagcaattgaaattcctagaaagttatatagttgtgtatcgataagaccattcactgtttcttaaagctcgatctctctctctccaatgactcgtaacagggatgacaatagtgagaactatagtatagagacaatgacaaaggttatgagtgggctcttaagaaggtgtacattgcagttaaaatataagtacgaaacttacaaaacagacacagtgacataacaattcttttaactaaacacatttaattaaattagaatgtcccctacttggtatctaatgtttttagtacatgtattattactgttagttgaacatagtatgagtgagtgagatagtggatagaaacgtccaattgaagagctgacaatgataaaagaggacggttactttatgttacattgataaaatggagtgtgggctagcatcagcatggaccctagtctagtctagtctttttagtagagtaaaaatcagtgtttgaaatatgaatattctgataagaaaacatcgaccattgtctgtcactcacaatgttttaagtgtgactgtgagtgagtgagtgctttttctagtctatt

SEQ ID NO: 263410 - DNA, 1259 bp, Cannabis indica
tgactattttttcaaaccaacccccacatgtagtttttctaatttttcaagccgcacccgcaccacgaaacttaaaaaccgcaaaaaccacaccgcaaaaaatggtgtggtgcggtgcggtttttgcgatttctgaggtttggactatcaccaataattaaactatcacaaatacaacaaagtttgaggaacacttgtcaaaaataccataagacttgaaaataaatatgaacaaaaaattcagtttcaataatacaataattagtgggctttgggttggacattcacatattggacctaaataaatataaaaattggtatattttataatgtgcggtgcggtgcggtttgaaccgcatattaataattcaaaaccgcaaatcgcaccgcgcggtttagaaaaattcaaaccgcaaccacaccgcaaaaaatttaaactgtatttttttagtggtgcaggcggtttgagcggtttgatgaacacccgtaagtaatattatgtttctcatatataaatccaattcaaatccattcttatgcatcaaattgcacactcttttcactcctctaatggatcttaatccaacggaagcccacctcttgagaccttgatctcttgtatgcttccttgcgtttctttaagatctagcaatcatgaaagaacaaaggataagcaaatatggcgagaggggtccctttgcctcagccctctggacagcttgaaagctttcgatgggccaccattcaacaaatcctgatagctcaccgagctaacacacttcaaaatgaggcttataacgctatcacaaaacccaaacgcttgcatagccttcttcaaaaaattccactcaattctatcataaaccctagacatatcacatttgattccaacaaaaacatccttccctattttctttacatctcatgcataatctcttgagtaataattgagttctctgtaatcattgcccttttacaaatgccaattggtttggagagatgattttagacaaagtcgctcgcaacccattagccaacaacttagcaataatcttgtagttgaggttacacaaactaatagaactaaaatcgttgaaggttactttaaagtgccaaacttcacaaaatgtagcattcatttattgatgtaattcatcattaagtcaaatatattttgattataaagagaacatacttattagtatcttgtgttttatcgaaaaacaaatttagtattctgtgtttataataatatttat

SEQ ID NO: 263411 - DNA, 2110 bp, Cannabis indica
aaaaagcttgatataaacattttaaaaagaaacattaaattgattaacaaacaaaaatcgataaataaacataaaatacaagattcttttcttcaaaacctaaaaagctcgttctcccaattaagaagacgaacgaacgccggcagttgagaagacgaatgaacgtggactgagctttccaccttgtgctgaggacgtcaaaatcgacaagggtggcttaaactcatgcatctccggcggctgcctggggaagactcccctggatatggtaaatgttgaaactggaacttgaatgataaattattattttgaaatggcttttcgtgtcttttatatgtctgattgttaacttttatattgagtattattttagtgttatttttgtttggatatgttaatttgtgagttaggtgtaatattaaattctggtggggtactgtttgtttttggaaggtagtgtgtgttcacatgtgaattcattgagtggagtagttaatgtggaatattttttactgtggtaaagtgtatatgctttgggagttgttttttttgtttgtgtgggtcatgaagtgattttttcaatgatgtaattttttggcagacttggaatatgagttgttcacagtaatattgcaccatggaggaagatggtacaatcattttgaagagaaaaaatatgaagggggtgagattgattattttgattattgtgattggctagatttcagcatgtctgaattggagaaatttgcagtggtacttggctatgatttgcctattcaactttggtggaggccatatgggaattcgatgaaagatggtacactgctcatttcagataaagagattagtctaatggcttttgatatgaaaagaagaaaatatagaaaagttgatatcttcctaatagcagttttagaaaatagtaatatgaagtcttcttgcacaattggggagttccctgatgctaatgtgcttgctaatattgtagtgaatccacaacatgaaacccaagaagcccaacatgaagaattgaatgaaaatgtccaccaagaagctaatgaagatgtccatgatcaagtacaaaagactaggccttggaaaggaaagaagaaagttgccattgaagatgatgatgaattcgaagaggaagaatattctcatcacaaagaacatgaaattgatttagagaatactactaatccaagtatatggtggtcttcagtgactgaattatgcaatgaaaatcatggagatgattctgaaggagtaatatctgaagatgacttgcacagcttggatagcgaagacgaaaataatccaattcgaaggagtgagaaccaattcaacccaaagtcaaactttgatgattttgagtttaagagatatatgctatttcctacaattggccatctaaggaatgcattgaaagaggtatttataaaaacaaatagacagtactcatttgttttcaatgacaaacataggctcagagccaaatgcaaagctgaaggatgcaaatggtttatttatgcaagattagtaagtggggataacaacactgttagggttaacaaattgaataatgaacatgattgtggcatagtctttgataacaaacttgtcacaagttcttggttagccagtcattacttggaacagtttagacttaatccaaacatgcaatatgaggccttcagggagatgatatctaagtctaaatacagtgacatctcaggttctacattttacagggctaagaagaaagcaagagatttgttaaatgggtcggtgaaggatcaatatgcaatccttgacgattattgtaggcagttgctggaaacaaacccaggaagcacagctatacttaaaactagactgattgatgggaaaagagtgtttgagagggtatacatttgtttgaaagcctgtaaagatggatttaataagggttgcaggcctctcataggattggatggatgtttcttaaaaggctattgcaaaggtatgttgttggctgctgttggaatagatccaaacaattcacagtttcctattgcttatgcaatagttgagaaagaaaatacagattcttggacatggtttctaa

SEQ ID NO: 263412 - DNA, 819 bp, Cannabis indica
cttataatgcttaaaattccactgatcagtttttgattaagatatctctctatggacatgaccgctcatactacactacaacgatcgctttgtgaagacaagtttgagcgtaatcacatagcagaatttacatgtttccagtattatgacaataaaggattcttttccttaccgtttgctccaagaccagacagctcgctaatcaggtaattcaatttcccttattgcataccttgtcacatatttaatccacatatttcaaacacttaaaactcaaacagatatcaatttcaatatgcgtataccatacacatattcatagtatagatagtcagtacgcaacttctttccatcatacactataattgtctaagcaagtaaggcaataacaaataatataaacactcactataccatgagtcgacctcttttcgcagcaaatatacatatttacccagtcttcaggacctttaaaacaatggctgctctgataccaagttgtaaagccctattccataaggatgttacgtatgtgattttataaactaatttaatactaatagattacttagttataaaaaactgtgataataataaaaacttgactaaaataaaagactgaaaatagaaattataacggcataaaaagcgtgttctggggatccctgttataaaacattttacaaaaaagactatagacaaaagaaattcaaaatacaacagatacagctagtccaaaacaactcctggcaactcaggacacaggccggtggggtgaatatgtacattgctggagaaggcagtcacctcatggcaact

SEQ ID NO: 263413 - DNA, 957 bp, Cannabis indica
ctatagattccatgtttatgatagcactcccactcaattgcactaccgtaatcatgtgaacaatgcaacattaaatgttatttctgacctatattaataagtaaatctgattatattgaaatgagttttattaagggcataaaacccaacaaaaagtcctcagggtaaagcccatacttcactagattatcatcggaggtccactggatgatattcctgtcttcctccggcaaccgggcaagtttttgagctctatccctaagagcaagggtgaggggaggacggtgatatgtcggaatctgctgaaacaaagttcgggtgatattcggatccttcaccatgaagtactcatcaacaaaacgccctattttgctgatggccttgtcatccgtgccgctcaaccacttgaagcctggctgagagaagtagaagtaccccgacctgccttgcttgggggtagacttcaggtcgaagaaccaggcaacctcgtggggggaaggagcatcccatccttgtgaaacgtagaggacgaagacagcggacaaatacttaatgccctttggagtaatttgagccgggcagaggccaaagaagtctgccacatccctgaaatacttgtgcaagggcattagcgccccttgctggtcgtgagcccccgatcaggagcacattcccttatcaggatttgtggcgcgattgtcgttggcgggaatgtagcagtccagctcgcccaggtacccgtcctggtcgagagttcggaagcatgcctccgaaatcttggacggacgacttacccagctggcgcccaaggcacccttgcctcctatgaggaaccgcctcagcaagctcctcactgacgtagtccacgccctcaaccaggacatctccgtcagcatcgactagctgcccagcctcgtggtagtccccgaagttaggggttcaacctcttcctctcct

SEQ ID NO: 263414 - DNA, 369 bp, Cannabis indica
ttgttttagaattcatattagcatgttaatgaaacatacttgttagtaaatctagatcctggtaaaatatttccaacaatacatgtatatttttttttacttaaaaaagagtactatgtgaacttatactgcatttgtagtcacatagagtcgagacaatacagtatgacactctctaaatgacaaacctttatatctttagaattgtaagattaattaaaaaaataagaacaactaattttgtttgcttatgaaatccagattctggtatataatgaaagctaatgttgttataaaaaaaatgggtaaataccattttggacactgtgttttgcaaaaattacagattggaccctgtgttttgttaaa

SEQ ID NO: 263415 - DNA, 782 bp, Cannabis indica
accacaaatgggatccaaatctttacacatgatccagggcttgtacccaacccgtagttgtgtctagatcttggaatcgtaaaaagacccaaacctggaaccctttccagactagggcccaaacccacactcgaaagcgggacacaaaatcgaaataagaaccagaatcaggaccttggaacacgacttagacctcgacccagaactagatctagatggggaaccaaacacggacccatacctcgactgggatcgatacctagacccagacccaaacccagacccagacttgcgacaggacctacgacctagaacctggaacccagcacccgtgactggagacctggaccaaaaacaaaacccgtacaagaacccagacctagaccaagtcctggacccagacctgaaccgaaacctacaccaagacctagacccagatccagaccccgacccagaggcagactcgtactggaactcgtactcgaacccgagacttaaactcgaacccaaaccgagatcaacacgaggacagagccctgaagcttcactgggactagaaaggagctgggccctgagaatcgaatcgtgacctagatgggggacctgggccccaaactcgaaactagacccaaacctggactaaggatccgaacctagatcggggacttggaaccaaactggcccccaaacggggatcgagacccaaaactagaccccaaactcgagacacaggacccgaccttggacccaaaaacgaggaactgactaccgggacacaactc

SEQ ID NO: 263416 - DNA, 509 bp, Cannabis indica
ctgaaaatccaaccaaactctaccaaactttccagtatacctgtacaatgcttaaataataatttccaaccagtatttcacaaaacaaaccaaggaaattcaacttgccattaatgattaaagctttaaactcaaagctcaaagttgcataaaacctaatctaatcaacaataccagcagctagggcccttaatcaactcaaattaaacttagaattcaaaccttaagcatatctaaacctaacatccactaaacttagaaatcacatattaaaactaaaatacaacttcaaaagcttaagggaaaagaagctagggtttaccttatctccatgaacacttgaatctctagttgatttccagcaaaacaatgaagatgagcttggtttccttctggtctaggttggccgagcaaagagagagaggaaaaggaaagaatttccttttggcttttctttatctttcttaattttcctcaaatgaaaaggattctatctaatcctttgctga

SEQ ID NO: 263417 - DNA, 854 bp, Cannabis indica
tggaggtatttcgatccttatattcatatagtgtatatatttatttattccgcatgtcatatacacatacatatattttatattatacgtctaacatgctcaccaattgcacattacttctgttgatattcataatataattagttataatcaacaatttttcaaaagttatattgtgccatttattcaatgttgcaataaaaaatacaaaatgagaaaacctcgttttttgcagtttcatatttattcattgtttaatttcatgagggatggattggttactggatttggactatctaaagtgtcaagtattcctgtttcaaatagtgatataaagtggtcaatcattaaaactttatggtaagtatgtgtccatgttaattttaccacctgaattttattttaaataataataattaataatagatctgtattaataatatgtattattgttaattttctgagtaggcaaaatagatccgtgcttaagacgtaatctcattttacaagactttgaaaataaaaaaaaatattttatttataaataactagtgaaataatacgtgctccgcacatgaactaattacaactgggtaaatactattttggactttatgttttgtaaaagttattaattggacattctgttttgttaaatgataaaatggaccctgtattttccaaaattgtataaataggaccctgaattaattttttgttaaattaaaacttagggtgcgtttggaaagccacaatgtaattggatttgtgtgtaattgaaggtaattacacaattggacatgtttgtctgaccatgtaattacactgaaactgtgtaattggaagtaattgag

SEQ ID NO: 263418 - DNA, 1081 bp, Cannabis indica
tagcaggtaatgacctactccccttttagttgtattgataccgaggaataatactgttcagatcactataggtgggatctgatatagctaccttaaggatacaaagtaggaatcaagatagtgaatctctagtattaagaatgcttctatgggcgtgtgagagagtgagggagagagagagagagatatcagacttagagattagaatgaggctctagaacttaatgacttggaggctagaactagacttattgtttttttaagttagagttaaggccctttatataggagagcttaaaccttaatttataattgaaatccttagatatttttaaattaaattaattttactacaaaagactaaaatgcccttaaacatagatattttctagctactttatttggctattagagcccaattcgtagtccaatcaatagtccatgtgtaagactgtacaaagaatcatgttaggtcctttcctagctagttggccaagcacctgcagggagcaggctggccaaaaatgtggtgtccagaggctgatcggccatagggccggccaagggtggcccggtagctcctttgaggaagttagtctgtcactttatgttccgtttgagtgtcagggtccctgttggctgaggtgttgactgttgggattttatgccttaaataaaacccattacaatctaatctgatttgtcgacaataaaaggatttgaaatcatttatgcttacatgttttattcatgtttatggtttaatttgtatatagatacacaaaatctgctaagtccagaacatatagtcatacacaattacagtgttttcaacatagtggaatgtgattgtatttatatgtttcgaaagacaaagtccctgcttcatcactgcattggatttacacagatgtgataatcggcgatgaagtgtacttacactttgtataagtgttatgttctttctagaacattggcatagtatactagtctcaaatgtatggagtatacattggactggaccgatattgatcttagtaaagatattataatacttaccattatatctttccaagtcaat

SEQ ID NO: 263419 - DNA, 529 bp, Cannabis indica
aatcaaatcagcttgtaagataatcttggggtggtgtcgaaatgatgcaacgtttgctacttggaagttaatctggaaatctcgaattcacccaagattaaagcttatttggtggcaactggagagagatgtcttcccaactagaggtaaactagctaattttattgagttatctaatgttagctgtccaatctgtggtgagggaatggagaccgttttccatcttttatgggaatgctctcttgctaaagctctttggtttaattctggactgggaatgagggtggacagaattgatgttcatgaatggcaacattggtgcacttggttcaaaacattgcataatcggcctcctaatgtctcttttgaggatatcttaatagttggcctatgtatagttgaaacaatgtggaaagaaaggaataacataattcatggtggagatagatcaattgtgagggaacttattctccatctaaatcgaagaatctctaaacatagactagtagccactggggatgtggaggag

SEQ ID NO: 263420 - DNA, 525 bp, Cannabis indica
attagtttgtgtggatggagcaccaactactgagggagtttttcctagtgatggacagtccctgacttggatgatgacgtgcctttgtctcggattgctcaaaatctaaagaggatagagggggccctctgccaaagcttggcatgtgggggctcagttggtgacgcttctattaggatcaagcctggaggcaagtgcttcgcaggacctactcaccccttgcctacatctagaggcaagggaaaggtggatgcactatcttttctattcgtgtcttgcattgaatatttatgacctacattttgactttgctactttctttttggagatatgtcttccaggttgagaggtatgttggtggaccttctgatgattcttcaggtcatgcaagggccaaggtggctcagaccactcatggtagagatgttgtcggatcatcttttcttcctcctcgccagggcctatactgttgggttttatgccctaaataaaactccatttcaatgtaatccgtttattcaacat

SEQ ID NO: 263421 - DNA, 554 bp, Cannabis indica
tatataaaaaatagatgacaccttaaatttggaagcagtttagtagtttggagagatttactgtcaaaatttgaacttagaaagttaagtgacagtgaagtgatagctgagaaggtttagccgcaaaaaaactctttaaagaataaactataatgttcaaagtttacattgatgacattgctcttaattagttaagggcatatttcacaatatctaatgtaaaagaggaaattacgaaatatatatttttaaaagtttattatttatggtaatttttattttgagtaatttttatggcattttttttggggggttttatataatgtttttgtatgccatattttagtaaaaggctatttaaaatctcatatttaagtaaaaagataccctaaatgctactgtctctctctctctcctctcactttgcattttcaattcaattatggaataagtaagacttggaagtggtggaattttttcttgcttaggagtttggtgaattgaggtagttaacgtgaactcatctttgagtaatttctgagattaatagcttg

SEQ ID NO: 263422 - DNA, 858 bp, Cannabis indica
taaaaggctttaagccaaagaatgaagacaattggaactcaagtcttggtgagaagggtgtgagagatacagccctccaagctgccatgatgaagagaaagaaggatttgattattatttacgcttgagagtgcccaatactaaatctagttggatgaataagactaataatgaaagcgaatgcgagagtaaatgcttgaccaattgctcttgtatggcttatacctatagctatacaaatgcattgtgcgccctctggttcggagatctgtttgatattcaacaacttctttctaggggacaacatacttatattcgaataccaaattcagaaataggttcacatcacatgtgttgttagtacattttatatggatttccttttccttcttcaagttttgactaatgtttgcttcttttgtttcacagctccaaaaattcataatgaaacaagagctgatggtagtcgtcgtaaggtgaaagtggagagagcagtcataattatagctatcatcaccagattaagtggtgggttcattttgattggcttttacattcggaggaggagaagcatttttggtaacattctcttctctaccttttacttcattatgtctttttttaacttttttggagtgcgctcttgtaattagatttcagtgtaatttgagattattactcaacttgacatgtttgtgtgcatttgttttggggctttaatccttacaaccactagtaatttttcagagagaaacgaaagccaagatgatgacttggagcttccattttttgacctacatacaattagtcttgccactaataatttttcaaaggctaataagcttggagagggtggtt

SEQ ID NO: 263423 - DNA, 892 bp, Cannabis indica
tctcattatttctctttccttataaataaaaatcctaaatttctaaacacataatactcatcccctttttcttctcagctgcaccccttcttcttctcacttctcagccgcaccttctatctctctcaatcgcacattctctcttcccagcacggtggggctctgacccaccgtcgaccaccccttctcctccccagttctctcaatcgcacactcctcagctcactcagtcgccttctctcattctccttcgcgcacaaacctccgccaggccgcctttgtttcccatcagctaaagttttgagatcgcccaaggtagataggttttttttctatttcgtgcgtctctctttcgctctctcttgtggtgacagtgtttatttttctgtgcagcgatctcagttcgtggtgacagcgtttgaagctcgccacagctcggggtttgtttgaatcacgctatggatctcgcctcgtggttcgtttgaagctcgtcatggatctgatttgtttaggtttttgttggttctgtcaatttctaggctatatttcttttttctaaatattgtagtaaaaatgtgtattttatgaatgtaataggttgtgggtggctgctgctgttgttgttttcagctactgccgtgtgatgttggccttgtgccttgtttgtattagcttatatttttgtataatgtttccctttttttaaaaaaaaaatattgtctgtaaaaaaaaaattggattaatatttaggtacttactaataatgtaatttattttagtaatgtttgttgttgaattagtgagtaataatgtaaatattgtgtttgtaaaaaaaaattgggtaaatattttgtttagtaacagataggtttattagaattatgataatggt

SEQ ID NO: 263424 - DNA, 2665 bp, Cannabis indica
gtaattaacaaattacgcttatatatccacttattgagtctccggggtcgccgaacctgaaatatttttattccacatatagctcatattacattcacacatgctatataaatctccgtaattaacaaattacgattatttactcacttatagcaaaatttaaattttatgctgaaataaattagtaggatcataatcccacttattacctgattaattcataatatcaatataaaccctaattatttaccatttaacttatcgggatattacatttaaactactatggatgttactttcttggagaataccccatatttctgcaaaaaaaaaaaaaaataatttagggggagaaaaaaagaaaaacaaaattttgggaaattagtgagcctttacaagacactattcttgatgtttcgatagaaaaaactcagccctagcctgcggattttgaatttgagcctggtttgttagaaagaaaaatactacaattgattaaaaattgtaataaccttgagcctgtggtttattcaagaaaaaatacctttgagaaaaataaagatcaccaaatgatccttgcacaggaccaattgtaagccctgaatgatggttcaacaattgctccaggtaattctctttctattcctactactaattcatctcctattagcactactttgccttcttctcaatctaatttaaatccttgagttgttcacactaaagccattgctgaatcaatcccagttgtatatgactcaaatgatcttcctattgctcttagaaaaggaacccatgcttgtacaaggtatcctatcgccaaacacatgtcatacaaccatctatctaaaacatttaaagcatttactactaatatttcagaacttttcgggcttaacaacatacaggaagcactgggtgaaccaagttggaaccaagcattgtttgaggaaatgaatgctttaaggaaaaatggaacttgggagattgttaaattactgaaagggataaaaataattggttgtaaatgagtgtttacaataaaaagcaaaactaatggaagtattgaaagatacaaagctaggcttgtggcaagaggtttcactcaaacatatgggatagactataaagaaacatttcttcctatagcaaaaatcaactctatttggctattgttgtctttagcagtcaattctaattggcctttataccaaatagatggggagagtacattcttcaatggagatcttgaagaagaagtgtacatgagtcctccattgaggtttgaaaaacactttggatttgggaaggtttgcaaactaccgaattccttgtgtggccttaagcagtcccctaaagcatggtttgaaaggtttggtacggtgttgaaacttcaaggatacattcaaagtcatactgatgacactatgttctgcaaacattcgaaggatggaaaggtagttattctaatcgtgtatgtagataatattgtgctaactggtgatgatgtttgtgaatttgaatagatgaaagttaagcttggtgaagaattcgaaattaaaacctaggagttcttaaatattttcttggggtggaatttgcaagatccaaagcaggtatttttgcgagtcaacgaatgtgctagatttgttgagtgaaacatgtatgttgggttgtaaacttgttgaaactcctactgaatccaatgtcaagctaaaacctacagatttggtccatggtaaagatcaggagcgatatcaaagattagttggaagacttatttaaccctctcatacacaccctgatattgcgtttttagtgagtatggtgattaagtttatgcattcaccaggtctagatataaaatcctaagctacataaaaggatcacttgggaaaggtctcttgtttaaagttcaaggaaatttgaagattgaaacctatactggtgctgatttggctgggaacctacctcaggttactagatgtttgtaggtggtaacttagttacatggcgcaacaagaagcaaaatttggtggctagaagtagtgttgaagctgaattcagagctatggctcacggtatacaactgtatatgaactttattgtgataacaatatgacatttgtagttgctcataatccagttgtacatgactgtactaaatatgttgaagttgataaacatttaatcaaaggaaaaataaaaaatgaactaatgtgcatgtcttcagttcctacaagggagcaagtagcatatatcatcacaaaatgactatccaagtaacagtttgaattcctgaatagcaagcttactataaatgacatttttagatcagggagtttaggaaaatagtgtatttattatggaaatattcttataggtgctatatcactattttaggaagtagttataagcataatctcattgtattattatttattttgttccttatatagagactcatgtaaagaaaatacttttaccctggtctattttgttttcttctattccaatataaagtcaaagccctagaagcacatagtagattattgttacaggcaaggcaatcaccatcccaatagtaaccctgagaaaattttccaatatcagattgatagtgttatatacgagttattttttaatgaatcagagcttatgaaaa

SEQ ID NO: 263425 - DNA, 822 bp, Cannabis indica
  modified_base (780)..(780): a, c, t, g, unknown or other
aaaaactgtatatgcagattggtttgaaaaaaaatagtcaaaactacatcacccgcaccgcgaacagccctactcacaactgacaaattgctattgacctaatttaatattaggtctcatattttttaatttaataaataatagagaaaactgctaactattcaaaacgcgccacatcagtatagcgttagactacaccttaattttttatttatatatgtgtaatgagtttttttaaaaaactaattattgaataaaatagctaaggaaaatataattcaaaaagaaatgtagatgtatatggagaggacactctgagtttttacgttgttggggcattaacgagtcttagtccacaagtcagtattattacaaagtttgttagaaaagcctaagggattacagtaaggtatgagcgttctatcatttgcttgagcaagtaagttaagaatttttccctccctttgcgtgaaggattcagcgagcatttatagtgttatagagatcatactagtttaccatttttcctctaatagggagtttacaaataatactgataggctagttttaggtacattttgcaaagttcttttaattgattattattttattttatgcaaaattacgcttgtttctacttgttttcaggtttattagatggtaaaattcataatatgaaattgaaaatagaataaaaaaaaaaaaacatagtaaataagatgaattatcatagaatttagagttctaggtgcaagattataagttttggatgctcaaacncgctctgttgtgatcgaaaaatcgaagtgtgagcttcaagtc

SEQ ID NO: 263426 - DNA, 921 bp, Cannabis indica
gtccggttacggttctggatctacgtcctatttcagttatgattccaagtccaagtcctagttctagtccctgtcaacttccggttttggttacaattttgggtcaagtccgggtctgggttcggttccttgttagggttcgggtccaaggctgggtcccaaatccaaacaccgactacaggttttctcctagccctgggtctagattcggatgccaatctcgggtcccagtctggttccatttatggtgctacgtcatgagctgggtcctaggttcaagtttgggtctggttcatgtactaggtcccggtcctagttctgtttcccaggtccctatcttcattttgggtccaggtcctgattattgtgtgggtttgtgtgccggtctaggtttgggttcgagtcctagtctcggttaaaggtttaggtctctgtttgggttttgatttgggtttgggtttgggtttaggtcctggtcctggtcctagtgttatttcgactctagttacatatgtgattctgagttagagttcgagtttggttcttcgtctgggttatggtcctagtctgagtcacagatctagatactgactacttgtctgttccagaccttgttacccgaatcccgagtcaagatctggatcacggtcacgagactcggtctgaaacttgttcaggtccaaggtcccacttctgagtttgggtacaagatcgagactcgggtgctgttctaggtaccgacccttgttctgtgtcccttgtctggttccatgtttgggtctgattttaggttcggtttcgggtcctgagtccaggtttgggttgggatccgggtccggctcccaattcgagtctatgtttgatttgaagcctttgtcctggtccggttacggttctggatctaggtccaatttcagttat

SEQ ID NO: 263427 - DNA, 2338 bp, Cannabis indica
gaattagaaagtatagaaggggggtatacttataagaagggggtatacttataagtgagaagcgaattcggtaataaatcaagaattgaaatgaaaattttacaacaaaaaagaaaaataataataataaagacaatgagagtgtcatttccaaaattgcatacaaagaaatcaacccaccgaattgttccaagaactggaaccccaaaataggagtatttgatatctctaatatgtaaagtaagggggaaaacaccagaacaaaatatgatcaaatcaatgaaaaaatttatatataaaaaaaattcccatctctaaaaccaatctgtacagccaaaagaatctgtgaaaaatcaactgtatgaaagaatcatgagaagaataatcataacaagaaactcgaacgcccaccgccgttcaatcttgatgaagaagacgagggcaataatgttgagcccagaagctcagcgtctttgcccatcttctgatcatgatggtacaatggcttgtaaagatcgtacggctcccagagactatcaagaggacacggcttgccctcgtcgagtctcacccatggctttccctttccgctccagtgaagcaaactgaccggacccggatgcagggacctacagcttcccctgacattgtcaccgccgagaccgtgctggttccaccggtggtcaatggcctcaacattaccgccgaagaccaataaaaacggcggtaaagaacccagatcgtaaatcctcttcttcctctgaacttccatccagttttcgattctcttccgaaaattcccttctctccacctcactagatccatgaccatgactcctgtgttgaaatagcagggtttacgggacccaaatactcgagaaagaagcgggtcagaccagaatccgtcggtgaagtacttggtgaagttggcatggcagtattctggagctccgataacccgtgacccagtcaatgttatgttccagagcttgtggatgtcgtcgacgacgaccacgtcggagtctaggtaaatgacccggtcaacgcagggatcgagtatgtcgccgaggtaatttcttgcgtagtttaaggggttctctaaggcttcgcgaatcgaggaagatatgaggttgatgacggtgtcttctctgaagatgtagaccttgaaccggagagaggggaaagtggatcggacgagttgagccaagactcggggactcacctggtcgaactcggcggcaatgaagtgaaagaagacgttattgggacacgaggcgtgtttcaggacagagtgtacggcggctacggatcccctgaggtactctttatccaacgtcatggcaacgtggaccagagaagggtcacaagaggacacagccattctccgaccaacaacgctagcaccgccgaacgctacggcacactcagctccgttacggtactccggtgcttcagtgaatctgagcaacccatcaggcgacacaagctcgtatccgtcgactgtcggaaatgaccgaatcccgaagcaaaatggtaacaaaatgaggcaaacgacggtgaggaagaccaaaacgacggcgtttactctcaagggaaccattctttgaagtcttcttgggaagaagaaagagcctttgtttcggtttcttgaaaagataagttgcatgtaaaaagtgtggggagaagattaaagggactagaatgagaggattctagaaatttaatgctctgaatggaaataagaccaaattaaaggctcaaaaagaaatgatgagcagggcaaggctgaggctgtgctgctctgtttggatttcacgcggtaccccttccttcccaagcagggagacgttgacataaaaggaaggagggacccgtttaggcgtttagtctctctggtttgggcttcggacaaattatatatacacacatagtttctttaataattaaaaaaattaaatatatatatatagcaattatgtatttatacatctattatctatagatatttgtatcaatacgtatggcctattggattctcttactgtctttttctttattttatcgaggagttataaaaaggggaaagaagcctggttagagtgcggcgtaaaccactggttatggaagtaaggaataaatatggtatatcattttttttttccctttttactatatatatatacaggagagttgaatttataccccgtaaaaaaatgataaatacactttatttttaaaaaaatttaaatttaaataatttttaaaaattattcttaatatcttttttttttctctcattattttatattaatttaaatacttattttgatttcaattt

SEQ ID NO: 263428 - DNA, 640 bp, Cannabis indica
ccaaactggttgattgattggttttaatgatgctttgggagagtgtgggctctgcgacatggagctctttggttacccgtatacttgggaaaggcatcgtggtacggatgattaggtagaagtgcgtatagatagagtcggtggttaatcaatcttggcttgatttgtttcccacggccaaactgtttaatttggaagcttctaattctgatcattgtcctcttcaacttgtgcctcataatgtaacaactgttgctacaaatcgggtgttcaggtttgagaattcttggcttaaagaacctctttgctttaagattattgaagaaagttggtctctttttcccaatcttgatgtcatgcgtaaagttaaaaactgtggtgatatgcttctagtgtggggaaaagattatactggtgatttttctcatcgcatcaaggaatgtaagcagaatattcgaagatggaagaagggtcgggatgtggtctcggtggacaactataagcaggcggttacgaagctcaatgacattcttctacagaaagaaatcttttggaaacaaaggagcaaacaactttggctccgggagggcgatagtaactcgaagtacttccatgctactgctacgacaaaggaggcgca

SEQ ID NO: 263429 - DNA, 877 bp, Cannabis indica
attttctctattttatagatcatatttttcatttgaccaatttatacattctaagtgtcgaaacttgaaattaaaaaaaacaaatataatctattctaaaaagtgacaataaagaagaaaattaaatctaaaaataacataaataataggctaaaaatatcctaacaaattcccccaaactaataaatccttactcgccctccagtaagactaacaactaaaaataacacaacctaaatgaagcaagtcaatcaaccaaaacatgagtaattttcaaggaagataaataacatggttatgaataaaatttcacctataataatctagaatttcagttcagtcacatccttgattcacctcaatcttttattcagtttatgaaaccataattagcacttaactaatagttgaaacaatttatacatgtcaattacaaccatcaatccactaactcggaatattccataagcttgcaatacttactactctccactaatataaatcgatgcacaaacaagaatcaaaaggtctttctagccttgtaatgttaggcttaagtatgggtagatagaatggtcatttaggctcacttatatcataagcttctccaatcaattcacccaatatttttgtacaaacaatcctgatactcctttttttcttattccatgagagaaaaattgtttgttttttttttctttcgacaacattgtaacactttatttttatttcttttttttttttgtaatttgacacttactgctagaattttttttttttctttttctaagttgttgccaatcaaatttttgtcatattctctcaattttcacacttattctcacacacatatcacaaacttctcatccaaattcct

SEQ ID NO: 263430 - DNA, 697 bp, Cannabis indica
ttttttcccatataataaatttgtctgaacttgaacatcatcacaactcagaatatgggtccaatctaatacatattttctcagcatggagacatgaaacacattatatactccggacaacgcaggagttaaggctagctgataggctacctagcctaattacctcagtaaacaagtatctaatatttctcttgtaccacacttattaaggtacctaaccagtggtacatttaattatcacttttaaataaaaacctcatcagggaagagattattctaagataatctatcctttattaaatatgctcacaacatgtttctaatattccattgatcttctcaggttacccacctttcaagaataaaacatcatactattttcgctttacctccatggttctcaataaccttctttaattcttaacatcatagccaaagatatcaaccttggaatttcacaagattagattatttcttcgtatgaattctgtattctcatttatagtataaattgtctacactgatagacaacatattaactctgtatgtccaaccgttactactcggtcaaaatcataagatcccatagtacataattcataattatgtctttctattccttctatgagatctcctaagctgatctactgacttaacttagtaacaagttaagtattcatttctgatagatattcaa

SEQ ID NO: 263431 - DNA, 401 bp, Cannabis indica
gttgtgcagagcacctccgcttcagttatctcttctacctcgtctctagcccttatgggttgatctcgatgatgaactggagcctcttgaattgcaaagtttcctttttctccagtttcttcatgcatgcatcgggtatggttgcctgagtggtcgttattgttaacgtggttctctttctcggtctctccttccacctggcgatcaccggtttcttccgtgtgcgggggtcgttggtacccttcgaggacaactttcatctgtccgtttttcgctctcaagcctttgaatatgttccttttgaagggcgatttctgtaccctgagttgccattctcccttcttgttgtttcagcctttcgaggatctctcgccatggcgggattgggtttaatatgtctt

SEQ ID NO: 263432 - DNA, 506 bp, Cannabis indica
catattgctcggcaatcccataaaaagaactactaagttgtacgtggaaaggtgggtaccaactatcgaacctatgggtgatacaatctaggaggaaggggttctaaatataaaaattatatcaactatcgttgaaggtcactaatgaagtgcgactcggcctaagcacggtgggagaccatccacattgattacctcgggaggcttcttcttcagcttcccgagggattgcattttggaagtaatacacccgagccgcgcagtcttgggtttcctcatcagctgggactggaacctactaccacgacgtatacttgggatacttataatcacaagtatactcgttttcagcgaggaggccaacagatctcagactggctcctttaagaaaaactccgctgatcgaagaccaaaaggaagacacagcagaagcctacgtcgctcggccatctcaggagttggagttggtcttttcaagatcgctgtcaaaaggaaaaaaaattata

SEQ ID NO: 263433 - DNA, 520 bp, Cannabis indica
ttattatgttgatttaagcatgaattagtagttttttttttgaatattttaacaagctttgagttttagaaatcaagcttgaagctttaatggtgaaattcaattctgagctttaattgttgttttgttgcttggaaatagtttattggggtataatatgcaggtttggaaagtttgattgagtttggaaacaatttggtttggctaggttcatttttgggtttttctgggtaaaaccggttacccggattttgcagcagggaaaccaaaaaattcagcttgttgttttgcgtctgttttaggtttctggttggttgttttcctgctagtttagggtattgccatattaagttgctgtaaataggtttttggtttaaaacctaagtcctggttgtgatttagcgagtcacttatgcgtgttgttatcgatgtgatttaggagcctataattcgccgagcagttgttctactcaggttgaccggcacacctgaattcaaaattgaggtaagattggtataa

SEQ ID NO: 263434 - DNA, 478 bp, Cannabis indica
ttgatgccttgtgaaaaattaagcaactttcgtttttacggaactcaattctgatgaaaaacgaagaagttatgaaggtttgaaaaatcaaatgcatatggtgtcgagtaggtgcatcgagtgcaccaggcgctcggagaaggcacgccaacgcgcgcgcatctcagacaaaattcttgtctgaagccgtgtctcgtccctaacttcagacacggtccgcccacacacgaatgctgcacctgaccgaggtttctcggtcaaggaggttgaatctcctcctcccgcgcgcgcatgagggctatttgcagcctgtgatggctgcacgtgcagccttgctgcctgcaaccccaaactttcgatttttgtgggatttttccccaaatttcgaatttttgcaattttcaaaccctaaaattaaaataaaatattatttttaatatatttaaccttagatataaattttaaattaataatattt

SEQ ID NO: 263435 - DNA, 663 bp, Cannabis indica
ttggcttcttatctccatggcattcgagaaatttttgaagtagccaacgataggatggaagcttctcgtggaggagtagagcgaacccgaagatgcatgtgttgaaatggtggtttacgccaatgagaacagtgagaggcttattgtactcatttgtcatgtaggtggtatcaaaccctagtacatccccaaaagccacatagtcgacacgtgagtttccatctgcccaaaataagttagccaatcgattctcctcgtccacctgatatacaacgaagaaatttggatccctctctgcgagacaatcaagaaatcccaacgctccttccgagtccgtctctatcttttcttctcgcttggcaccagcaaccctgttgtagacatctcgaagttgacatggcattctctcgtaacctccactttgcaaagcaacatgagacattatgttggcagttttaattccaacggagttcatcgacctaacttgggcaagcaagccatcggacactactcggtatgatctcaaaaattgtacctcacttgatgaagcgaggtcgtgattgtgtattgtgctgaactctttgcatttccaagtgttagacggttgtgtgagtaaaatacgtaatgctgcctgacatccggttctagtgacatcatgaggtc

SEQ ID NO: 263436 - DNA, 528 bp, Cannabis indica
ttgcgcaggcaaaagtattaaattaaacgtgtgaattttgatgtggcaagtggggatacttttatcggcacaattgtgcgccggtaaaagttgtaaatgaaacgcacgttttgacttaggtcaaaattttaaaaaaacttttactggcgcatccaattgcgccgatgcgccggtaaaagtgtatatatctatcaggtcgagcacgaagcccccttcttccccattttcatttttgcatctctaaaaaaaaaccctctcaagccctctctcaatcgctcttcgattccatctcagtctctctctttctctatcaatctctctcaatctctatctcattctctcaatccctctcttttcttcttcaaaaagaccaccaccaccacctccgtcgaccaccaccaccaccatcgacgatggcagagctacgccagccaccaccgcagaccaccaaactccacctcctctaatttatttaaggtatttttaattttttaattttaatttttttaatgtttatatgtatggatt

SEQ ID NO: 263437 - DNA, 1790 bp, Cannabis indica
tgcgaaaacaaaaaagagcgagttagcttaagatctcaaagtaactcaaaaaatgactaagtcaggaaacatgcgacatactaggtcgacggttaaagtcagttctaatccctgggactttgaatatgtaaaaccactttaatttccaatctcccatattggaaaccatgccttctacgccgttaatctcagaagtcgcccacttgctgaagtagtagaaaccattgtgaaggcctacgctttttatatcatagaagtagctaaactcttctaccgtgggagccctatgtacgtactccatatacatcgcataaaaagcaagggttgtgcgataactgttgggggttagctggaaaggagacacatcataacgtttgaggatggccgcaataaagggatgaaaagggaccgataccccacatcgaagaatgggtattgagattaccacatcctctgtgggaataatcgctggattggtaaaaggaagatgcgccctctgagtcggtttaggtcgcaaagaagcagtcgcaacaagtttagtcttgtaaaggtagtgaggtccgatttggtaaccctcgaaaccaagtcctcgcacgagaagggctcgttcagctgagtgtcgtccaccgaatcagttccactcccttctgcctcttcttcttcctcacctgactcgcgagctggggccgcccaatcgtcatccatctcctcgacctcaacgtcaggggcatgcctggagtggataagataatcgtgggctgacaccgtagactcgctgtctcgaatctcgatggcccctggttcagcgagctcctgcaccattttctcgatgtctgcgaaagacatcggacctaattctatacctacgacaggtgcgatctcctcttctgagatcgaagtcgggataaagctatcctccctctggtcctcgtcaccgtcaaatgcatcgcctcccgagccaagcagctgactatccgacaggtcgctcatctgaaagatagaagatcttttcagcgtggtgaatgtgtaaaaaacaaaataagtgatctcacccgcatataaactaaaaaatcgcattgagagaatggtccgcatcctcgcgaatactgaccaccccatcaatatgcgagcagagcgaatactaaatatgcgaatagaaaaacatcccaaaaatggttaggagtgtcctggtaacctcagcgacatgcgtctttcggcatgaccctgaggtgacgaggagacacccaccatttcaaggagtccaactaaagtcgcaacctgcgaataagtcacgcatcttgagctaagcgatatacctctagaaacggctgggagaaactcagtgactcaaggggcatgcgttctcaagcatgaccctgaagttactgaggtactcccaccgtttcgaggatatctaccagccaaagagtacgcttattagaacattaacgcatgtcgcaaatggctgggtgtatctcagtatctcaaggaacatataaccgcatatatgaccattagaatactgtgatacatccaccatttgaaagactcagtcaatgttctcacaaccaaattcacagaatacaaaatcctaaagatctaggcgacaatcagaagtaattaagtctcgcaaacatgcgagtattcgaagtgttcgtccgaatacccgcgagtattcaaaacatgaagcagtgcctattcaagcattttttatacagtatgcggttatgccaattttaggtcatttttatgaaattacccagttttttacctaaaaaatgtagcctcat

SEQ ID NO: 263438 - DNA, 1001 bp, Cannabis indica
tttatagaccataaaaaccctagagatagccacaagatcgaatctacagctgtacaaaactttcctaagataaacacgatatgcagcatcagaattggggtctgacgcaacaaatcagaccaaaaaaggaaactagctataatcgggtccaatcttctattaagtcttgattcctgccataaacagtttatatattctgattgtatcaagacacaatcgaattaaataaggaaaagacaataatcaaagtttgctttaaaaaccaacttttcataagagaatttcttctcttataagaagtttccatacacgaaaagttcagctgaaaaatgaatctttcctaacatagaaaagagcaataaagaaccgaatatacaaggtaagacaatcggatatgagtgcaaaaatattttaccatgaaaaaaaaaattagcatctaacttgccaaaaaaaaacctttatacttttcttaatactttttccatttattcatttattatttaatattgtatcatgtttaattaatagtgaccttttatttttataattcactatttaataatgtagaaagttcaattagtgacctttcattttcataacactatattgtaactcctttcctattttactattatcatattattttttacaactattccacttcacctcttaattatcaaatataaaatttcaagaagtgatattaaacaactattcatatattgtttatatgcgttttaacatgtatgggatgagataaactattagagtgggaggctacaagcaataaaaagggagtacaatgacaacattgaaaaacaagaaagaaaaaaaaaaaaaagaagagagagaaaaatgctacatttgtgtttatcaatctttgcaaccacatccaaaaatttgaaagagctaatagaatttattaactgtgttagctttaatttttctccaactcacattctcttttttagctatattttatttatgtgaatgatgattat

SEQ ID NO: 263439 - DNA, 990 bp, Cannabis indica
tccctcctctatgtgtaaggaatcaccctttcctgattttgcttaccgaaatgggcgcccaagtgaagattttatccctgatattgggcctactcttatccaaagccttgacatcccccatatctggacttacaaatcccaacaacctcatcacttccctgaaccactcaatattcgttggccaagcaatgatccagagctccaaaagatttattgtcaattgctagggccagagtccattgaccgttatatagcccaaccttctttgatctctaatcccccaatgtctctgagttgataactcatcttctgggaactagaaagaggaaggttcatacttggtaccaccctacacctgatgtgtttgaaaactcccccttcctggagaatgatgatgatagggtgtcgacagtgcagtcagggaatgggagttcgagtaattggattcctgaagagggaaggaaattcgagccaggcttgattcaccatggagaatcgtctagaggcagaaccaggcgaagcaaacaaaagagagcatcaggccacaaacactcaaaagtcaaaacccgtagaaggaaagctcaagaggagcaaaataactctcagttacaaggtaatctggatgaaattcttgctcaatgtactgatgtcctaatcacctttgttcaaaattttggagatggcgaggaggcagcccaaaacttgcccccaccatcatcatgaggtgcttatcctggaattgccgcggtctgagaaggtcgacggtagagagaactcttgagagcttctctcaggggcagcagtggatttaattttcttggctgaaactaaagttgatggggggattatgacaaatgtttgtaatagattgggatatcgaaatgtgccttgcattccttctagaggtttagcagggtgttttgtgttgctcggaaaagaggtgttgatgtgcgcttatttgaaactatggaatcgggctttggattaagt

SEQ ID NO: 263440 - DNA, 392 bp, Cannabis indica
aatcacgtaatacgcctatgttagttagggttttacaataattctgtgtctgttgagtttgatccatttgggttttctgtgaaggattatcagacggggatgcgaataatgtgatgtgataagcgaggcgacctttatcccatttcctattctctcaacaatcaagcttccttttctacctttgctgccatctctcctaagctttggcatgatcgtttgggtcatccagggtctcatatcttagatgtgcttaggaataataaaagcattgattgtaataaactttcgagttctagtatttgtggttcatgtgttcttggtaaacatattaagttccatttgtttcttcatcttcaagtactactatgtatttgatattttacatagtgatc

SEQ ID NO: 263441 - DNA, 900 bp, Cannabis indica
agtgtattgtttacaatattgttggttgcaagacacatctttaaatatagtgaaagttattaccctggttcggggaacccaagcactagccgcgtagaatgagtttttagggcaggtgaagcttgtgaaattctggtgttgaatctttgattttgttttttttttttatattcaagcataaatcaatatagaatcaatctaactatgaaaaagataggttagacgaaaagttggggttttcatttctgattggaaagaatctcgcaaatctcatcaaccttattgagcgcaagagttagttgggtagtattctattgatgggattcaaaacccataagctccttgcttcttgatagaaggtcggagagattaccattctttatcaagttccagtcattggactggaaactcctaaaatggtgacaggctgaggttatgtgttgggagaaagctttagatcctgagatgctagcctcccaaggaaaagggaaaatgggatccattagaattacttcagggttctcctcagagaacgcaacttggtgaatcacgccaatcacctattttcccttacttttgacctcaaaagtgggaggaacacttgaagatgctataggaactgtattggtgtcgttgtcaggttctagttgtttttagtataaaatgcttaataattaatatttttgttttaaactttgaccatatcatattatgccaatttttttattatctttttttaaaataattttgtattaattcttgtggtgaatcctcaccctcaaaacaagttgttatagcagtaacaatgtttaagaaacacaaatcaaaactaaaaccaatcacaaccaaaacttgaacttaattgaaataagacaaagaaaacttaactcaataatggat

SEQ ID NO: 263442 - DNA, 922 bp, Cannabis indica
taattttgcatttccggtacccgacaacatggaactcggtgtatggctcagtagaatcacaaattagtatttcagtatagtgggacggtttatttagacattgggaatgtcgggattagtcgggaatttagagttttcccaaaataccccttagaaaccttttaattagttttgtgtgggcaagggcattttggtctttttgccttttagtgttttgtctttatgtggatcaattaattgatttattgttgactttgacttcttagttttggctgaaacaaataaggaaaaagtgaattttataactcatttattcaaaaattagaaattagaaaagaaagcaaaatcctttttctctcaagccctctctatttcggcccctctttgagcagcaacaatcttggtgtttctttggttttcaagcagatttttgtgtgcaattcaagctctaggtatagctcttactcttctcctctttagtttcttgaaaaatcaagttagaattggttgcatgcttagttttgttgttgtacttgctgctgtatgttgttgttgatttctgtagtgagagcatgattttaaaatgttgattcaagcatgattgtttggtgattagttggttttatcaatttatggaattttaactcaaagttatggtttttaaagaaataatggaatcgttgctgcacttgttgttgatgcttgctgttgttttcagaagttattttatgcatatctaggtagatttgagctggtttggatgcatgtttgttagatttaaccaagtttgagttttgaactcaaagcttggagctttaatggtggattttgattttgtgcatgaagctttgttttatcacttggaaaatgtttattagggtctaattagcaggtctggaaagtttggttgagtttggaaacg

SEQ ID NO: 263443 - DNA, 1370 bp, Cannabis indica
aggtgcctggttgatccaactaatccacaggtggtggatcctgcatttcagaacccaggaaatgcaagggttccgcaagctgttaatcttgaacagccatcgaatgtaggtcatggtgtgacgactcctgtagatgaaatcgcgcctggtgtgcaagagactgggaataccagttcagcacccagctagggcattcataacacagtcgtcccacctactaccaacgttcgaacgaccattggagatgatactgagatccaaaacctccgcgttgctcttggactcatgcaaggtcataccaataccctacatcatgatcagtttgaactccatgttgcgctaaatctcgcgttcgaggaacaaagacgcatgtttgccgagtggagagacaaagagatggaagcgttaagggctcatcatactgagattgaaaatcgtagtcggtaggctactgtgatgatacaaaaagcctaccaaactgtaggacagcaacctccgagtgtcatcccccagggtgagacggacgaagatccagcgatgaatacttcccagactataaatggtcagccgccaaatccccggtcacaagttccgcttgtgggcctagcgataagcgggcagaccttgtctagtaattcatcaggaaaggtcatacctaatagttctaaccaggttaacagtgccattccacctgtcaatcaatcgctgcttccgtattcgataggttggggacaactcatgacctaacaagcgatctgaacagaaggagaggagtcgatgattagattgtcacggcgatcgtacatcccggagcccgtgcttaaattcctgctcagaaagatactaatgtgattcaaatcgaccaaaatgccgagcaggtcagtccagctgtgcaggcacagctagacgagctgaaaaatatgttacaaggcatggccagagagacaaacaatgatcttaagctggagcgagcacgtggaactcccttctctcctgaaatcaatcttttggcattaccccacaagtttaaaataccaacatggaaaatgtacacaggaagagaagatcctctttcccacctaaagtatttcgaaatgcaaatagatttgtacggggtacgaggggatgtgtgttgcagaatctttcctgctaccctttcagaagccactcagcaatggtatttcaaattggcccttggaaatgtcaactcatggaaaaccttctcttcgaaattacatgcacagttctcctcctctcgccaacttgcgttgcatttgggagatctggtcgaagtcaagcaaagaccaggtgagcctctccgagcatacatcagcagattcatgacggaggcgaccaaagtttcacgggta

SEQ ID NO: 263444 - DNA, 1068 bp, Cannabis indica
tatcgggctactaacatgcttcccaagaagcttttttatttcatactaatcaaactactgaagcattaaaagcttactaaaccatgagtcgagcttattttatgatgattgtacatatcgtgacgatctttgaaagataacctagcagctctgataccatattataacaccctactagattaaggtgcgttatcgtgatttcaaattactgtgcactcctttgattatcaaatttactaaaaattgtgaataactaaattttttataattaaatctaattttaaatacataagtacaaaacatatttcaagatcccatttacaaagttacatcagttttcaaaatacaatagttacaaaagtttttgcctagcgactatcaaaataaagcctactgtcctaaagatatgaacactccaagtctaaccacctcaatatgtacaatcttcatctagcctaaactcactgatgtttagtctttgctttgcctttacctacacatgcatataatatctgtgagtcgagagactcagtaagaaaagtacaaacataatataacataaattagattatattatacgcccatacacccaatcacaatcctatcccacgtccaatgcgtactaggtctagaacattcgtatgacagtatgcttgaccataatatcagcctatactcaatactttaatcttactgatgtgatagtgcattaatccatactttgctaaatatatatatttgtgggtatttagtgcaactctacgtacactaatatcgctcttactgatatgttatctattaggcaattataaaacacatgcactaaacaagcaaacatatataaaactattatactaatcttacgtcaattctgaattcaggtgtgccggtcaacctgagtattacaaaattttattattaataaaaatttaccaggataatattacatctttaacatacccaaaaaaaatattcaaatcaaatacaatctaaaaactattaatacatctaaaataaaataaaaaatacacatattaataaaaatatacatttcacaaaagaaatttt

SEQ ID NO: 263445 - DNA, 753 bp, Cannabis indica
aatcctaattagcctaatttttatttgctacaatataataccatacttatctttttctctattcttactcttattcactttgtttagtgagatatcaaatttcaatttttttgatatttttttaataatataaataattatttttttttatgtttattccaaaagtaaatttaaatatagtaaaaaaattcataacaactgaaaaaaaaacaacattaataatcaataagtgtcaaatatttttaccataagtctacgtttatagtttacatgtcatgaagtacttacatatttatatattctcattctctttcagaaatatttcgaatgatacaacaatagagatgcattcatatatattaataataagataagatagataaaaattttacaatcttaaataaaaaaaaatgtgaatgacaataggagcaaacttgttctctttcatccagttttgattttattttccaagcggctgaatgaaagtgaaagaacttatattgttacgttggtagatattttcgtagttttttttttttaaaaaaaaataaataaataattattaatcgcgtagcattttttttaattataaattacaattgatttgattcataaaaaaataattataaactattatttggccggaaacaattttatagtaagaagattatttttaagcatatgatttttcaaaaggctaattagtaatttttccccccgaactttgacatatactaaatcatgcctcctgaa

SEQ ID NO: 263446 - DNA, 519 bp, Cannabis indica
cttgttgacggcttctgtttgcccattgttctgtggataggcgactgctaaaaatgcctttttaattcctaactcatcacacaattgtcgcatttccttacaatcaaattactttatgttgtccgagatgagtttgtaagggatgccaaatcgaaaaattatggaattatagacaaactcacgtagtttggccactgtaatagttgcaagtgcccttgcctcaacccacttggtgaagtagtcaaccgcgaccacgacgtatttgactccgcgttttcctttgggtaattcccctattaggtcaatgccccagaccgcgaagggccaaggactcatgatggagtgcaagtggcttggaggttggttgacatatgtggctatctgctgacatttgtcgcatttcctggaaaagttgaaagcgtcttgtcgcagtgtcggccagtaatacccttgctgcatgatttttaaggcaagagaattaccactagtatggtttccgcagataccactgtgcacttc

SEQ ID NO: 263447 - DNA, 2397 bp, Cannabis indica
agtgatgggcatgccaacaattggtcgacagactttccttgatacttgactcagtgactctctgaggggtatggccgagagatggctgagtaaccctcgagaagtatggtcgagtgacctttgggaaggatggcccaagggttgggtctaccagtgaatgtattctgaaatctcgaattttgccacttaggtcggcatgtagattaacttgtaatattttacaaaacggtttgtgggatcccgaaacatgttgtctttttggattgtttgtaaagttaaaaattaatacaagttatatttctactctctttcagttaaagtttaaatttttcgctcttacccttatagtaatcacgaattagcgggattagggtttcattatcggttgtcgtaacgtgtctaattgttagggtgttacatacatcttgaagcgtcagggtctcgtggcacagatggtgatggatgtcgtgctagagacgaccttccaactggttaaaagcttcaattgccgagcttgccattaatgttctcatcagttcaccttgtactgaggccagtccttgaacaatacctagttgaatgatctattgatagaccctcccttatctatcaactagtctcccttggagaggatctctgatgagatcctggcctctccatgtagttctttcattgaaccgccttataaggtcgcgccttctctattccggttgtctagctctgcttggtaggattggaggatgtattcttggtcatccatccatctgagaaatttgcgtctttattatgtgaatacatcacagccaacaacgtgtggttcttcagttgggccaacttggcagacgatttctctaagcctggctaactcgagatctttttccaagtctacacggggctcgctaatggttggctcgtcaattcctggccctgtttctccagcatggtactggggatgaggtccaatttttcttatgggctgcaccacatgggtccttccttcagtggaaggtgccagtggagggtcttccctcagaggtaggggccgattgtttagatccaccaggatgtttgtgtcgccctcaccacctttagtggcaagatttgtggtgctcgccgagatggaaggagtggctacatctattctgttcatggggattctagtcgtggctagaacctaaacactcgccatcgggtcttgaaggagacctgatgaggttgatgttgtagccaaagtttttctcgtgttaaccatggtgtttgatcagattacatgagttcgactcgctcttaatgaaagcaccaacttgttgacctaagaaatggccaaccgacagtggagtcaaaattaataccaatgcttgtcatgtgttacataattagaactaaaaagtaaatgaacacaagatttatagaggtttggcccccttagttagcgggtaatgacctactccccttctagttatattaatataggtagataatactcttcagatcactataggtgggatttgaagtagctctcctaaggttacaatgtaggaatcaaagttggaaaatctcaagttgagaagagcaatggtgggcgtgtgagagagagagaggttagactaagagctagggtttcttacttgcactttatgacttagagcctagggtttttgttaaggctctttatataggagagcttaaacccttcaatttgataaaacaagttgatatgtacatattagattagtaaaatacaaatgactaaaatgctccttaaaatagatattttccctctatttttccgggctgttaaggctcaattcatagtctagcttgcagtccatgtgtaaagctgtgcaccaaagtcttgccaggccaatgtttggtcggccatgcatctgcaggatgcatgctggccagctttgtgctgttcagaagctggtcgacctatgttagccatagggcagctagcggtggccggccagcctcctcaaggaggctggatcatcactcgatgtcttgtttgagtgctgagactccccgttggttaaagcattaagtagatgacttggccttcttgtcagtgagttgtactgccacgtggcgctcatactagtcaggtgggaaaaaattgagataacaccagtgtttattaactttaatatttaaaacgtcgtcaagtcaaactttctaattcgcaagattaagtctttgcaggaaaacaattcatctaagggtgcattctctactaaatccgcctcaatttcttcatcatctccttcacatccacgagtaggaaactttaagtcttcattcctcgagattagcatctggaacaacctatgggtgaatgaaactcccctaagcagatacagtggacttgctccctcttattttgatgcgatctag

SEQ ID NO: 263448 - DNA, 843 bp, Cannabis indica
gatacgtacattttgggaatgttgtcgagcaaaattcgcaacaacaaatgtatatgatattattaatgacaagaagaaaattatatgaagaacaattgcgagtattcaacctagagtggcgagtactcgaactgggaatgggaaatgcttaacagaagactggaaatagcaataagacagagaattatagtagttcagtcagatcacggtctgcttagtccactgtagcaagagtttcgtaggtctcatttctcggtggatgacccctttatatacaaagcaggtgtccaattagttatacaaggattgcattcattgtcaatccgtttttacacattgaattataataactaaactaaacaacgttaacatcaataaatgaataacagttactagattcagcaacgtatgcgcccttttaacatgcgagttgactgttcatattctaatgttaaactcgcgggcccaacacttaattaagtttaggatgtctgcgttcttaggtagtcgcctttgtggacatcgcatgacgagctgacagaacctagatatgcgagtctatatcggtttatcaaggttgtagggtcattaggaccaattcgcattatagagagtcggtctctatgtttatgcaagaacatggagaggatactcgcacatagttcgatacatgcgagttactctcttgtcccgcataatacgagttataatcatgcggtcagactttggtcatgctcgctgtatctcgctgactctatcttgagcgaggtttaaaacatcgaggagtctcttgtagacgactcagcttttattagaaaactgagtacacgtgtcctctaaaca

SEQ ID NO: 263449 - DNA, 764 bp, Cannabis indica
aactctaacacccttcttgacctttatatgctcacatgactattaagtctcactagcacagccctctggcctccactccaactctagcgccatcttaacacttgcgctcggtcttcttagccctgctggcttctttgatgctttcattccacaactatgcatctctatcaatgcctttgtgtgacttacgcccactagcgctttaacaagccaacacatctcactcaactgcctctacgcttccatagagatcaaataaaagtcacatgcgaacacctccaagtacaacaatcctctgacgattacggcatctgcttcccttggtcttcatgtgcgtccctcttgacacacccatgtagcaactgaagcattccatgtctgtcccaatttgaaccatctcggtcaccaactctcgaccactatagtgagtaacaagaatttggcagcccctgcactacttccacacccctgccaagaagcttccttttcgacaaaagtgcctcctgtggcttacaatgtcactcaggcaaacttggcctagcgtaccaagtatacagtatggactacccaatcaaccttgtattatgccaacaagtttcaaacattctgttgcgcctttctacaattgcacatggtagttgtctttctagcatctctgaacttaactcgaagcaaccatcatcgtctcctctctaggatgtccagtattcccatgaagaaaaagaacccaatctcaactctatctcagtctactgatccccttt

SEQ ID NO: 263450 - DNA, 3246 bp, Cannabis indica
agaattgccgttagataggcacttttaatatataaagattctattcttttatatttttcttgatagattatttttaatttttaattttttttgttaagtctttgtcagtattactcagaacagcctaacccatttccccttttccctcactccaattataccttctcatcacatttctctctctctctctctcttctccgttctccttttctctgtgctcggtgccggagccggagccgtagcttctcccgtcgggatttctccgatcgaaaccctaatttactcatttacgtcttctgcaatcattgcagatgagccaattattcgttttttgacaacgtagcaggacagagtccaaatcagccgagatgtctcggcaaatgccgtctgctcattttcccaagaacaagacccttgacaacaaatacgtaagaattgagaatgtttctcactactgtagcgtttcagggttcttttattgttgttgaattacttaattcttccaatactgatgttaagttttgaaaattcactgaactttcttgtctgaaatgtgtttgaagaagtgaaaatgagaatgtgggtagtagtggacttgaattggtgaaataatgataattcagatcattcaatcatatcactatattgcttactttgtttttttgaattactttttgcgaaacaaccaaaaagtttgcttactgttttatgctcgaaaagctttttgttttatttaactgaatttccttactggatcatgtaatttttgttagatgcttggagatgagattggcaaaggagcatatggtcgagtttataagggtttggatttggagaacggagactttgttgcaattaaacaagtttccttggagaatattgcccaggaggatctcaatattataatggttagatcagagcaccctgtgtgttactgaattttttttcttacttgtatcttatctattgcgctaattcgaagagagatattcaaacttagaagtccattatgtttcgttatgaccaatctctaaaaattgatcaaggctatgcagttgctttaaagttctggagttaactggttaagtgtttttgtaagtcaagttttcctcatgtttgttttctagagttaaattatattatagtgctctgtatcttggctaggtaggtggtgaacagccataaattcttatcaaaattagtttaaagtaactaaattagaaagctggaaatattattaagaactaaagttagcatgagcacttgattcagaagtattgacatgaagagggttaagatattcattagtaaacaactgtaggtctctacaatttttttatttgctctcttttgtgatcttgatagtgccaatatatactgcgattcccttaatgttaatttattaatctaaaatacaatataaaagttgttattattccaatatttaactaccaaacaagtcttaattgaagaactagtttggtgtcaatttaaaaaactgctttcatagctccttatttttgtccttacgaatacatctatgattaataatttaatattttttttgtattttataagctgtttattttgagaatctatgcatgactaactgagtgtcttttttctttgatggctttcccacggttcctaccacgtacctttacagcaagagatagatttattgaaggtatgttcatcctgattgctcaaggaatatgtattctttatgcagttttgaactcacaatttagaaagttcggctgatgcatgccaaaatctgtaggctgtaacatagcaatgaaaattttgagttctgaactgaggacttccatattagttaaacaccatggataactataactttattcttatattctttcactttaatcgagttgaattccgcaactagcattcttggaaggtatatggtaagagactaatagttagtctaccttgaaccttattgtcttttgcagaacttgaaccacaaaaatattgtgaaatatcttggatccttaaagactaagagtcacctccacataattcttgagtaagtgaattttaaacttgttaatgatatttaattgtgcaacttgtatattggcaagtcctattatttactcattttaaatttgtagatatgtggaaaatggctcactagctaacattatcaagccaaataaatttgggccctttccagaatcactggttgcagtttacatttcacaggtttgtcaaagtccttgcagtttattttatattaccccgcttcttttatataattctaccataatgattataggttttggaaggcttggtatatctacatgaacagggtgtaattcatcgggacatcaagggtgctaatatattaacaactaaagaggtaaatttttactgtgtttgtatatgttttcaatgctgggtccacaattatatataagatgtagtcttagaaattacattcttgttttgtgcattcttgtacaatttccaatgatgtattctatcctcccagggtcttgtgaaacttgccgattttggtgtagcaacaaaattaactgaggctgatgttaacacacattctgttgttggtacaccatattggatggccccagaggtacttttctatatacttaagtgacaagatatatatatttgtaatatatatatatttcaactttatttttgtatttgttttgtgtttgttcctatatgaataccgttgttgtttatcagtatcaaaactggatcaatatgacctatattatgaaaattaggtcactttagctaatattactgacaaaatttataaccaactagatgttttagtgaaatcctagtccaggtatgcagtacttaagtaaaggaacatgattttaatggtttggtatagcagttgctaagttttttttttaagtaccaacttatgatatatatatatatatatatatagaagccccattctctggttataagtgaaatagttcttggttcgttctgccatcctacccaatgaatcattaggattcattttcaatagaatcttatgcactcacgggttttgtcgtccccatcatttcacaattaatgattaggtttgacctgtggatccatttgttgatgttgaaaagttagaccctcaaatccttttgactcccaagttgcaaaacaaaattgtttagtgaggataatgactataactaactcctactaacacatttaatgtagaattataggagaaac

SEQ ID NO: 263451 - DNA, 743 bp, Cannabis indica
ggacgggcatcgggcccccatcgaacccgattttcaaaacccagaaataagccaaactggtgtacaatcgggcacatcggacgggcatcgggcacaccatcgggccccatcggactgaccatcgggctttgtcttcaacccagattcaattttttgcatcatgatgcatcgggcctacatcgaacctgcatcgggcctgcctaaaaaatgcattttctaacccagaaatcacagattcaaaaacactaacctttgacattgggtccatgggttgcggtggtcgtggagaaaggggtcggcggtgtaggcggtaggcagtgagaagtggtcggtttcgatttgggagggggtcagcgttgtagccggtggtgaggggccgacgttgtaggcggtggtgagggggggttttgatttggtgaagggttcggttgagagagaactgaaagatatagaggaagagagagagttggggtattgttatgagaggggtattattgagtttttgataaagtggtcatatatttttaattatgaattgtattagaatattttatgcatattttttcaaatttccctatccattatagttgtaaatagtataatacaagtgctatcaaaaaaaaaaaatatttattgataatattagtatattattcaaacaacggaaaaattaaaaaagacatatgagagctgtttataaaaccattggagaagaactaatttacaaaaataaataaatgaaa

SEQ ID NO: 263452 - DNA, 1639 bp, Cannabis indica
agatatcacaaggcctacccaaaagatcaattatttgggtagccacatatgagcgtgtagctcccgaatcaaataatactgtaaacaatgagtttttgacgagaagctgaccggtcatgacagaaggactagctacagcatcagcttgggtgatagcaaacacccgagcaggtacggttttacctctgctttcgtctcttctttctttgcctgagggcaatctttcttaaaattccccaccatgccgcacagaaagcatgtctttcggttgcactctcctggatgatgtttcttacaacgtgggcactcagggtaagaataaccctggcgtctacctttgccttggtttccacgaaactgcttactctgccctgaaccaccagatgtcggggtaacattcctcttctgatctgtggtggaatcaccaccatccctaccataaacaggagtaggaagggtgggggacccaccaacactcggagtcactcggtgctcttgaagaaactttaccacgcccttggctctcagagctttctcaaccatctccgcataagtggttgcttcattggtagcgatcaccagattatgcctaatcttcacattcaaaccgaccaggtacttttctttcttactgaattcagtttgcacaatacccacggcaagcttggccaaacgatcaaactttgtagtatactcagtgactgacattcccttagcctgaactaattcagtgatctccttcctcttagcactacgaacagcttcattataatatttggcgttgaataattcccaaaattcttcccaggtcataacagtgacgtcctgagtgtgggttatcaactcccaccacacgagagcatcctcctagaatggaaatgtggcgcaggtcacctgatcatttccaaccaccaccataaaattcaaaattcgctcaatcactgtgagccactgctcagccttcattacatcaggacctcccaaaaacactggtggtgcttgcttacgaaacctttcatataacggctccatacggttgccaacaacaggctattctgctggcatcgctgaagatgcaacggcctgagcttgctgaggaggcatggtaggaacaccctgctaccttaatatctaaatttcttcatcttgttggcggattcgatcttgcattttcgcaaacctctgctcccaatctggaggagcttgtggtggatttacaagacgaccaccctgagctctgccatggccacggccgcgaccacgaggattctagggattttgatttccctgaccgcctccggtctcaaccatattacccggacttcttgtatttcgctgggcatccattttataggacttagcctggaaactgttaagccaggcaaattagacagcgatcataaaactaaataccgcttttatggacttaaaggcaacacacataaaacaaataattataatataatatgcttcctaacatgctttaataatcatttaaaatactaaacaagtatgggcttactgaaccgtgaaccgagccttctatgatgaagattgtacatgtcttggcaagcttcggtagacaactagacgactctgataccaaaaattgtaacgccctaatgctaaggcacgctac

SEQ ID NO: 263453 - DNA, 663 bp, Cannabis indica
cccagcttaacgagttgaagaatatgtttcatggcatggctggacagagtacatgatcttgaatttgaccgtgctcgcagaactcccttctcaccagagatcaatctcctgccactgccccacaagttcaaaatgccaacatggaagatgtatactgagagagaagatcctctctcccatctcaagtattttgagatgcaaatggatttacagggagtgcaaggggacgtatgttgcaaaatattccccaccactctgtcggaagccgcacagcaatggtatttcaagttggctcctggaaagtttagttcaaggaaaaccttctcttcaaaattccatgcacaattctcttcctcacgtcagcacccattgcatctgggagatttggtcgaagtaaagcaacgaccaggcgagctactccaggcatacatcagcagattcatgacggaagcgaccaaggtgtcgcgggtaaccgaggatggaaagttatctgcgatacggggggcattgaagtccttggtgaactatggaaggatataaggaagaacggaccgcttgacttaatgagtgatttcctggaccgagccaaaggtttcatcaagctcgaagaagccattcaacgagtagaaggtgagcaaaagctgggcaaaacaaaggctcctt

SEQ ID NO: 263454 - DNA, 1680 bp, Cannabis indica
tcaaaaatacaaagtaattgacttacgcataaataaactcccttttattgtatgccgcaagcttggtgtattccaccttctaatcgaatcttattgaaacttcaagtgctcgaactcccttcaatccccttaaagagtgcttgcttcctcctgaggtaagacttgaaaaactatctcccaaaagcttgtagaactttctctagaaggtatagcactgttgttcttcttcttttatagatttaattacaaactcaagacaatacaaaatacataaacacagagaaagagacgaacacacccttctctacaaaacaaaaatattctttcttacaagatatgaatgaaatacaaagatgtgaaagagatattaaatctaactgctataaatacaccttattgatagctcatacacgatctaaaaataagatcacaactcacaagaaattttcctaaaaaagatctttaatcaacccaaaaatttttgcttctgtacctacaaaatcgtgagaagtaagtgtgacttttcttttatagaataggaaagtcatatttcggttttcttcataagaaacttgatccaaccaataaagaaacttatataagatcaaattaatacagttgaatttttttaccatttatataaattaatcaattaaatacaaatatataaaaataaaaaatacaactcagctgaaattataaacaatttataaaatatttttatcaactatagatgtcaaaaaaaaaaaaatagaattaacatagctcaattaggtgattgataaaaagcttcatatattttgcaaatttgtaccctgcattttctttgttttgatttcctataatttcaagtgtcaactatgctcaacttaggtcattcatcacgaattactgaaatcatttttatttgaatgatgatgaatgataatttgaaattcttgaggatggaaaaaggataaaaagactactagctagtactctgcataaattttgacctacgaaggtacgtatatggtgatacactaatgttgtaataaaaacttctcatcatgacccttttttgttacttcaaatagcaccaagacactaaccacagagaatgctccattgctcagactcacttgcattcacaatcattttatgtaattatatgttttcagagaagtggacgagaagctttttcatacaaaaaagagagaatgatcagagagaatctgtacagagaaactataagtctataccctttattaaaaatgcaatgttattaatgtttgaagacgttattttgtttggttctttgaccaaaatgttaacaattacaataacccatcctaaaaccaaacgtattgggtatatcttgtgaccctttaaactgagcttcttatcattattcatcactactaatgtgtctttttattttcagaaaacatgaatgtttttttctctcttgtcatattctgggggaacaagggcacgtggttatttttttcttcttttcttgaattgtgtaatggggatggttatggatcatttattagaatatttttatttatggaaattattttctaattaagtaaatgattttctatttaaggaaataaataaataattgattttctgataaatgaatattttatattcattgaatctgcataaaatcaattatgtaatattctatat

SEQ ID NO: 263455 - DNA, 344 bp, Cannabis indica
ttttctcctaagtccgtggtggggaagaagaggaagtcgggtgctggccgacctgaacgagctcatccagagaatgagttgattcaactaagcgagatgctaagttgaagggaggtgtcagggccaagcagtatgctcaggagcctttggatcctgaggatgaggctgaggctgaggctaagcaggtgaccccattgaagaggaagaagaaactcctggccacgccccggcctgttgaacatgctatttgttagaatttattttaccaggatcgtaggtctactcacaagtatgttttttaatatcctaataccacttgatgtgtgtgggaactactctatcac

SEQ ID NO: 263456 - DNA, 542 bp, Cannabis indica
agagttaaaaattccttgaattcttcccaggtaataattgtgacgtctcgagtgagggttatcaactcccaccacacgagagcatcctcctggaactggaaagtggcgcaggtcacccgatcattaccaaccactcccataaagttgagtatacgctcaatcactgtgagccactgctcagccttcattacatcaggacctcctagaaacactgaaggtgcttgctttcggaacctttcgtacaacggctcaatatggttgccaacaacaggttgttctactggcaccgctggaactatgacggcctgagaaacttgctgaggaggcacagcaggaggaccctactgcctcaacctctgaatctcttcatcctgttggcggatccgatcttgcatttccgcaaatctttgctcccaatccgaaggagcttgaggtggatttacaaggcgaccaccctgagctctgccacagccacggctgcgaccacgaggattttggggatttctctgaccgcctccggtctcaaccatgtcaccctgact

SEQ ID NO: 263457 - DNA, 5859 bp, Cannabis indica
tcatcgttcgctccgtgcagctggaggttttgtgcatgtggtatttttgtaaatatttatatgtggactgtataaatatttaatgggccggcccatagtattttgtaattttttttttaaatattttttttttccccaaaaataaataaaagagataaccacgaggaacgtgtcttaacaccataaacgacaccgttttgatcgtgtcagttctagacactatctgagtatgctcgtaattaagagaaagatatgggatagaacgagactctacttcttcactgtctcactcactcctaataaattaaaaatcagagccaaattcctatttcggaaaaaaaaaatatatcaatggcgatttcttcaatttccatattctgtcagcggagcagcgttcacctaaccttgaacaacgtcctccgtggaggaatccgatgcttctcaatagctgcagccaaacagcaacacaatccaaacagcgtatccaggaagctccaccagcaaccaaacaagaaactcctcagagccaaacacaccttcaaggactattcttcactcgctcctgtactttctcctaacgacaaaccaccgctctcggacacccaagccatcggcaccgtcgcctccgctcaagccaactttatgcgcgtcgtggttcaatccgaacactcttctggaagcttcgaagagggttcggatgattcttctagaattggagttgagttactgtgtgttgttaaagctgtgttgaagaagattaagaggagggttttggttggggatactgttttggttgggtccattgattgggtggaccgtaggggaatgatcgagaatgtgttccagagaagctccgagattcttgatcctccagtagccaatgtggaccatttgcttgtgctcttctctttggaccagccgaaggtggagccctttacgctcactaggtttttggttgaagccgagtccactgggattcctcttacgctcgctttgaataaggtggagctagttgatgaagaggttagtatttggttatatcttaatgctatgttttgctccttaattgatggagaactaagacttggatacccaattagtgtaattaatcacatttgtaggtcgagtggtcaatcccatacttggctccagacctcatgacttcgatggttcatggaatctttgtgctagaatttcatatagttatgaaataatgagaaaatgcttttgacaataatgtatattagaatgaatgagattagctgaatcttttctatgctttgaaactagggttcccaccctatactaggaaactatagcaattgcaatgtaggttcccaggaggtttctaatggagcaaactaaaaacttcatgtttgatcatttgagctacccttcttgggttaactgaaattttagttgcttgtttctgctctaataagcttctagatgattctcgtagcaaacaaaagcttctagatgactcttaggagattacaatgatgttcaataaggtagtttattagaacctaaacccttgaatcagaatggaagatggccttgtatgcaaggataacttaaacacagctgttttaagatggggtgtttgacctcaatcgaagtattttttggttctctttggattcgattctgtgcattctattactacctgacatttgatactaactttcgaggactatatagggtaatctctctaatattgacgtgcgattcaatctgtctaacgctgacaactagttatcgatgtttattgtgcaataccatacttctatgcagacaatagttttgtggcaatctaaactgcgaagctggggatacaaaccagtgttttgcagtgttgaatccaaagttggacttgattcccttgcttttattttaagagatcaaaccactgtaattgtgggtccaagtggagttggaaagtctagcctgatcaatgctttaagaaacagccaacttgcttcaaatgctacagacgataattggtttgataccgtgagtagtattatctatttcttattattttattcttcatataagtgataatggtaatatcattcccccatttcttcttatttgtactttctttttttcttctccagattctaggaagcaaatggttagaggatcagcgggttggagaagtttcaacaagaagtggcagggggaagcatactactcgcaatgtttccttacttccattagctggaggaggttatcttgctgatactccaggatttaaccagcctagcttattaaaagtaacaaagcagtctctagcacaaactttcccagaggtatgcttgtttgttagatgcactttgtttctggtttcggtttcttttgcaccgttttcttagcgcaaaattcaacacacctgtttcagctgacatgtctgtatttcttcaggtccggaaactgctcaatgccaatgagcctgcaaaatgttctttcaatgattgcctacatcttggcgaaccaggatgtgttgtcaaaggggattgggaaagatatccattttactttcaactccttgatgagataagaattagggaggaatttcaattaaggacatttggaaccaaaaaagaaggtgacgtaaggtatttgtccaaacttgttcttcacagaaacgtaaaactcttgaattgtgactggggcaaagctttgttcaagtaatgaaattactgattctgacaggtacaaggtgggagacaaaggagttcaacaagcagaaccgaggttggaactaaagaagcataggagacaatctcgtaagagaattaaccagtcatttctcgatgaattagatgagctggatgaggacgacgaagatggcgaaaacttactagacctggagaatcattctgtaaattgatcacctgggagtgaaagaccaagcattgtacatagatacgaagaagaccttgttttgtttgagaaaaggaatgcatgccactcaagcaaagtgtgcaatgcaactgctagagaccagatcttgactcattatgttcatagacctcagtactaatacctatccggtgttaaacagaagaaaccaactcttttattttccaataataaattgggatgccttacataatgccttacataaccttgttatgttcatgcattttacttttggatggctaacagaaaataaaatagctgaaatgaaatccgttaattttaaataataaaggtgtaataaaatcccttatgttggcgaaaaaatataatatatttgtactaaataaaatatcaataataattattattattattataataaaaaatgtaataaaacatatcactaatgatcatgcaaaaaatattgcatttaacgcaccattaaagctattttaaaattgctaccacttttatacattagagatgctcttagaattgcgaaattccattacatatttatctgctacgaattaaaacaataaatttcatccacagatgatcttaaagtctggtagcctaatcttaaatcaagaacacgtcgtcgtttaagctgcaacttcaattttagcttatttaatgctgatttgggaaaatgaaccacaacaatataaaccgaaaagaaaatgccaaaaaagccgcaaaatatttgggtaaatctagatacgctaaccaaataaatactcatcaaaaattctcaatgacattgagctaaacacaaattggaagaacacaggatgtctgaaaattgtctagataacatttagttgtaaaaattttaaagcaacaaaaatccacaagagaacaaaaagaaaaatctggtgaccctccaaagtagatgtaaattaatgcaactcttaagaagaagcaccgctgcgaagttgggttttctttgatttgtttgttgccaactgggtctcggcctgtaatgatgaaagtgcaatttttgagaaccaaacgcaaaaatattatcatttttaccaatattctaaaaccaaattacctctttcttgacagcttcttctttctcagacaaagtcaactcaatatggcaaggggatgacatataggctgaaaagaatatcattcatacattaatattgctgtaataatcagggagtgcataaaagtaaatcctgcaattcagatacgtacggttgattcttccatgagcacggtaagtacgacgtctttgcttctgtgcttggttgacctgtatgtgagatacgaatagggcatcgacatctaaacccttcacctggaaatgtataagaatatgagcacagcaaggaaaattaagatcaggaaatagaggggaagccaatagagacaaatacctcggcgttgctctcggcattcttaagcaaatcaagaatgaacttggctgacttgactggccaacgaccctgtccattggaatgcctgtttttagcctgtgcagtacgcccaacaccccgacagaacctacggaagggaatggcttgtttgtgaactaggacatcttccaaatatctcttagccttgatcaaaggcaactttctgatggcgaacgctgtttccctagtgttctgttaatggcaatagaagaaacataagttaaaatggtaaagatgaaataaatacaggaacaaacgaaaagaaatggataataaacttcataaaaagaaaacaagattctacaaatcagataaaaacaaattaatacatgtacaaccatttactaacctatattcacatataacacaggttcacccaaaaacaatgcaattaatttcctgaagtttacgagagcaaagttcacaaaaggcaacatacccctgctatattttttatcagcttatggaaaacacaaacacacagtaggaagtacaaccatcacataacaagataacaaaagctaccatgatacacaaacatgacaagataacaaaagctaccacgatacactatgcaactgcaaaatgttgcatcattaactgaacatgaagtcacaaacatcaacacagtggttcaccccaaaaccagtcaaatgatttaacaatcaaatttaacgatcagaacatatctgaaataagaaaactagctccaaaataaattcgagaactcaagataagctattagtttttagtaactgtttattctaatcttaactcaaccaaatcaggcacaataaagaaagaaaaacagacaaaaaggattaactcgtgcatttaaaaaatgtcgcgtcatttactgaaccttcagccacggtaaacaaattacagaacagaggttcacccaagaacaaggctaataatttccctgacatatacgagaggtctattcacaaaggcaataggtccctgcttttttaatcaggttcaataaattctcaaaatacaacaaaaatgcattccataatttaaggtagggtaaaataaatttgagaactcaaatgtttaataactgttttttaattaatgcttatcctaccttaaccaaaccaggtacaataaaaaaacataaacaagattaactcgtgaaattaaaaatgttgcatcatttactgaaccttcagccacggtaaacaaattacagaacagaggttcacccaagaacaaggctaataatttccctggcatatacgagaggcctattcacaaaggcaatagatccctgcttttctaatcaggttcaataaattctcaaaataaaacaataatgtattccattaatttaagggtagggtaaagtaaatttgagaacttgaatgcttaattagctgtttatcctatcttaaattaaccaaatcaggcacgataaagaaaaacccagataaacaggattaactcatataaataaaaatgtcgcatcatttactgaaccttcagc

SEQ ID NO: 263458 - DNA, 681 bp, Cannabis indica
gcttagctactcaactctgcctatgttcttctcaggatatgctattcagatggaaactgacattttaaatgttgttacatctaaatcagtccctaagacacctttagaattattgcatggtcgtatacctagtttacgccattacagaatctaggggtgccctgctcatgtcttatgaaagaaagatggcaaactagaaaagtaaacagaagtttgcatgtttgttggagattctaaggagactaggggtggactattttatagttgcaaggattataaagtgttcatttctataaatgctactttccttgaagatgactatattaagaatttcaagcctcaaagaaaagtagtattggaggaaatactttcaaatataactccaaataatgttccatcgtcttctacccaagtagaggataatcccactttctcagttgaaccttttcaagttgatacaactgagaaatctactactaatgttcctgtttagaaggtcacgactcctcatcgtagttggagggtttccacgaaaccagctcgttatggcttggacggtgaaatcaatatggtcattggtaatggtattgatgatgatctattattctaaaaacaagaaatggcaagtctggaacagaaacaatggttaactagcatggattcagaaatggattccatgaa

SEQ ID NO: 263459 - DNA, 1263 bp, Cannabis indica
cctggatctctttctctgaatgtaataaccaaaatatttgattattattacgatagtctagcattctcgatgtggatatagtaagttcatataaattcgttagacaaaatgatatttttctaatttatttaaattagatttcttctaaaaacttttaggtgttttattataagatgatgagttcactttattttattattttcaatgttataattatctttattgttatcaaagggcattagtagccgtacattactaggtcttaggtagaattgattttaaatttcaattttaaatgacataatatatgttgaaaagatgtatgatatatgaaagaaaggataaaattatttactatttagtagagttagaatgctatgagaaggatttgaaatagtcttgatcatagaatgagtagggacacgtattgaggtttttatggaaagataaatgaagctcaattaaaattagtttaaaataaacatttcatgggctttatcatacacgtgggacatgaattagttaaggtcacaagctatcaattcaatttgagagaaattttctcttcaataacaaatgttgaccaagtatggtgggaagttaggaagtttattcatttattaatttattttaaatcttaacctaggttagctagaggcctatatatagagctttaggtattcattcttcactaatcacttaagctattacctatcaaagttactctctctgtctcatctcttactactacttcctattttgccttttatgtcataatattcattgcttattacctcacgccaccatcaatatcatcatcctttatcattttctctatctatttttttttcttcaattttctttttctatcattttaccattctctcaacactattcccaactgattattcttgtcatactcacgtatcaccaccaccaacctcttaagtatttatatatatatataccccactattatttacttatatatatcaacatcatcaccaccattatttctctgccagatttcctttttaatctaaggtatcattctataattttagatttgtagattcaatgttaaggtctcgtatatatatttatatataccattgtaatatgttctaattaataaatatgaaatttaggtttttcataagtaatttttggttctcaaggatcacttttgcaatcaagctaggatctccacattcgaggtagggaaattaagtagaaaaacataagtttctgtatgtaatgaca

SEQ ID NO: 263460 - DNA, 555 bp, Cannabis indica
gtaattttttttttcaaatcaaattgtatatgtagttttataatttctcaaactagaactgcagtgtaaaattttaaaactacaaaataagcgatttttactatcatcattattacattataataaaaatttaaaattaaataacaaaattttaataatacaaataaaaaaaaattattaaaattttaatatcataacatatattaattattaattttttttttttgaaacatcaatacattatattgaattatatatatatttatatatatttattcttatatgaaaaaaataataaaaattagtaactttgtaaatgttggaaaattgttgtgctctaatagaaatatcaaaccaacaatattacaactcaataacaaataataacaaaagacaaaatcacgtattaaataatgttacacctactaaaaaaatctatctatatataatataaaggaaagcacaaaataaatttaggtggcatcttagattttttttattctatttttaaaattttgtgaatttttctattttgtttagaaaagaactataaaa

SEQ ID NO: 263461 - DNA, 689 bp, Cannabis indica
tgagtcaatacaaataacgaggattaggctattaccgaactgctagggctgaacctctataaaatttccatgtcttaatattgctttatcatatttcaatcgttataaactacttatcacttactaaattagactcactgtcattggctaaaagcgagatcaacattttggtgctttcgttgagagcagtatcaagaatcgctcttcaatctaaatttaatcacaagtacgatggtggtacagactcgtagaagcatggttgatccggcaaatccatgcagtggatcctgcattgcagaatccgagaaacacaagggttccacgaactattaatcccgagcaactgtcacacgtgggtcatggtgtgacgactcttgtggaagaaattgcacatggtgtgcaagagagtgggaataccagttcagcacccagccaggacattcataacacagccgttccgcctgctaccaacgtttgaacgaccactggagatgatactgagatccgaaacatccgcgctgctcttggactcatgcaatgtcataccacaccctacatcatgatcaagaggaactccgcgctacggtaaatctcccgttgaagagcagaggcgtgcatgtttgccgaatggaaggaaaaagagatggaagcgttaagggctcatcttgcagagattgacaatcgtagtc

SEQ ID NO: 263462 - DNA, 882 bp, Cannabis indica
atttggaaatcttcaagattcaaacattttatttggcttatcatagaagtgatataaaggattttcttattcaggcattgcataacatttctaaacaggattttccaatttttattacatttatttgacagatttggaatactcgaaactctattctctttaacaaatctggtactactaacaatgtggaagaaattgttgttaattatcttcaggaatacagtgctgctcaatgtaagcaccaagatgacaatctgcactcagaggcttcacgcatccctcctgcttctatccagcaactccctccttccctgtcactggaaactccttctctttttgttgatgcagccatcgaccaccagaatggtataactgtaactggtttcatcttcaagcatggtttccagactgtgttagcttctcattaccatcagttgcctggtgctgtgtctcctatttttgctgaaggccaagctcttttgcagagtctcaagtggtgcattgactcacaattttccccacaaatagtattctccgattgtctgaatttagtttcaaaagtgaatggttcctggcaggataattctgcactttctggtcttgtctctcggattcgattgctcttctcaaccttccctggtgcttcgctgcagtttcttcctcgacagtttaatatgggcgcccatgtccttgcaagagaagccctcaggtcaagagaagttagctagagggagtgcctcttcttcttctttgctgcttgtggtttttgttttctctttcttcagcagccttcttagtctcaaaaaaaaaaaaaaaaacttgcctagtctgctggttttactttttttttaactaatatggtcaatattaattattatttaa

SEQ ID NO: 263463 - DNA, 859 bp, Cannabis indica
cattcgggctctaaaaaatcagcttcactactactaaaagaactagaaaacacacaaaacaaaactatcactcccaacaacaatggacgaccaagatcaaccatattgagaaataatatatgtatatgatcttttagttcatgcgagattcactagtaggggtatatatatatagcttagcttatactagtaatgaagatatgaaaatggagttgagatggggtttgtatttataaatgtggggggaaatgatcagtggtaaatggcaaaggttagaattggagtgtagggtgtatttaagggcaaaaatattagaagaaaaaggaaagaaggagaaggtgaaggtaattagttgggcaggtgaagcaatttaagaggggtgtgtgtgtgtgtgtgggtgggtctctctattatatatgtagtaatagtttagtgataattgttcaagtccatgtgtcggcgttcagatgtcgtgatctcgattcccttagacatcgtattcgtgttatctaattccacatgcaactgtgacttccaatatccttttctttttccctttattattagcagtaccagtcttgtttagcacaaaggctcataatcggttagccaaactcataacagttactacatattaaattaggctaattagtaatttttccggctaaactttgacatgtactaaattgtgacccctgaatttttttggccgttaaaaattcccctcgaactattgagattgttaaatttaagtacttttgtctaatttcattcaatttactgtttcaatgattgtttatgtactaaatcatgctccccaaaatttaatatttaccaaatcatgcccctcaaactttga

SEQ ID NO: 263464 - DNA, 1239 bp, Cannabis indica
ctttaaacctttcctttttgtgatgagaaaaaaaggcttggaagttggaacctttatattaacactactactatagccgtctgtgcctacttcatgttggccacgaatacacatcaagattaagactcatctctctctttatagtctttttttcttagctccatttgattttttacgaaacacaaacacagtcttacacttttagactcaatcggttcatctcatgaatccaaagctaccacctacttaaggatttgacactaaatagtacaaaacagggtccccaaaaaacgacaaattttttatcttgactgtgactgcgtttcaatcccctttaaactgaggagtcatcatcctacctggaataatggaagaagctaatgtggctgaaactataagtttcctcaacctcaaactatatatatatattatcattctagttgtttattttttaccaccttaataaattaatgttcatttttgtaattagctaatttttgccactctcacgatatagattggtacattgtacgtcctacttaactccttataccccaaacgaaagtaacgcctaattaatcataccaatcataaacccgcctaacacggctaaaacgcagtgtcgttttctctcttctgtcttaatctcacttaccttcttcattaattttttcacttttattgcttagaaatctccaagggccaaataagcaacaatataaatatcaattagcagctataccttagtcttcatgctgataagttttgagtcttcaacacaacccaaagtaatcgtacttttgaagatatatactacatatgtgatatttcttttaagaaaatacttttacttatattagtataatctcataaagaaaaaaaatggttatattaaacgaatggaaatttgaaggtgtcacatctagcaatatacaccatacaattgttgataacacattggattgaggtgagagaaggaattataaaacattttattctccaaaagaaagcagagagagtaaaaaactattaatataattaaatagaaagacattctgttttttctctttattttctcggttggtttagatgtcctctcacaattggatcttcctcctttttttgttgtattatttttctctgttttttccttttcattttggccgataacatttttaatttagtacaataaatttcacccaagatcatcctatgaaccccataacattttgttctgtc

SEQ ID NO: 263465 - DNA, 513 bp, Cannabis indica
ttggtgccctgcaatcaagtgatatatggcctctcttgccgaagcatcatgcacatcgggtatatcagattacccctatctgttggagaaaatccaaccaccagaactctaatggcacagttcatcgtaattgacgttgcctcggctttcaatgccatgatagactgaccagacctgtgcatcctaaaggcaataacatccatctatgacattcgcttgaaattcccagcaaggcatgaggtaggatgccgagaggagattagcaatttgcctatcactattacaacttggccttatccaaagccaagaaatagaagatgcatccatcagatcaagagcacacaagcttcatgatgttcaatgatcctattagccgcaacatgaaggtatgcatggacgatgtgctcatcaagtccaaaaaggctaggggcatttggaggacctagagaaaaaatttcaaaatcctccacatctacaacatgaagaagctcaaatccagacaagatccaagcc

SEQ ID NO: 263466 - DNA, 1247 bp, Cannabis indica
tcaaatctaataaagttgtgaacatgtatgttattgatacagatggacaaggcttctgttcttggggatgctatcaagtacatgaagcagttacaagagagagtgaaaatactagaggaagagatgagaaagagaaacatggaatcagtagtctttgtaaggaaattccagctcattgcagataaagatagcaattcaccatcttattcttcagatgagaattattcctccttcgatgagccactaccagaaattgaagcaagagtttgtgataagaatgtactaataagaattcactgtgagaaaaagaaaggggttatggagaaaacaattgttgagattgaaaagcatcacctaacaattatcaacaccagttgcatgacatttggaacttcttctcttgatttgaccattatagctcaggtattgtgtgccattatatatataccagcatattatttaaacaattaaaagttgtatagaaattttgaactataatcattattattccttttgacagatgaacatggagttctcccttacaatgaaggatctagtcaagaatctacgcttggctttcagcttgttcaagtgaaaaagtttctaacttcacaaacatgaaggaaaacccataactaaagaataattccttatatatgtatatacaacttgccatgtttatttcaaactgtgttttcaaggcctgaactcaattgctcccaccaccaagttaaaaccatttcatttcaagcttttgttttcctgtgagattattcatttttgcaagctttttttttcagtttccctttttttgcatggtcaacatcttaaccatgttctattcacaccttgctcttatagaataatctcacagcttggctgatcttttttgaggaaatgttgtaaaatacagctgaaaccttttgttcccatcacttttccttaccttaaaaagtgtttgacaagggagaaaaagaaaagatggttttctcttttgggtgtaaaaaagagttaaagcctttgtttcaatagtttgtaatttgtccagtgttttagaggcctcagagtaaagcttaatctgttccctcttttcttatgatgtaataatgtttttatgtgttggaaaaaagaaaataaagaactgtttaaagagtgacttgtcttatttaatgttatattaagcatcagttactttcactttatcaaagtcaattttggtattgtactatgtatgtgtttagtaattt

SEQ ID NO: 263467 - DNA, 2434 bp, Cannabis indica
tatttttttatagcgatatttattataattataataatatttttgtaattttttttaaatttttgaataatctaagaaatgagtgaacatgcgttgtacttgtattcaagaaatttgttgttgatattataaattaggagttttttcatttttacaattcaaaacagtttttttttttatatatttttacagaattcttcatagaaattcttatttcatctagcgctgcaacctaaattgcaacaaaaaatcgtatagaaacacatattgcaactagcgctgcaaccactttagaaactcaaaccgtaaatttgaaaaacaaaaagttaaaaaaacaatatataaagtaattcccctataaattattcaaaaatttcaaaaaaaaacttacaacaataatattataattacaacgaaaaaaaataaaaaaaaatattccaacgtatatttatatttacggacataaaaattgagaaataagttgtaattaaaactcctaattagtatattattaccttagtttttcagttggggccacaagcttggaacctttgtggtgataccaattagcatcaaagttgttaggtgggagagacaagtgtctgtttttccaagtggcagagatagcataggcaaaaccagagaacaagtttttgttacccttaaccttgacaaaatatgaagtacccaaaagaaacatgagagttgaaaaagccatgagcccaagagggactccaaaaccttcagcccaaccaacgttatcctgaatataaactatgactgtcacagctagtattatggagactccagttgaagcgtaataccaactaaagaagatctgtaagttcctctggttttcgggtttttcgggccggtccagttgatctgcaccgaaagccatggaacatggtctgatccctccagctccaatgctcatcagaacaaatgaagtgtagagtagtaagcgttggccaagatttgcagcaacacatttttctccatgctttatgtcacaataaggaggccttgcgtgtggaattacagcagttaaaagtagaacaaccattccctgagaaaataaaaatcagtcatatataatagaacaataagaagaattgagttattaatatggtgacatataaaatatttacttacaagtaaggaaacgattgtccccaatgcaattacacgaaaccgacccaagtaagagtcagaaagaaaagctcctatgattggagtaaaatttgataaggcactccacaagaagataacattagctcctgttgtgattttcaagtgatattcattcattaaatacaacatcatattagccagaagcccaaagcttgcaaccttttcaaatgtctcatttgctgcacaaaattcaaaactttccaactaattaataaagatcctttagaaaaattgaaaaatagagaacaagtaaatcaataaataagaggtatattaattatatataacctatgataaatgggagtgttctaaggccacccttcttccttgtgacttgttcattagttgtagctttctctgaagaagaaaccaccatggtttcctttgcaatcaattagaacttgatattggattctgggtttatatatgtttactcatatatatatatatgatataataaagctaaatatagataggagaggttaatgaaaagaagaaaactatgttttagtaatatatatttatgtacacacaaagaaagttgcattccccatttctttccattttcataggcacattatattgattttgtttttgaattccactatgttctatgaaacggacaaaaaaattgtagtgtatgtaatatgctttgattaatttgtttggttgagtgtattagaagtgggtgttccataatcgatgtgcctttagttgcatagactttatcatcatgtatcagtacggcaaaatatgctgttttaaaatttgattgatacagaaaatttattttatgatttgttccattttttttttcataagtttattaatttctttgtttttatgtcacagaaagaacaagatgtggatggcttattggtacgtacgcttactgaattaatattattataaaccaaattcatcccatagagagagaataattgtttgagtctccatgattattgattgacaatattggtatagtttatgtttatgtatttcttactttttcaaatacaaatgacaaaaatgtagagtttataaataaaacattacactaattaaagatttattaggtatatattataaacataaatcaatcaataatgtctagagaaggacaaaaaacaaaaaatgaaaaaaaaaggcaaccaattaaatttttcccttaataaatatgagaaaaattaaatttagggagttctatgctacgcccacctactcctttttattttttaaa

SEQ ID NO: 263468 - DNA, 844 bp, Cannabis indica
aataataaaaccaaacatccatctctctctctaggatactcacaccacacacacgcacacactctacgagtcggatgacccatcaccggagctagtgttgttcggccgccttacatttcaaaaaagcttctctcattttttgcgtttttttcttctggtttaccagtttttggtgatattttgcgatatttaacgatgtatttgtaatgatagaacaaacctgaggtcatggatgaagtttagtgatgatttgcgatatttagcgatgtttagcgatatttcgcgatgatgttcgcaatgtgtttcgcgatattgtgaattggagacatttagagatgttttcatgattttgcaatatttcgcgacatctagcgatgtttcgcgatattgttaaaaataaaaaaaaatgcagaaaataagcattgttgtgaattggagacatttagagatgtttcaagatttcgcgatgtttcgcgacatcgtcaaacaaaaaaaaaatgcagaaaacaaacgctagatgggtcagaaaccagaaaaaaaatgttgtggtcgtgggttgtcttgggtgcttctcgtgagtcgtcgcgagtcgtcatgctcttttcagtcgtgggtcgtcttggtcggtcggagttgtgaacagtcggggcttgaaaggtttggggctggatggaaataacagagaaagagagaggggggaagttagacagagagagtgtgagaagagagcttttgaattgtaagagtaattttggaattttagggtgtttggagaatatttaaggtattcatttaaaggtggtatattaaaagaatagtctaaatttttaagtatattttaaca

SEQ ID NO: 263469 - DNA, 659 bp, Cannabis indica
tatgtgaatcaactaaacaataattgattaaaaaaataattaaagcaaacatactaatcaacatcagatttgtttttactaagaaaaacccagaaaattttgcaagtaaataaacgtttatggagatttgcctcaatcgtgaccttctcttgtcaacttttcatggagatctctattgctgtcgtgttgccatggctgatcgaaaaaagcttcttgccggagttcatggtgatcggtaaaagctttctcgtcggcattcatggtgatcggcaaaaacttctacattgttggtggtgttgtttggagaagctacattgattatggagtagatctttgattgtttgggtgagctcatgataatttcagatctagaatatttgaaaaagttattttgggaagctcattgtagagaccgtatttttgaaaaaaaaactttgagttttccttttttgtttaatttcctatatgagagtaaaaaaataaagctatatgagaaaaaataccttatttttattttgttaagctgtgttttgaagtctttttcaaaaaaaaaaaaactgtgttttgaagttggattttaacaaaaaaaaaaaaacatagtaaggaaaaaagtagaaataaaaaaaaatgaatttttatttggtatggaatgaaaaatt

SEQ ID NO: 263470 - DNA, 788 bp, Cannabis indica
ttttttttctcaatatataaagaaaaatataaatcaaatgagatgtcattttatgaatatttttattttttattatttatctattaatattttatctaatttataatatgtcttctaagtaatatatatattttgtaagagtctcacattgtttacaaactatgtgagtattatacttattaactacaagtaaacacaatatatattatatttcattaaaaaaatacaacaagtaaaatatttcttcattcacaccgatttgtccaaaaattaatattgtttctctttataggggtaattgaataccttatccaattaattttatatatttatatataaatatatatatattctattgatcaactttatataaatatctaaaaattaatattttttttctatagatttgattatttttgtccatttacttataatatttgtaatttttttatttcataattactttaaatatacattttaattagtttatgtatatatacatcttaattgagtttaaaaaatgtggcactagaaaagagaagagaccaaaaatattcatcaattaaaataataatattagtctaacttaaaaaattgatacaaataattaatattataaataataatagtaataaaaaagataacaaatcatgattcattaatttaatgaattgttgcaagaaaaaaattaagaaataatattttaaaatatctacctctcattcaataaaaacgttaaaaatttacaatgtttaaattattaatacttaaattaataattttatata

SEQ ID NO: 263471 - DNA, 2126 bp, Cannabis indica
attatatatatttgtacattaccttattaccttcagtatcatcagtggtacttaacaccttctagatgtatcattttgtgattagttagcggtactctctaaaaattattacattaaattatatgagactcaatacttagtaaaattaatagcaatattaacatgtaagatggtattaaggaccactcgtaccttttaccatttttaatatttgcattactagtaaaagaaagtgtagctagtggataacttttacttgggtcccatctctagttaaaaatgatcctgtaaaaagtgttacttttaatctttatagctagtggaagcctatttaataggtagcccaatctaattagtggacaaagtaaaccttttcttcatctatattcccccacaaaaaaaaatgtctgaatccaaaacttctgttaaacttcatatattagacatttctgagccagaattagacccttcttctctatcttccttagctgaaacctgcaaaacttggggattcttccacataaccaatcatgggatttcaagtgatctttacaacaaaatatgttccttgtcaaatgatctctttagcctcccttctgaaactaaactcaaacttggtcctttctcttctataaagacttatactcctcatttcttagcttctccatactttgaaagcctcagagtttctggtccaaacttccttgcatctgctcaaagttcagctgatgtgctctttgacaaacagagttctcttttcaggtatatatgtatatatagattacatattcaatataaatgagctaaaaccctcatgtattatattctcttaacagtgagatgctacaagaatatgggagcaagatggcagaactgtcaaagaaaattatgaagattttattgatgtgcttaggggatgactttaagaataagttctttgagtctgagttcaacaactgtcatggttatctcagaataaacaactattcagctcctgaaagtatagaagatgaggttgaagggcttggaatgcacactgatatgagctgtgtaacaattgtgtaccaagataaaataggagggcttcaagtgaggtcaaaggagggaaaatggatggacataagcccatgtgaggggacccttttggtgaacataggagacatgttgcaagcttggagcaatgagaagttaagatcctcagcacaccgggtggttttgaggcggcctcagaaccggttttctatagctttcttctggtgttttgaggatgacaaagtgatcttggcaccaaatgatgttgtaggtaaagaaaataagagaatttacaacccttttgtttgcttggattacttgaagttcagagagaataatgagaaaggcaagtttgaaaaagttgggtttacagtaaaagattttgctggtgtcaaagtctggccaagtactgtaagtttgtaaagcattcattcaaagcttaggtgctctaattaagtactctcagcagtagaaatggaactgtaatatatatcaatcagtactcttgaactgaagagataacaataaaaatgtggggttcagttgggtttggctaaaagcttttgatttgtttgataatacaagttactggcttggctagtactttggagaagtttgacttggtggggtttatgagaggtttttctttcaaatcatgcacttttttaatgggaataatattctggatcaaacattgactatacatactattcatatccattagtcgaaactctacctgtaatggagctgaagtggtatagggacattaatttaatttccattgaatttgattgctgccttagaatattatatattgtccttgttgcatgtatagatttctttctggaaagggttgtgatttacccattattaatagccatattcattattgtttatattacaattattagttataataataataattgctattaatgtattgttcttatcacctaattatattagtttcaacaatctcatgccatgtttctgttatatattttcataaaattgtcaaacgttattatgtgatcaaggcatatctttctggcaagtaatcaccatcaaattgcaatttttgaggaaaagagaaa

SEQ ID NO: 263472 - DNA, 2528 bp, Cannabis indica
attattttatgtatttcaaacaaatattgctttacaaatcatgtttagaagattttagttttcacatcattaaattcttgtttgtttaaagggaaagtgattttatatatttgtttattgcctgttttatggttcataatgtagagttatcatttcctttggattttaaaggcacaggataattgaaactgaagtgaatgctgcatgttactgaacagttgttgcagttagccctgaaaaggagtgagtttagcctgtattattcatgtatcataaatgtcataactctgaattatcagtacttgcatttgttggtgtttgttgctttcgtattttcacaaaatttacaacacactataggattttattgaaagcgagtttttatataatatctgtgaaattgattattctttgcaagcatgtcgatctcaactttaggcttgtgaaattttctataaatattccttaatatgaattatacttgctttgtttttttttttggtttttaacatgagttatacacatcaataattttattgaattatttaaaatttgattctagagtagctttaagttaatttaattgggacatgggtagatcaggtggtttctcatggaatctggtaccaatttacagcaaatgagagatcagaaacaatagaacaacattctatcaaacagtaacacatatctgggtaatatagcagtaggctgtgttatttacttgagcaccagtcaaagttttccaagttgctttagagaacttcaaaactcttcacccgtacaagtttgccatgttgtttgagagatcttcaagactcttcacttgaaccaaagcttccttaaaatcatgacaccaaatgcctacctcaccacaaaagtaagagcagaatatgttttccttaatctcaaaatgcaaaactgccactacacctcaccttgctggctacaaaaccaaccagggacaaagggtcactgccctatacaaaatacttaagtatttccaccactaattcttctgttgcctagtatacatgaagcgtattggaggcatatcaaaatctaaaattaattagaaacttaattgcgtgagtggtagtttcataattaattagatgttgcagctagttaataggatataaacatgttaaatgactcataaatatgcgtaaaatggtgcaaaaattacttgttataaatatgttaatgggttgataagttggccaaaattaagcatgatcttttatataaacgtgttaaacgggtcgggtcaagtcaaatcttgtataaagaggttggatttgggttttagttttcgacacgaataataaagggataatttcataaatacacaaaaacaacaaaaaattacaaaaatacggtttcacggaattttaaatatttttatgaattttttgattttatttatagaaaatacggtctttttatgttgtattcatgttaatttgttgttgattttttggtaaccggaaggtaatttttgttgttgttttgatgttatttagatgctatttttatgttatctttatgtagttttcttgttgttttcgtgttatatttacggaaaaccgtaaaaatgtaaaaaaaattcattaaaggtaaaaatgtagttttttaacaaaaaaatgaggccttaggtaatcatcccaataataaatgagttgggcatttgcttttaatacttcagcctcggctgaacataaacacgacccataaacatgaattgccacccctagatccaacactttccattcaagctcattcgtacggaaatctttggctccgacaaggaagatttttgtgtagatgaatcatgttaacatacttgaagacaaatgagaatttatggtgatgcaagccattttcttacaatttcctcctcaaagagcttcgaatatagcaactatctacatagactatatttaatgaaatctaattaagaggctcatgtagtatataaacactaatacattattcaaacaatagcatataaacactaatatattattcaaatgtagcatcacaaccccaaatactagggttgtttgtgcaaacttcctactcctacaacaaatgtgagttgatagtatgtctagaacattgccaaggtattctgcaacaagtggagagtgttagtaggaatggagttgttttgggtagaaggattctgtggaatgtgggaacctttgctatctttatggataatagcagattcttcaaagatatagaagaggatgcatgtgctattttatttgggaaagagaaaggcatggactggctatatttcagtgctaagaaaatgtttccttttaccatgctgcttaatgatttgtcattttcataatttggtcccagcattgctgtcgttgttgtgtgtgcatgtgtgtgtgtttttattggtattagatcgtgaatagtgtactaggttgtaagtttggttatgtctatcattttttgttagtaacaacaagtgtttaattttagataatattgaaggattctctcaa

SEQ ID NO: 263473 - DNA, 1015 bp, Cannabis indica
agactccctctagtgatttgtcgcaaccctttgtaattcaccttgctaatatgatctctgaaacacaccaagtagtgaactcccttcaactattgatgtgtgcttacttcctcccgaagtaaggcttaaacaaatcttcttccgaagatatacgctcacttcctcccgaaatgagacttggaaaagtcttctcccgaagacccacacttgttcaagcttctcttcaacctattctaagaatagtatgagatcataataagaaaaccaaaacctagatgaacactctaggttttaacaaatgaaacactctagcaaggtgctctcgttgatggaaactctagtatcacaaaatgaatctcttaggtccctatttattgtgtaggtgaaccatatttgaaactcacatcctaaaggacgttactagccgaaatagaagcattaatgggatataatctattggtatcaaagtgggaaacgttcccatttaagaggtgagcattttgcaatgtttttccaaaaaaggtgttctaagcgacatgttgcctattattggacggcacgccgcttgagatgatttctgcacccccaatttcaaaaatatgtaacatttcttcgtcatgttcaggcgatatttcaccactcattgggcgacatgtcaccaggtgttttcaagcacacgcttcaatttattttgaaattcctcatcatgccaactcttctaaaaatattccaacactcaatttaataatataaatgagttatgaatgttttataagggtcatataaccaccattattaatctcataactcctttgtgtaataactcatagttacacaattaatcatatatggttcatgagttataaattctatttcaaattttgtaacccctttatgctactttttgggtgcattattaaacattatttatcacatatatcatatatattaaccatatattaatatatcattgcaatataatggcttttatactattttgatggaatagtaaatt

SEQ ID NO: 263474 - DNA, 678 bp, Cannabis indica
aactatcattttgagcctccatagtaacacggtatcctaattaaccaaataattaccagaggaggtgaaataccataaagctttattaggaatatctctacaactcagagataaatctagaatgagattataatcaacttcccaaaatattttcttgatataatcttcattcgaacaccaatctttaatgaaaccagtcacattccgtagagggccaagaccattaaggcttgtgaaaggccgaaacttatcttatcgcgatagccaaagatcggtatgaggatgaatttgagtgcgatgaccaacccactatttcaaattattcttaattttttaaaggattatctttctgttgacctaccactactgtatacgaataagttgaagttatgctcctacaactgatataaatttttctacccttgttaccatctcaacatctatttaaggcagtgtgaaatgttttttatgtcatatagtgcaaatcacatgaaatagaacattattgtcactatattgttttacagtatgtatgaaaggtaaaagatataattaattattatttctaagttgaatagaaacttttactgatgagctacaatattacagatggatacatataaatataattttatttgtttgaagagacaggtacatataactgaaagataagatgat

SEQ ID NO: 263475 - DNA, 644 bp, Cannabis indica
ctctaccgcccacttgagtagccatccagaagcgtctgacttttacagtatttgacgtagtggctggtcggtatatacccgaacaggatgagcttgaaaataaggcctcaatttcgttgttgctagaataaggcagtaagcgagtttttctattaacgggtatcgacattcagcctcaatgagtcttttactgatgtaatagactaggtgttgtacgctattctcttctctattagtacggcactcacggcatgttccgtgacaactaagtatattcctagttcctcaccgtccagaggttttgaaagtacaggaggttttgcaagttgtgcttttagctcttaaaaagctttatcacactcctctgtccactcgaactgcttgtttcctcgcaggatgttgaagaatgggacacacttgtctgttgattttgaaacgaatctgctgagcgcggcgatccgaccagttaagctttacacttctttggtttttgttggcgagttcatatccaggagggctttaatcttctctggattagcttcaattccttgggcattgacgatgaagcctagcaactttctcgagcttactccaaaggaacactttaagggatttagtttcatattgtattttctgaggacttt

SEQ ID NO: 263476 - DNA, 573 bp, Cannabis indica
agagtacacaaggatgtcgtcgataatcacaacaacacagatatcgaggaaatccttgaataccctattcatcagatctatgaaagctgcgggagcattggttagtctaaaagacataaccaggaattcataatgtccatacctagtgcggaaagatgtctttggaatgtcctcctctcagattctcaactgatgatagcccgatccgatcaatctttgaaaagaccgtctttccctgaagttgatcaaaaagatcgtcgatcctaggtaaaggatatttattcttgattgttaacttattcagttcccgatagtcaatacacattcgtaaagaccctctttcttcttaacgaacaataccggagctccccagggtgacacactaggccgcgaaatgtcctctggccgaacaaagtcaggccaagtggtatccaataccacggccaaaaaccctagacaaccatctcataacaattccttagctgttaatactgacattaccgggatccgagatccccaaaccgattcgacaaaaacaaacagttcttcatcttctggttggaagattaccat

SEQ ID NO: 263477 - DNA, 544 bp, Cannabis indica
cagccatagattcaagggaaaacctaaggtaagctctaatgaaactcttctttagttttcaagttttaagtttaggttgaatatgtggaactgtaaatcaagagctgttagggttagagttgtttgaatttcgaattctaaggttagtttgagttgattgaagttcctagcagctggttttgatgcttggttttagttctaagcaagcttgagttttgaaactcaagctttgagctttgatggcaagttgagatttgttgatttgttctgtgaaatactgcctggattttattgtttatgcattgaataggagctctggaaggtttcattgcatttggaggagaattgagcaagaaatgaacagttttgggaaacctggtgcaaaccggctagccggttcgcagtgccacaaaaaccggctagccggtttggcagggttcccgagcctttcattttctcaatttttgccatttcgatgcctcggttgggtgtttccccatttctagagatagaataaccctttaaaagcatagcagaacctagg

SEQ ID NO: 263478 - DNA, 695 bp, Cannabis indica
cattcactttctctttctctcttcatcttcttcttcttctttcttctcatctattttatattattttatattattttataacattatttatattatatatgttattacaattaatattgattttaaaacacgtgaatagggtggattggaggagcacgataaacttgttatggctcttaaacaagtggatgttgttatatctacgttacctgttcctcaacatcactactacaaaaactacctttagaggcagtttttaagccctttcagcgtcgattttgacgaaattcgctaccgacactgttcaaggtgacgctaaagggttttaaaaaaccgacgccatatatacccctatggcgtcggctattagctaggaaccgacgccataggtggcgtagggaccgacgccatatatgagtgtttttctgtttttttaattttatataatttatttaaattatatatttattaatttatatattattttatttcatttatatttaaattacatatctattttttaaaaggtaaattaaatattatttaaattaattttaaaattggctaaaatacataatttcatttcataaaagtaattaaatattacacaaacattaatgtaaaattagtccaaaatattagtaagttaataaaactaactacaaaataatttaaaaaaattacatagggaagaa

SEQ ID NO: 263479 - DNA, 708 bp, Cannabis indica
tcagagtctcaaactgcttcttatctaacaggctaatcacaaataacatcttagttgcttttgagttagtccattatttaaagcataagactcaaggaaagaaaggatactctgctctcaaattggacatgagtaaggcttttgatcgtgttgaatgggcatatctagcagctgtgatggaaaagatgggatttgcgaacagatggatttcacttatcatgaaatgtctttcatcaacatgtttttcctttccttgaatggagaaattgttggtaatgtcaaaccggggagaggtttaaggcaaggtgatccattgtcaccatatttattcttaatttgttttgaaggattgtcccgtttgttgaatcatgaagaagacattggtaaccttgccggactgcgcctaactagacatgcaccatctatctcccacctcttgtttgctgatgatagccttttgttctgtcatgctaccaagaattcggctttagctattaacatagtgcttcggacttatcacagagcttctggtcaactgctaaacacacaaaaatcagtcatgtctttctcgcccaacactgaccaagctattcaaatgtttttcaattaaacattgaacatgcctattagtgattgccatgaacgatatttgggattacctgcttactcaggtagggacaaaaaagaaatgttcagcaacataaagga

SEQ ID NO: 263480 - DNA, 1129 bp, Cannabis indica
tcaaaccaatcatgacaaaattgactaagaataacaacaacaactaaataatcaatataaacgaaataaaaatatcagttttcccttacctgagacaccagaaacaatctcagttgcagaaatcttgtaaaatggtacaccagtctcattagcaatggcgtgagctaacttggtcttaccacagccaggaggaccatgcaagagaataccagccatgggacgaactccaagccaccgaggaagctgaggatggtaaagcgggacaataacttccatctcaagctcctccaacacctccttcattccacccaaatccttaaacctcggaccatcattccccctcacctcaacatcagttacagaactcgaaccctttacttccttcttcgattcattaggtaaactatttggtgctcgaccatcactcgtaaacccaaccttttctcgatcaggaagctccatctcaatattcttctccttctccgctaccttggaagatttcggtgtatacgattctcttaacatcgatttcattaggtcaaatttcggctccaattcttctccatacacagcatcttcggaagtcacctcatcgctctcaccagactcttcttcctccgactcagacgaactactatcctgatcgttcctccgaattctagcaatacgagcttcctccatacgtcgtaatctctcttcgctctcatcaggagcacctttcttaggcttctttcgggaactactcggaccaccacaatcttcgtcgttgtcgtcttcttcttcatcgtcgtcaaagaccaatggtttagggttgttgagacggcgtggagtggagtctagggtttgctggacgaacctggtgaaaggttggagctgacaacgcttgtaatcggggtaagaggaacggagataatcgacgatttcgtcaagggttgaggaatggaagtgcttgaaggaatctacacggcggagcagcatgtttcgtttggattgagagaaggaacctccgccggcgccgccacatcttcggccggagaacttcttccccattttggttattggagttcaaagccctaactaaaacctctcaatcacaattataactcaaaaatactttgttttttttttt

SEQ ID NO: 263481 - DNA, 3147 bp, Cannabis indica
ttttataccaacaaattaaattatagctagctacactgtttattttctaatttatatatattataaaaatgagtgatattttctggtagtagtgtacataccgtagtaagatggagtaatcattctctttctgagattggtgttgaggtcatagagtgaatatttgaagcccttcaactgctttgatagtttattgagaagctttgaaagagctttgttatgtaagtttgctaaagatgaagcttcttctatgcacttatagttaccatcttggttagttactctcaagcccggtaaacaaccaaattctggcaagtttataaatccaaattttttacccccactgctatatatatcctgcaaattaaatttcttcattttaattctataaaaaaaaaaaaatcttcatttcacaaatttcaccactaattataatcacgtatacaaagaaattgttgtatggatcgactaagcggaattagtgtgtggataacatgtacctaattttaatattgtaaaaaagtcaatagaagaatagataatagcccgtgttgctcgttctcattattcaaacttagtagacccactttcataccactaattaagaaaataatagtctattgttcaaaagattagtttgaacacgtttaatactgacctagtgcctatcattatatcatatattgagtcattgactgtataaattaacttttttttttcttttggtattggaagagagcgattcaaattaacactcccttttgtgatagttatgaatcggtaaattatgtttgtgactacaatggtaaaaaacttaagtgttcgggttttacttaaatatctaataatttatttttcagttgtaacaacgattcttccaataaatagaatattattgatgcccattaggtgataattgttttctataataatgattaaattaaagtatataatatgtgatacttaattacacaaatagtgacacaacaaattgtagtggtactaaacatggctggtgctctctaacatttctcttaattttatgcttcaaatattaaatatttaaatcccatattttttttaacaaaaatccaatgcagtagtgtttataagacgttaatctacaaagctagagaaattaagggaagggaaatgcttactttgatgacagttgtcaagttgccaatgaccatctcaatgtactgtgatttggagtaggttttgaggatggtggaattggttaagaaaaggctcaaataatcattactgccaatgctaattaagtagacagcattagacaacatcaattcacctccaacattccccaacttatttctcaaccaaccctcaaccttcttatagtaccttacctgagttttcagatcgatcacctaaaaaaaagaagtccaaatattatataaaaatactcaaaactcaaatgcatgcgctctctacttctctttttctcttaggtgaaaaaaagcctaaaaacaatattgcttgcaagcctaccatttccattgatatctcttctctttttcacatttttttactttatttcccttttctatttcaaaaaatgtcctatgcctatcatacacatcatcacttgacaaggatataacatactagtatttttctggagaggctcatttttggagtctgatggtttaaaaatgatcactacgtactgctcactttatcaatttgtggacataaaacattatgtacatttccacgcttccaaaagtaaatttggctcattcaaatgacagataatagctaaccagattcatctcttatcccttttttttcaaatttcaagtgagaacaggaaatttaagtcacattctacaagttaaggaactataaattataaattataatgtgagtttgaattgaatctaacatatgaaaaattaaatagcttaatataaacaaacataccgatccttgaaacgtttcgaccagagcaccagcccctgaagaagcaaagttcactcctttataataatggcgaaaccccggttgtagaaaaggtggaatcaatggtaggttagcatattcagctgtaaaagaacacaccatatgtacacatatgacataaatactaaaataaggaacaattataaacacaactattaaagtttaggaggcagacaatatgtacataatgttagttagaataaagttgcttttgtataaacaagaagacaagattggtatataatataaatgatgtgtacatatatattatatgaggaaatctcaccaataaaatccgatatcaaccggccatcggagaatcttccggtggggaacttgaagtaagtctctccataaggccagaaatttgcttgggtcaagaggtttgtggtgttgatgtagttgttgttaccggcatccaagaaggaatctccaaagatgaagaaagcaattccatgtttcgtagaagatggtttagttacattattattactctcacaaacaggggatgtgataagtaataggaccacataaatatcaaggaataatgcaaggaacacacaccttaatctttccatgattcacttcttctcaatacaaagtttacaatgtttgtgctcatccaataatgtggtttttgttttattatatatatataatatatatatatatatatatatttggttaatattacttacaatagatatataagtagttttctttttaattagatttaattaggtgatgttaagtgtaactttaatttttttttaattaataatgtattttattaattttaaaaatgagatttgagattttagtcttaaaaattttttaaactattgcggctacattaatgtgtctttttaatgtaattatatatatacgtattttaatatacttcaattaaataataaacttaattcaagcatattatatatacataattttgagttacataagtagaattcgatctctaataatttgattatggcttagcctatataattttagatagttttatcttagattcattctgttaactttcatttggcatactttaatctatggtatatatacctaagtaattgaaaatgaaacttacaacattgcatctaattttttttctctaataatttattgttgtcaaatattattaat

SEQ ID NO: 263482 - DNA, 611 bp, Cannabis indica
aagatgtccgaatcggatcaagttttcaatctcgtccttgaggttttcacattcattggtgctatgcccaatgtcgttgtgatactcgcatcttttgttggaatccctccgggagctatccctgtacagaggaggcggtctccagtagtgcgtattttacctggtagcgaaatacacacgctcttgggagtccgttagctctgtgtactgggtatactggggagtgtaccccttttttgctgcatatcctccgtccggttgctgccttttgaggacctcttgctccgagagccttgagagggacctactaagcttgcgggcggagcggagtgcgacgggacttgtccacccatccctgaagattcccaaagtgagaagatgcagggactaaggcctggccctgactatatcctggggtagcgggaaattgtatgccgctcatcggtggggcagctgttggtaaggttcctgggagctgagctccgggtacatatcccgctatccatgtagggtagtatcccccataggccactatctgggccttttctaggttgatgtatttttggactcttttctggaagtcttgaaagttggaggctcctcttgctgta

SEQ ID NO: 263483 - DNA, 804 bp, Cannabis indica
aaatccaagtgaggcccatctcacctatggccggccacttgtttgtgtttcccaattattattttcaatttttaattgccaaataattgctaacctaaacctagcagctatctgtaagtggaaagtggtggctcacactaaataaggcaattaagcaattactctgtaattcaggaaactgcctctttcagaaagttgagcttccctttctctatatatagccgcccactctcttcctcttgtatgcttgaaccatacacgaaatacacacacacaagagagagagatacaatttcgaattccctagtgagagagtagtgcccacacacatcaaacagtacctcaatcatagattggaagactgtgaaggatcacctccaactgaaggacattcgggctcagatcttgattatactctgcaacagaaaggaatcaagggttagagatctgagtggaaggagacatattattccgctgcaatcaatgtaaggttttcttaactttatatgtgttttccttttatcgttttagaagttcatatttaggttgttaatcaacatacttgtgagtagatctaagatcctgtaaaattaattccaacataaataatattcagtaaacttatataattactgaaatgagatctcaatcatttatctctattcagccaagctcgaagaaaatcaccgtttcacttctaaatacttatagaagctatatattccatatctatgattagcgctcccactcaattgaactaccatgttcccaagatgtaaattgttggtaaaatttatttttacc

SEQ ID NO: 263484 - DNA, 745 bp, Cannabis indica
aaaaaattcttatagatgccgaaacagttaggggttgcatcagtgtgcccattttagtagggtgcaatgtataatcaccctaaatattattttttagggttagatattttagttttagaaaattctataatgcacctcttaaaagcaatgtattgatatacccttatctattttggtatccgaaataattttttagttaaattttttctcatgtcgtgtacgttgtaattatttaagacatcctacaaaatttttgaaaaattcaaaaaagaattaacacgccgaaaatagaattcaaatcatgaaatccacccgtgactattttattttatacgcgggtgaaatagactgtttgaacactgtaatctatattgtaaattattctaaatttcataaaattttattttcaaaataatttttagtcaatttttttcttctcatggtcatgtaccttatagtatttagaacatcctacaaaattttgagaaattcgaaaaaatttaacacactaaaaatatggttcaaatagtgtattgcacacgtgaatatttaattttatatgtgtatgaaataaactgtttgaacactgctttctatattgtcaattattctaaattaatcaaaattttgtaggatatctaaataactataacgtacacgaatataaaaaaaaaaattggaccaaaaaattctattggatgacgaaatagataaatgatgcatcagtacatccttttcaaggggg

SEQ ID NO: 263485 - DNA, 402 bp, Cannabis indica
gctctctgttatgttaattatattgtgtgggaaatgattttgagatatatgcatgtttggggtgagtttgggtgagttttgatgcattttttgagctgttggaatggagtctctgagttttgaacccaggcttcgcggcccagcttttgggtgccgcggcttgcttgcgtggacaaattgcatgttgaacttgttttgttcataacttttgactcgggactccgtttgagacgttcttcatatcgtttgaaagctcattccgagctttatatgtttatctattatttttgaatgtccaattttatattatgtgaaattggatttacggattaaccctttacttgtgaatcccataaattgtgactagattaccgacacttggtcaggagcacccgaggattt

SEQ ID NO: 263486 - DNA, 1732 bp, Cannabis indica
  modified_base (1713)..(1713): a, c, t, g, unknown or other
gagagcatgtagtttggtacatgtagaaagttacgaggagaaaaatcctaagcctaattagaaataactaaaaaacaaataagaagtatttaaagaatttttggattcaatgctttggaaacatagaaaacatattcaaattgtcgttttcattttagattaaaactcaaaattatattcagattttgtttttaaaacatcttaccaatcgagtattttatttggatccataccttttaagttttcaaaaacataaaattgttttcaaatctcaaaccaatcaatattctaaaagttttttttgttttttttttttttttaaattacaatcagaatttttatatttaaatatttttttttatatgaattatactatgacaactttcgaagagaaattttctgtcaacaagttaattgtctagtcaaagatatacaaagtcagaatatgagtcactacaaacaaatcgatttatataagacaaagttatctcgaaaatttagacaaaacactcgagaccaccttcaagaggcagctaaaataaataagtcattggacgaaaactacctataaaataaatagatataaaatgtggattagcactctataaaacgataatattattaatttcaaattaaagataaaattcaattattattataacaagaaaaaaaatatctttgaagtttttttcctcagcatgtcaccattgcatcgaaactaaattgttatgttcaactattagaattaaattttttaagacagaaatattcaagtcaattaaacttgcattatacataaaatttgagaaattaatcaaatgctaattaaaattaactattttgctaaaaaaactaataagttcaattagctaataaataaataataaaaaaacaataatataaaataatagctaaaaaattcttctaaaattattaaaatatagttaaagtaagatttaaaacttatatgtaaaaattaataatagcactctttatgattgtattcataaacaaagaacatactccaaactaaccaaaaccaaaatatgatacaaaaagtcaaacaaaatagcacagactaaccaaaaatgtgaaacactataaccaaaattagaaaagatataatctcaaattaaaatgagagtatcagacccatcttctttaatcaacacatctttgattaatgtcaactattaaatccactgtatgtactatttcttttcccttttttaaaaagaaaaaaaaaattcctaattcttttgaaaaaaaaaaactatggatggaatcactcagaaggaataacagtgatgtgtttcaaaggagtagatacgtcagtacagccggcatgttcaacgaattcagccggtgagaatgcagttccacggcaaacacaaacaatattcacttcagaattttgcatatctatacagaaaaccagtcacccttttccgatttggaccctcacctttagtcgaaatgtactaatttctctcgtttcaaccactgattcagaaacagtagtagtttcagaactattactatctgagtagaagaactagtataaccaccatacgacgtcgttttcctatcttcaccctgtgttttttctccgctcttatccgcccgagatccgaacccgtgtaaaggtccgaaccaccgacaaggcatgggttgaaccgcattttttagagtagaacctgcgtttggcgtccnccacggcatcatcatgtat

SEQ ID NO: 263487 - DNA, 877 bp, Cannabis indica
taagtggaggtttaatccaacatgcatgtataataatacaagtttactagctttgttatagttttgatattctttcttatttgtgttgtatactatactctactaactaagttagtttatacttttctagtactgcaatttctactggggcatcaaaataatatttgtagttaatattaaagttagtaataaatattatatgcttattatgaaaacactaattatttttttttaatctttaagaagttgttcatataaatgtattttttaaataaatgtggtgattttatatttaaagtttgaattgtatattggcttatactttttcttcattgttgtaagaaactgctcaatctttcattataaaatttatggcgctacttagaggtacaattttaaattgaatattgaataagcaaaaatgtactttagatgatatcaagagttatgaaagttaagagtgaccgttccttatcacacctatggaggatatccttatgtattgtaaatgcatatgtttactaagtgattatgaaggttgggtttgtatattaaaagtattgttagaaatatttattataaagacattttatataatattactcatgtaattgtcttaatttcaatttatcttctattaatcctactttattattatttttttaatagtgaattttagttaataatgtatatgtttttatatggatatataatattagcttatgttttatatggacaaaacaatattagcttatttgtgattttattttttaatttgtaaaagggttttatcgtgcacaatgttttcggtataagttttaccgaccactttttatatgtcctcattaaaaagttgtttgcaccgaggaagcgttat

SEQ ID NO: 263488 - DNA, 766 bp, Cannabis indica
gtttatttcattgttttataattcatcataggatattaatgaaacatacatggtagtaaatctagatcctggtaaaatatttccaacacaatattgggcgtatgaggccattttggaggtagggaagaggtatggcacgaatcatgggattccgtttcccaggatgcttagctggacgagcaagggtgatattgggaagaaagaagtcagtgcattattttctggacagatatgaatttcacttatgttcagagtaataatttaacataaatgcttgtaataaatgttaaatggttttactatgatattttttgaaccataaacagaatcttaaagtggtgaaggggctacttccacggacagaagaggaggcatttgtgaggaccatctcttatgatgttgtggaaaacctggttgatggtggtatggatgacacagaggctgaggcagatactcaggtaccacacactcaggtaccaatttttaaaactttttttatggttgtatacttgattgttttattgtttttgttctgtgatatttgtatgcttaccgtatttttttggtatatattttttcaggccactggttcagaccctcagcccagtgcaccatcttcatcaggcgttcgtggtgccgagtacagtgatttagtggggaggttggataggatcgaggctgaccagaagggtatgtacgtttgtcatgccgagctgaagaaggcatatgagaccagccatgtagagctgaagggtggtcagaacgt

SEQ ID NO: 263489 - DNA, 757 bp, Cannabis indica
taagagaagattttgattccatatgaagtccctcacaatagcttgaggtgttagatccctcaaataagacgaaagaaaatttaaaatttttgtcacgtggctatgaattcataacctcctactacaagttttttaattggataatacattattttatgaaagagaaattatttttaaattgatttttttttctaatattattattacaataaatttctaaggggtaaaagtgtaattttagtttttttttttttcctaacatatatttgtaaggaagagatcatgtattgttgtatttcctttctctttatttttttttttaaaaaaaaagagagtaaatggtcatttcagcaaaaaagtgtattctcataaagattgtattattcttgcaaattttttctattcaaaatttagttagtgatatatttactataaaaaatggttatacacacaaataaaacaatacgaaatttaacatttccttaatattttttttaaatctttatcattaattttaattattatcttattatgaaggcaataaaaaatatgtaagtctataacttaatactatatctaaatggataaatactattttagatcttgtgttttgtaaaagttgttgattgaaccctctgttttgttaactgataaaataaaccatgtattttttaaaatagtataaataggatcctgaacttaattttttataatttttttaatataaccaacttgaagacaattcctaatacggaca

SEQ ID NO: 263490 - DNA, 601 bp, Cannabis indica
atgatggacatataattgtcctgcctatcttcttttggccttgacaagtaagagtctggatttactttgtcaagacaaagtatgcctggaagacttagaggcaggtttagtagcctattttatttctctgcataagttcattgtgctagttcaatgcgttgtatggtaagggcacctctcaagcgaccatgcaggcaagtctcttggtcacttgctattcactaagtttcatagactttgcttaggttcttccttgggggtggtgtctatagtacgtatgtagaactgtaactttaagaagttaatcttatgagcaagtagtttagacatagtcggtctaacgtgtaacaaaagcttacaatttagtgcccgcttttgaaatcacgtagaggctacccatgcgcggcttaacaaagcagaggtcaccgttgaagaacagtgggagaccacgctaagaagatcgtgggtactagcacttttatgggttcttacacgatgaaacattagaggaactcaattgacaagttggccagtgagagtacttaccgagatgttccttattttagtatttgggtagaagttctgacttcaagttctcgtc

SEQ ID NO: 263491 - DNA, 573 bp, Cannabis indica
tttatttcttttttcttttttctctgaaaccctaatcctctccacactaacctatcttccttctccttcttcttcttctccagaaccaccaccacagccaatatcaccaccatcataactcctcccactaccaccaccactacattcaccattgcaccaaaacaaagaagatgtcagaaaagaaaaaaatcaaatatcacctgctatgaaaatccaaacccagaatcaaatacccagccaaaagatcgtcgtcggtgatgttgtggtatttttaacacgcaagtatacatatcgttaacaagttatatactcataaagagtgaggtcgatcccataaagattgtagttaagtactttaaaagtaaatctttatggttatatcgaattttaaagtaaattaaaattagaaagcaataaaacaatgaaaataagaagtaagtaaattaataaggaaattaatgattattaaaagttagggttttcaatttcaattgcatctattgattatggtttaacatgattctattcctattaacaaattctatgttatagcaggtttacttaggtaattta

SEQ ID NO: 263492 - DNA, 566 bp, Cannabis indica
ttattaaacctcacggtatcagtaaaattaaagattgaaaaggatattatgttattttaaaatgatcacatattgaacataattccttaccacacactagacttattgaccatatcgatttaatactttggtatttgtgattatgattgtcttttgttgatttaaaaacaatataattgtcatagttcaatatcaaaggataacttggaccaatatgttgagatgctatcaaagaactatcttttttttaagtggccacaaatatattaaaatcaatgtagcccaagtttgagaatgttagacttttttatttcggtttacatcaacttttattagttttattgaaatttgagttattttggatagttgtttgctgtgttagcccatactgttattgatcaatagttgatgggcttagcatctctgtgtataaagtctaggtgaagtagaagtgtgggttttcccagttaactagaggctttgatgagtaggcccagtccaactagggttatctagataagcctcctccctaattttgtaaatattgtctcatcacaattgtatac

SEQ ID NO: 263493 - DNA, 569 bp, Cannabis indica
gcacatgtaattttttcaattttccaaatcgtacccgcaccgcgaaattaaaaaaccgcaccacaaaaaatggtgtggtgcggtttatgcggtttggactattactaaataattaaactattacaaatacaacaaagtttgagcaacacttgtcaaaaataccataaggcttgaaaataaatatgaaaaaaagcttcaagtttcaacaatacaataattagtgggcttaggttgggttttcacatattgaacctaaataaatataaaaattggtatttttataatatgcggtacggtgcggtttgaaccgcatattaacaattcaaaatcgcaaattgcaccgcaccgcaccgcaccgcgcggtttaagaaaaattcaaactgcgaccgcactgcaaagaattaaaccgtattttttttgcggtgtagtgcagtgcgggcggtttgagcgatttgatgaacacccctaatttaatcagagcaggtcttgaaatttagtgaattataagaaaataaatatttttaagtccttattaaaaaaatgtggtatttttcaaaattagtaaaaca

SEQ ID NO: 263494 - DNA, 852 bp, Cannabis indica
gacccttgttagcttgctttatgtattgctcagtccttctctctatgttgacgttgtgccctctcatggattttcttcacaaattgtgctttctttttgccatctagatttaaatgctcagaaacaggtaaaggtgtatagagtccaaaggagtcaaaggattaagacatacccaatttcaaatggtgaaaatttagtagaagaatgcatagaatgattataagcaaactcacatgtggtaaacaatcatcccaagtcttaatatttttacttatgatagccctcaataaagtggataaagttctattaactacttctgtttgaccatcagtttgagaatgacaagtagtagaaaaaatagttttgtcctaagttttccccacaatgtcttccaaaagtaacttaagaacttagcatccctaactgatacaattgttctaggcatagcatgtaatctcacaatctccctgaaaaaataaatctgcaacattagaatcattatcaattttatgacaaaggataaaatgagccatcttagaaaaactatctaccaccacaaagattgaatccctcccacgtttactcctaggtaaacctaacacaaaatccattgaaatatcaacctatggagaacgaggaataggtaggagtgtgtaaagaccattttgctgaactcttgatttagcttgcttacaagtgacacatctaccacaaattcgctaaacatctcttttcatgtggggccaaaacatgtgttcttgttatataactaaggtcttagcaactcaaaaatgtcccataagccctcctccatggaatttccgaactacaaatctcgtaaagaacaattag

SEQ ID NO: 263495 - DNA, 842 bp, Cannabis indica
agatgggacaagaacgaggcttctataatccacttcattatatcacgacctgtgtggagatggaaggagtcaattcggatattccatttcgacatgaaccaaagattttcacaactttttacaacctctaaaaagatagcgaagtggtgttacctatcagatgattactcaaaacacaaagtcctggttcattgccaaaaataacaatgagtgcagaccccattggcagcgcatcatagtacaatttccaaaggaataacttaagacgagggtggagggagcacttctagaaatgtttaaagaagccttcattaacaacaaatgacttaaagttcaataagctgatttaagagagaagttaccttgggcagtaagggtccatataagtgaatcttcatgtttcagatccctcagagccactgacaaaagacgcgaggcagctgtgggggagaaggcttgaataagatttccattccaatttaatccctcaacatccaacaagtctttaaccaagattttcctcattttcctggggtttatatcgctaactttaatgccaatgtcatcatatagaacctaattacttgtccacaagtttttatcagataacagactaacacgccaagccgtgtttgaagtaatcatgtgttttgctacccatataccacgagctacaacatacactttaccattcaactcaggtgaacactttgtcaccagatgggtggccagctaaaccctaactagggtagggtgttcataaaatagtcaattcaatccaatccgcacgatccaatctgcaaagtgcaaatatccacgcttgtgcggattgaatattgatt

SEQ ID NO: 263496 - DNA, 2076 bp, Cannabis indica
ttttgcttcttgtcattcaaagtcatcaaatactttttaagaaaagtaattggaaagaacagaatgtaactaacaattactgtgaaaagacattaatttgtcattgcattaatataactttgaaattgttcatattattagagagtaactaatgatgtatacactcttaatttacagactttaattacacacaatattggtattaaattttaataagaaatatttttaggtatgatcacatttaattgtgtgattaagattaattttagtaataaccgtcgattggtattaaattttaataataaatatttctaagtatgcacaataatgtacattttcaaactacaacaaatacctctttttctcaggaaagaagacaaataactctcttccttaagcagaccatggatggtaaccaggacgtggtaattgccattggccagcaagctgagctgagaggtgatgatgatggtgataataagttgttagatttcatcgaaaaatatattgaaagtggaggaaaaataaataaagctagtaaaagtgacgacggatcacatatcaagatacaaaaagttccaaaaatgatgttgaggaaaaataattggaaagagtattacaagccaaaggagattgcaattggtcctcttcatgctttcaccaagagcttgaaaaatacagatgatctcaagcatagattaacggcaagatttatcaaagaaagcggtcgagatgggagaactttacttgaagaaatcaacaaaacatctctcaactgaaggagtgcttcgatttgaatgtaatacctcccctcttcccctcttcaatgatgatgataaggaattggccaggttactgtttttagatgggtgttttgtactacaattcatagatagttatgtcaatggtgacataaaagagtttgagattagcagtggccaagttgttgagattcaacatgacttgtttctcctggaaaatcaaattccatttcgagtactcataatattgatgaggttgagtaacaaaggggttcgattggccacaaacatctatcgttttatctttttgaacaatatggtaccacacaacttctgtagcaattgggcacaagacattttttttgccaatttagaatttctagttaataaaaagaacatcattgaagatgataaattgcctgctcatcttcttgaccttcttagatcaaagctcttatttaatgaggatcagcctgaatatgatcatgagagcagcacaggtggaaacactacagatactcttttgtactacaaacactcttttcgcaacgttcaagatcttaaagaagttggcataatgttaaagcccgactattctcgtggcctgaaatctgtatctttctcttctccattgtatatttttggtaaacttaaccttcctccattgattgtggatgactcaacagcacgaaagttgctgaacttggttgcttatgaaatgtgccctgataacaataagaaaaactacactgtgacttcttatttgaggctattagattcactcatcgatagtgaacaagatgttaaagatctaagattagcacatatacttcgaaatcatcttagtagcgacgcagaagtagcacaattgttcaacaccataggcagcagcttggtgccctatgatgcttatttgagcgtgaaaatagaaatacaaaagcactacgaaagaaagatcgttgcttggaaagctcagttctatagagactattgtaaaagtccttggactatcttggctcttcttgctgcagcagcggcacttatattaacagggattcagacttattactctgtcaataatccctcctaaggattgagttacagaaacaagtatagtttttttttagtcatattgttttagcatagatgttattgggtgattctacaatgcacccctttaaaagggatgtaccgatgcacccttgacatgtttcggcatccagaaaatttttttaatctaatttcttttcatattcatgtacgttatagctatttaagataacctacaaaattttgagaaattcagaataattta

SEQ ID NO: 263497 - DNA, 555 bp, Cannabis indica
ttatagcaaccttttattcgatcgaaaagagaatccgacgttgttccatttaggcgagagtcaaggttattcctatttcatgagcttctactattgtttcatactttgtaagccctactctaagtaaccactattaggttagacgttactaagaataaaagacttacaataatacttatctttcgagattctacggtgttaaattactaatgaacgaacatctattagggatgaatctcagtaaaacaagaactatgtagaaccaacaatggaaatcgaatatctctttgattaaagctcattatttaaaataatatatttttaattaatcacttattttaatctatatattttaatgatgaaaattacttaatttaaattggtctaaaatgaattaaaattgatacctcgcatttcttgaaacatctgctgccagtcagcaggagaattagcattgccaacccccgcattatccctcgaattctgcggagatgcaggcggtgccagtggattggtttggtcaaccccaagctctacttgctcgccctgtggtct

SEQ ID NO: 263498 - DNA, 521 bp, Cannabis indica
ggaccctaggcacaggcctagcccgcctatgcccagggtcgggcctagctattgatgtaattaagtatcaggtcctatataacttaagaaaatagtattagggaatattgttaattaatcatggagtgtcacctataaaaagtactaggtactactaacacccaataacaatgatctttattatttttgccaacaaaaatgtaaattactagtagaatgaaagctgggttttattttttttcctttgacagaagaaaattggaatattttaggtacttgtaaaatgaaagttggggtattttagcaataaatatcctttatcactattcaaaaagttttgattggtcgggtgttgttatatttaagaattatgtgagctcctaagactttgtctaacactttatacatttccgaaaatgacattttattattgctgactgtttttaaaaatatgtagctatgaagtattaagggcactgtcttttgacgaattaagagagaagaaatataaaaaaaaaaaa

SEQ ID NO: 263499 - DNA, 1869 bp, Cannabis indica
tccccaccagaaattggccataatcttgctaaactacctacaaattgaaagaggaagcctatagcaagacatggtataagaggggatagcttggatcactgctttcaggaggatttctttaccatccttagagaaaagatgttggttccaggccgataatttactgctagccttttggagtaggaagagaaatgaggatttcttagatctggataggcactggggaacccccaggtgtttgtcaattaaaggcttgtcactcatttgcagagaggtcagaaaattttgtttatcgttagaactggtgttgggcgagaaaaggatggaggatttagcaaaattgactgtttggccagtggccttattgtaagtagcaaggatatccttaatagcattgttgttcacattattaacatgtgtgaataacatgctatcgtcagcaaaaagaagatgggagatagaaggggtcgagcgacagatagaaatcccattgaattggtgatcaagagatttgaggttgataactgtggagaggatttcagccaccaataagaagaggtaaggtgataggggatcgccttgtctaatacccctagagggttgaaaaggaggggagagatggttgttaatgcaaagcttgaaagtgaccgtggaaatgcatttgagaatgagggatacgaatttattggggcaacacaaatgagaaaggaaaactctgatgaaatcccactcaaccctatcaaaagccttctccatatcaagttttaacgcagtccaccaaattttgtcgctcattctaatattgattgaatttatgatctcattggccatgatgatattatcaaaaatgattctgttatgagaaaagctccctgattatgagggatgagatcttcaaggacagttttcagcctattggcctttttaaacaattttgtaaacgatggaacaaaggctaataggcctgaaatcttgaactctcgaggcattgttcttcttggggataaggacaagggtggtctcattgataaggtccagattagctccattgttgaggatgtcgaggacaactttttctaaatcttttcccaccaaagaccaattcttttggtaaaaaaagggggttgagaccatcaggtcccggggccttatctccaacaagttggaaaagtgctcttttgacctcttgagtctcaaaggtttttgcaagatagtctgaatgattagttgaaatatgcttagttgtacccttaagaaccgagtcgatggcattgaggtcagagccttgagaagtgaaaaggttcgagtagaaatggacaaaactatcagagatgtccttaagattggtaacaacagtgctatcctccagggtgatggcctttataaaattatttcttttcctcatggaggccttattgtgaaaatacttagtgttattatctgatgctttaagccaattgactctagatctctgtttccagaaaacttcttccttaagtaacaaagtatcaagggaggattggaggctattggcgtgattaatatcggttctggaaagggcgggattttagtagatttagtcaatgccagtttgcaaattcttgattcgttgtttgaattgtttttttccttgctctaggatttcattttgtggatgaaatccaactgtttgttaaggaaagaggacagaggagaacgattagtgtctagagtgttccaattcgctttcaacatggtagagaaatcaggttccgtgagccagtgattctcaaaacaaaaacttgtaaggaaaccaaagttagtgggggaggagttatagtccaatttgatggctctgtgattagattcgtagaagggaaggtgatggag

SEQ ID NO: 263500 - DNA, 5115 bp, Cannabis indica
tttagtttttcatctttaatagttatatttttcttcgggggaacgtacggttgttatgcaaaattatagaaaatgatgtcttgtctttgtccaatgttcatggactttcaggttaaagatgccttggtccaatttgaaacagcacttgatttagatcccaacccaatagaggctcaagctgcactgtataacaaagcatgctgtcatgcatataggtatcaatctcattaaatttgtttagtgtttctctttccaaagaattcttagctaagtcgatgagtacatatttgttttgtttcttttttcaacttttgaggtagaggggaaggaaagaaagctgctgaatgtcttcgtactgcattgagagaatatgacctcaaatttggcacaattttgaatgatcccgacttggcatcctttagggccttgcctgaatttaaggaattgcaggaagaggtatgtcgctaaactttgtctgttcaatgttattgttataaatctttgatatgcttaggatgatggtctactgtccttatgtatatggtaaaaatttgaatctcggttgattagttttgacttataacttattgaaccaagctggcttggtgctaagtgataacttcataagttttgcaagatctcttccattctatgcattatacatacaaagagattctatgtattacaggctagattgggtggggaagatgtaggttatggttttagaagagatctcaaactcatcagtgaagttcaagctccatttcgtggagttaggagattcttttctgtggcctttacagcagctgcaggaatttcactgtttctcactatacctaggctactccgtgcaattgaaggcggtgatgatgctcctgatctctgggaaaccgttggaaatgctgccattaacattggaggtaagtgtcaagcatttgtacttcaatgcaaaacattctgataatcacatctgctataagtatatgatgaattttcatttgcatcaagaatcatgtagtgtttttaaatagaactgctaagtgtttcttaacatggctaaacttttgaatcagcaacctccaggtattattgcttttgtggcattatttatttgggacaacaagaaagaggaagaacaacttgcccaaatatcccgagatgaaactctatcaagattgccactgcgcctttccactaatcgggttgttgaactcgttcagttgcgggacactgttaggcctgttagtatcaaaattgaattctctcgtactattaatgatgtgtgcactttttttcaacgttaaaactcaatcaaactttggatttaggttattttagcagggaaaaaggagactgtttctgtagcaatgcagcaggcagacaggttccggactgaactccttagacgtggtgttcttttggttcctgtcatatggggtcaaagtaaggagccacaaatagagaagaaaggctttggtgcatctcaaaaggcagcagcagcctctcttccctcggttggggtaagatgtaaaagctaccgattaatgtacaaatttttccttaaaggttgtagttttgttcctaactgacactatcttgtataggaagattttgagaaacgtgctcagtctatcactgcaaagtccaaactgaaagctgaaattagattcaaggctgaaattgtatcaccagccgaatgggaaaggtcagttgctactctatattccctctttacagttagtgcatacatattttaattctgttcacatatgtgatggaaaacgtttgttggtacatccactgctctgaaaaatttgcagttaatcttgttttcactcctaaacatcatatatagtgttttcttttttttttttattgtgtatctaacatatgaaactacgtaccgaatgcattattttacttctttcacccggatgatgtcttctatgccttagtcactgcaaccttttccgtaaccttgctgtttaggtggataaaggatcagcagaaatctgaaggagtaactcctggtgaggatgtctacgttatattgcggctagatggtcgagtacgaagatcagggaaagtaagtccacttaatccaacacactttctttctcatttttaaattcatgttgttaaactttctccagagctaatgtagaacttggaagaccacctttagaggtgtatgaaattataggaagaacaagacattaacaaaccaatttgaggcaaaactttgaacttagaaagtttacattcagaacagctctctttcatctttagttgtttaaggtttgagttaatctagagcctcagaagactctagtttcaaatttgggttctctagtgttaaatagtgatttttcttttctgaagaacaaaaaaactgataaaattgtatccagtaataaaattcatcacttgttaacagggaatgccagactggcaacaaattgtacaggaactaccaccaatggaagcattgctgagcaagctcgaaaaataaactctcaatattattgtatagtaactttgatcaagccaaatttcaattttgatgtggaaaaaattaatatagattacaagtgtaaaatatatttgggccaactccatattcttcttgtatgtttaaacccattaaagaaaagggtgtcagtgtcactctctgatatgagtgagtgcatcttcttggaccttcattcaatgatgtttattattagtatttataaacatcataatgtcccccaaccgttacgcaattctcttctcttcctccatttgggttatctagataataacgctgtcttgagaaattaaaccatttttcttattttcatcatacaaaaatacttaaaaattcaactccaacttagttatcataataaactatttgttatttgtttttcctagttcttggtcctctgaaattggtccaggctactagatagatatcttgggatgggagtttacatataatgaactaacttctctattcataaccatcccaagttccaatcaacaaaatggatccaaaaagaacattgctattgggcaccagtgatgcctagcaccttctaagcgtgttgtcttacgtttggttagcgatactccataaaagttattatattaaactatatgggactcgatatttaattgcaccaatagcgatatttacacgtaggtcgtaagagggtgctaggcaccagtgatgccctttaacatttctcgtccaaaaataaagcaagtttttcccttggattcttttataatataatatatacttgttgaaacactaaaagtcacttatagttgttgaagtaatttttgaatttatttttcttttattacaaaagtaaaatcccatgtgtcttttataattagataacagattaaaaaaatatcatgttttattgattaagatgaagatctcataaaaagggacacatcttttttcttcagctaatgtcatattacattttaatgattattattagcaaggataacatgctttgaatttgaacaataataatgatcagttgtccaaatcaaagctcactcttcttttcctcttcttttcagtgcctcatttcattgtcttggtaggttttgaagaggtcacacaatgttctagcataatttaattttttctttgatacaattgggaggtgtttgaatttgagaaagagtcatcaattctataatcacattcattagaaaaatgagcctccattttgttaaactaatctacccattatagtatcttctaagttaggtttctttgtacaaacatataatataattaactatggttagtgatgataatattaaaatcaagtgtgaaaattaaacctcatatcaggattaagactgtcaagcagtcgaggttgttgggtagagggtagaaataatagtaataatctagatgtctctctattgttagactaggtatctcttagtctcttatgctattttactcgaacattaatatttgtcttatttatttgtgttcacatatgatgctactctagttggacaatgtccaactttaataaatatagaaattatttttgttttaagtttggttacatcactatcaaatatgagaaagagcaaaaagaaaggatgacacttgatctaccaccgtatcaagacttttagccaatttaattactcgtacaaattttatcccattttcaaaatctagttgataataacattacaccgtctctactctactaataaagttacaaaatcatcacctgagtttcccttattatattttccatgaaagttccactaaaacaaattaaaatacctatgcagtagttggattgctacaataaatatattaagatacaaacacgctagttcaatatataatttcaaaaataccaagtctttaaaaaagcaacattaactcaagtcaaagtagggaaagagggtgtttcgtaaatatgaacaaaagtagtgttgttttctagaaactcaactctctcactttgtctcaacacaactatataaatatatgtagtcacgactcactgcatatgtatatatgtaaagagagagagagagagagagagactaacaaaacaaaatgattcgtggggtggggttttggttggtcatagtactagtagtggtcatatcgttggggtcgggggttgaagggggtagtggtggtggcatggaacaccggctgagctggggacgcagcactagtagtggtggcaagtgcgagggatccatagcagagtgcatggctgagaacgagtttgacatggactcagaaatcaatcgtcgtatattggcgaccacagattacataagctatggtgcactgcagaggaacactgtgccttgttctcgtaaaggtgcttcttattataactgtaaacaaggagctgaggctaacccctacaaccgtgactgttcttccatcactcgttgccgtagttgattattactacttctctctctctctctggttcttgttcctgttttctttctctgatttgttgtaatataatggtttgcaataataaaatgtcaattctcgaatcctaaatatgtatgtgcatgtactttttttattctcagtattaataa

SEQ ID NO: 263501 - DNA, 948 bp, Cannabis indica
aatcacgtaatacgcctatgttagttagggtgttacaatataccttaggacttggcttgtcaaggattcgaattacactacaacccttcgtgtggaatcatacttggaccttaaaggcctatagcttgctatggtgggtaggggcggacccacatataaccgaggcggggcagtcgtcccacctgaaaaaaaaaatcagaaaaaaaatatatatacaatttaattagttacaacatgtatttgtaataaaagatgatatttataagcataatattaactttggtgtaatggttaagctacttacttagcatataagttagaggataaatgttctaatcccattaaatgcatttttttctatttaagttacttttttgcccccttcacttacaaaaaaaaattgcgtccccttcactttgaatcctatgtccgccactgatggtggggccatcatgggatgaaaactctcatagatagtagtattgatggtccaattaagacagaatgaggtataagactcttataactagaatatggtccccatgactgtctaagctaccgaagaggtggaaaatgactctgcactatgtgattttgtatttatttagaaataataataaaaataaaaatagagaaatactaaaggacactttaaaatatcaaatactattattcaaaaaaaataatatcaaatactataaaaatatataggctaattaggatttttgtcccctgaactttgacatgtaccaaatcatatcccctgaacttttaaggccattgaaaatgccccctgaactattgagattgttggatttaaggacttttgtctaattttattcaattttactattttaatgattgtttatgtattaaaccatgttccccagactttgatatataccaaatcatgcccttcgaactttcacatgtactaaattatgcccc

SEQ ID NO: 263502 - DNA, 1250 bp, Cannabis indica
atattccagcatttttgaaaaaaagcaggagtcattccgtcaggcccaggacttttatctggatgcatatcaaaaatggccatcttgacttcctcctcttgaatcggctccattagttgctcattaatctgactggagactctctcccttacacaatccagaatctcattacagttagatcccatagtagtgaaaagattagaaaagtaatcaaccaccacgccttcaagacccgtcccccattctttccaattaccatgagtgtccttcaatttcacaatctgattaacactcctccttttactagcagccctatgaaagaacttactattttgatccccttcctttaaccagaattgcttggctctttgcttccaaaaaatttctttttgatcaagaattaaaaataacttcttcttgatttcactatacctctgaatagataccacatctctcttatttttcagcattttaagttcatttctgcagtgttgtatcctttttttaaagttgccagtgacttcttttccccaagttgcaagcttattagcacacacatcaagcttagtggccatattttcattgtcatgccgagaccaacagtcttggacaatttcaaaacataaaggctccttaagccaagcattctcgaaacgaaatcgacgagtaggtggcaccaaattctgcagctccagttctagtaacagcggattatgatcagaaggagatgattctaaattaattagccgagtattaggaaaagcttgataccaagatgaagagacaagtgctctatcaagacgaacctcgatccagttacttgttcctcttcctttctcccaagtataagggtaaccaatgagctcaacatcaatcaagtcacacctttgcaacgtctgttcaaatccttcaattaaccaattcggataccgattaccccctcttttatcactatggctaagaatgttatttagatctccaatgacacaccaaggaacattattggtgttgactaaagattgtagcaaattccacgagttctcacgttgacaccttcttggttcgccataaaatcccgtcaacctccaatgaataccaccttccaattctaccataaagtcgatatggtgttgagaataacccaccactctaccttcatcttgactcttccaaaacaaagcaagcccaccactcctaccttgggcctccaccgaaaacacaccctcatagtccaaataacgactaacata

SEQ ID NO: 263503 - DNA, 730 bp, Cannabis indica
atcctttttttaaaaaaataaaataaaatagatttttgaagtgttatgtgttatgaggtattttgttgtggaactagttttgttttttaatttatgttttagtgttttaggaactgattttctctttattttttaattgtaatcggtttgagttattgcgtgttacttgtttatattcattatgttatataaccagttctattttagttataatcggtttgagttatttcgtgttatttatttttattcattataacaatatgttataatatattttaccaagacctagatttactaacaagtatgttttttacatcctaaatatgaatttctaaaataatgaatcatgaacacatataaagtatgagaaaccttatattggttgcagcgaaattaaatgactcatttcgttcagatctctaacccttgtatcctttctctctcacagagtatttttatttttactctttcaatttttttatttacaaaaacatattttcaataaaaataataaactgtcttttttatatatagtttattgataattgtattatagttgtcatatgattatttttcttgtcgcttttggttgttttatagtttatttattcattgtcgtgaaattgatttctcattatcttttttcttttttcttaaccaaatattatttttgtaattttcaaactttacaagtatattattataaaaaatttaaggtctataaaattat

SEQ ID NO: 263504 - DNA, 985 bp, Cannabis indica
ttttgggatcccaactattttgaaagtttaaatatattacaagtttattttcattatgtttaatataaaagtttaaattttgcgctattttggttagtaatcccgattaggggattagggtttcataagaatttttgggtagcgtgcctaattatttagggcgttacattatcctataagttaaactctatgtattgataaatcataggaatacatttaattacacaatcttgattattttccactatgttgacaacacaataaacaagaatatctatgtgataaggatttggaggaatttataaatcaaataaataaataattataaatcaaataaataaataaatgatcacatgaaccaaataacacattaaataagtaatgaaaataaatctgtctctttattgataaatgaatataaaagattacattgaaatagagttttatttatggcacaaagcccaacaaactcccactttcactaacataaaacaatcagtacatttcaattagaggaatttgcggcataaatacctaagtttatcttccagttgcaatttaatacctaagttaaaattttggcggcataaataccttccgttacactttcagacattctgtaggtaccttactgttatcttgcacactggacactaaatgacatgacacatcatttaaaataatgccacatcatttaaaataattccatatcatcttattaaatagccacctaatattaaaaattaattttactttaaacaaattttttacataaaaattaattaaataaatttataataaaatctgaaataaaacaattaatacaaaatcaaaaacaattaatcttaaatattaacaaaattctaagtaattttagataaaaaataaattctgtacaaaacaaaaattaaaaaccctagatctatggaactagtcggggagagagaaaaaagtggcagctggttcttctccgaccacgagcagc

SEQ ID NO: 263505 - DNA, 560 bp, Cannabis indica
atcaataaaataaacctagatttttttgagtaatctaagtatttttcctaattaattaaacacataaatcaaataattcataataaatcaaataattgcaagaaaattatgaaactttaccaaacaccctaaaataatatgtagaatcaaaatctataaaaaaagatgattaaaacacctcagaactacccagatcgtggtcgccggagttacgcggcgaacccctcttctccggcgacggcgagccccaactccttatacagttgcttttcacacattattttgattggtgaagcctcctacagtgcttagaacctcaagccgaccataaatcaccaaagaatacgatccaaaagttgttgtcttcttcattgccggtgtaccgttaaaaatggagtccaacaatggcgatttttgtttagggccttaaagctttcattctttatgtccaaacgtcttccaggagtcccttaagcttaaacacaatcttatttcaacccagaaatgttgcaaatattttaccaggatctagatttactaccaagtatgtttcattaaca

SEQ ID NO: 263506 - DNA, 645 bp, Cannabis indica
tcttaaaattttgcaggatgtcttcaataactataacgtacatgactatgagaaaaaattagaccaaacaattatttcggatgctaaaacagataggggtgcatcaatatatccattttaagggggtgcattatagaattttccaataatttactactttattaaatttaattcatatgctttatttaatttatttacttatttttaaaatttctataaagatcgatacattatatattattttaataaataaaatatttttagaagttatatcaagaataaaattttagaaaaataataaatctattgagaactctaaaaaatttagaaagaaaatcatcataaaatttttatttcaaaaagaaaaaagtcaaaatatatcttcaaatattataataaaaattaaaaattaaaaaaatagaaaaacatgaaggaaaaactgctaagaagctaacgctagaaagagattgggggagagagatgattatatgtatatatatttaagggtagtgtgattattaaacataagaattattaaaataaaaatatataagaatattatcccacatgaattaaatgtgaaagtattgagccatatataagaacatgggctactccactcattgccaattggttttgagatgg

SEQ ID NO: 263507 - DNA, 565 bp, Cannabis indica
ttctcaagaataagtttgacttctggattagagacttctgcttgtccattggcttgagggtgataaggtacagctaccttgtgagtgacactgtaacgacgaaaaagtgcttcaatactcttgttgcagaagtgggtgcccctatcactaatgatagcttttggtgtaccaaaacgaacaaagatgttagagcgaatgaaatccaccaccgtttttgaattgtcagttctggctgctatggcttctacccatttagacacataatccaccgccaaaaggatgtactcaaaaccaaacgaagatgggaatggtcccataaaatcaactccccagacatcaaaaatctcaacaataaggattggagtctgtggcatttgatctcttgttgtaatgttgcctactctttgacaccgatcacaagctttacagtaggcataggagtctttgaagatggtgggccaatagaatccactgtcaaaaatcttcttggctgttctcttaggtccaaaatgacccccacaagcatgtgcatggctgaaagaaatgatagatcggatgtcagaat

SEQ ID NO: 263508 - DNA, 635 bp, Cannabis indica
gttgtatgcttctttcgttaagttaatcaagaggatgttgatggacggctacttagatttagggcactgagagagcacgagaagaagagagaaattttggagaatagggttttttttatcttttttttattactctttaattttatgatttattttttattttagattaatttatttatcattttaaattaaaatatttttattttttatggaattagattgatttattattttaaattaattaattttatttttattttatttataaatatgttttaggtgggtaatatgtgtacattgtgtccatgtgaaaaatacactgtgtacacatggacatgccactacaagaattacacccaatagcggcgggggtattagcggcggagctatttcgccgctaataatgcccgtattagcgacggacccctgtttctgtcgctattgggtggttgaaaaataatttttttttctaaaaaatttatttagtcggcgggtcagtctgccgctaatgcccgccgctaataccccgtcgctaatagtattttatttaaattaaaaataaaaaaagacagtaattagctattagcgcggggtccgccggctactagcactatataaaccccatcaaacccaac

SEQ ID NO: 263509 - DNA, 704 bp, Cannabis indica
  modified_base (54)..(54): a, c, t, g, unknown or other
ctgaaaactgggccatttctacaccgccacgttgcccccacacccccaatcganagccaaaccagaatcaaaggagaacaatacattaattcgtgttttggggtttcaacctcctcccctacacctctcacacactggctgaacaagtattttctgcctactaagctaagaattcgttggaagggcacgataaaacatccgccacaaaaagattttgactttctggtggcacccgtaaattccacaggccattccaccatgtggttaaattcattgaagaacaacccttctcctcactcaccaattctaagggcagagcatatccacttcttactgtataacacccatcgaaatcataatgccaacaccaacggtctctacaagcactacttggtaacagaataccaagtattatatctacatccattggcaagaatacatggcataacgctggtaaactccaacaaccattatcatcaatgaactccttaactaaccaatctaccccaggcttagatattataggacaaaaagctctaggctgcggcatccaaggatctctaaaagccttaaaatgcatgtcgtctcccacaaacatcctcaaccccttacgcagtaactccaacccccaaactaaacttgaccacaaatgggaagagccatttctatccttagcctccaagatagacaagttctggaaatac

SEQ ID NO: 263510 - DNA, 898 bp, Cannabis indica
ccaatatgactatgaacaaccccatggtgtcactgttgactgacaacaagctctctagagctaactttgtcaaatggagagagaacattcatattgctctcattggtgaaaattccttatttgtgtttactgaagaggcttttgagcagccaggtgagaatgtgaccaaggcagtcaaggaaaagttcaagagttggcaaaatgctaacaacatagttcgatactttatgctgtctagcatggtcgacaccttgaaaacaaggttttccaatactctcatggttgcaggtatcttgaaccagttgactgaactgtttgggatggcgtcaattcaagctcgttgaggcaaccaagaattttatcaatacatggatgaaacctcatcagaatgtgcgtgatcacctgcttcagatgactagttacttccaagaggatgagaatcatagagttgttatagatcaaacaactcaagtgagtttgatcttgaatagtttgactccagcttttctgccctttacatcaaattatttcatgaacaagttggagcttgacttccacgagtttattaacaaccttcagacatttgaaaatttgattggaggaccacagaaaggaggaactaaagctcctagttctagtgctgctaatggtacggccaaggttgaggcaaacattgcctctactttgaaacccatcaaaaagaagaattggtagaatggcaagaagcctcttaaagctgttaaaatggcaaatagaaaaggctgctaatcccaatgcaaagcaaaaaggaaagtacttctatttgcaacgaaaagggccactggaaaccccagtgtcctaagttcttggcaaataaacaaggtatttctatttatgctataaactcatgtgttttaga

SEQ ID NO: 263511 - DNA, 623 bp, Cannabis indica
gaccctgcatgacctcctccagggtggccaggcgaacttctcctttcttggaagatttggaatcggatgcggaagtagacattttggttctgaaaaaatcgagaaaatccagcagttaggccccaaaccaaaccctaatgttcaaaaaagggaatgggggtcccctaaccgctggaaagaggccccctccgaacacttgccaaataagaaagccccaagaggttttccttgacaagagtcggtgcaagaatcccaaaggtagtgacattgcaaacaaaaaaaagagaggaacagagaaagggaaaaagggcaaagccaaaaaggcaaggtctactctaagtcctaaagtggtcattacgtgggatggggatgattcctcaacagaaatgcaataaaaagaagcaatctaaacgcgaacaggaagaatttagcgcatcatacagaaactcaagcaaacccattcctagaagttcgacatccagcccagaaatcataaaaaatgctatataaacgaatagtaaacaagtatacgatctacgaggaacttacatgatgtttgaaggctaagggttggtgttgatcgccggtaaaacgaaactggcaacgtcgaaggaataagagca

SEQ ID NO: 263512 - DNA, 596 bp, Cannabis indica
ctcaagacaatacaaaatataaataaacagagtaagagtcgaacaagctacttctctaacaaaaaaaagactactcttttccaaagatgagtgaaaatcaaagatacaaaagagatactaaacctagctgctataaggtgtatttataatcaatatacaccttattgacagctcatacaccttttgaacaagaccacggtccactagaaaattccctaaaataaaacttcaatcagcccaagaatttctatttctgtacctacataatcgtgagcagtaagtgcgatttttcttttatagaaaaggaaagtttagctccgattttctcctcaagaaatctgatcaaacaaaatgggaaactcacacaagatcagaatataacagctgcttaggtagaaaagaaatgagtaaccatacatcccagaactataagtaagttcccttttctaatccttgaaattggtctcattaagcatagtaatagaattaatattagcagatattggggcaacagaagatgaactagctgaatatagatcaaataaaacaagcccacattatatgaatataaacaataaattcaaaaattggttaat

SEQ ID NO: 263513 - DNA, 747 bp, Cannabis indica
tgacacactaggctatgtgaaccctatatccaacatcccttggagttgtatcttcagttcttttaattcagcaggtgccattcggtagggtgcttttgaaacaggttctgtgccaggaattagatcaatgataaaatttatctcccgctgaggtggtaacccaggtaattcctttagaaacacgtctaggaattccttaaccattttaacctcttcaggtccaagtaacacaggtttactggaatccactacaactgccaggaatcctacacatccactgcataacaaatccctagcttttaacactgagattcttggaacacgagaaccttgaaccgaaccaacaaagacaaatggttcctcattctccagttgaaaagttaccattttccgtttacaatcaatactagttgagtatttggacaaaaagtccattccgagtataatatcaaactcggccaatggtaactccacaagatctacactaaattccctgtcttcaattctaattagcaccgatctaacccactttcttgaaataattagttccccattaggcaacagggttccaaatcccatctcaaaaacatcactaggcctaccaagttgattaagaactcttgacgatacatatgatcgtgtagcactcgaatcaaataaaacagtaaagaaaaaaccattaataagtagctgacctgtaaccacagaagggctggcagcagcatcagcctgagtgatagcaaatac

SEQ ID NO: 263514 - DNA, 862 bp, Cannabis indica
tgtatggcatggtacccgcagcgaactgccatttctcaactctttgaagatgaaaatgtctattctcattggggtgactcaaatgaaccttggaattgtaataagctattttaatgccctgtacttcaagaacagtataaatgtttggtaagccatcttactctgaagtgttgcttttagaattcaaacatcttcgccactgccataggggccaatatgtttccgaaactgtagaaatataattttatcttgaactgattggagctgaccaatattacaggttccaatttattccccagctgatatttttaaacagtcttttcggctatctctctgttcttatcgttatgaagtggtgtaccggctcacaagctgatttataccacgtaatgatatacatgttcctgagccctacagatgatttaggtgaaaatcagctcttccctgggcagaaactagtccaggtattgtttaatgtcttgcacaccgatttcgcactttgaaatatatatttgagaagaaaattatttgactaataactcacattccatgccttttcttctagcttgtgctgttgtttttggctcttgttgccgtaccttggatgcttattccgaagccttttctcttgaagaagcaacatgaagctgtacgtcgtaaaatctctttttaatttcaaccttaaaaacttctctttcaatttatttctataattcctaatttttgtcactgcagaggcaccaaggtgaatcctacgccttactcgaaaccacagaggagagcttgcaagtagaatcagctaatgattcacatggtggtcatggcgaagagttcgagttcagtgaagtttttgtccaccaac

SEQ ID NO: 263515 - DNA, 692 bp, Cannabis indica
agaagcaagtgtgacctcagggcggtcaaggacccatagtcgatcaaatcgaagaggagaaagtactcgacgagctgatgatcgagaaggtacgggaaccagtaaatctgcgagtcacttgaggacgaagtccatgagcaagacgaggtccgtaagcaggacgcaatctgtgagtaaaacgaggtctgccagtaattactcccaaccgattatgcaagagcacttgaatcggaaaaaacttgatcttcgccaataactcggtccaaagcaagaggattctatccaattgcgaatagacgagttgaaggacaagttcaggagatatcaagtgggggagttagggaggcaatctggatacgattcggacgaggagcttgagccgtatcaaccacatatcatgaataccccttttccctcaggattaaaaacccgcatgtctcatcatatgatggaaccactgattcaatcccgcatttgaacaacttcaacataataatgcgagctagtactgtgacaaacaatttacgctgtatcttgtttcccacctcgcttgttggacaagcaagtagctggtttaacaagtttactcaccattcaataatttcctgggaacaactgtctgtggatttctgtgagagatatgtcttctgtttattcagatgtactttaaaacagtaaggatttcagtatcc

SEQ ID NO: 263516 - DNA, 538 bp, Cannabis indica
ttcgggtatgcatgggtgctcaatcgcacgcatcaggctcggacacgaagccctgcgcgcgccgtgagcctcgccccatgtcaccccctgcccagcgcccatgattcccgcacaagcaccctgcaaacaccgagaaacctcggctgggtgcatcacctccgcgcgcatatgggctgctagcagcccctcatgggctgcagatgcagcctactgggcagccaaacccaaaattgcgatttttgggatttttcccccaaaaatccaatttttttcatgggattgtttcccaaaattcatttttccttttttaaataattctaaatttaaaatattttcaatttagaatttttccaatttttaaatatttctatttttgaatgcttccaatttaaatatttctaattatggtcagatttaaaatttttttaacttctttaatatttatttgttatttaattataagattagatattttgatatttaatatagtttaaatttaaagataactgtctttttatttaaaatattatattaaaat

SEQ ID NO: 263517 - DNA, 510 bp, Cannabis indica
aaataataattaaaatggagagcatgattgaagtaaaaataaaaaaaaatggcagtctattttaattttttagctattttagcttatatttggctaaaaaataaagagtgcagttggagatgctcagagcatttggacttcatattaaagaggcactctatactttaactatatatatatattgttggaaatattttaccaggatctagatttactaacaagtatgtttcattaacatcctaatatgaatttctaaaaatatgaaataaacacataagggtttaagaaaaccttacattgttattaaataatcaaataataattaaaatagagagtcatgattgaagtaaaaataaaaaaaaatggcagttttattttaattttttagtctattttagctaaaatttgggtaaaaaacaaagagtgcagttggagatgctcagagcatttggacttcacatttaaagaggcactctatactttaactatatatatattgttggaaatatt

SEQ ID NO: 263518 - DNA, 531 bp, Cannabis indica
aaaaaaaataataaatctgtcgtctacaaagaataaatgagatgctacaaggcctcgtcttccaaacttaatacctctcaaccaaccattcattttaacatgttgaataaggttagaaaactctttagtgcaaaataagaataaaaattttgagagcagatcaccttgccaaagttctcgttgtggaataacatgcccttaaatttctccataatcaaaaaagaaaattgcaccaaagtaagacacaacatgatcttgtccatccattgtgaactatactcaattttaacatcacggttttgataaatctccattcaaccctatcatggttgtgctattagagaatatatgttaattggttttgatactttttgtaaagatgacttgcttgttttctttttggaattatttgggcaatttggaatattaaaaagggaaatttgattttctatacttaaaaatgttcaaaaaaaaattttttgaaccaatacattttacactatgaaaaatatgactcttttttcaaaactc

SEQ ID NO: 263519 - DNA, 382 bp, Cannabis indica
aattgattcaagtaagctttcacaactgaattaggggcttctttttgtaatataaatgttgcctttgttaagtgcttctcctgtttccccaaccaaaccacttggaaccttcaaaaacaacattaattcacataattaataaactaaaaccttataaaaagaaagggtaaatttcaattttatatattcttatttaactaattaattggaaattttcatttttaagggttgtagggcaagactttgtaaaaatatcatttttttttaaaaaaaacaaaatatttaaagattttgaaaacaatataaggtaactggttacaaaacaaagttaaaaaattggctaaataagatttttaccccgtgaactttgacatgtactaat

SEQ ID NO: 263520 - DNA, 836 bp, Cannabis indica
tagacactgtagtaaaactcaataaatacagttttatatttactaagagttcaattctatatatatagtggagtaatcatggaatgaataaacaagattatttaattggtaaataaatcttatttattggagcttagaattataggtttatggtccccatattgccaccttaaaatattgttaagtggtgggataaaaattatatgtggaagtttaaaaaatctattttgaattatcacaatagtaattatttatgttttaataagtatttatttttcaaattatatcccttgtcttaactcagacaaagggaggcaccacatgcattgtgtccagatacagtgcatgcaccacatatatagttgtccctattagttttgtctttgggttacttaattcaataaataaatatttgaattggaaaagtagttgagatattctctcaagtagttgagagattccctcaatcggttataagatataaacatttataaccgaatccaattatattatttattcaaataatgtaatatgatttgataaataatttaaatttaaataattaattaaataaaatctttattaggtttatttaaatataccatataataaatttttatatagtttttgtatatagaatttttctcaagtaacctttttgacagcctataatgtatttttgttttctctctatcataaaagaaatagttcttgcttatgtgttgagattttaatcaagaactgtatatacactattgtcctactagcccacattagtccttgtgtatgatggaaggtctggaagatcaatgtgtgagttttatcattaccgttct

SEQ ID NO: 263521 - DNA, 1318 bp, Cannabis indica
caaattgggaaggtccatacgattacagaagttgtaccccccggcacgtataggctcggccggtatgactctaacatgaaccttataccagtaccccgatattggaacggccaacacctccgcaaatattatcaataacaattgcttttcagcaacaattcatgctaagggtgtgcccgtaagcaacttagaatctttattagtatttagtcttttcttttagatttgctttagttttaatcacatactactacgtagtgatgtaataaggcgttgtcgccaatttcatttatcaataaaattgcaagttattttcatataatgacgcagcttgtatgattgttattgaatcaaattgcaagcctcacaatggtcatagatatatgggtaatagtgagcaaccaagacttaaaggtaacaccccggtcataagataagtgaccaagaggtaaacctgcatagtcacttggggggcaaccacacccatatatggactagtaagcaaaaatgcaccctcgcttaagtagatattaaaatttttaaagtgtcggtgcaatactcaatgttttgagcaacttgtgtgtggtgaatggttgactatagataaatacccacgctatgtggctcacgccaaacaaaagtcaacatttaaagccaaaaccatatataaagataaaggcccgatggccaagtaaaaagattaaagacataaatgtctcaaaagtaaagttacgggattaaagactgcccggacagtcatgaatctctagtgggcataaaatctgtaaaagtagaattacatcaataggaaccatcaagtaagtcattaaggggactgtcatctgttgcctcaaccccaaagttgaggtttgaatcggcctgaatgcaagctgcctgagccttctccctggcttctgcttcttcacgattgcgacaataagatagcatactttccatgttcttacccagataactaaagtcagctttctagtattttagccaaaatttgaagaaaacatcggtggagaggtctccgatctgtttcacctccgcagctagcttctcacactccttgacattaattttgttttcctcgacaaccttggcatgagcctccttctcgctttcaagctcacccctgaaacgctccttctcagcagtaaccctttcaacagaagtttctagatcacaaatcttctaggagtattctttgcgagggcatcaagctcaagttggagtgaggctgctccttgcttgttgtgctcctcttgtgggcgagaccctagattgaccataagaagtaaatggttgcagcctg

SEQ ID NO: 263522 - DNA, 564 bp, Cannabis indica
gatctaagaaaatggaaaactcacacaagatccaaatcaacagctggttagatatgaataaatgtgtaatcaaaacttaccatttttatctcaattattataaataagaaagcttgacaactttccttctaagtttagatacaaacaataggaaaccaaattaaacataccagccgaaattaataggaaataataaaatatttttgtcaattaaatatgctaaaaatggaattaatatataatttaatacattaattagcaaaaattctaattagtcaaactgcaatgaaaccatatgtacataatccctatataaaatgtattttaaacgtaggtaatacataatagacccatatatttacgttgacagccccgcatccaatcctagaagtagaaatgaaaatgattggtttgaatcatagatagagatcttgaaggagaatattaacctttttttttttacttttttttttttttttttttagacaatgaacgaaaatactcaaaagtttatacaatttttttttacattaaggagaatatattttcattttttattttttt

SEQ ID NO: 263523 - DNA, 657 bp, Cannabis indica
gtgagcatatacatagctccgtccctgtatctatatatatatacacacaaaatataaacaagacactataccacttgtaatcacaaaggaacaatgtattacaatgagtggccataaatattattcatcaactttatatgggtttcacaccccttaatttgtcattttcaaaattgtacggaatgataatgcagactacaataattaaaaaactttaagaaataattatttaccgtaatttacaatatgaactattggccacaagatcatcatggaccataaaaaatggcatacctattattattagtgtatatatttgagagtcatatatatacatactttaaggtgacaaattaatagcaataatagtaaaattattttgctttgtaaaatgacaaagtgataagaaattatttggacttttttgacatggtatgaaactggaatgagcatgaccatgcacgaaaaaatatgggcttaaaggtacgacacggaatgatactacacattagcacgacacggcacgataaatatgaatttgacacgatacataagcacaaatatactaataacccaaaaaatacgaaacgagacaaacctaaaaaccacgacaccatacattaacaaactctagaattttataagggaaatttgatt

SEQ ID NO: 263524 - DNA, 627 bp, Cannabis indica
aacaccatagattgatattgattagaaatccaatcctgatccaaacccctctttttattgtcgatttcatgcatttaatggcaaaaatttcgtctcggcccgcctggcacgaacctgggtcacgcgagctgcctgggatctgaccagaggttgaagacaacctcttctagccaagcccactcttggcgtcagcgaggtgggggtgtgcgactattctcgatgtcatttttttgatgtttcttttttccagcgtgcttagaattaaatttctgatttctctatgattttagttaattttttgactttgtttaataattattattgttgtaatgataattatacagttaaaaaattattgaaaataatttttgatgattttttgaaatctctatatcatacaaattttttcgggcttcttcttgttctatttgacatagtcactctcttattttggtcacccgcttattttgttttatctttagtaatctctaccaatattcttactttcatatctttccattatttgttcttctaaagttgtaaaaacttgattatttgatgcaaaaataatgtattatggtggatactttatttttcgattattgatatattataagcaattaatat

SEQ ID NO: 263525 - DNA, 539 bp, Cannabis indica
tgtttaaaatatcattgattttttattctgcaccatttgtcttaattttctcacaaatcagagcttggtaatcgatcaagaatgcagaatcaagattcttttccctgcaatcttgaagaaacttgaaagtcatcaatggcaagatttgaattggagaaattcgatggaattggggactttgctctgtggagagaaagtctgaaggtgatccttgtgcaccagaaagtttctaaggttcttggagatcagaaattactgcagaaaagaaatttgaggaaaaggcagaaattgaggagattacatactacatgatcatcatgtatctatcaaatagtgttcaaagaaaactcaacgcagaaaagatggagaaaggagtttgggataaattgaattatccattgttacaatccaaatagtcaaagatcctctatagatgatctacatcgaatagggacaaatttacctacccttcatgtattttatccttaaaacacttagctacctataaaataatatttcactaaactaatataattact

SEQ ID NO: 263526 - DNA, 275 bp, Cannabis indica
actctatcactcaagaatttcaaaattcaaagagaagaaagagagagaggggcgcctaggctttttctgaaagaaacaatatgcaaagtcatgagtttcctgaagccaatactttctatttatagaatgccttctaggtttaggttagaattgtatggcattaaaataatggaaaaataaaatgggaaacctttgcatagtggccggccatataaggaaattgggcctcactttgtgttgctgaaatttactaattactacgcaagtgcacgcaa

SEQ ID NO: 263527 - DNA, 646 bp, Cannabis indica
gtcccaggtctaggtctggctttcggtttggttcttcgtcttggttctggtcctagaatgagtccctgatctagacaccgactactagtctgttttagtccccgttacccgaatcccgagtgaacatctagatcactatcacgattctcggtctggttcttgttcaggtcccaggtcccatttctgagtttgggtttgggatcgagacttcgtgcggttctaggtcccgaccctggttctttgtccctagtctggttccatgtttgggtatgagttcgtgttcgggttcgggccccgagtccaggtttgggtcgggatctgggtctggcacccaattcgggtctaagtctgatttggagtctgggtcctggtctggttacggttctggatctaggttaaatttcggttacgattccaagtctaagtcctagttctagtcccggtcaacttccggttttggttccaattttgggtcatggggtacttttttcggtccacttttgggttttggacttggtttaggtccgggtgtgggttcgggaccttgttagggttcgggtcctgggctgggtcccaaatccaggcaccggctacgggttttgtccaagccctgggtccagatctggatcccaatctcgggtcccag

SEQ ID NO: 263528 - DNA, 552 bp, Cannabis indica
gtcatagcaccaacgaatgcaagaatctcaaagacgagattgaaaacctgatccgattgggccacctctatgagtggatcaagaataggctgcctcacctcaatccgggccaggcgacaggggttgtgcctcagggaacaccgggggtgcagcaggagtattggctccagttgctcccgcgggcgatgcccagcacatccccggtctgccgcccagacccaacgggagggtagccatgatctccggaggtccccatattggaggaactacccgcaaggagctaaagcggtacgcgggggccgtgaagcacaatgaggtttgggaggttactcaactcccagctcagaggccccggctgatggaccaacccatcacgttcacggaagaagacgccaagatggtgcgcttccctcaccatgatccgctggttatcgagacccccatcgctaataaggtggtggccagagtcttgattgacaacggaagctccgtgaatctactcttcaaggaggccttcactgcaataggcctgacggactgagacctctcacc

SEQ ID NO: 263529 - DNA, 932 bp, Cannabis indica
atctagaactttctttcagaaagtttttttctgaagtcaatagatcatagtcaaaaattacgttgaagcattaaatttgttttcaaacacaaacacagcgtgttcaacatccaaaatttagaatttttcaatttattttagaaagtaatcactcttgactctagaccacgacttttgaagctaaaaatgtaagctttgaccaattttaggcaataagaaccaactaagcattattaaagtttcttttttcctcaaaattaaccattttcatctcaaaaaagcttgaagaacaccaaaataacggagatctctcaacttttcacctgaaaaatacacaaaagcaaatactaagcataaatccgaacaataaaatgataaaaaaaaaatcacacattaaaatagattctaaaattgtataaaaataaagctaacttgatattttaaatacctacaacataaatgaccataaaataaaattaaactaaatttttttccaaataccgaaacaaatataaatggatctatgcacattgtagaattttaagttttttatattgtcttttgttttatgagtacatgtttttcctttcttattcacatttaaaattgtggaatgtttagtaagaaagatatgtaatgtaatagctcttatttcctaaattatttatatttattttcacgagtagtggtgggtggtccatggtggttgtaaatgccccacgtgactaaacacagctggttggagtattagaccataagactgatcatcatatcaggtggggaggctcacttggtttgttgtcctcttctaattggctaaccacacaattcccacgtggaaacccacgtggcccctctaagtactatttttcttttttcattattgttttaagtttcgggtggtatccagccagaacttcagctgcctcatt

SEQ ID NO: 263530 - DNA, 801 bp, Cannabis indica
taacaacataagaataatataccccggtaatatataactataccaataaacttaaactaatattaccactaagtttttttttctttatttcgttcattatataccatagcaacataaaaataatatatcctagtaaaatataactatactacaaacttaaactaatatttcactaactttttagtctctttcgttcattatatatcatagcagaataaaactaatataccacacacttaaattcatatacaacttttaagatatttatattttttttcttaatatactataacacataaaaaagatatactatagtgcaaaataaatatacgttacacttaaagtaatattctattcttttaattttattttttttctttattttcttcgtaatatatcatatcacatataaaccatatacattagagtaatatgaatatatataacataaatttaaactaatattttattaagagtttttttttttcacaatatataacatagcatacataatccatattaggggtgataaaatgtgtcattgtgtcgtgttcgtgtcatattttatatgacccaattttacattttgtgtcaggcatgttgaccgttttttgacttgtgtctaattttctcaaccctaactcgacctatgaaaaatcgtgtcgtgtttgtgtcaacccactgtgacccattttactattattcaaattggagttgtagagaaaaataatagatttaggttctattagaaaacttatatataattatgcgtatatagtttgtttattatatatatataac

SEQ ID NO: 263531 - DNA, 891 bp, Cannabis indica
tcactcgaaaagaaagccttgaccacaatgaagttttttcacctgtggtaaaaaaataaaaacctcaattagaataattcttgcaagagttgccaaagataagcttgggtggatcaaatagatgtaagaacaaccttcttacatggtgacttgagaaggagatttacatggatcaaccagaagactttgtcaatggaaatccaaaccaggtctatcttttgaaaaagtcattatgtagactcaagtaggctccaagatagtagaacattaggttttataatcattactcaaattggcttcaataagatcaattatgatccctgtgtatacctcaatcaatatgtgcttttattattatatatggatgatattctcattgtttggaaagataaaactgagatatcaaagctaaaaatacaactgagtaataaatttaaaatggaagttcttggaaaggccaagaaaatcttaggcattgagattgatcaaagtgttccaagagtaataaagttaagtcagaaagactatttacagagaattttagagaagtttggaatgagtgattctgaagttgtctcaatgcccttagcaccatgctttaagttatcacaatctcaatgtcataagactgatgcgaaagaaaacttatggagaaggctccatgcactaatgtggttggaagccttatgtatgttatggtctacacttgacttgatctagctcatttgtcagcaggtatatggctgatccagatgatgctcactagacaaaaaatcaaatggattcttaggtacattaaaggatcacttgacttgtataacaccctaactatcttaggcgtattacgtgatttttaagggctcgtttggaacgccgtattaggtcgtattg

SEQ ID NO: 263532 - DNA, 1209 bp, Cannabis indica
ggtctggtggatgcattttgatttgattgtagcttgagtaagcgtccatgaagcttaatatttcatgccctgcagttgcatctacgagctgatcgatccttggtagtggaaaacagtctttgggcatgctttggtgaggtctatgaagttaatacagactcgccatttcttgttcggcttgggtaccaatacgggatttgcgacccaagctgggtagaaagcttcaattataaaatagttgttgtgcagcttttctacttcttccttcagggctaatgctcgttctttgtccagtaaccttcgttttcgttggactggcctgaaattgggatcaatattcaggatgtgcgaaataatagaaggatcaatcccaaccatatctgcatgtcaccaggcaaaaacgtctaggtttgctctcagaaattttatcaattctgatttaacttcgagcagcaaaccgtttccgatctttagctttccggtcgggatatctggatcgatctcaatctcttctaactcttccacaggtccaacattgctgcttgggtccccaagtcgaggatccacatcttcatcccgccttgggaaattccctatttgggaatgcttttccccttgtctgtgctctagctggaggatacttccttcttagccttgttcactgcaaggttataacattctagagcagactgctggtttcctctcagacaccctaccccattctttgttggaacttcaggcatgagtggaatattgatgtgacaacttttaagtcatacaaggccgaccgacctagcattacgttaaaagctgaaggaacatctaatatcaagaactgtgccatgatagtcatgcttgtcagagcttgtccaacagtgaggggtagatgaatttttcctagaggtgcaactccttgaccggagaaaccattgacaggctggaggcatggggttagatccttgagttggagtcccatcttctcataagtagtttttaacaagatattggaagatgctccattatctattatggttctggctaacattttgtttgttatttggacttccacgaccagcgggtcgttgtgtagaaatttaattttgacagcgtcttcatcgttgaaggttatggtaggctctcctgctcgtggaactttgcgcctcctttcttccatggcaaggataaattcttcttgttcgtgctgcgctg

SEQ ID NO: 263533 - DNA, 815 bp, Cannabis indica
atctaaaaactgggataaaaagtcccacttaaaatgctaagttgcgtttggcaaatgcataaaaatagcctttttaacactgttttttatctgttttccaaacaaggcccttgttcgaaatttttagttaaggctccaaaagtaaaagtgggatcaaaagtttttatcccacattttatttttttcaagtgtaaaaagtgggataaaaactcccttttgttgtagtgtgaagaaaacccgagaattctccctgtaaggcaaccagtcgaccatatctggcagacttgaaaaccttgtgttttcttcctcaatttcgacccaaacctcctccaaacctaaccaaacattccagaacagtgtaataacataaatacaatatatttcaagctccaaaacacaacaattcagtctttgaatcaaaatcacctatccaagtgtagaaaactcaatctttaggaattattaatccaattcaagttaagtagccctaaacaaaccttcaattcagcttcaaacttattcaaaatcaaacatatactcaacatcacatcctaaacaaattctacatccaagaaaactcaaaaccctattctaaaacaaactaaattcttaaaacaaagtatgaaatttaccttagttgcttctaggttgggcttaggttcaacaatctgcttaaacccaaagaaaaatggtgaagattgatcctcttgctggctggttttggcttgcacgaaggggaagaaaagatggagcatttggtgccttaatctctaagtcacttatcaattacacctaaaaaagaaataatccccttt

SEQ ID NO: 263534 - DNA, 971 bp, Cannabis indica
cttaaaaaccgcctctaaagggtgtttttgtagtagtgttctaagtaagcatatataatatttgaagtcaaatctgacgtgatccctccatttatggctaatagactcaaaaataaaagcttgatcacaatttgcatataaatgtctcctgcaaaaaatgcatcttaatgaaaaaaagtttgaacaattcatcatgctaaaataaatatagctacatgaaagtacttttacctcgatatcatcccatagattactcaatattgtatttgaaacacttggccaatcgataaaatctataggcaccatcgtacatgcaaggtggccaagataagtttgaagtatccatctataggcatctcaaaggacaccccttagacgtgtctacacttatacatcgtccaggttgacgtgagatgtcaacttgggtgctgggacctaatttgccttcagtaaaacggtcataacttacttaattttcatttgattgatgcgattcaacttgcattttaaaactttttaaatgctctatcaagtcatatctcacactccaaacgtaattctgaacctactgtcgtaaaattcacccccaagggagttacgaaaataagctccaagtaactcgcagtgtgacccgccaggtaccaaaaattggcctttactaccaaaagttaattttcaccgttagattatcatcaacggtagaaagaaacttatttgtatttttctcctatttttatgggccaaagagagctcccttagcttattttctacattcaaaaaactacccacaaggttagagcttctctctctagactttctctctctagagtttggagtttctaatacttagtctattgttgtaattatcatctcgtgagaaataaaaacttaaagtagacgtagcctcattactatcgagatataggggggtgaattattataaattggtgtctctctcactctctctctct

SEQ ID NO: 263535 - DNA, 608 bp, Cannabis indica
accatgaagacacaatttcacatataacttagcatactggtcaatggagaaatttgtccgaactggtaagaagtgtgctgactttgtaaacctgtccactatgacccacacaaagtcaaattgtcccgtggttctaggcaaacctaccacgaagtccatagcaatatcttcccatttccactcttgtatgtttaatggctgcaacaaccctgcaggcctctggtgttcaaaatttacttggtgacaggtaaaacacttaacaccatactcagcaatgtcattcttcatgcctggccaccaaaacatgtgtttcaggtcttgatacatctttgttgaccctaaatgaatcgaataaggagtcttatgagactcatccataatctctttcttgatattctcatccatattcacacaaacatgattttcgaaacgcagcattcccgtttcatccactgaaataccactagctttcccagtcgaaaccctatatcgggttttcatcaattcaggatctcgcatttgtatttctttgattcgctctataagagtagattgtagggtagtgttagctaactgccctacaacaactcaatcttagctcaggtcat

SEQ ID NO: 263536 - DNA, 526 bp, Cannabis indica
tgccactttccttgaagatgactttattaagaacttcaagctgtaaagcaaattggaggaaatgctttcagatataactcaaaataatattccatcatcttctactcaaatagaggatgatcccactccctcggttgaaccaatgcaagttgatgcaaccaagcaaactaccactaatgttcttgttcagaagatcacggctcctagtcgtagtgggagagtttctagaaaactagctcgttatggattggatggtgaaatcaatatggtcattggtgttggtattgatgacgatccattaacctataaacatgaaagtttagagcagaatcaatggccagccggaatggattcagaaatggattccatgaaaagaaataaagtctgggaatatgtagatgcacttgatgattatcatccaattggatgtaaatgggtctacaagaagaaaagaggtggtggtggagaagtcgaaagttttaaagctagacttgtcgcaaagggttatacccaaagagaaggtgtg

SEQ ID NO: 263537 - DNA, 713 bp, Cannabis indica
ggtgtttactcttgggggtggagcagtagtttggagaagtactaaacaaatcgcgatatcggactcgacgatggaagcaaaatacataaaaaatgacacgtgccttttttgtcgtgcctaaaagttggtgcctaaatacttcaacgggcaccacaaatagcatcgtgccaattgactgatcaaattacacgacacctgtagtgcccacttagaataaaaaattctataaatcatacatttaggcatgacaaagtcgtgcctgtggatttaattttcctttaataaaaataattttgtattttcaaattaatttatatttatatttaaaaaatataatcatccaaaactaataaaaattaatatataaaagtgtcttctactatataaattaggaatcaacactacaataaaaatattcaattaaataaatacaacaactaaaataagttttcaaataaataataatacttatatcatcatatgcatacaattacaaataacaataataataaataataatcctaattgcgtggattctttctcatcatcatcatcatcgccattctctctagaccgttgttgtggaatttatgatatttgcagatagtatggttgctgcgatacttttggcatttgcgggtagtatggtgttgggttttatgccctaaataaaacttcatttcaatgtaatccattttattcaacatcaataa

SEQ ID NO: 263538 - DNA, 1711 bp, Cannabis indica
cgtaaatagtccctccaaacacccacaaagttgttcggatccgattcaacaaacgttccaatatagtttcctaaagccgtaacaacactgagtgtcatatttccagattgtaaattatgaagttgaacccacatatcaacatgattgatttcgacaagcctaggattctctccctcctttaatctagtaaagataaaaggtttcctatcataagtccacggacttccatcgatgactctttgtatatcaacttcatgatagaattgaaaaaggaatagattaggattgagttccttgacatacattcccattctcggttgccataggaaagccatcacattctgaaaaacattaaaatccgagactcgacctgttaggagtttgcccaccaagcacaaccttgtgttgatcgctatctcttcagccctgcctactggaacccgtaagacttcattatcttcttcctccagaataacaacatctcccgttgcccttccttcactactgctagacgccatgacagccaccactcgaacaatctcacaccaccacactcaaaacagagtgacaaccaaacgtatcaggggatatcttcaaacttatttaagaaactaataaactaatatgttacaataaaataaaataatttaaataacttatttgtaaatatctagattaccaatctttattttaaaattgcatatcatgatttttttaatattatttatgatatatttttggtaactttaaatttattgtagaatttaattaggtgtccaattaatcaaattttaaaaaataaacttgagttgtgaatttaaataaaaatatatataaaatattaactaattagcatatgattggtattatgagtaactctatagtttctttaattttgtaaattatgaagaaaaaaaaatatatgtatatatatttatatatgtttctcaaaatgatcacatttaagagtagattataatgatatcttcttatgcttaatagagtagtgatgtgattagatataatttttgaaatttgagaaaatagagataaaagaagttgaatgacaaaaaaaaaaaaggtaagaaaaaaagagggggctgatggaagaacgaaaggaggaaaaaaatattagaaaaaataaatagacaataaatagtttaaacactgaaaaagttgtttttttttttttttttttttgtttaagctcactaccatcgttataaatatgaataattacataagacaccattttttgtaaaatatttacatttttacgttcaaagaatattttttttttttacatttttacagttttccaaaaaataacacgaaaacaacataaaatcaacaagaaaacaacataaaagtaacatgaaaataacatcaaaataacaacaaaaaaacaacaaaaaataacatacatataacaaaaaattaacaacaaatgaacaaaatttcaacataaaaagaccgtattttatgtaaataaaatcaaaaaaatcgtaaaaatatttaaaattccgtaaaacaattatttttattgttttttttgtttttttttttttttagtttgtcatttgataaaattaacccttttaaactatatatgaggcaaataaatacgtttgatattaagataaaaaaaaatgtaaagtaaatggccttaatttctaactctatagatagttaatgtctctttttaaaataa

SEQ ID NO: 263539 - DNA, 952 bp, Cannabis indica
tttttgaccatttttttaaactaacccgcacatgcggtttttccaatttctcaaaccgcacccgcaccgcgaaactaaaaaactgcaaacaccgcaccgcaaaaaatggtgcgatgttatgtggttttgcagtttagattatcaacaataattaaactatcacaaatataacaaaactttagcaacacatgtaaaaaaaaccataagacttgaacataaatatataaaaaaaattaagtttcaataatataataattagtgaaatttgggttgaacattcacatactggacctaaataaatataaaaatttgtatttttataatgtgcggtgcagtttaaaccgcatataaacaattcaaaaccgcaactcgcaccgcaccgcgcggtttaggaaaaattcaaactgcgaccgcaccgcaaagaatttcaaaccgcattttttttgcggtgcggtgtagtgcggacagtttgagcagtttggacaatttaatgaacacccttataatttggtgagggaggatatgaggaagaatttagagacttgaccattatttttatgaaaaaaatcaacatatctattacaagagaacaaaaacaacaagagccatagataataaaataaatatgatcaaacagttttttttctttgaataatatgtggcataaattatttaactctcaattgcaaataaatactgtgtacttacaaaatcgcaaaagttcaactagatatttatgccacaaattactcttggtttttttttattttacaattcatcttcctaagggccttaaagaaattttttcgaaaaaaaacacatctcttttaacttatgtctttaatttttatgtgaatgtgtgagaataatttgattacaataatttagttaatgtatataaaaaaaaaacaatattcttcaacttctctaaatttttttaatctattttttt

SEQ ID NO: 263540 - DNA, 728 bp, Cannabis indica
agtgggtgcatcgaatgcaccagacagtcgcacaacatggcacacgcgcgcggaatgaaggggacaacacatgaagtgggcattcagacacgcccaggacgctgcacctgactgaggtttctcggtcaaggaggctacaaatgccgagtatcctcggtgtctctccttcctgtgcacgcataagcccctttttgcagcctctcaaggctgcacttgcagcctagctgccagccgcacccaatttccaaattttttgggattttttcccaatttcagatttttccaattttaaacccaaaattaaaataaaatattatttttaatatatttgaacttaaatatcatttttttaattaataatatttattttttaatagattattattaatttttgatattttgaggtttaaatttaaaaattgattattttattttttaaattatggtcagatttaaaaatttgttaatttctttaatatttatatattatttaattataagatcagatattttgatatttgacatattttaaattaaaagataactttatcttttttatttgaaatattatattaaaattatcttatatgataaattaaataattaataaatttgaaattaacctagatatttttatagatattctaaccataatatttattaaattgttaaaaatttaattatttataaattataagttttaaaaatgatattttactattttatat

SEQ ID NO: 263541 - DNA, 701 bp, Cannabis indica
taccatttcagcattgcctgctgagtgctgactgctgtaatgctcttatgtctttctatgacacttttaatttctttctttattttctttacacttcaaaatgagttgtttaattctaatgctttcaatgaaatgtgatagaagagacaaaagtgaattgagagagccaggtttcttattccttgattaacaccaccaatatctcatagaacatgattaaacaactttacttgaaagtgatgattcttttttttttaaaaaaatttagattcttaattaaaaaattaaaaaataaaaacaattttatagaatatgtaatatgattttaaaatatattttcacttttttaatattaaaaacaaaaaacctgattaaaaaaatattaccagacacaccctatatgtatcgttcttgttgtaagagtagaaaaagaagatatcgaattataaataatggaaaaaaaaactacaaaaaaaataaattgctcaaattaaaaagagatttttacaaaaatactagattttgagcaaaaaatttataattttactgtcacacaatcttttttacaaaaatattgtctttttttgaaacaaccgtaaaataataaaacagaccaattaaaacaacagtggaacgattaaaaaacaacaatagaataatagtaaaaactagcacaatacacagtataatacttacataat

SEQ ID NO: 263542 - DNA, 710 bp, Cannabis indica
tgtatactttgtagtaggtcattattgtatcattttttagttaatgtgtcaacttgaaaataattcatttaataaacggaatagagaagtcaaatctaaaaatatttttccaccttaataagtagagctatagaaaataaactcggtaacttttttagtgttaaaaaattgtaaatggttataaattcagagtaagtaatttgtgtgtggcaactggttaaagaagccaaaattgaggtttatgtatatactgacaattcaggttcacatttcaaattctgtaagactatactctcttctctgtcctattaacaaaaatttaacgtacacataatacatgaatatgactttttgcccgaaaccaagagatgattaaaaagtagaaatatagcttaagaaattaaaactaaggttataaactggtaaaggttgtgttggaggctagggtttttgcaagtgacccatgaatttctcataaactagtttatttttattaataaactattttatttttaatataaataaaaagtcactcatgaatttctcataaaccaagaattatgttatataggcatactttatatagaatagatatatatatatatacatttaaaaaatccaaatgtaaggaggcggctgggatcgggcgaagaaaagagggaccgagagagagttggagtggaagaaagagagttggggtgttgttatgt

SEQ ID NO: 263543 - DNA, 1001 bp, Cannabis indica
aacctataacaataataaatatgggaagggacccttatactggctagctagctagtccaatttgaggaatggtggccattaatttctgtgttattatattatgtatgaaaataggtggcagtagggtctatgttagtggtaatgggcaacgaagacacgtgagaatcacatgcaactctctgcatgtacccctccctaaacttttatcaacatggcccagctaagctccctcgacccacaccagtcaccatatggccatgagactatatatgtagtcagttctctcatggcccatatgggatgggaccatgcacctatatgtcatcaaaccttcccacaccaccatatagcgcccttgtgaagaagcaccactaaattttattgtcctaatatcttggggctgttagctactaactataatatatattattatatacgccctctttccttataataactcctaatattatgtaacacactttgatgatgttttagtttaatcagacaaatacactgtttaatatatcttagaatatttatcacatttatcttattatataaatgttcctattcctgatctcctaataatgacttattaattaattattaaatggaaaaatatatagtcagatcctgatcaaactccgtccgtatattaattgatgatgtgtaatacgtacgtatacgtaaaatttaactttcatttaagatattgattacgtatattttctaacatcttgtcaagaattaaatgaggctaataatagaaacaatatatatcatcaagatcgttttataaaatgattaattaatcttacaatatatataattataaataataataattatatatagaattgtatatggaggaaagcatgtgaaggaaggaggcgaattgggaaagagtatgcgaattaataatctgtgcaagttctagggttggaaatcaattggagccctctggcagactgttttgcacatgctttgtttttccaattata

SEQ ID NO: 263544 - DNA, 880 bp, Cannabis indica
acattgtacaagcattcattcgacgggatataattgagatgtctctcaatagtagaggcagcacatgcactttaagagactcatgccggtacatgtggcgcccatcaagctggcccaaaattgtcggctcaattaaagcggttgggttactatctactatggttcaagatgcgattaatttcgctaaatgttgtaagtgatgccaattacatggagatttcatccaccaatcccctcaaccactccatccttctatattgtcatggcgtttcgaaacatggggaatggacgtcattggtctttttatgccaccctcttccaaagcccataaatatatttcggccatcacatatcacttcaacaaatgatctgaagccatacgggcagaagatgtcgctgattttttaaggacccacgtaatttatcgatacaggattcctttaaaaattatctctaacaattattttaaatgtaaggcaatggtcaagttgatgaacaagtacaaattcaagcacaatttctcatctagttacaacccgtcttcaaatggtcaagcagaatcatttaacaaagtgttatgcaaaatcatgaagaagacgacgacaaagaataaaagggattggcatgaacgcctcctagaagctttatgggcttatagaaccactgtgaggatcgccactggttgcaataacttggtgtttgggtctgcgggagtgttacctttggaggttcaaatacctttattgagaattgctactcaactaacatacccagatgaaaatgtacaagcccgtctagccgagcttgaagcattagatgaaaagtgacttgctattcaacaaaagctcaaaatttaccaagcccaagtagctggagcatt

SEQ ID NO: 263545 - DNA, 918 bp, Cannabis indica
aaaagaataaaccaagtttaacgagttcgagccatgtgcaatgctctacatcatagtaggaacaacagcaaccatatctttattcatattagtgtttacaatgttacaagaatctttacaaattctaagagattacgagaaaaagttttctctctctaaattagactctctcactcaaccttacactatcacgattttcactcacgcaaatttggtatgtttctcacacatgttacaaagatttacaactatttatagattcacatggttgctaaagttatctcctaaatcatcgtgacacatttacaccgccttaaatgatccagctcatcactacacacaataatctatcgcatcttaaaaaaatacgcttttagtacggacaattcagaagctttataaacacacaaaccttccaaatacgtacaaaacttccttcttggacagtccttaaagactgacagtaaactgtttgggagtgtaccttcggattaataacaagctatcatgacgcggtacaagcttatctggaagtaccttttggattctacaagaccttccgcacaaggctttctggatccacactaagcttccggtatctgctctctggattaacatcttccatcctagaagacaaaacttgtaaccattacaaccaacaaatctctaacttggtttcaagttgaagtcgcttgataaatcattgttttaaatttgttgtcttctcagcccctccgggctcagctgaatccaattagcttcaggcaatgctcaaacttactacttgtgtaatacccggaattaagaaatggattagcacaacctaactagataattatgtataatggaggaattatattattatatagttcaatatatgtgattttatatgaattttaatatattaaagaccccgtt

SEQ ID NO: 263546 - DNA, 2864 bp, Cannabis indica
aattaggactaagttttccttgttagtcatattgttgcttgccattagtgccgaagcatccgcagtttacattttttttcttgggatttgtttgatggtatatccttattattatgtgagctggtcttgaattttacttaaatatgacatcattttcccttggagccatgtatttccccaaattgtgattgacgaccaattgagaattgctgcaaatgtatgggtactaagtatgtacatcccgaggaagtttcagtttgactatgagtgcttcatacttgcttcatcattagatgttgtgaagccaaactttattgctccttgtacgggttccccataagtgtaatgagagctaatcttgcacctgatagttggtcaatggatgacccgtccacatgccatttccatatttgttaattattattgttttcatctgtggggactctttttcttgttccttttctggctcaatattctcctctaaaattgctattctttactcgtgcatttggcctcaaagtctgccaaggcttgaccttttattattgtttaaggctgataagtaatatcatattgccctagctcaattgcccatttaagtagccggccagaagcatgaggtttttgcagtacttgacataatggctagtcggtatagactcagatggggtgagcttaaaaatatggtcataacttccttgatgccaggagtaagcaattggtcaatttctcaatcagagtatatcaactttcaacatcaattagccttttgctaacatagtagactgaattttaggttttgttttcttctctaatcagcacgacacttacaacgtatttagtcactgcaagatatattcctagttcttctccgtctaaaggttttgataggataggaggttgtgcaattttcctctttagttcttgaaaatctctttcacactcctttgtccattcgatcttcttactgctgtagaggatgttgaagaaatgaacacattttcctgttgactttgacacaaacctgcttactgcagctatcgaccaataagactttgaacttccttggcttttgttggtgatttcatatccagaagggcttgaattttctttgggttggcttctattccccgagcattgacaataaaaccaagaaacttaactgagctaaccctaaaagaacacttgaggggattgggtttcatgttgtatttcttgaggatcttggaacatttgtctaggtcctctttattccccgaacctttctatatttgacgagcatgtcatctacgtacaccttcatgttatgtctgatctggtctttggacatcctgttgactagtcttaggtaggtagccccatcattctttagtccaaatggcataactttatagcagtacaagccaacatctattcgtaagctagtgtgttcttaatcaggtggtgcattcttatttgattatacccagtaggcatccatgaagcttagggtctcataacctactgtagtatccataatctagtcaatcctttgaagtggaaaacattccttcaaacacgccttattgaggtcagagaaatcaatgcacacccatcatttcttattcggcttaggcactaatatagggttggctacccaagctgggtagaaggcctcaattatgaatctatttgcttagagcctttcaacctcttctttttatgcttgtgcacgctctttatcaaacaatctcctttacttctaagcaggaccaaaattggcatcgatgttgagggcgtgagaaatgacagttgggtcaaccccgaccatgtcttcatgcaaccaggaaaaaatgtgaagattttatcttcaaaattttatcaaagcggattctatttcaagcaacaaacctttgccaatttttatttttttggttagcttagcaagatcaatttcaacttctttaagctcttcgactggcccaacatttgtacttggttccctaaggcggggatccatgtcttcgtccccaccttgggaagatccctatttagcaatacttttacctttctctaaactctggtgagatgtctcttcttttttggccttagttaaagcaaaagttgtagcattaccgtgtagtcctttgattgcctttcacacaacctagtccattcctggttaaaaatttgatgcatgggtggtaaattgaggttacaaccttcaaatcatataaggttggtcggcctaacatgacattgaatgtagaaggaacatcaattaccaaaaattgtgccatgattatattggcatttggagctttccctattgtgagcggaaggagagtgtgtcccagaggagctatactttggctagagaaaccatatatgagctgcgtgcaaggaaccgagtctttaagctgaagcaccatctcttcatatgtagttttgaaaagaatgtttgaagaagctccattattgatcattgttcgagcaacttgttgggctttgtgccctaaataaaactctatttcaatgtaaacttttctattcaactatcagtaaagaaacagattttattttcattacttatttagtgtgttattttgttcatgtgatcatttatatgtttatccaaatccttatcacattgatattcttgtttattgtgtcgtcagcacaatggaaattattaagattgtgtgatttaatgtattcctatgatttatcattacacagggtttaactgataggataatctacaatgtagtttacttgcaccttggataagtgctatgtccttgcagggcattggtaaagtaagcttgggttggatgcatggagtatgcatggaagggccgatattgaacttgcactagatatga

SEQ ID NO: 263547 - DNA, 1323 bp, Cannabis indica
ccatccaatattttagatccagtgtgtattggattagtctcgatccatccaattcaagaaaaaaagagtaaaacttttatgttaattatcatatatatatatatatataaatttgacgtacaacaatgtaaaatctaattactatccaaactaaatgaaaataataattagttcgattggatattagatgtattggatttttagacaccccgtccaccatccgaaccgatccaattggatatttaaaaataacatccaattcaatctgatcacaattggatatccaatgttttgcggtcggttttcattggattggatcgatttagacacacccctatttgtaaccattgcaaaggtctaggacatgctacggatgattgtcataaatggaatgcaaagagaagtaatggaaagatagaatgggtacccaagcaaccaaagaaagatcatgagaagtagccaaagatggataaagaaggatttcaaatggttaaaatggagggaaggttatagaagcagaatttattcccacggttactgagaacaacttccaagtgcttggagagaatagtgaatgcaatgatatgggtgcgactgagttacaagtaaatggaatagaggaaaacttgaaggttaataccaatggagagggagtacctccatttggtaatggatagaataatggcatggaatgtctgagggctcaacaaatcccaaaagcaattagatgtgaagaatttgatagaatccatgaaagtgggacttgttgggctcttggaaacaagggtaaagcctcataattggggtgctttataccttaggttgttctcgggttggtgctttttgtcaaacaatgcatggtgtcaagttgcggtctgcgatctgcgaatccctgaacgcagtgaggatctctccgagtgcttgaagtcgaaactcaagtcaaatgaaacgcgtagaaagaatgttaagcacaaagatggcatgcaagttttcgaacaaatttggtgctggttttttaacgaagaagcttaaaaaatcctcaaaatttctaaaatggaagaaatgttacaaaggtggttcctttggtttattttatactcttgggataattttcgttagattagggagatacttgatcctacggataaaatttaaaatcgaagtggaaaggattgtcatttaatgttgatgtacctcgaaaccacaaaaccgccaaaatagaggacatacattttttcaaaagagattatgaaaaaaatactctttgtaatcattaaaaagaactttttattaaaaagagctttataaggggcaattgttata

SEQ ID NO: 263548 - DNA, 769 bp, Cannabis indica
ttctgaaagaaatggaaatcgaagacttaaaagcccaggacacccagctcactctagtagtattctcgggggaaagcgctgtcgctcgaagtttcgtccaactacccgtctacgcgaacggagtcaacaaattagtgaagttcttaattgtggattgcccgtcggcctacaacgccatccttggtaggccatggatccatgcaatgaaggcagtcgcgtcatcctaccatcaagtaatcaagttcccctgcaagggtgaggtaagggagattcgaggggaccagttgggggcccgcgagtgttactcctcatccttgaggagtaaaaacaagttatagcaattaatcaactcctcaaccctggcgagagaacaatcagccgcggtagaggagttgcaggaagtacccatacacccgacggacccaacaaaaacgacctatatcggcatgggacttaccagagaccgaaagaatcaagtcatagaattattaaaaaaatatttccaagtatttgcatgggatcactcggacatgcctgggatagatctgaccgtaattactcacagattgaatgtaaacccgaactacatcccggtcaagcagaagaggagaaaaatgggaacagatcaaaataaggcagtaaatgatgaagttacaaaaatgcttaaaaacgataccatcaaggaggtaaaatatccaacttggctcgccaaccccgtggtagttcccaaaaagaacggaaagtggagagtatgtgtagatttcactga

SEQ ID NO: 263549 - DNA, 6019 bp, Cannabis indica
cttaaaatgtgaaaagagaaagacaataatgaaagattattattcaaaataaaatgaagaaatagaaaaagatactcatggtaactgatattattataaaaaatagctaagtatttatagagtgcttaatagcaatactcagaaaaatgtgttgggttgggaccttatatagtaaactcacaagcacaaacactggtgcagctaatcaaacttttacatttaggccaggattaaggcattaacaatttaactgaataaattacacaagcttttcctatctttgttctacactttctcagactcaaaatcaaatggtccccaagaagggggtacttttacatcttgcatactatattgacatatgctttaagtaaaagaaaccaaacgtttatattggctcaaacgagactgtcataaagctcaacccgatagctaggtaagcactctcaaaaactatattgtacaaatgatttacgatgccaaaacaccgactcgcttgtgtcctccaaaagcctcccgaagcctttcgtatccattcctgtaatgttcgatacagaagcatagctgccttatggcctctcttttttcttctgctccttctgaaattaccaccctttgcctctcaacttcatcctctagttcctgagttcttgaattcagctcctttactagtttctgtactgcttcagcttctgcaatcagctctcttcgttcgttctgtgattcgaccaattgtttgttcaattgatctacctgatcatctctagagctaacatctgctttaagtgtcaaaactcttgaatttaaatcatcagtttcaactttcagagaatcaatgctcttattcatagttttaatggtgttatctctctctaacatttctgccttcagcttctcaattacaccatttagtctctcctccatttctgacttctcggccttgatctttctaatctcctcctctaaacaccgtccttgattttctatatccttaagctgttgctcaaatcgaacacgttcctcaagcaatttagatatttcggccttcacttgtgctttttcaggaaaaatcttctgctcagcatcggacactgcttgtttcaaatccctagcctcatgatcacggtcggacaaactactctttagcctcgaaactctttccttcagcttcaaaacctctcttttttcaacgctgagtgtggatttcaatgtagcgatatctttctgggccagttgaagctgattctgcaaaatcttttcagatgatttatttctttcaagttcatatctcaaactagtgatttcattctctgacacttgaagcttgctttttgtgattctcagctctttctccaaagcctgaatcttgctgtctgagctaacatcttcttccaaaccaccattttcttcacacatcgattcttcttgttcctctaactccatctcacgtgtttcaacctctttctgttctgatgattcaggcaaagataaatcaatctcagatgacatgcacttttggagttcaatcttcaatctagaaatctcttcttctgagttatgtattttctcatttgcaaacctcaactcttgctcgtatccagcaattctagcatatgaatcttcagagtactcacttttatatccccttgatgagctgctgctatctgcgttgtcttcctcttggagccggagcttcagtttcacttcgcgaagctcattttccagctcgaatatccttctttgaagcacttgatcaccagcaacaacatttccaaaaagtccagaataatgttgaccgaggaatcatcagattctgcttcagaatctgtcaaagtagatgattcatctccttctctctggtaattatcagagtttccacccgaaccaagaaagaaatcaaaaccagctgctcgtgtagtagattttcggcggcctacctttaaatcaggagagggccaggcagcagtcaggtcagtgccattatcagacattgtagagctctgggattggagatcagagggaatgttcttcttcaattctcctgtcacatgatcataacgttcagctagtgatcggtacatgcgatagaactcctcaacatgagaaactaattctggccgcttttggtaatacatctcagccttctttgcaaatgaatcaccatcttcctcaataagcttcaacatccgtttcacactcttgtccatctctgaaatcaaggatcgtactgtcattttcttgttcatcatttggtgcaaagaaatcatgactctcaacttaaatatttcttttattattttaattttttattcaaatcaatgaatcaatctatcaatcttgcatggtttattgtgtcccaacatttggaaagtggggaatttaaagcatcctacatcactagatgatgaacagaagaaaggctaaaattatccaaagattagacgttatgacatttgcctcatttagaataagaaacaaaggcctgtgttaccggaacaaaaaaaaaaacctagattttagggaacaattaacaaatgtcgttttagaataagtctcttatcgacaagaatttttatctctcaaatgaaacagcattataggcaacaaagctatgtgacccaaaaattgcaatagaaaactaaaagataaatatatatgagatacattaggttaaaaaaacactattagacatgttcagttgtgctcaccttcaagattctcaaagagccatttagaatttttagaattaatgtggctatcccaccaccaggaatgggacttctttgattctagccttttcatgattttgttggagtgaacctgaaacaataaccaagcaacgctattaataattttcctacccaacagagaaaaattctcaatttcacatgctcaactgaaacacaaataattaagggaggtggaaaagtacttctttcaaggagcccaggtaaaacctactcattcaactgcatacattgttgggtgtaaattatttttaaaatttaacttctctgagagtttttcatgctagtatctgaaaactaataatgagtaacacataacatatggcatgcatgattcatgtaatttacaaaaagacatcataataaaatatatgtagttaccacatagacagatcaaaataaaattgcacatgaagaaagaaaatactattattttcttttcaccaaaataaaatgaaataaaataatgaacaaatattcctaacttcctctgaaatccctaagaaatccatcagctgaccaatggctcatgcaaaagcaaaagtaaaaggtgagatggcattacttaccaaggaagtagccatttagctactactctggttgaaattgaaactttaattggaaatcctctaccttgtagtttcaacaatataatctgcaattcaattacaatacatcatataagaatgacccatggaaatattttttttctatcttccccttacgttcttataacataaaaaagttaaaactcaactgtataaagtcagaacaaattttatccatacaaatacaataaaacgaatcgatatgatgttagaatttacatctgacttgcatgcactggctggttctcagagaagtgaaactgcccccattgtacattgaagctaatcaggcccaaaaatccctaggcctttctaggcccaaaaattgacataaattaaaataatcataaaatgagcgcgtgaattacgttgcacaaaatgatctgtatgaatcagaggaaaattgactaaacccaaatttacagactgtctcgtacagaggtccagctattccaaccacccctttttaatcctctgttcaaacttaaaataatcatacgtgaattttaatttctccaaaaaaattcttcaaaaaaaaaatcatactacagcttcaaatcatgatatggtcgaatcgatgaatataaatagtaattatggttcgatcaagaaagaagatcattatgtgatatcattaaccgttaagatgagctgattttttaaaaatgaattaacagaagaaaaacttacgaaacagatttacgttactcaattgagacgaaatgaaagttatacaaatcttggaattgaattttggttatggataaggaaaacataaacgatttcatcataatattaactggatatatatatataagcattaagtcaaaattcaaatactgaaagatgaaagagattttcatttgaagaacagaagaaaaagcttacaggagagaaagaggagtggctgatccaactgagtggagagagctgcaaatttctcagttaccaaactgacgttttgtagagttagtgaagtttttccgggaaaatattttggaattgttgaaggtaaaaggtaagttagtacgctccaagcgaagaatggtttcaaaaaagtaactttgttttgtttttcttctcttttcttttcaatctctcgctttctcattaaatagtttagtgccttaatataattcaacaaagtcaaatactaataatctttttaaaggatttttttttaggattcttatgaaattgaagagatttttttattgaaaaaaaatcctttaaaaaatctccctctttatatatattttcattaaaatatatatttatttggaaaggcaactaatagtccgcgttgggctttaaagcaatgagtatgtctcatatcgtaacatccgccggtccgtttgaaattatgtatgaaattactatgttaaccctgtgttattaatcattcggagaaactaacagcataaacaaaagggtatatttgtcctaaacttttgttaactttaaagaatatgagatgaagaatcttcctacgaaaacaaatttagaaaaaggtatggtctactaggttcgtctcattatcccagttactaccaaaaatattagttgggcccacttgaaatttaacttgacgcggctagagatagcgtaagagtatgggctggcaattagaggaacagggcccaccatcaccgctccacgaaaaatgggcacgatatatttaatacttgcacgtggcaccagcatatcgcgcgatatattatatactagtcatttttattttaaatttgttgacttattttaaattaaagaaatttgatttggtcttaaaaaaaaaaaaaaaaaaaattgatttgaacctaaaaaatttataaaaataacatatttaactgtcggactaccattttccttcaaaaaaaaaaactgtcggactaagaatttcattcacgtaaaggtaaaagaaaatattgaaacaatataatatggaaatgtaattatattttttatttggaaagattacatatctatttccttctacataattaatttttattttaactttagtttacattaagaaaagaaaaaagttaagcaaaacttccgtccttctttattggatctaccattgctttatttgataatatttattttatgtaaaataataataatatcaccaaaatattttcagctagccaaataaatatataacctaaataaaaaaaaaaatacacaaatactacctacacacacttttaaccagggccggccctgaggataggcgggctaggcgtgcgcctcgggaacctctactttttaatttttttaaaaaaatatttaatgtgtagtgatcagggattgaacctttcacctcttaattgtttttaaaaattttaccattacactaagtactagaactatcacttttataatatttaaactatatataagggccccaaaatttgatttcatcttaggccccatataccttaggaccggccctgctttcaactcaggatttatacttcctaagcaactatcgtgaaactacgtagcaatccacaactgaaacgaaaattcaactagaaaaaaaactaccgttaattccggcggcttcacctgaaaagaagacctaaatcaatcaaaacaggcactgttttgaatttatgaaaaaaaaaagtgtagaaaaactattacgaaactaaaatt

SEQ ID NO: 263550 - DNA, 616 bp, Cannabis indica
tttcccattatgcctttaaaatggccaagaaagtgttgcacaacgtctggaaagtgatcatttaggaccccttgctcggtagtaaaagaaacaatcctgttatcttccttccgtttcttcaacatagcatgaaaataagctgtgttaccatctcctttttgaatccaattaaccttgcttctttggtggagaaagttcaagtacattttctcctggatgtgaaactggctagcagcagcttgctccaaatcaaggaaaaggttgttgttcgggttagcttgacattggaactgagcctccttgtaattgtccttggccttctcataagcatccccaatgttcccaatcgagtgtctgttgaaagctttaaacttgtgtttgagtctcatggtttttaaataaatccccttcaacccaccacatctaagaggctttccccagctatctagcactatgttcttgtaatcctgatgatcaatccagaaattatagaatctgaacggtttgcttccaatactctctgtagcaaccgaatgaaccacacaaagacagtgatcagagcaggtctcccaagagaaatgggatgaagtattcggaaaatcatcaacccactcct

SEQ ID NO: 263551 - DNA, 604 bp, Cannabis indica
atatatatttatattttaattttgtttatatattatatatatatatacgtaagtattatgcacttattataataatttttcatgcttttgtgtttgtcattagttttccattttattattttggttcttcatatttctctaattttttaaattggctttccggctattatggaaattatttcttgtttatctctcaattattttgtaagtttgcctaaatctcatattaaagaaaacataaaaagaagaaaatgtataacaattgaaataaaaaaatatttgattcgatttgatgcccacccaagttattattactacacgggatgaggagattaaggaggaagaaggtagtgcaagaatgcttgatcagtggttcgagaggtaagacccactgtggtgttgtgccatcatcggcaaagcacataacgaaagagaaattagtcgatttatcgggttgtgttttggatctccacagatcactcctcagcgtctattattattattattattattattattattattattattattgattttcttcttcatgcttctgtcgttgatttttttttttcattaaaatatgttgatttatttggatata

SEQ ID NO: 263552 - DNA, 516 bp, Cannabis indica
ctttgagacaaaagattcatcaattgttgatactgatttgtgatgctttgaataagatgttgatctggcacattacattgtccactttgaccagcttgtcttgaaggccgtccttcttgtaaactagaaaaattagcagaattattcaaaaaaaaaaaaaaaattaagcagaaggttttccaggctaattattgctgctcttatttggaatttttccatagaatttgtgacctagttggatatccatggagcttatagcacttagccataatgtgtccaggcataccacaatgatgacaagtaactctaggtcgattgaagctagcattcccaacaaactaatctgcagtagatctagtaggatcatgtgtagttttaccagtttctgcggtagtatttggaatcacagtaatggttctctgtctctcctcttgaataatcgatgcataagatttgttaacaggtggtaatggatcttgcataagatctgagatcgtacatgtccacaggattcat

SEQ ID NO: 263553 - DNA, 1195 bp, Cannabis indica
tatgttatacatcgaccatattatttcccttcagaggaaaatcatgactgtttggataatgaagatctgtctgacgaaaaatttgaattgttaatgtcgatgcgctctgctttgttacccgttagagttggcaaggatatatacatggaaccttattatcccaacagatttgctcgtcaatttggttttgaccaaggtgttccttcagagaacttttgtttgagtatccctaggaggatgcaatgtggaatagaagatctagccaacgcttggaatttgattttaaggaggaataccaacattcgctttcatatacctaagatgactcgtatgggtcaatgtacatggttgtattgttgttggtgggtgaggagtagttttccatacttagggaggtctgcaccaaatagacgatgcagaaaattaacgcgactaaccttcacgtggcccagcttgccacactgccaagtgccgaccaggatctgcccactgtagaggaggaagattatgagggggacgttgagctccaagagatagaggaccaggtggcgtccgtcctgatagcccttctgaggctgaggaagagggagtggctcggcctctacattttggagggtataatgagtccgggaagccagtgtctgagctgggtgacatcttggtcaagggggtagatactgtcactcaagagtttaccgaggcggtcccccacaaaaaacaaagtgccttaggggctagatgggtgtgtcctccgtccatcataactgagggccacttaaaagatttggagaaggcagggtacttgggcggacttgagtgttatctccattctctaaatcactgggcaacaagtccgaaggcagggtaccgtgcctggtcaggtgcccacgcaaagcaaggagcaatgctgcctttgcactcgtactttaagagggttgtggactacttccacctttgtctgacctagttcacacccaagggcatcaaatacttatccgccctgttcgtcctctacgccattcaaggatggggtgtgtcgtctgttgagttttgtgccctaaataaaactcatttcaatataatcagatttacttattaataaagatcaaaaataacattttatgttggatggttcacatgattaatttcatgattatatatagataatgtatgaattctatttaagtctagaaca

SEQ ID NO: 263554 - DNA, 663 bp, Cannabis indica
tcgaagtcaagcaaagactaagcaaacctctccgagcatacatcagcaaattcatgacggaggcgaccaaagtgtcacgggtaactaatgatggaaaaatttccgcgatactgtggggtatggaagtcctcgatgaaatttggaaggacataaggaagaacggcccggtagactcaatgagttaatttcttgaccgtgttgaaggcttcatcaagctcaaagaagccactcaacgagcaaaaggtgagaaaaatcctggcaagtcgaaagctcctccgactggaacgtccgcccaactcccccattacccaaataattcaaactcaattggtaaacgttccaacaaaaccaggcaagggaatgggaagaagggaaagttctccagcaaattcgagcaagctccccgggagaatcaagcaaagtacactacattcactatcttgactgaagacatagaaagtgtttacacggctactcagtcgctggccccatataagaagcccgggcccatgaagaaagatgtcagcaagagagacatgacaaagtttggccattccacgaagactacggccacgacacaaatgaatgcaataacttgaagcgggaaattgaattcctaataaggaaaagcaatccacacctgcaggagtatgtcaagaccga

SEQ ID NO: 263555 - DNA, 1171 bp, Cannabis indica
aaaaaattcaaaaaactaacaaatctcctaaatatcttaaattctaacttaaattcaagtatctaaccagttttcaaatttccagtttatttacataatttaaattaattaaatatctaataagataatataatataatatattgaattttaaaatttagatattcttaatcttataatttattaaattaaatattacaaaaataaacaatttgaaaaaaagatattttatggttaggatattaacaaaattaattaaaaaaaaataaataaaacaaaatatcctaagtttgaaaattttatggttagaaaccctaaaatttctattcaaatctaaattaacaaattttcaaaatttcatgttattttgccaaaaattaattttaataaaaaaatatctaataagataaaatgtcaaaactaacatttttcaaatcttataaattaatttaatgaaatatatttcaaaaataataaatttttgaaaaactaacatggttagcaaattttgaaattcaaactagattatttctaaaattttaatattttaatatcaaaataagatcatttcaaattttaataataagtaatatttgatcttataattaaaataatcaaaatttcaaaattaacctaaggttatttttgtggaaaaacaaattttcaaattcaaaggttactaatatctaaaactaattttaattaattttaaaaaattaataaaaattaattttaatctaataattagatttttaattgtaaatttagattctaaacaaaattctaccaaaatttgaattttgttgcaatgaaaaatgacttttgaatctaaagatatcaccaaaacaagattgcactaggggagtatgcattgtatactcaccgtgcgcacaataggctgcacatgggcgagaaaaaggctgctagcagcctcttggggggcaaaccttgatcaggaggggcttaggacaacccttgtcctagtgaatttggaaatgggcgtgtctgaagccgtgtcagaccctatccgcgcacgcacaacgtgttgctcggtttcagatattttcattcaaattcaaaaaaatcataactaattcataaaaaatccaaattgagttctataaacctaaattcatttattttttttgtctactttacagtaaaaatatttc

SEQ ID NO: 263556 - DNA, 1623 bp, Cannabis indica
atattgggcatacaaccgacgaaagatgccaattgaaagacgaaatagaaagcctcatcactcggggtcattttaaacagtacgtgaaaagacagggccagggatacaaccagcccgatctgcccaataacccaaacaaccaggggttacagcctattcctgtcgaaggtgaggacatcctagttttttcaggagggccacatatcacaggggaaagtaataatgcccagaaaagatgtgtgaaagagataaagaacgagaagtcggcctttgccccagaaccttccaagaaggtgaaaactgaggaacctcccattagattcacgaaggaagatgagaaaaacgtgagatatcctcacttcgatttattggtgataactattcaactcgccaataaaaggctcaaaagagtattaattgacaatgggagctcggtaaatatcctttataaggagactctaaagaaaatggggctcggaaaggccaaattaaggccttgcatggtgaacctttacggattcaccggagacagcattgcgagccttagcataatcaagcttgcattaactttaggcgaggcacttttatctgctactgttatgcaagatttcttagtcgttgacctgccctcgaattacaacatattgttgggtcgtccaacactgatcggactaggggcagtcagttcgatcaagcacctatctttgaaattccagacaccaaatggcgtgggagtggtgcgtggcgaccagatgctggctcgcgattgttatcgcatagagcggcagcatagaaaagctggtcatttattgatgacgatcttcgcaaaagaaagtgagaagaaagacgaagatcttgaccctcaagttcaagacaagattaacctattgaaaccaattggagaattggaagaggttattcttgaccttggaattctcgcaaaatgtgtctacattgggaagaacctggacaagcagctcacataacaactaataatatttttgaaggcgaaccaagatcaattctcctggagtcatggggatatgaaagggatcgatcctaatattatgtgccatcacttaaatgttgatccaaactacccagcgaagagaccaaaaaggaggtccctggattccgagatgcaagtggcactaaaataggaagttgacaagttgttagtcaacgattttatacgcaaagtaatttatccctcgtggatagccaatcctattctcgtcccaaagcctagcaaaacttggagaaatcgtatcgacttctctgatctaaataaggcgtgtccaaaagattgtttcccacttcccaagatcgactagttagtggatgcaactgctgggcacgagcttatatcatttatggacgcatattctggatataaccagataagaatgtacgctccggatcaagaacatacaagcttcgtaaccaacatgggaatattattataaagtactgtcattcggactgaagaacgttgaggcaacgtatcagccattggtaaacgaaatgttcgcaaaccaaatagggcgaaacatggaggtttacgtcaatgatatatttgtaaaatcaataaaaagcaaggatcatacctcagacctcgcaaaa

SEQ ID NO: 263557 - DNA, 632 bp, Cannabis indica
aaatcatgggaacatttatatttcactgtgctgacgatacaataatcatgaacaaatatatacatatatatgttctggactttatataatttatacattaaacataattatgaaataaatcatgtgaaccatgcaacataaattaatttatgatcttatattaattagtaaatctgattatattgaaatgtgttttatttagggcacaaaacccaacatccaccttcttgacctcctgtttcatgtcatgcacctacatattcgtcatcagacccagaactcaacgttgatcttcccattgtactacgcaaaagtatacgtcaatgtacatatcttatttcttcttttgtttcttataatcatttatactcttcttcttactcttttttttttgcttctcttgattctatcactatacctaaaactatttgtgaagccatgtctcatcttggttggcttattacaatgatagaagagatgaatgctttaattgcaaatgatacttgggactcagttagtttaccttctggaaatggtcatagggtgcaaatgggtatttacggttaaagtcaatctagatggaacaattgatcgcttaaaagcatgtcttgttgccaagggttatgctcaaa

SEQ ID NO: 263558 - DNA, 2705 bp, Cannabis indica
tgattggtgggacaaggaagagttatgcagttgtttttaatttttatgtgtgtagtaggagacaaggtatagtaggctagtagtaaaagacttgatttggcttactcaagcttggttacaatttggaagcttgatggggtatttatagttgctcaccccttacactttatggctagaattatttcttctagatccttcttttactagaagaaattatatccaaacaaatctaaatgtttctagaatacaacataactagtatattctagatttaatctaatctagaattctcttaagttcttagataatttttctacaggtgtatagaaatttctagactaaattgtgtagaaatgtgtagcaaattctaataataacaaaagcttttacacagttatataacttaattatactaaataaaaaacaacccacgcgacataattgagtgacgagtggtgggtgggagccgaagccagattagaggcaacgtggctgattctaaagcgatgctttctccagctttgtgggcgttggctcttgaataattttactctctcaaatcgaaattccacgccatggaagccaccatctcttcctccatgctcccaccaagttcaacagctactccctttaaggactgttcattatcatcatcacatcttattaatcttattactccaagagttaatcatcctcacaaccgtttgataataaaaaacaagacctcaaaactgaagaaggttgcagtcattactgagttctcggccgcagctgatcctgcccctgatggcttcacctggcagattgttgttggagctttaggtatgttaatgtaatcatttatgcatgattccatatctctgtttggatgctgagaaaactgagtttcgtttgtgtaaattagactggagcttttttgggactttatctaacccagaaaaaaaaagggaagaatcatacgtatatgtagtgaaacttcttttggtttcagtatatataaatacataggcgaagccacgtagggggcgattgcaccacctgaaatttagctgggtaactgagttctaaattctttggggcatatgtataaacaaaaaattttggacatttatacaaatattagtcagtaaaatattgaatagtgatgttgtttgttgtattggtaaaagtattcttgaagtttaaagatgacacaagttcaaaattccatatccttacaaaacaaaaaaagttttaaatcaaaactccatatcttccttttatatacatatatttttttatgatagttggaatttaaatttagctattaatataaaaatgccttttatgaatccttatatgagaaattataaatgtgattccatattaaattttatgaatccttatatgagaaattataaggatactaggcaacaaaaatgcctttttgcattttactataaaattagataaatagctccactaaattttatttctgacttttatttgtatatatgtatatatatatatatatatgaaatctttaatgtatatgtattataattatgttgcagctggagtgactccttttgtggtggctgggattgaattcagcaaaagaatcgtatgtgacattatatataatgcatttgacatgattataatataatgtatgtttgtttatttatttttctgatttatttactttaattgggcagattgctcaaagaagttgtgaggtgtgtggagggtcagggttggttttgaaaaaagaaaactatgtacgctgccctggatgtggtactcaccttttcattaatttatttatttattttgtcataaaatgagtgatgaaatgtaaagttttatttttctttcttttttaaataagagaatagatagtatttcgtaatttattatttcaaaatatttcaacttaattagtatgctcttattaattaatagtattatttagtactttatatatagtaattaaatcagtttaaaataatgctttccacagtacttttttctaatgatacgttttctttttaggtggatttctaccttggcagtcatggaagagatttttctcaggataaattagtcctgtttgaagtattatcacatttctccaatgattaaactaaaatgaattgggttgaactgtcaatactcactatttggttgaatctttccatatcttttggtaatagtgtatactcattaagtgtagatatgtatgtattttttataagtttgtgagtacagggtactctttttgtttggtagaatgagatgttttgagtcttaattatattgtaattaagtccttttcttttgtatataactaaaatgtttactcccttttcgctataaagacatctttttgggctatatctaagcacccttttgttacttgatttgaggtagtcgtgcaccacaacacatgcgcacctcttgtacatatttacctgatttttcttttaattagtacgtgcctcttatttattttgaagtattatggtcttgtgagttgtgaccaataaacatacggcttttgatactttgtgcgcgagcgtgcttattattttgtagtatactacttgtagtatactacttgtatatttgttattgatgttgtagtaaactacttgttgtgctaaaattagatatacataagtgcacgtagtcacaaacaagtaatacaatgataagtaaaagag

SEQ ID NO: 263559 - DNA, 826 bp, Cannabis indica
atgctagagaaactttcacaccagcaactacagtggggtatttttcaccgatcgataatgatgatactgtaaatcgtacatattttcttattgtagtttttagagttttaagatctcgcagtgcggttatggtttgagaaattataaaaaccacatatgcagtttgaatttaaaaaaaaaaaaaagagttacaacctgtaccacccgcactgcaaacacccctaaaaaaaataacgtgcctaatttagtagaacgttacacatagtcatctctataactaccaaaccaaagccaaaaccttgagcaatcctaaaaataactgcatctacatattactattatttgaggtacacagcaccactcagctccatcaccagcttgtaaaccaatctaagatgccacctattcaaatatttgagggacccgccatggccaagatagcctgccacaaatgcataaatatcaaaaattttggagatttttttcctcaagaaattatcatatcttgttccctagattgcctaacacagaataaccatcatgcacctttgaatacactttaaaagaagatgcacaccagtctaaaaatgtcataccaatagcaaacatgatgccgatccctatcctatcccaccattgtttgatctcttgaactcgtgtcactgttttgccaagaaaggtatatttgaaattctctttttgttttcttttgataattgatatattcacaggttcaactcataattaaagaaagtgtatggattatgtcaaaatggttaaaacaagcataattacataagaccctatttttaaaaaaataaaatta

SEQ ID NO: 263560 - DNA, 2797 bp, Cannabis indica
tgcaatgaagatgccttcatcgaacttgttctcacttaagcgtttaacaatgagtagatagaaatcgtagaataacagctaacaattccactgattactacaattttgtaaagcataaatgccaataccatgtacacaatttttccttggagaccaaaagtaaagtctccaagaatgatataaatgatacaacttcactttttcttccatgatttatgtgtagaatttattttttacctcatatattctcagcttgcaaaggaaaaggaccaaaacaaaagaccatttatgtgtcttgtttacaattataaattagtgggaaaatgatcattaagtcaatgactcaaaatttgaagaaatcttcctcaaattggtaaatgtactcacgaaaacatctgttcatatataactattggcttgctaagtcaagctgatacactaatattagctctacattgcaaaatgtgtattactctttaatttagtagtttattcttgtgaagtagaattattggctcacttttaccaatactctctagactctcctccctctctcaattctttatgtttctaaaattttcatcttcttagttctatggaataagtcaacactcaaagtttggctattcttgatacaatagaaggtcgtatgacaagttcaaacaagaatttggatttgatcatccaattggagctctcgcaatttcctgcaatgaagaaccctttctcgcttaaacttctaatgataagcttacggaaatagcagatcaattgctaacagcaccactgattacagaaatagtcaataaaatgcataggaagatcagcatggcttttgcatttcctggttttgttcagtttaagaaggctctcgaaagattacttttcgggcaataaagatgctgatgtgaagtccaagatcatttcaaaaggagcagaaaaaaaatcgtaatgtagtactctttcgtacctaagtgagccggcatttcaagaattgccaagcatggctgaataagaattggggtcacaattccttgcagagaagacatctttattgatctcacttcgcagttgaattgattttaaatcatagaagaactaacatattttagtacagaaacaattttgtagatcatatactttgaccatgcaaagaaaattgtttgattacttgtgaaagttacatttatatacagaatttcctcatttgagtctacatgttttatcctttcattgaatatattaaaatggtatctttagaaagatttatgtcttcatctattctatcaaataatatgtaccataccatattcaaaacccattgtcctctatctgataagctcctcaaataaagacaaaaattttctttaatagagtttaattctcaagtcaaagaccaaataatataccatttcgacttctgagtaactttgtgctttgatgtatcgaaaattgtatcttgtattcttgctatacataaacaatgacagatacaatcaatttcttagaacttaaattttactgattatacatattccatatcaagaatttaattagtactacaatattttggttttaaaaatgccaaaaaagaatgaagaccaagtgtgcacaaggattctatatcggaatcttaagaaaaaaaaaaaaaaggttaccattcacataaaactcatagatgaagatttcttaatattcattcgtatcattcttggggacaacatttatttgttaaatcccaaggaaaaaataattacaagaaatataggcattgtctgcctaaaaaattgttaacattaaatttggttagtggttgttatcatctattggtgtttaaattcatatgactaggagcttaagcgagaaattagatcgatgaaggaatcttcagagcacggaattgtaagagctcccattggatgatcgaatccgaacttctcttcagcttgacttagaaagtcttggaatgaaggttggttcaagtatgccacaagaatcacaaatctattcaatctgctttcaccacccacatacactgctaaatatcctttcggaataacttttgtgcttgaaaaaggcctcttgatgagttgcttggcatgaactaagctagcaaatctgaaacccatgattgtaataattgcagtgtctaaaggaacaatgaagaagaaacaacgagcaagatgttttagaaaacttgctaggaaatcagcttgttacttgggaatttgaggagttgggatggtagtgatcctagtcttgtatgtatttataatcaataatacccttgataggatatgtaggacatagatatatgaatcactttgaaatgaatggtgaagagactatagagcaaactaggtggattgtatgctatggggtctagtgagaggctatagttcatgtgcaatcacatggtattgtcttcctactcatctttattggttcaaacaaataccaattccttttttctctgcaattttcttgctcttctttccaagccccaccaaaccaacagagattataaaatttgccattagatgtcttaggcatgtcccatatccacaattaagtggatgagcagataaagattttaatcaaaagctgatttgatttcaattataaatatttgtgtggcccttcaaattggggcatgacttggacatctttacacaaattatgtgatctgtgttggtgtggtggctggtggggttgggaattgaagagcaagaaatattcaaaaaaatatgaaattgtgatgagtacgaagacaataccatgtgattgcccaatggct

SEQ ID NO: 263561 - DNA, 2011 bp, Cannabis indica
ataaaagggtaattgggtcattgtattaaggggagtgtttgagtgagattacaatagtatatatagaatacttaggaggattggtggttatgcaatgttttgagtaaatactctaattgcaccaaaggagcctaagggctcctatcttttgtaattgaatttctcaatacatttaatatacaattcctactgttttgctactgtttggctactgttttattgagttcttgatccgaagatctcggggcttatcaggaaaccgcaaatggtgggaaagggctatggagtaagaataccagactgaggaaaaaatatgattggagccacaaaagcaagttagaaatttttttggccccaatcaatacaatcatggactatctaggaccaagacacaagcaaacaacaccaacacctccaagactaatggaaaatacaagaaaatgacaaactgaaattcaaatgaagaaaaccaagggtttttctttcaaatgtgatgctaaaaggtttagagggcatgcatgcaaggataaacaactacgttgagaaggaggaagaacaaccagaagggtaggagacttcacactacggctcaattggctgaagtagaggatcagacattgtactcaacatagtagcaggtttaccatctcccaaaacacaaaggttgaaggatcagatagacaaccaagaacttgtcatccttattgaccctgaagcaactcacaaattttgtttctcaagatctggttcacaagtttcatattccaagttaagagagaaaattatggagtaaatgggaatgggagaaaaagttctaaggaatgggatatgcaaagacatcatgtcgctagtacaaggattaagaatttcgaaagatttctagctgccgaaactgggcaattcaaatgtcagtttgggcttacaatggttcgaaacgactcacatggattggagaccttgacctaactcgatcattggtgccttgataaaaccacttctcttgagtatcgatttcagcaagcatgcaatggaacaatatttgtaaaataaaacaagtgtagtaggaaacaataagcttatttagccatagctttcattgtatttcgaagaaagaattacagcaacaaaagggaatggtccttcaggaccattgatgttgagaatgatctatgttccttgcataatctcaccaactctcttacccacctatacacaatcctatccccactcaaagaccctactcagtacaattgagtcctatccttttttattgcctacactcttccaaacccttctgatcctagggtccaacattaccggctgccaaaactaagcaacagacgagttctttgcaactaagtgaaggcataaagaatacaaacccgagatagagagttgagcgtttcatgggcatcttcaattcctaatattgtttggtgtgctctctccctctatcaaaaatccatcgaagggctttgagcatttatttcttcaatatctaattacccgtagcaaaatgctgctctccatgaacccaacaagcaccaaacaaagaaggaacagaaggtacataaaaagaaagaacagaaggtacataaatgatgaggcaagcattcaaagctagacacaaggtttggagtaaaggacttggtgtagtcacgacccctccataatgtgcgaaggtacggctagcaccagccttccgccttggattgttctgcgatgcaagtcaaaagttgtatcccaaccaatcgttcacatggagtgaagtctgagaggaagactcgtgtacaagagagttgaccctttacgtggagaaggaatagttaaatggccttttgaaggttccatatgcccagctcactaattgtagtagttaattttagggtttcacttatctaggtttagaagaaactatcaaatggacttgggggtcacattggactagcccattcacttgagtaattggggtaacgtatttgatgatgtgggccaaatctgaaacataaat

SEQ ID NO: 263562 - DNA, 534 bp, Cannabis indica
tataattagactctaaatgttagattttagtctctcataatgtaggtcacaaaaaaatgtgaagtgtcactaaaaagtaattttattttttttattttattaaatgaaaaatactgacttatagagacgcatcatgagggactgggaaagtgtgtagtgaccagccaggcgcgtcactaaaaccacataattatcatatagttttagagacgcgcaaagtatgtcaggacacgctttcactgtcagtcataacatgactctatatacactaatacaataaataatatttattttatttttatattgaatgtaggatatcatatttttttatttatttgctgatcaaatgtacactactacaaaaaccacattcgaaggaagttttttagggctttcagcgtcgattttggcgaaattcgctaccgatgctgattagggcgacgctgtagggttcaatttagtaactagttataattagttactaattacacaacgtaactattgagattttatgccctaaataaaacccattac

SEQ ID NO: 263563 - DNA, 518 bp, Cannabis indica
ttctcaccggagattaatctcctgccactgtctcacaagttcaaaatgccaacgtggaagatgtatactgggagagaagatcctctttcccatctcaagtactttgagatacaaatggatttacaaggagtacggggggatgtatgctgccgaatcttcccccccactctgtcggaagccgcacaacaatggtatttcaagttggctcctggaaagtttagttcatagaaaaccttctctttggaattccatgcgcaattctcctcctcgcgccagttcccattccatttaggagatttggtcgaagtaaagcaacaaccaggcgagccactccgggcatacatcaacagattcatgacgggagcgaccaaagtctcgcaggtaaccgaggatggaaagttatccgcgatactagggggcattgaagtcctcagtgaactttggaaagatataaggaaaaacgggcgggtaaactcaatgagtgatttccttgagcgagccgaaggcttcatcaagct

SEQ ID NO: 263564 - DNA, 630 bp, Cannabis indica
ctcagcctcgttatttgacgcgtcaaattagaatttcagagcatagtgaaacttaaagccttctggagatattaatattacccctgcacccgaaccctgttcgttgtatgcgccgtccacatataacttccaggtttctacatcttgctgatcaggtgggatttcttctggagttataccttctatcaagaagtcagccaaagcttgacccttgatagatgttcgaggatggtatgttttatcgaactgccccaattcaatcaatcattttatcaatcttccaaaagcatctggttttgataaaacttgtctccagggctgccctgatcggttaacacttttatggggtgagcctggaaatatggtcgtaatttgcgagacgcatggactaggcataacgcaagtttttctagagggggatacctggattcttcccctagtaaccttttacttacgtagtaaataggttgctggtgcttaccctcttctctcactatagctgcactaatcgcatcttctgagatggctaaataaagaaacaatgtctctctagttattgatttatccaaaactagaggcgttgcgagatgcctttttatgctctgaaaggcctcttcgcactcttttgtc

SEQ ID NO: 263565 - DNA, 1571 bp, Cannabis indica
aaaagaaagaaaaaaaaaactatgtgaaatactaatgatcacgagcaaattttattttttaatttttttttatatatatatatcattatattataatataataataatactgtttagaaaagagagaatagtgcgcaagagcaacatgggttgggccacaaaaccagaaataataataacaataaaacagagttgcgaaaaagaaaagaaaactaaaaactaatatatatataccgctataccaagttgttggggatttctaataagggatagctgacacaccactggtagagaccttttccatgtgtctggtatgttagggaatggggtctactaataaaataaatatcaatacattttattttctgtatgtgatttttggtaaatctattaatataaaaatataaaatacatatatatatttttagattattgtttataggcacactcaaagtgttttatatttgaaggatccctcatacctctttcactacacaggagaaatattaagagagagagagagagaaagaaagaaaggcatatgtagatggagaaagaaaataagaagaagaatttgaacaaggggaaagaaaagtagtgcaactagagaaagcatccaaagggatcgcattgatccatcctcatatctatgtttatatatatatatattattcatcttctaattattattccgtcccattgttttggatcgatcatgctatccctttggattcctcctttggtcacttatcactccattttttaacattaatttctggagaagactggtcgaactaccagcaaaaaaaacggtggtaataaattatgggaaaaattcttataatcttttttccaagtaagttgttctcttttttcctttttaacttttttttttatgtatatatataatttttttgcagcttatatactaacaagctaggttatacattattttgatgaattaacttgaatgaattaataaattaatttatatttaaaacttgaaaactaacaaggcataacgtgtcatcatatctttggaaaccacagttttcttgttaagttatgaccactatttctgcatctggaatgttggagatcgatcttttatttttgtttttaattattatttgtggtaacaaaactcaaaataattaattattttttttctgttatatatatgttaataaataaaacaatcaagatatgggatctggtctgaagatcgaggatttggctcggtctcttaaaccggagatcgacccttgaaaacgttccagtagtgctatagattattgatcacctcacccactatagttgtttacagttgtcatgatatcaaaatttaattatttccttatatatacatatatatacttctaaaatattttataactatagttgtatacatatatggacacacatataataacagtagaatgtaaagggtcaatggaatcaaacccaaagaaaacagtgacatatatatttactgaagatattatctggtcctcttcaatatagaaatatgcaatttttatttcaatataatttcattgacaaaatacttt

SEQ ID NO: 263566 - DNA, 566 bp, Cannabis indica
tagaattagaattggaacacttctcgtttaaaacactcgggcacctggtgcctgggccacttggtgatgcacccagcgtcaggttgacatattgtcaaattgggacgcttacaacaacaatattgaagaggtgtcttgagccttttcttcatctcaatccaaaacgaggaatcaaatgcttttgggaaagaaaccaatcgacctggaggccaaaactaggacctagtgcctaggttaacctggtgctaggttccaactcccaggttggcatgttgttaacgtgggccacttccaacgacacttcaaacaaagttttctgggcatattctctgttttcatgagcaattaagatatgggtgctttcggggaacaaacagagccatctgggagtcagaactgggacccagtgcccaggttaacctgatgacaagtcccagtgcccaggttgacctgatgcatggtcctagcacccacgttaacattatatcaacctagggcagttccaagtgttttctctgaaaagtgttttaggtaacttttctatttttcagaaataacaaagatac

SEQ ID NO: 263567 - DNA, 535 bp, Cannabis indica
aaaaggaaggcttatgaagaactgttgatttttccaaagaggatggtcacatttcttcaggaattctgcatgattattggcacatgagacttcgatgagctccttccttatctgatgaaatgggtcatggggtattaagaaatagtttggtattgtttcccatggagcaaaatgtcgtttgtaaccaagtccactagggagaatacgcaaacccttcttctttgtataaagatcgaatccaacaattaggtcttttccgggcaattttgatccaaaaattctctgttagtttttatttttaaaaaatattaaataaatggttaaaccaaaaattctgttacatagtcatattttataaatgaaaaaaatttaggataattctcattcccaatatctctctaatttaacaaagagaaatatatttttctattaaatatccttttcttttagcatataaaaatattattattactatttattttcttaaacaccattattatagttaatatttaagaaagaaaaggtagtgattttt

SEQ ID NO: 263568 - DNA, 776 bp, Cannabis indica
ttaaaatatatcatgtcatacttaatttgctatagcatttatcttagcattttattattgcttttcaaattactgtcacagattgtttaaatataaacaaagaaaataaatttcaattacacacataataatattaatcatattaccaaaattttattattaagttaagaattacgagtttatatgaatcactcacactaagtttactttttttaaagatttcaattattacacacttaaagcatctctactctcttatttttttaacttaaatagagagtattttattattattattattattattatacttcctatttaattatattataattaattgttaaatataattaatttataaaataataaaaaataataatagtactttagttaaaatactattaaacaatattagcgaaaaaattaagaagctccttatttattctctattatattatagagctaattttttaatggttgaatctatttttttttttttttgagtttaattctctattttaattaagaagtatgtttagaaagtaaaattggagatactgttataagttaccaaattcttattgtaaggttaaaacttgataggtatatatgagtgtaatatacaatgttactgttagtgtaactgataaagtagtacttaattagttactgcaacttatatagtatatattactttgatttctccttctcttatttcgtatccacttttcttctcttttaacgtcctgacaatacaaaccctttctctcccgtca

SEQ ID NO: 263569 - DNA, 1661 bp, Cannabis indica
tcgaaaaaattagcatgattataacttacctaaagtgcgtacaaaaggtttagtcaaacccaaaacaccgaacagataagcaatatatttacgaaagacaagtgaccaagagtcatacgtctgctcggtcacttggggggcacctatacctgtacaaagcatttggtaaaaataaaacaatcacaattgcacgacaattataaacagagaatgaaattcattaaggatgacaaaagcacgtagtaccgggattaaaagctgcccggtcagcctgttgtccaaaaaatgaaaaataattccaagtttaaagaccgcttggccggtcgagatgtcttagaaaaagcctgaaggctgaataagatatataaaaaaaagagataaaggaaatgtttaaacagctggagtcccaggctcttggttcagttcctctgggccaactggagtaggaggatctgttgtttgaataggagaagcatcagcagcctgaccataagttgaagcagcttgatcggaggttgaagcagccgtctcgttcccaccataagctacttgggtcgtgcagtactcaaggtacatatccttagcctcacccaagtagtcaaagttggcctggggattaaccttccaaaaatcaaagaagagctcgagaccggctgtctccaaggcattgaccttctccttcaacctgtccacctctatcgtaagctcctccaccttggcgtccttctcctccttcatccgaagaagaactgctcgcagagaagtcctctcatcctgaagactgtttacttcagcagataagatcttgatggtctcctcaaagcgatcagtagcttcgagatcctttgtcagcacgaagatcttcttctcggtagcgaacaacttcttgttggcctcaaccaactccaaccgaacagctccaacttccgccttggcctcctctgcttcctttttggccaagtccgcctccgccttcaaggtgtcggacagagccgcgctcttggaagcaacagacttagcctgggagtaagtgtaggccaacttcagaccagcctgcataaaggaaaaaattcagcatatggagctaagtgtggaaagttaaagggaagtgtcaaaaaagacttaccgtgaactccttcaggactccgcccaccaacacatccagagatgagtcactatcagcactagctagttgctcactgacctcgggaaccaaccggttcatatagtgggccaggatctccttgccctttttggcctctggaagcacggggaaaggtggagttggtgcctgcacccgctcaggagtactcctgaccaatttagacccaatcggtgatggtccagactccttggacttggcagacttgggggtagaagggtttgtagcagtcagctcctcggaaaggtcaatgacctctccagagggtctcttttgtgaggacccctcacggcccttagatttcttagccagaggggaggtgctagagcttccacccattctcttcctcagagcatcgatcatctgccgagacatgtctggacgaaacaaaatcagcatggttagaaaaaagccatcagaaaacacaaggcatgaaagtcaagaagctcaaaagtaacgtaaagtgcaaggtgatcgcctgcacagagactcagaagtc

SEQ ID NO: 263570 - DNA, 7502 bp, Cannabis indica
caattgtgcagcagggtacatcataatcataccaaacttgatccccattctcaaaaattgtattttccttgggaactaatgctacaatccactcacgggtcgccttagtgtctcatctaatgtcacattcgatgaagaacaacctttttatcccaacacttcacttcagggagagcataatagtgatactcattgttgggatacttgtttgcccatggtaagacttgattctaatctgctcattccctgagtctccacctactgagtctaatctacccattgagcctaataatgtgcaaaatttagaacaaaacactcctaaaatggaaaagacagagcaaataaatgcaaaaatagaattattgatttacgctagatgatagaacaaacatcaagtaataccgccaactacagatcatgcctcccaagaatctgaaccaatgacaaatcccaatgtaagtgattctttgagcccagtttcatttgattctaatcctaattcatgaatggtagaatcaggttttcccattgcaaaaagaaagggagtgagaaattgtatttacatcctatatctaagtatgtatgctatagcaaactcacacccaaatttagagtctttgctgcgaaaattgagaaattcaatattccaaagaatattgataaagccttgtccattcccaagtagaagaaagtagttgaagaagaacttggtccattggagaaaatacaacctgaaaaatagttgcacagccaaaaatcaagcatgtggtgggatgcaagtgggtatttacagtcaaatacaaagttgatgaaactatagaaagatacaaggtgaggctggttgctataggttcactcaaacttacaaagtggacttcccagagacgtttgcaccagtggcaaaactaaccacagtaagaattctcctattagtagctgctaatcttgattagccattgcagcaacatgatatcaagaatgcatttctaaatgaaattgtagatgatgaggtctatatgaaggttcctcttggcttcaaagtaaaatttggaaaagaaaacgtgtgtcacttgatgatatctctttatggcttgaagcaatcaccacaagctttgtttgagaggtttactcaagtgattaaaaatgatgggtacaaacaaggccattcaaatcatgctccattcttcaagcacaaggttgtaattcttattatctatgttgatgatatgattctaatgtctaattggaaataaccttaattgaatagaggagttaaaagggtttcttgcgaaagaatttgaggtaaaagatcttcgtcagataagagactttctagacatgaagtttgcaagaacgaaacaagggatttcagtctctcaaacaggggattccagtcagatcatattgtattcttcaagcactcacaagatggtaagattgtaattcttattatctatgttgatgatatgattctaactgaaaatgaccttaatggaatggaggagatgaaaggatttcttgcaaaagaatttgaggtaaaagattttggtcaaataagatactttctagacatgtagtttgcaagaacaaaacatgggatttcagtctctcaatgtaagtatgttattgaactactcaaatagattggtatgctcagatgtaaaccagcagcaacaccagtggagccaaaaagaaagtacaagaagagaagaaaaaaaaaagaaacctgttgataaagggatgtatcaacaattagtggggaaattgatttatttttctcacatcaaacctgacattatctttgcaattaacttggttagtcaatatatgcacaacccttcagaagaacacctagaggtaatttgcagaatattacagcacctaaagaagacaccgggaaaaggtttgttgttcagaaaaagtaaagaaagaggcatggaagcatatacaaatgcaggctgggcaagttcaattgaggatagaagattgacatttggatattgtaccgagttatggggaaagcttgttacttggagaagcaagtagcaatatcctattgcaagtagtgttgaaattgagcttagagctcttgctcaagaagtatgtgaactaatgtggatcaaacgagttcttaaagaactaaaacttcaaaagtcaagtcctttgatactatacagtgcaataaattagttattaatatagcacacaatccagttcatcaggtagaaccaaaaatgtagaggtgaattgtcatttcataaaagaaaaattgaagaaaaaaaactgtgttgtttttgtggctagcaaagaacaagctactgatttgctaacagaaggattatcaaagaaaacttcgatgaacaagtgtgcaagatgggcatgtgggaattgtatgcacagtatttattaggattagttgaagtgttagtagctgttggttgaagtgtatttaatatctaagattgtacttagcctatttaaaggttttttcctgtagtaataaaaaataactcaagtgtatatttttctacatttctgcacttattacatttttcttcccacctttgggcaacaaaagtgtaagatatttcattaggcaagcaataggacaatcatttcaccctcaggtatcacataatctttgttctttagaagtcataaatatcattaatttgattcaaattaatttcaaggaaattttagaacaaaattcattttcatgtttttcgatattcacagcttagcaactaatttgtatacatcatattcacttaaatctatcttaagaccaacaaaagtaaaagtagaggaagcaaagaaccaagaaagaaaagatgatgaaaacaaaaagagaatgacatactaactggtaggcaatagccttctaagtactaaaggcacaaatccatcaaacctcgagaaattctaaattccacaaattatgaaagattcatacctcttctctcaacaactgtgcattctcttcctccagctctgatactaaagtttctagctgagcttggcaagcctaaatatagaaaaacaaatgaattaataattaaacgttaaaaacacagtacatttaatgatttaaaatcatacaaacaagtaaataagaaaattataatttgcttgatgacagaatcatagaaacaaaaaaacgcatgcaggtccctaaccaagacaatttatcttttgggcgtcaactcaaggaagaaaaagttgccatgcgactaaatattgaggggggatgaagttattacactttccattttttgattgtttacataataatattgctaattttatgtgtttagttcttttcttaatcagttatttccaaatttattcttctttgtttcctctaaactacaaaaatgtaggataggatgtcgtgaactgttttcaatctttactctcgagaattggcatcaaagctcattagtatggagaatgagacaaaacaacgagggcaatatggccatatgataatataacgttaaagaaatcaaagaagccaaactctggtttcatttttgttttctctttaggagattagatttttgtaggaaaggtttatgataagtaaattctcagtgtttcactattttaatgctactacacacctaatcgctttccttttaatgaaacaaaagatgtgaagtagaaacggacttccatgatgctcaatatcttatttgcaaaaggataattcaacacaactaaccaccatatgcagcaactaaatgaatctaagaccacagtcaaatctgtaactgtaaaagctctctgtctctctctctgtctctcatttatatttctaagcaactcgagattctaagaacctcacaaattcctagttcattggcatggatcctatagattcaatactagaactagcaactgtgtgcagttaaagacattctttcctcataattagtattccaatcatatatcatccaaaaatttaagagtatgaccactccctagtttaaaagtaacaaacctaaggaaatcattgtataccgataaaattgcaaaactatcccacccatttataattatggcattgttaagaccccaaaataatagaatgtggtatacgagaataaatataaaaggtatatgagtcttcgtatgggagtgtagccttggggaattggatgggtaagggaaataggagattatgcttgaattaagtgaattgttcgtagcatcaaggagagcctaggcctctcgaatgcctagggtagagtctttgcactgtaattctctttctgcaatattaatccagccaccattaattctacttctctaattgttcttattactgttagtctctacaatttctgggttatgtacctgcagattatattagacatacaatctcttggtagttatctcctaaagtttctatttccataaaaaatagccatagccattttcaacgtaaggctttgttgcaatctatgatactgccaaaacccaacataagttctatcgcaccaactgatctccatcaccatccctttttcacatcatgtccatccatcgttccactttcactactaccatcttcagaatccagagagagaaaccaaacattagatacttatagaatacatgcctcattccccatacccctttgatcggcctataatccttcactgtgttctaattatactttttagggatcaaacaaatatacgtctcatcagtcacacaatgcacccgctgtcgttctaatttcaattgtttcttttcccccaagaaatgctgataccaatttccactagcttcctcaagatccagctttataatttcttccaatctgatgttggcttaactttgtacactctaaagtccactgtcctatctcccttagaaaatagccatagccatttcaaacgtaaagctttgttgcaatctatgacactgccaaaactcaacataagctttatcgcaccaactgatctccatcaccatccctttttcaaatcacatataaaaatgtccatccatcgttccactttcactacaaccatctttggaatccagagaaagaaaccagatgttagatacttataaaacacatgtctcatttcccataccccctttaatcggcctataatccttcactgtgttctaattatactttttagggatcaaacaaatatacgtctcatcagtcatacagtgcacccgctgccgttctaagttcagttgtttcttttcccccaagaaatgctagtacaaatttccactagcgtcctcaagatccagcttttaattcttcttccaatctgatgtttttgtacactctaaagtccattgtcctatctcccttgtaacatttttcaacttattcatgaacgtagttcctcaaaagcaaaagcattggcttcctttcattattcggcgaacttttccccaaaccccatctcctttaagctattattatcaacgatctaagagtggtcttgcttccaccatttgtcttgagaaaaagaataaagatgcccattcgtttatctaaaagaaaacatccaatctcaaaatagacccgactaaaatgcatgttaattagaggagagtctagtagccttaattcatcaactaggccatccaaaatctgcatactctgtgttggtaattgttgttacacttctcgctttctttcctcactatgttgaaatcacctcccgcaacacactgtgttaaagttaatgatatcttggggtttaacaattcagtcctacttcgttcatcctaaaaagaatcacttccttcatacctacgcggcctgtagacaactaaaaccactaatctaatccatttcctcccttaataagaatagaaagacaaaattcaccatccaaagaaccaatgacattaatttgcctagaataccccacactccaccagctccccagatagaattttctttaaacacaatcttgattcttgattttttttaatttaacagaatctagcttcatattttaaataataacaataaaataattaaagaaaaatagaaaactaaatttcatgtttttcacacttctattcagttttttcaaatgttaacgcatcagttcatttcttaactattctaacctcatttgaggctatgggacgaagtctcctacttataccctcgtggcttggctgcaagtagtagaccaggcattaagggatagagactcggtggttttcgcctgctcaaagagaactcgaatcaaaaagtttacggaaagtctcaaaatgtattttagaaaatcaatctgaactcatcctttcttgccacacaaaaaatagaaaaagaaaatagaagaaaaatattctctaacaaatgaccagagcttagcaattagattatctacttgtctccatacttagtctaagaagctgatatcctttcactaactaactaaagaatttactattcttttcacttttcccaatcgtattagatgggacattattttcacacatttttctaatttccagagcagccaaacagaattcacccaagaaaatggtaaaagaaagaaactgtaaaccaaacctgtttgcgctcccttgacctggcagcagattctctattcttaatcatccttctctgcttctgtgcagtggccttatcaacaggtggttcaaaagcttgcctcttccctcttcccgaactaccactaccgctcccattcccacaaacgacgatcggattttccactgcctgaaattgcaacggtggtggcatatggaactgaccgtatcctaagggagccctaacgtcttctctaacagcttcattgtgcgtcaagtaatcctccaaggtcatcccgctgccgatctcgacggaatcagttttccaatcgctcccaccggccacggctcctgaccaagattcgtctgcttcggcgatcgggaacgaagccagtggctgagaatcctgaagctgttgttgcggttgttgttgttgttgtgggtagacgttggggagattattgagtaaatcatccatgggagaaatgcttctagagtgttcttggctcatgattgtgttaagagaacatgtaggggacacagtgtcgtggcagttccgaattcgtcgctgacgctggagctatgaccacgttagaaaacgccatatccgactttatagggttcgttatacttttcggttgcttcaattttcagaagaaaaaataaagctgtcaaaaaaaaccatttcttttttcatagtttaggctattttgggaattacagcattcgaaataaaaacattatgtgatgcggaaaaagtaaagagcatccctgctagcaccaccacaagggatgcatagtttttccatggaaccttaatggggcaggaatactccgtctaaatggggaacggagcagggacgaatcaaattttattcctgaatgttaaacggggctggaacggagatgatactccccgccctgacgggacccgtttaatttattaattattt

SEQ ID NO: 263571 - DNA, 197 bp, Cannabis indica
gaaacactaagcctttcttcacactaaataatttcaaccattagtgatagagtagtgcccacacacatcaagtggtatctcaatcatagtgtgtaagactgtaggagattccaaacaacaagaaggagaataagcatcaaaggaagaagagaaagagatccaggttcagatcttgattatgttctgctacagaaagg

SEQ ID NO: 263572 - DNA, 693 bp, Cannabis indica
aatttttcttaatttgtggtcgaatttatatggaggctatggtgttttccgatctagtatggtggtggttgaggaaaataaaactaatatatgttctcgattatttatcgaaagattctcgataggttatcgacaagatgttgtgaaaaaaaagtttgtttttagttttttttgtggttaatttagatcgattatatattgaaatacacttcattttgatgaatttttcttaatttatggtcggtttatatggtggttatggtgttttccgatctagtgtggtggtggttatgtatgttctcgattatttattgaaagattctcgataggttatcaacaagatgttgttaaaaaaatattttagttttttttttttttgattaatttatgcttgattatggacatattcttgatagattcttgataatattgattagtcttttagttgtcatgtttggtaagtgtagaggtaaaaatttgcttaatatttgtgatatttttgagaagtccaatatgcaagtcagacgagcccatcaataatggatccaacaatattaggcccaataagacagtcagacggactcgctaggccttgaaatagactaacgagtgagcctatgggccacacggatcgtcccgcaaccgggtccgagcccggccagtcagccaaacgggtgaaatcaagttaatatg

SEQ ID NO: 263573 - DNA, 590 bp, Cannabis indica
gactatgaatttggtcaaagatagtttgcttaatgaagaggccagaaggaaaacacaaggtgaatcttcttcttcttctggggctcttgttactgaaaagcatgaaaggcggggacgaagttagactagaaattaggatgactctggaagaagatccaagtcttgaaaagatatcaagtgttatcgttgtaacaagtcaggtcacttaataagggattccagaatattgaaaagagagcagaatcaagggaagaaaaatgagaaaaagactaatacagtttccactgaaggtgatgttgtcattgtatgtaatgatgggtgtgttagtcttgcaacccaagactggagttgggtgtgattctggcgcttcattccatgttactgctcatagtgatttattcacttcttacactacgagtgattttggcaatgtcagaatgggaaacattggtgcatcaaagattgtgggtattggagatatttgcttggaaaccaatattggtagccaattgattctcaaagatgttaggcatgttccagacattttcctaacttgatatctactggaagacttgatgatgaggggttca

SEQ ID NO: 263574 - DNA, 545 bp, Cannabis indica
gggccctatcatgttattaggttcaacacaagaaattacaaaatttacctgtttatttataagatctattgacaattgtactatgattgaaatcagatcattagatatgtcaacaagtcaatcatagcaatttagatcaaataaataataggtttgtttaaaaaatatttttgaataaataaataaacaaacaaaagaatcatgcaacaaatatttggaaagtaggttaagatatttctatattaaaataaattatttaaaaaatattttaactagaatttaaatttaagttgttagaaatatttgaaaatatttaaaatctaacaaatctcctaaatttttaaaaattaaaaatgaaattcaaatatccaactaattttaaaaatttttagtatatttaaataatttaaactaattaaatatataataagattatataatataatatcctaatttgaaaattgagataatctaatattatatttctaatcttataatttaataaaataaatttaacaaaaatagacaaaattgaaaataagata

SEQ ID NO: 263575 - DNA, 972 bp, Cannabis indica
ggtcttaacatacttttgtaggtgtggattttttttcttatcaggaattcaatttcccgctgtaagttgtatcattcattagtgtcgtgaccgtaatctccgtggaaccgacaaaactttgtcatgtcacttttgttggcatctttcttcataggctcgagcttcttatacggggccaacgattgagttgccatgtacacattttctatatcttcaatcaaaatagtgaatgcagtatattttgcatgattctcccggggagcttgttcagattttccagtgaactttcccttcttcccatttccttgcttgtggttgtgctggagcgtttgccacttgagcttgaattgtttgggtagtggggaagttggggggatgccctagtggaaggagcctttgacttcccaagcttttattctccttccgctcgttgaatggcttcttcgagcttgatgaagccttcggcacggtcaaggaaatcactcattgagtctacggcccgttcttccttatattcttccaaagttcatcgaggacttcaatgccccccagtatcgcggataactttccgtcttcagttacccgtgaaactttggtctcctctatcattaatctactgatgtatgcccagagaggctcgcctggtcgttgcttaacttcgaccaaatgtcccaaatgcaatggaagttggcgtgaggaggagaattgtgcatggaattccaacttgaaataccattgctgagtggcttgtgatagagtagcagggaagattctgcagcatacgtctcctcgtactccttgcaaatccatttgcattttgaagtacttgagatgggaaaggggatcttctctcctagtgtatatcttccacgttggtattttgaacttgtggggcaacgacaggagattgatctctggtgagaaaggagttcctcgtgctcggtccagttcaagatcattgtttctttgtcc

SEQ ID NO: 263576 - DNA, 1265 bp, Cannabis indica
aggaatttatttgctcttgtctcattcctttatggaccacgggtaacacttggcaaaaatctcccccaaaaataatcacctttccgccaaagggtgtgtttgtattgtttatatctctagcatcttatccaatggttctatgtgttattttcttgtcatcggagcctcgtcctatattatcgactttatcgcacgaagtagacctgcaagggcagtttgtttgctaacacaacatgtgcttttttcgtctgcatccagtggaagcttaaaacgtgagtgtgttgtacgaccacgaggaagaatagaagctgcaacccccgacaaagtagttgcaagtgccacaatgtttagcaatctaacttttgcaaggatggccctgtataaatacgtttttcctgttccacccggaccatctacgtagaacgcatggcttttgtttgacaatgtattttccataactacattaaagacaatctgctgctcgacgttagtgattctgaagctgcaacatcttcttctggaatatgaaccgccaattcatcattgatctctctagagtgaaaatcaatatcgtcaaaagatatgtcatcatcaagcagttgatatgagttaatgtctttccccatggattcgattgtggaagatattgaccttagtacttcatatcctacatgttgtgatgaatctcctggagttttgaaatcagctgacatttcttcctcaaagcgctccagagatctcttggattggtaggattacaataaactaatatggttacaaacaatcgtctcatactcgaaggcatttgatactgtgatgcttcatgtaaacaatcttctaatcatgtaaatatatatttacatatatatatatataatggggtgtgattaaaatggtatatatataatatataattagaaagagagatagagacagaatgaaataaaaaaaggaaaaaaataaaaaagagagatagagagagaatgagatgtgtacgaagtggatgtctttggggtcattttttatggtgatctcgttttaaaaactaatggtcatttatcatgataatgtcatttttcagtttaatgtccttgtgttatgttaatatatatacaggtgcggagccaggataagaaattcggggggccaaatatataataaagaaatttacaaaatatacttaaaagtagattttattttaatataattttattgacattttttacaaatttttattttaggattttttttctagaaaaaatgtt

SEQ ID NO: 263577 - DNA, 604 bp, Cannabis indica
tgcagtgtcggagtctagaccgggagcaccgtgctccgaccacgcccacccctacccccacccccaccccacccccagcggtctaattctgaattgttgttctgggaacgtaggagcaagagttgttggcctgacttgcagtgcaaggtatgagaaataccttttctttggatctccaaatgatctgccacctccatccctagccgtgctggcattgacaaataataccataaacaatgccacagaaggtaaccgagcttggaaggactaggtacttagttaagagattgaagggcattttcattattttaatgtttgagtgacatagttacagagcaaattttattattttgcaggacaaaagagtagtgacaagtctagaaatattattcttgttgttgtgccacaattagtactaatcatcttcttcgttgtaagtttaagattaaggaagtgaaagaaaattgtacaaagtaggttgagataaaattaaaatcaattatccttttaatttggaaaaaggtttcacctatatattttgtgttctattgtaatatcaagattaaaatagtatttaatttttttttttggaatattaatggtg

SEQ ID NO: 263578 - DNA, 888 bp, Cannabis indica
aaactttttttttaatatttattttcaagtcttatggtatttttgacaagtgttgctcaagttttattatatttgtgatagtttaattatttggtgatagtccaaaccgcaaaaactgcataaaccgcaccgcatcgcactattttttgcggtgcggtttctgtagttttttagtttcgcgatgcgggtgcggtttgggaaattgaaaaaagcgcatgtgcgggttggtttgaaaaaatagtcaaaaattgcaccacctgcaccgcgaacacccctagaaaatataatacaaaaagtaaaggttgagttagaaatgatattgttttagatgagtggcattccagttgttgcctatttctcgaccatcctctgcttaaagtcgatatgccccttgtcctattactttagtaatcttataagggccttcccagttggggctcaacttaccagctcctgcctctttggtgttttgaaacactcgacggagcacccaatcaccctccttgaatgttcgtgctcggatgtttttgttgaaatgttaagcaaccttctgttggaatgttgcagctctgatcaaggctttctctcttttttcatcaagtgagtcgagctcgaggttcatactttgccagttctaatcatcggtcaaatgttcatacctggaagtgggaattcccgtctctgctgggatgattgcttctgttccgaaggtgagtgagaaaggggtctcaccagtagaggtttttgcagtagtgcgataagaccgcagaacaccaggcaattcatctgcccacattcctttggctttctctaacctctttttcaatgtgttgacaacaatcttatttgttgattctacttgaccgttggcttgtgggtatcttgggg

SEQ ID NO: 263579 - DNA, 1143 bp, Cannabis indica
aatgtacacacatttagagatcctttgagctatagtacaatgataattagataatatgaaactcaaagccaaggcaaaaaattaccacctccaaacaagcccaattacacccttactgtaataattgagtaataaatctttgctcttctatactcttcttttttctttgtaaaaactatacaattgatacactgttcctattaattcaaatgttatacactctagcttccaaagtaacaaacaagatagtcaccaaatgtcccattctcttctctgagctccaaatcagccaactctcgaaatttaaaggccaaaacccgaaccacttgaaatcttcattcaccacttttcttgagaagagactgccaaataaaatgtgctcgtgactttcattctccatgctacaaactggacataataaggaatctataggaacatgaaatcggagaagaacgaaggagtccttcgtaagaagttgaacattaacagcctgcaacatgataaagtgatgtttgaaaatgttacctctacaccacactgtgaacaagtgcttgttgaagcaaaatattataaagcacaacaaatctaaacttgccttgccttccaatagcttgaataatttgctgaattttaatcccaacaaccacaatttttttcagtaccaactcgtgttttgcctgagattgtaatcccaaaactcaatgcctttcatatataccacattaacccacttaacctaaaggagattatgtttttccataacaactcacaaatacttaacaaggatagctctattccaactagcaccatcttaaaaacccaaagatggtgaatctcttcaatgaaagcaacaggaagcctacaaagatttatcgagtaggtggaaatagcttgaatcacaacaatgaacattgcatccctacctagtgttgaaaaaaagtttagcctaggttcggcccaaattatatatctataatattaaaaaaagaggacttttcacttatatacttaaatctaataataatgacacgaataacgaaaattaaattaattatatacacacggagcaaaacataccaaaacagaaaaagtattaccattctacgtgttcttgtcttatccatagacatttatgtttttaat

SEQ ID NO: 263580 - DNA, 853 bp, Cannabis indica
aaagatttgctaacattttgctgtagcaaacgcacagtttctgctaaacatagggggggattcaatagttcaaacctttcacaatgtaaaagcttacaactcatttttatttccatattgcatcaacttttgagttaatttacttattcttgttcatttagttgattaattaatcatttcattttggttgttaggcactttgcttggtaattaatttttgcaatagaaattttatttctatagtccttgtggagacgatactcgctacttatcattatattacttgtttgtgactacgtgcacttgcgtatatctaattttagcacaatagtagaggacggggatgtttccagtgtggcatgcctggacattacaaaagagactaccttcaactcaagaaagaagagcagaagacagcagtaatgcccgctttagcaagggtgtttgctcttacccaagctgaggcagaagctaatccctcagttgttacaggttagctctcggtcaacaactcttatttctctatattgtttgattctggggccactcattgatatgtggcggctagaatttttgataaattgggtagatcgtttgatagttatgataaagagtttggaaccctactgcctggcggagaattagttatctctaaaaggtgggttagttttatgccaattagaattgaggatagagaattgagtgatgatttagtggaattggacttagcagatttcgatatcatacttggaatagatatcttgtccaagtattctactaatattgactatgagcggaagatggtgattttccaaccaagggagaggaaccatttgtgtttgtgggatcagtt

SEQ ID NO: 263581 - DNA, 1632 bp, Cannabis indica
tatttagggcgcaaagcccaacagtggcttcgtcactcttgaggtcgagtgactttgtgactcttggggtcgctaatggcttttgtgaggagtatatatcctttgtcaaccaagggtagctaatctttgctaatttgagaatttttatctcttgcttccttgcccctaagtgtatagtgttatttatggcgttgtacacttgaattccttctcttcttcaaacaagaaaaagaacattaatttggagaagcaaccagacatgattaaactattctaatattcattcatgtgagttcaaaggcctttaagtgacctctcaagatactacatttgaaatgtgtagggaatgaaaacaacataaaaaattctaatggagttgccccaaaaggcccctccttgattcttactgatgcaagcaactaaaggatattaccactctttcctcacagatggtatttcttcaaagacttctctcatgtactcttacctacttggtaatccaccttcccaacagcctttccatcttgaccgaggcttccatgcattgtcatagccatgagttccttggccttggtggccatctgcagggaaatgttatgaaccataaaccaatataaactataaattttgaatctcaacacaattatacataacacaataactattagttttaagacttttacctcttgttgcctatcaagatttccttgctatcttttcatattaaagagatgatcatccaatccagtaagacttgttgaagagttcaaaccagggtcttccaagtcagcctcgacactccaagaatagagtgagctattagattcaatttagatgaatataatttttttgatcacagtgtatactcaactcatgagagagagagagagagggcaggggcggagccaggattagatgtctatggggccaatatactctttgagatcttaaattatttagtccccatataaaataggatttatattattttaaactctgtattttataaagttaatgattaaattctctgttttgtaaaataacaaattggacgtgtattttccaaaatggtacaaaatactagtaccctgagctcaattttcaataacttttcttaatataactaacttgaagataatttctagaacgaactgatgcagaaaatgtatacaattttgtcacaacaactttagctcgggttattattaacttttattttgaaaaaaaaaaatcagtttagaatactattttgtaccattttgaaaaatacagagtttaatttattatttaacaaaatagatggtttaatcggtaacttttgaaaaacataaggttcaaaatagtatttaccctataaaatattaaatttttcatgcaactatcaaataagtaaaaattattatcatcaatataatttaagatccaataatatatagtgtgaaaataataaaattttaaatttcgagaaaaaataatttacatcagtcgaatacgacatcatttaaatatattgaaaagtaatttaaaataaggctaattaggatttttgcccccctgaactttgacatgtaccaaatcatgccccctaaacttttaaggttaataaaattgctccctgaactattgagattg

SEQ ID NO: 263582 - DNA, 1052 bp, Cannabis indica
gtccctttcaaccaccaaaagcacgtgaaggacagccgtcaccgcttctcttttcctccggcttccaggccatggatcgcctggagcttcttacagactgggtcaggatcccaccttacatgcggaccgcgcctactcgagtattcctccagcgggtcaagactttctccacttatgacaagaaggtcctcgacgttggggacttggtcacgacggagaactgtcgaaaggccaagttgatatctgagaatcagtcggtggatgacttcaacctttccaaggtcatctgcccgaatgtgaggactccggctgcagaaagggcgctccgggtggagcactccgggtggagataatcgcctcggcggaggaccggtaccagaagtacctcgttaagagggaacaagagctggcctatattaaggcccaggcagcagccgggaggacccttcgtctggaagctcctccggagcggaggccctccaggcccaagcccgtggtcccggttcccaatactggtgctcccgacgccagtatttcaggttctggtaagtctcctttaataatacatcatgttcctcctgaccgagagtatacccaacttagacctatagagttcgatgagcgcctttgtaggtttagaatgccttccacccggtggggaaatcatgccaaagaatattactattcccacttgggccattttttgggtcggtcccggatgggctctagacctctggcgcctattcccctggaccattcagcccatttatcttccagctggtttctcccctcggacagctttctcagggatgatgaagccagcattgtaatccaagactttgctagggctgaattagagagtcagggtaggactagttttattgctttcttgttgggcgcacgcctttctcacgattattctaacacttagcttatttctttgttgcagcagccaggcctatggaagatctcctggctactctcgccgaggcatacagccccgacgcctctctgcctccgcctccatcacagctggtgacccccaggaggtc

SEQ ID NO: 263583 - DNA, 530 bp, Cannabis indica
tccctggttaaagataataaagtgttgtgtaacaacataaatgagttggaacataaacttaaatgttgtgaatctgaactgtctttaaaagagtctaaaattatttctttaaccaaggaaattgaaaacattaaaaagaatgttaaaatgctaaatccaggttccaccatttttgaaaaaattcaaaaatctggccaaactaatcatgcaggtctgggttatgttccaaatcaatctgattctaataccacttttgttaaatctaatagttttgtttctggaagaactgtttctacctcgcaggtttctgtctctacagcaaagcactctgctgttacagaaaagaagcagcacggtaagtttgacaatttcaaagggattggaagacgtttcatccctatttgccatttttgtggaataaaaggtcacattcgacctaagtgcataaccatgcaaaacatgtttaaatctaattatcttggaaataaacatgttttacaaaaacaaaaatgggttgtcaaaaacaaatg

SEQ ID NO: 263584 - DNA, 1220 bp, Cannabis indica
gtattagttctgaaccgacacttataggtatacaatttatttttgcactatatgtcttgatttagaaccgacgacactaaaataaaactttaagatctggccccaaattgcttcgagccaaatctgaaatccaaacaataaaatttacattattgaatccagaaacaaaacggacatatttttaatacctaatttataaaacacaatcatagacaagtcaacaaaattcaagagatcagtccaaaataaattgcaatccaatttgctttatccaatagttcctgtaacaataattattacacatcaaaatataaattcttcaaaaggtattttaattcacgataaaatatacatcaaaccttgtggttttggcttgaaatcacaattaattacactactaaaaagttggcttttagtgatactctttaataactcgcataaaagtgcgagtcattaaaaagttagtgctaagttatagtgacctacacaaaaagtctttgaaaattcagtattattgtcctacaatccgggtcactaaatatatgaagtcactaaagtgtaactcctataatttctattatttttttaaataaatattaatctattagtcattgaagaaactaactagctaggagtacaacaattgatcttgaacttcccattcttgaaagcaacctcttaaggataaactgaatcggagatgaagtcttgaaattgattaccatgaatggctgagagaatttgggaataccaaggaggaaattgttgtcatcgagcttcactgaaactttgtgtgcgaacacgaggcggacctacatgtaggcgaggcggagcagtcgcccccctgaaaaagaaaatcggaaaaaaatttatatgcaatttagttagttacaacatatatttgtaacactacaaataattttacttttactcacaacaaaatttatgactaaagataaaaaaaattatggctaattacaaattatcattattgtgttgtgactaaaaggtccgtgactaaaaattttagacacaaaaattacaatttgttgtgactaaatgtgttttagtcacaatatttgttgtgactaaaactaaattagtcacaacttgtaactaaatactatgttttagtcacaagtaactttttgttgtgactaaaagtcttatttagtcacaacaaatttatgttgtaaataaaaagttgtcacttaaagtag

SEQ ID NO: 263585 - DNA, 490 bp, Cannabis indica
ttcatgacggaggcaactaaggttgcacgggtgaccgaagacgaaaaattgtccgcgatatttgggggcattgaagttcttggagaactttggaaggacatcaggaagaacggaccaatagattctatgagtgacttccttgatcgtgccaatggttttatgaagcttgaagaagccattcagcgagcacaggttgagcaaaaacatagccagccaaaagttccgtctattggaacatccgtcccgctcgcccagtaccctagtagttcgaacttgagtggtaaacggtccaacaacaacaataggcaaggaaatgggaaaaaagggaaagtttgctggaaaaattgaacaagcacccaaggagaatactaccaagtttactgctttctctatcctgacagtagatatagaaagtgtttacatggctactctgtcattagccccgtagaagaagccgcacccatgaaaaaagacgtgagcaagagagaca

SEQ ID NO: 263586 - DNA, 1926 bp, Cannabis indica
gttatgaagtattttattgtgaatactcattccctaactcatcgcacgcatggaaaggttggctggatggctctaaaactcgacatggctgaagcatttgaccgtgttgaatggagctttctacagagagttatggaaaaattcctttttccaccaaactttatcaaccttatcatgtcttgtctctccactgcatcattcaccttctccatcaatcagcaactaactggctctgtaactccaacccgtggaattcttcaaggcgaccccctctcccttaccttttcctgctatgctcggagggtctctctttgctcataacccaacatgtcgaccaacgcctcccccggaagcatgccctcggtctcaagatctctcgggcagcacctatcgtttcccatctttttttttcgctgatgataacattctttttagcgctgcaccccaattgcagccgctcaaatcaaggatatccttcacacctatagcctggcttcaggtcaacttatcaattatgccaaatcatccctttatttttcaccaaacacctctgtcttagtgaaggattagatcacctccttgctcaacgtgcctattcgggactccatcgagaaatacttgggttcacctcaatcttttgggcgttcaaaaaaagaagccttcacctacctctaagaccgagtgtggtcccacctcagcaggtggaactcaactttcttctctaaatgacgcaaagaaattctccttaaatcggtggtccaagcgattccgtcttacgcaatgacctgctttaagtttccccactacttcaataaaaagttgagcctatgatggctcaattttggtggcgaggcacaactcaaagtaggaaaatccattggaagagttggtcatcgttgtgtaaatctaagtttcatggcggccttgacttccgttctatgaaagctttcaatcaagcgttgttggccaaacaggcttggcgtattcttcaggctccttcctctcttgttgcccagcttctcaaagctagatactacccccactcatctttccttgactctggtaaggggcatcacccttctcttgtttggaatagcatctcttggggcaaaacactcctccaatctgtgttacgcagttctgtgggtaatggtacctccatatctatctacaaggatgcttggattctaggatatgggaaaaatactctatcttcaaaagccagctactcttgatcataaggtttctagcctaatctcccccaacggagatttggatttttagcaacttcaacatcttttcccaaccgacatcgcccaagctatccaatccatccctcttctgcaacctccttgccaagaccgtttgtattggtcccgtaccccacatggtgcttacactgtaaattcgggatatcaccttgcccatgatataatacaccaacttgatccttcgacctctaccaccactcgtcaagaaaaatggtggaagatgatctggaacatggaaatacccctaaaaataaaacacttcatctggcgagcctcagttaatgcggccctagtccgtgaggaaggcatagcccaacatcatatttaccacgttagcaagaggatggtaggagtagatgtctggtactaggggttttcgtggtgcgggtggtgcaggttgtagccattttttcaaaccaaactgcatatgcggtttttataatttctcaaactgcaaccgcactgcgagatcttaaaactgcaaaaaccacaccgcaaaaatgtagtgtggtgcgatgcggtttgagcaatttactttatcatagttatcaaatattataatgaaaattgaaaaatcaaactaatgaagatttaacaatacaaaacaaaaaatcttattaaagttttaacatcataacatgtataataatcatca

SEQ ID NO: 263587 - DNA, 859 bp, Cannabis indica
cctatcccactcgcgcgcggatggcacattccctcggccagctgcgtgttcggacaggattttatccgagcaacacacacatggggtgtctaaaatcccattccgcgcgcagaaatcctgctgggatcacctagcaccgagttttctcggccagatcactcctgggcacgcgcggatgagtatgcaacaacataccatccgtacaatccacaatttttttgtttttcttcgttttttcatactttttcatggaattaacttccgattttttgtgtagttttgtatttagatatttactattcctatttcaattctaattatcagaattaaattaattgaattttttaaaattaatttatgatattagtgtaatttgaacttgaaaataggtaaatatctaacttttttgcttaattaactatcttattttttaaatttgtttattttatcttatttttaaatttaggtcagatattaaatttttttaatctctcttttttaaaaaaaattatttgaccttatttaaatttaaaataagattgttataatcatgatattttgaatagatataagatattttgctaactttttaaaatttttgttatttttatttaaattaaattattaataaaaaaaaggatatttttttttgaatatttaatttataaaataacatgaaatttaaaaggtagttagcaatttttttttgaaatgatatttaggttagtttaaacctaattttttcaaaaatattgtaggtttaattttaaaaattattttttttatttatttaaaaacgaaaaataataataattttatttatttatttttgaatttttttaattaattaatttaaaat

SEQ ID NO: 263588 - DNA, 1834 bp, Cannabis indica
taagttaggtcgactaataaaagaaactacactcctacaacgacgtacctacccttaattagtttagaattaaattagtttacggttttcatttttaaatttatagctacataaaattattttttcgctttggccaagcccaccgatcttccctaagcttaagtgatgcttggtcggaatcttattttgctattgcgatttaatttttaatattgcgattagtcttgtctctgtgacataattttgaatgttttaatttttgtctctgagacataattttgagtgttttagtcttgtctgtgtaatatagttttgttttgttttgttatttagttgcacaatagttgagtgctcaagctacaaggttgaatgaacctaccacaatagattctactgttgtgtttttttttttttgttgagggattttttaagatctcagcgcccttaataaaactaaccaaaaagaatcagcggttttatggacagacaagtgtgaagcaagctttcaagagctaaaacagcggttgattttagctccagtatcaaccctaccatctgataaagaaaagtttgtggtttactgtgatgcatccagacagggtttgggatgtgttttgatgcaaggtgattgggtaattgcttatgcctcccgtcagttaaaggagtatgaatagtgaaacccaactcacgatttagaacttatcgcggtagtttttgctttcaagatttggcggcattatctttacggagaaaagtgtgagatttacaccgatcataagagtctcaaatatttctttacccagaaaaatttgaatatgagacaaaggcagtggttagagttggtcaaggattacgaatgtgaaatcttttaccatctcaggaaagctaatgtggtggcagatgccctaagcagaaagggtccctggcaagtaaccagtatgattatgatttcacccccacctagcagaagacatggtcagattatgtattgaatttgttgtgggcaaacttaataatttgacattgcaatctgatctgttagatagaattaaagctgcttagttaactgatccagaattggtaaagattcgagaagaggctttagctagtcaagctaaggattttacaatgtcaggtaatgggatgttattgtataaaaccagagtttgggttccaaacagtgtagaacttagaagtgagattctcgaggaagctcacaccactccttattcattgcatccttgcactaccaaaatgtaccaggatttaaaacccatttactagtggtgcagattgaagaaggatgtggtagaatttgtatcccggtgcttgacttgtcaacaaattaaggttgaacaccagagacctgcaaggttgttgcatccattgactattcttgagtggaaatgggaagatgtcaccatggattttgtggttaaattacctagaaccacgagaatgttcgattctatttgggttatggtggattaatttactaagtctgcacattttctaccagtgaaaacaacccttatagtggatcagtatgtagaattttatgtgaaagaaatagtgagattacatggggctccgaagtccatcatatcagatagggatctgaagtttacctcaaaattttttgcaaagtctccagtgagccatgggtaccaagctgaagtttagtacaactttccatccttagactgacggacagtctgagaggaaaaatcagatacttgaggatacgttgcgagcctatgtgatggattttgaaggctcttcgagtaagttcttaccactaatagaattttcatacaacaacagctatcagagt

SEQ ID NO: 263589 - DNA, 1040 bp, Cannabis indica
ggtctaaatgttcagccctaactaataccgaccaaaaccaagccatcgcgcacaactacaagaacacaatcttaacaatcaaaaaaaaatccaaaaaaaaattacaaaataaaagataaagcaatgtaaataactaaaattattagagattagatttataccttaatggacgttgagattcaacgatttctccaccaaaactagcagtcgaagctacaaccaccacaaccactaccgctaagctcggtttacactaaaatactaaaaaaaatatgatcaaacatcaggaatatatttttgagtataaaaaatgcaatatttaaaaaaatgggtaaaaacagattaaaaataaagaagtgagggaaggaagggggtggttgggcgagggtttagagtttcggccattttggctctggttttttgtgggaataaagaagataaagtgagctagaaggaagataaaatagggttttaacaccctatgatgtcgattataagaaaataatcgaggccataagtgacccatataacgtaggttatttccaaataaccgacgttatagggttttaaatccctttagctgataaacaatcttttagtgtctctttttaatttttcaacaaaaataagcatctttaatagccaaaattgtagaagtgtgaataagcaattgatagagagtcgtaaaagatttctctctttattgttaaataatgagattgcatggaaaattttttatttagagaataaaactccaataaacttctacttgaacaaatataactacaaatacatttctattaatcgcatgttcttgacgtgcttctcaaaattcgcttttggtatctttgtgaaagaatttgctagtgttaaggcagttagttgagtctgttagttgttagttctgttagcctttcagttggttgttacaactgatttctgttagttgttttccttgctgcttctacatgaatgttgtataaatatcttgtacattcatttcattcaatgagatactctttcttctccattgtctttct

SEQ ID NO: 263590 - DNA, 2267 bp, Cannabis indica
ttaataaaaaaaaatctaaaaatgctcatttcattcagacacattgattgcatgaatattattaaaggtccttcaagctagtatcataagcctataaatgaccatagttcatcactacagctcacactcagccctcaagagtatataatccaaaaaatgtgagaataagtggcaagttaacaaactgccatacattcaacttcaacatatataataataataataataataataataataataataataataataataaaagctaacacaaaatacaataaaatccaaactgctagcattagcactcgattcctttgaggtgtttgcaaatttaatagctacttatataaaatgcaatataaatgttctactatattctttataccatggtttccctatcttatttatgtagtgtataatccttatacccaatttagaccataaaaagtcacaagattcaacaaaaacatactagcaaaacaagaagaaatcaagcatggcacaaaaataagacatatatcaagtcattctacaatatgaagcgaacagctaacaggaattttcagcagacatgtcaaccaaataacaagctcgatgcagtcttacagacataagaaacctatttgcatcatctgagtagtattatttaagcggagaaatgtcagtaaaatactatgcatgatttttgcatcatctcagtagtgcaatttaattaacatatagatgataatgatgagcatagcaataacatcagtagctgaaatccgtcaagctgcagctaggttgacatccttaccatgtatttagcatcaatgaaaggatcattcactgccactacgtcaatatcatccctgaatgttgctactcgtaaaaccaatcttccaatccgaccaaaacctatatgagtcaagcaatgaaaaagtacgaaattaatcccttggcttactgcttacattcatgattaagttgtcaattcaaagtaggaactatgatgaacttaccattgatcccaacctttgtcttcccactggtcttcaattctaaacaaaataaattatgagtgagtgaacatcaaaatattttggaatttcgaaattcacactaccacatatgaagtgtctagtccttactctgaacagttggtggtacttcagtggccgttgctttaatgggttggacactcttgacattgcataccctgaacaatgtgtcatcttcttgggtcaataaattagaacagaaaatatgcttaaacctatttaaacttaatatattacgttactcaactgtaaaacagatgatccacttgggacagcagtgccaaataaacttgattgaaatcttgcagagtttgggttgcgattgaaacaaatgctcgatgcctgaaaagaaaaaaaattagaaggaaaatatcaccaataaatatttatatttgtgtggaggataatgaagtccgtgtaaagccaaaacagaaaaaagttgaaaagattaaatacgaatttctaacaaattaataaaaaggtttttctaacacaaacacatatctgaataagacaaaaacattttaacatgagaggaattagaacaaatgcaaaatttatgtatggaaaaaataaattgattgaaatttacatgagcaaattaactaaacattttgagcttaacagtacagatatgtgttactttcatttatcctcgtttttttttgttcaaaaatcaaacatcaaacggtgtgtataatataataacaataatcgaaaaactaaaaaagctcacatcgcaaaatagaagaacaaaattcaaaacaatatataaccgataggagtttctttgagaaaaataaaagaaaatcgcacacagcacgaatatacacacatataaatatataaattaacacgttaagctcgactagacgaaataacaataaacggtcgatcaaatggagcaacgagacagttgattactaacattgatcaaacagtttaagcaatagattatcaagatgagagaaagagaaagggaaaaataccttagaaggattggaagaagcaagaggcgcaaagatttcaggtctagaagcttcaatcagaacagctccggtggtagatctgagcagagaagagaacgccattgttgactgtgtgtacggagctttctcttttctcttcttcttctttctcaacaaccctaaaaaaaacttcctgcctttatgtgcctcttcgaaaccggcacaagtcagaaatgcaaattttctttttcttttttta

SEQ ID NO: 263591 - DNA, 798 bp, Cannabis indica
agatcctggtaaaataaattccaacatactctacatgctaatcactgtcttacctgttttccagcaagagaaagagattctgaatgcccgggcgctcctgatcaggtgccggtaatcctagtcacacaaatccgggataattcacacttagggttaacccctgaatttcaactcaataaaattcaagcatggcatttacaattcagataatcatacagaggtcgggatgaactttccaacgatataaagaactcccaaatcggagttcggaatcaaaagttacgaactttcgaaaatcaactcaaaactgcccaaaacacaagggcgggccgcggcatgcccagaccatgccgcggcacctgggaccaattcccaggtccactcagaggagcatgccgcggcatttgggtgcagaacccagaaaccaacaagctcctcttcgaattttcagcccaaaactcaatcttttcactccaatttctcaaccaattcacaaattaacatataggattgctagcaattttaagatgctcaaataacctgcttcatgcatccaaatcctcataaaaaaataccaaaatttcagattgagcaacactacaaaatcatgcttaaactaagaaaattccaagttcaagaacaagagcttcaatcacaaccaaaaccaagttttcttcaacaattcaagctttgaaatcaaatgggttaaagggagatagagagttcgggtgagggggagaaaaatccagaaattttattcatttttcctcaaaaatccatttaattcaatgtaaatca

SEQ ID NO: 263592 - DNA, 1115 bp, Cannabis indica
aagtggttgaattggaaaatatgccatttttgagaaaaataagataatagttgaaaatggcagaattgcaagtggtgggcccacatcctatggccggccacatgtgcatgattttaccatttattttattaattttttaatgccaaataattcaaacctaaacctagatggattcctacaaatagatagtgatggtctcaaattgaaagatgatgcactcaagcctttcagtcaaaaatttgagccttctatttctctctctttctctctttaatttttgagccttatagtgatagattacgtgcccacacatagcaagttggtacgcaatcatagtgtgtaagactgtgaagaatccaattcaactgaaggagaattgggctcagatcttggtgatactctactacataaagaatacaagggttagagatctgagcagaatgagtcatttaatttcactacaaccaatgtaaggtttcttaacttgatatgtgtttaaattacattattttagaaattcatatttaggatgttaaataacatacatggtagtaaatctagatcctagtaaaataatctccaacagtaccatacccttagtgatctttcacacatgaaaaatatcatgcacgtgctagtcatgttgaatttttatgaagcaacatccagcttccttgagggaaggcgggagttgcataaaaattcaatcgatgacatcgcttaagaaagatcaaagggtgaaaatatcactgggagtgagatcgacttcaagcagtccttccattcagggaaggagggttgaagtcgtgccataccctcaatgatctttcacgaacgaaaaaaatcttgcatgcgagagtcatgttgagttttttataaagaaaactccggcttctgcgacgaaaggcgggagttgtgtaaaaattcaagcgatgacttcgcttgaaaaagatcaaagggcaataacattactgggagtgagacaaactttaagcagtccttccatttcgggaaggaagattgaagacgtgtcgtaccccgattgacctttcttgcacaaaaaataacgtgcatgcgagagtcatgttgaatttttatgaagcaagcttcggctt

SEQ ID NO: 263593 - DNA, 823 bp, Cannabis indica
ttttttttattttttgtatttaatatttactaataacaaaaattaattgataaaaaatagaaatccaattgacatttcatattggagtttttatacatagtgataggaataataatatttattatctcatattttacatactatgtctatttaatttaataataaagattaataaaataatatataaatataaataattcatatatatatttatgaatttgtaagtaaagagaattttatatgaatattggtgtaggtgggtatatataacacataaaataatatatattaatttttttttatttataattatttgtaatgataataattgttatattttaatagccatatacttattacaataataatatatattcatgtatgtatatatcaattatgcatagttataactaattattaataataatttagttttagttatttatatatgatagtatgtaaattcatatttttatataacttttatatcaacaatatttacttttatgctacagtacacttttatgaatttaatttattaatttttcttaacaaataaatataatatgatgtacattaatttacaagtaaatcccttaattttattttttggcacatatatgttatatatagtaattagatatagattaatttaaaaattgtacatatacctacattaacttacaagctataaattacatatgatcagaatatatttaactatttggaagaggtttcaatggttacatttttattgtaaccatcatagttacattttttcaagccattgaattactattaaatggttgtgattaatttagaa

SEQ ID NO: 263594 - DNA, 2132 bp, Cannabis indica
gttcgagttttggttcgggttcgggatctagtctaggtctgggtccaggtccaggtctgattcctagatttagacaccgactacgggtcgggtccaagcctcgtgtcttgggtcctgggtcctgggtccaaatctatatcctggtccaagtcaaggtctaggtccttagtctgggtcctagttcgggtctcaggtccaggtttgggtctaggtttgggtcttgggtcctgagtcatgggtcaacgtcctcgattaaggtcagggtcctaggtcccagacttggttatcatcctagtccgagtgcaggtcccaatccttattcggtacttgtccttgtctcaggtctttgcgttgtctaggtctgggtcacaattcggttctcaggtctcagctccgagtattgggtcccgtatcctagtctcggtcatgggtcccagtcccagtcccagtctgggtcctagccccatccatgttcaggtctcggtcgttgtcctggtctgggtcccagtcttgatctcgctcctggtccaagtctcgagttctagttcgagttcgtgtacgagtccgggtttgggtctgggtctgggtcccggtttcagtccgttttagggtccgagtcttggtctggatctgggtctgggtctgggttcttgtatgggtctgggttctagtcaaggtctcaggtcatgggtcctgggttcttggttcttggtcgcgggtcctaacgcaagtatgggtccagctattgatcccagttggggttcgggtctgtgttcggttctgagtctagatccgtttttgggtcaacgtccaattcttgttctaaggtcttcatttcggttcttgttccaatttcgggtcgcgagtccgagtctgggtttgggtcctagtctaaaaattgctccaggtttgggccttggcacgattctaagatctagacaccgactacgggtttggtccaggcctcggtcgtgagtcatgatctatatcccaatcttgggtcccggtctcgtttcgatttggatcctaggtcctggtctgtgttcgtgtccgggtctgggtctaggactgagatcggggtcgggtcttcgattccagtcccagttgggtcccttttctggttctaattttgagtttgggcccccaatctttgtcgggctcctaggtccaagtcttagtcaccaatctcggtccggtcttgggtttgggactgggtccaagtctgtgtctgagttcgggtttatgtcccgagtcgttatctgagttttgattcaggtccgcgtcccgctcgagatctgtttctgggtcttagttagattacggttcttggactcaaacctagacttggactcggacccaggtctggggtatgggtcttggtctaggtcagggtcttggtccgagtccgggtctgggtttgagtttggatatgggtcccagatccaaacactgactacaggttaggtccaagccccgggtccagatttgggtcacggtgtcgggtccctatcttgttccacttcaggtcccaggtctcgctctgagtcctaggtcagggtccgggtctggggtcgggtcgtgggtctcgatcctagttctcatgcccgtgtcccgggtccaagtcccccatcgaagtctgagtcctaggtctcgatctgagtccaggacctagtcggggttcaagtcttggtctgagttcgggtttgggatccgatccttgtctaggtccagatctgggtttgagtctaggtccaggttcgggtccgagtctcgagttttgagttccgatatggctctgggttctcatgcccatgtttaagtccccaatccaggtccgggtcctaggtcccgatttgggtccatgttcgggtttgggtcctagtcccaattttgattttgatttagtgtctgggttcgggttatggtccgggtttgggttttggtcgaagtcctggtccgagtctgggtccgggtttgggtccacgttcagatcttggtctgggtctgcattcaggtccaggtttgagttcggatcccgggtgtgggtcaaagtctgggtctgggtcagcgtctcagtccagatttaggtcctgagtttcgatcccgatgtgggtccgtgtctgggttcgagt

SEQ ID NO: 263595 - DNA, 686 bp, Cannabis indica
acttgcactaacataaaacaagaagtgcattttgatcaatccattgttttgatatttagatcaagtgtagtgtatttgactaaacccaaataataggaactataaggttgtggtaggcaactgctttatccaccattactttctttgcattcataaaacattatgcaacatcatttttctatatgtattactcctctagggttactgaaatctttactgcttgttgagtgcatctgaatatacagaagacacatctttaattctatcaaaaatggaatatagataaacacagttaaaaactttcttcagtttgaataactttctagtgcctttcgaaacaattaagttattttgcttcactggtggaactaaattattatagatgtatttttacatccttctagaataattcttccacccttagagtaagcaccatctctaatattaagtattgagttggtgtagataaaaggattctaatatacagctctatcatcttatatataggtcacttttagagattctttcttaattgtctcgcaatatttcttgtttagttacatcttagatggctctcactcaatagtaggagtctagttaaatttatacacatgcgtgcatttaacctcttactattggtgcttagggacctcttgttgtgatattttatcttagtctggaacatt

SEQ ID NO: 263596 - DNA, 583 bp, Cannabis indica
ggagagtaacggctacttcatgatatatataaatattaattataaaataaagtgggtgggtccaatatgtatatatataataaataataaataatagatatatatagaaggagtttctagaattagagagagcatggaggaggaagtagaagaagaaggcccgatgacgacgatatctcgtcactattttggagatgaaccgttctgttccatctccataattgaggtaatattcatttctagaaactccctatcagccattaacgaaaaaaggtttcaactttgtgtaatttgtgctggttcagaacattaaggaagactatggacaattcgtgtggccttgtagtgtagtcctagccgagtacgtttggcaacaaagattccgcttttctggagcttctgtagttgaggtggtgatgatttcattcctcctttggtcaaaattgaagatataggtaaactgtgtatgtgttaaacttgttagatttgcagctaggagctgggacttcattgccgggcttggtggcagccaaagtgggtgcaaatgtcactctcactgatcatgccaatggattagaggtaa

SEQ ID NO: 263597 - DNA, 633 bp, Cannabis indica
aacaagagaagaaaaaaaaaataaataaattaaaatagcagagaaaagattataatccgaactttatatttatttgattaattgaattttggttggtgattaaggcgaagttccataaaaacccctgccttttttgaaatatcatgaacagttcctgtaggctgagcgcctttttcaaggaaagatagaataacaggaacaaactgctgcgcctcaatgcattttggggagtaccagctagctctgggttcgagtggcatttcacccctaaccacaactcatccgctgattcttcaaaatcagtggttcggacctccacttagtttaacccaagcttcatcctggtcatgaatagatcacccaggttcaggtccataaacagtgacaattgtcctatgaagactcgccttcgctacggctccggtgggttcccttaaccaagccactgcctatgagtcgccggctcattcttcaacaggcacgcggtcagagccctgggctcctcccactgcttgggagcttagggtttcatgttctatttcactctcctgggctcccagtgcgaacccaaacccttttaatggaaatgaagtaattcaaagagttcgcgctggattacatacctgattagaa

SEQ ID NO: 263598 - DNA, 2733 bp, Cannabis indica
atacaatacaatacgacctaatacgacgttccaaacgagcccttaaagttaatgtgaagtgtgggaactgaatcccatggacaattaacattctatgagaaaaatgcagatcaaaacttccggtgagaaagaagctttctaaagtgaaattaaattggacaatcttacaaattttgtagttaattatagtgacttcatcatcatgggcatcaagatcttgataatgtactgagtaaaatagctatactgaaattcacactttatttctatgacaatcccttgacaaataatcttgtcttgtaccttgctccttcaattctaggaatgccttctttttgtctaaaaatccatttacaagagatcaacttctggccatcttgtctcttgaccctaatccatgtcttgttctttaacaagaacactatatcttcttttattgcttgcaaccatgctgcatcattctttccacttattgcctcttgatagcaggttggctctgagctatcaatgtcttcagcagcaataagtacataggcaataaaaccagcatagccaaatcttgttggagatctgatctcccttctttctctgtctctggctaactggtagttgttgaggatgtattgtaccttatctttcttagctgactcattttcatttaattctctaggcattgacacttctgcttaatccacctcaaactgaacatcctctctctcatcaatttcactatctctagatgtggctttggttttcataggcatctcatcttcctttaaagccacatctctactgatcatgcattttctgtgtcattcttcaaggcaccaaaccttgtaacccttgacccatttagggtatcaaagaaacatgcatttaagtgccttaggctgcaatttatcttgtttgatatgcacatgagcagtgcatccaaaaactctcaaatggtcaaattttgggggcttacctgttcaaagtttctgaggtgtcttgaattgatttgcaacaaaaggaaatatgttgatcaagtaacatgatgtgttgagtgcttctcccaaaatttctcttgtcaaactagcacctaggagcaagcatctcactctctcaagtagtgttctattcattcttccagccaagccattttgttggggagtcttaatcaccatctttgtctcagaattacttctttggcacataatagtttgaattcatctgaacaaaattcaagcccattgtctgttattagaactctgatcttgttccctatttaattcaccaacaacttcctccattctacaaaagtgttgaaagcacgggtctgttttcaatagatgcacccataccttcttgctgaaatcatccactatgctcatgaaatagtaggctccacccatagtaggagttctggatggaccccatagatctgagtgaacataggctagtctttctgtgatagtatgctctcctttgcttaatttaatcctactggccttccctaagtcacatccctcacaaaattctagcttttctttcaacttatccttgaatagcccatgtttgttaagttcttcaagccctctttggcttacatgaccaagtcttaagtgccacagtcttgtttgatttgcactcattgagttaatagctggtgcaatagatccatctattgtgtctccatccaagaagtacaaaccattactcaactttccttgcatcaagacctataactcttatttgattatcatcacaccatcatccacatctactctatatccaagtttttcaaacatgcctatggataacaaatttcttttaaattctgggacaaatctgacctagtgcaggattctaatttgtccatcatgagccttaatcctgacagtaccaatccctttgatgttgcaggctttgttgttccctattaagacagcactgtgttcttttgtaagagaacttaacaaattcttatttagtgtcatataaaatgagcaccttgattccataatctattctccacccgagtctaaattggatgcaataagtactcttacagattcataaccatctgcaacatcaacctcaccttggttcatgttcttcccttgattgttgcctcttctcagcttagctttaaatgccaaacattcgtctttgaagtgcccttctttcttgcagcaatagcactgtttccctgagtttcctttggaatttgaacccctagtagagttcatggtgtttggcttagcttgattccctttatacccatttgaattttaatttcctttgtctcatttcttggggtactttctttgacaatcaccaatccttcttccattgctctcacctctttcatcacctttcttttgaatctctttggagttgagagttgcattcacttctgtcacggtgagagtatctttgccatatagaattgtgtccacaaaatgctcatacgtctttggaaaagagatgagcaatatgattgattggtcttcatcctcaatattgaccccaagattattgagatcaaggatgattttgttaaactcatcaagatattttttgagttctctagtttcaccatccaaggtttgtatagccttttcttgaggtacaacttgtttgctaaagacatcttcatgtagattaatgacaacctgtttcacagatcaagtgccttttcaacattagaaacctctctcaacacttcatcaccaagacttagaagaatgg

SEQ ID NO: 263599 - DNA, 582 bp, Cannabis indica
taggactagcttaaaaattcataaacatgcatgtatacatatgtgcatcatttatactaatcttaccttacttctgttatcaggtctgccaaccaatccgagtggaaatattgctcaatgattctgaggtcctaatgcaaaacaggttagcgacttgctaactcaatactaaggacttaaacttaaaaccagaagtttccctatcgctaaatagagtggaaataccctatatatcaagaaaacacaaaaactgaggaacctaaaaaacactctaattagtgaaccagatccccaaacggtccaccgtttcttagggtcctgcgtggagaaactgttcactacttctacagaaacgtcaaaaacttgttgtgaaaattatatacgcaagtatacgcagtcacacaagtaataaagtgataagtaagatcgtctccacagggattgcaaacaaagtttgatataaaatcaactaattacaacttaaaatagaaagaaataatatgtaaatggttgagtaatgattcaaaattaaaattgacaagaattaaacttgctaaaattaaaactactgctgctagaaaa

SEQ ID NO: 263600 - DNA, 576 bp, Cannabis indica
actttcaagtgatctaagtttgggggtccataactcttgtgggggtcttgaagttgtttggcatagatagtgatctattgattagataacaagctattttaagagcttctccccaaaaggttctgtccaaacgagctcctagtaacatgcacctaaccttctaaatcaatgttctattcatcctcttagcaacactattttgatgaggggttttgattacaattttatatctcttgattcctaggcatacaatcccttgaactcatttgagcagtactcaagaccattgtcagttcttagtacgttgattttgttcccagtctggtttcctagtagcctcttccatgtatcaaaggttcctagagcctcatctttgcttttcaacaaataaacccaaactttcctactgtaatcatcaacttcacttaattttactgtttcagtgattgtttatgtactaaaccatgctcactagactttgatatctaccaaatcatttccctcaaactttgatatctactatatcgtgccccctgaactttcatccatgtcagaatttttttactaaaattagac

SEQ ID NO: 263601 - DNA, 539 bp, Cannabis indica
gtaaaaaataattgttactatatgattcgaatatttaagcctaaagatttatatatttacattgacgtgataatcaacgatgcattttatttgcactaaaacaagtgatatgccttttttcgaggcattgataaaatagacttgatatcgaatatgtagatttatattggattggaccgatatttacagtagagtaaatatcataatcttaccgttatatataagtcaatattacttagtttatcatagatcaattggatctgaatcctgacatgattaagatttaagataattctattatttgagttctttgacttgttcgttactagtttatcttatggactagctcatacttacatcttgtgaattcggtagcataattgagtaggagtgttactcataaatatgaatatttatatcttctataatattagaagtgaaatgatattttcctttgaggttagttgaagcgtttaatgattgagtactcattttagtaataaaatcagtttactaaaatatcattatgtcaactaagt

SEQ ID NO: 263602 - DNA, 572 bp, Cannabis indica
tttaggtgaagaccatgattacctttctcaaaaccccaccaaaagtcacggaccaacccatcgatccggttaaccatacgggaagagagctttgtggtttgcatggcatacataggcaaagacaatcccacagattttataagagtaactcaccctgcctttgacaaagttttcgccttccagccctgaagcttggccgtaaggttgtcaaggataaaattgaagtcagcatccttttgcctagacctgaaaagaggcagacccaaatacttgacgcaaccttcaggataatcaatccccagagcttgcttgatatgacgacgtatgtccatcggagtgttattactaaagaaaattgtcatcttgagcttgttaacctgttggccagaccaagaacaaaatttttccaagcagccccagtaaccctctgcctcagataggttagctctgcccaccagtattaaatcatccgcgaagaagatatgggataaaaccggaccgcccctactgagtttaattcctttgatagccccctggtcgagggtgtttgaaatcagtcttgagagaacttc

SEQ ID NO: 263603 - DNA, 706 bp, Cannabis indica
ttgccaaatggtctcccccgcctgctggtttctttaaattaaacgtggatgcagcatatgatgctgttggggcagttattggtcttggggctgtgattagagattactttggcgatgttgttgggggccttctctcaatcgttgcatggttgctattcggtgaaggaaatggaagctatggggattattcacaatttgcattgggctaggaataacggattgaacatacatttcatagagacaaattctcttattgttgctgtaaagaccgcatatgaataatattttgaattattaaataattagggtttatgtgtgagattttattattattaataataatacaattatgggaatttatttgagttcgtatatatttattatgctatttatgtaaatttctcaattactgtgtttgtgttcggaagcggtggaaagcggcgttgggcctttagagggttgtattttgtatgttatagcattgttttattccggggtattagtgtaggtttaatagtattggttattagtggggatattatggtgattaaaatgccttagaaacctttttattaagttgttggtaattaattaaaggataattattaacctttattcttttatttttattctgattataagaatattacatatatagaaatgaggcattaatctttattctggagaaaaattagaaaatcctaga

SEQ ID NO: 263604 - DNA, 1931 bp, Cannabis indica
cttatgatttcttccattccttcaacatctccttgatccttcaagtaatctagacaagcagccaaagtaacaggatttgacatccatccttttcgaccgatcactagtgacttcttcaacatttcaactgctctagacatttgatttttctccacaaacccattcgccaagatactccatgagccagcgtatggaattcttccttccacagcagctttgtttaataatgattctgcctcttccaaaagacccttcctgcaataagcaataagaatactattaaccaccctgaagtcataaattgagcactgtgattcccattccttaaaaatcttctcagcaccctcaatatcatccaacttcgaaagacatcttatcatgcaggcatatggagcctcagttggcccataatttggtttgtacttgttccaaattctgtaaagctcctctccattaccagtattagaatagagcgtgagaagaaacatatgtcctgttttctgacttttaggattcattttatcaatgtcctgttcgagtttccctagcattttcaaagcctccttagtcaagccaaccttcagatatccactggctgccaatgcgtacactttccagttaacataaaggttgggctcttcctccatcctattcatgatctttttcatcccagcaacatcagatgctgcaacataggcagacattcggtttctcaaagtatacttgtcatgaggtatacccttaacttccatctctttcatcaacatgtcaatcttatcaaagcttccattcttagcatagaggttgatcaatacattgtaaggtaaagatgacactgcctcacctaaatttctaatttcctccataatggcttctgctttgtcaacagaattctctctaacatagctccttagaagagcagcatatacatggtgcgtttttaactttcgtgacatgttgttgaagtagttttcggcacgatcaagtccatgaactttgtggatcaattctaatctaaccgctgcatcacttggtgatatttttaagaacctactgtctgtcatccaaagagatatctagaaaggaaaacaagataattagttgcagacttagcaatcctttgaaattaattataagcaaaactattaagctctttaagtatataatatccaccacaacatttgaaaaaagttgttgagagactgattaaccactctcccctttatgagatgtgtaatatgttgaatgtgaaatgagccaaaaataagtaaggcgatagaaaatcaacagaagttaatatcaattcgtatccgcaatgaattaagaacaagagaatttattgttgttaggaaaaattcggtgtcaactgagcggtagtaagtgtaagtttctaggtctcaatatcacacatgtcacaagttatcagatatgaaatccctaataatccaacaactaaacaaatctccatagagaacatttctagtagaaaaagctacatgagcccattttctcattaggcagtacaataagacccagaacatagaaattgtaaggaaggaaagaaaatgcaagagaacctcaagagcgtggttaaagcgtctaaagtccctcatggtccgaaccatccagcccagttgatccttgtcaacctgtcgtccttcgaggacccattgtcggaggactggtaaaaccgaggcctttgggtctcggatgtgttgaatacggtggaacagagagtctgagccagaagaagaagaagaagacgaatgaggaggtttctcaggggttttagcagagaagaggggagtataagcccgagggtagttgtgaagattgtactggaaccgaaaggaagcgggcttgatcagatagtgaagcttcatcatattcaatggctaatggcttcgcttaactggctcacaaactaacac

SEQ ID NO: 263605 - DNA, 970 bp, Cannabis indica
gcctatatgtttgctttggggttagatgcatataggtagtccatttaatttttgtaattaaaatggactaggtttctaaataaaattgtcacatcttgatagattttatttaggcccaattagtatttgggcttattcatttaataacagttgtacattttaaggttaaattcctctcttttgggccttgtgtgagagttagggggtcatagcagtgggtacgacatactgaacccaaccctccctcacatgaacaaccccaactgtgaaggcccattttgcctgatttgaaaactgtactaggttaattaaactagtttaacctaataaaattgattagcaacatagttaatttcgaaatatatgaaaattaattttttatttcattattttgaacataatttagaaaaacacacttggtttaatgaaattcaaattcaagataaattaaatgtatttttctgtatttaattaaataaaaaattaataactaattagattcttctagatacttaattatttaatatgtctttaaaatatatttaagttgaaaattagttatttataactaattttggatcaacttgaatttaaatatatttgaaattcataaccaagttaagagattctagaaaattagttattggaagattttttaaaatattggtttaagttgaaagtttgttaattttagatcaacttaaaatggaatatttttcaaattaagtggttagtaacttaatttgttatttaattaaatttttgaaaataatttaagttagaaattttttttgtaaataaagtaattcattaaatagcaatatccgctattacaatagactcaagagcagagggaacattgctctcagtaaaaagacgatcagccaaaaacaagaaccgcgaacaacacaatgtgcagccttgttagcaaatcgtttaacatgacaaacaaaaacatgatgtaaaatag

SEQ ID NO: 263606 - DNA, 1310 bp, Cannabis indica
ttgaaacaccaaatcctcaaagtctgttaacaacagcaggtgttaaatcccaaaataaggaaaacaattaaaattaaaaatgtcttgccgaagaagctatagaatcagctatgccattttcatctttgggaatctagaggaaattataatcaagaacatcaagaccatcaaataaaaacatgaacagggcatccaactcccaatagggcctttacgactttcagttgcatgacaaagctcattacaatgagaattaaacacaagatttgtcacaccgagttggaatatgattagattcacggctaaaatccctgcacgagtcacaacttcaagggctgaaactcatgtcgtgaatacttccgtcttaatcgaagacactctcccatgttcgtcaataataataacaacacctgcagtagaagaacccgagacaaaagatgcaataaagaacactctagtgttaaccaaagttcactgtactgttagtagaaattgcctggcataacacaggtctagtactggagttcacctcgtgaactctttggtttatttccttgtagagaaagaggtaagactaaattatcatagaatttcttattccttgctcaccaaacacactcacacaatatagtagtaaaaacaataaattgatgtttgatctctgtctctacggaggaaaggtaagtagcattgaatatccactcaaccaaatcataagccgaaatgagttgaatcgaagtagtacgaataccccatctgcttgagaaaccacgatattacacttttaaaaaagatgcaagggagtatccaactcaatatcgcaaaggcatcaactaaacgacgaactcgagaacacgataaatttatcacttgtaggaagacaacccactgccactttccacggagccttaacctctcggggataggggcttgccaaatttttgaccacaaagaagagatgatggtgaacctatgtttgttcaaagcccaataagcagatttagtgctgaggtatacatttttttgatcccctctataatataaatctacaattaggatgaaaatttctaacttgttagaatttgctccacatcctccgaaaggaaccaggaggaaattttatcatatgacaccacgacccagtatcaattaaaagctcacacactttaggagtggactcgatagacattggattgaaggtcgctcttgttattatcccaattatcccactgcaaccacaggtcatgccaaacatccacattgtgacccaacccatcaagtaacatctctcattttgcaagaaatcttcc

SEQ ID NO: 263607 - DNA, 965 bp, Cannabis indica
cactgtacatatagaaaagtctgtcgcctagcgagtatacaaaataagccgtgatgtcccaaagatcgtacgctccaggcctaaccgccctgacatgtacaatctccatctgctcgctctcacggctgcttagccttagccttgcccttacttacacatggaaatagcaactgtgagtcaacatactcagtaagaaaagcataaacaatgacatagcaataatctggattatgatcagacgcccatacccccaatcataaccctgtacccgtgtccaacatggtgctgagtctagaacgttcgtatgacagtactattggcaacaatatcagcctatacgcggtacgctagtcataccctagccgtatcgtgtgatattgtcaagtagtacggtactatcaactataatatcagcttatgctcgatacgctagtcatactctaggcgtactgatgtgatactgccccaaccggtagagcggtttcccaagtagaatccagttctgtggggtttcttggggaccaacaagaatttagattcatacaggtcccactgaaccggttgaccgattcagtggaggaaaatttcaaaattccattactcactcaattcaactccaaatctaaccagaccatccagacatgatatttagaccataaagtacatattcaaggcattaaaacactacaacatgcacaaaatcaaaatccaccatgtgggagcaaagtttgagctcttaagctcaaaccttgaaaaaacctcaccaacaaccatcaacccctcaattcaactcaaataaacataatctaactccagaaaacaaactcaaacaccaacagcaactacaaaactctaaactcacaattcatgcataattttcaacttaaagcttaagaaactaaaggaagagatgttaggaaacttatcttgagctgagaccacttaaaacttgctggaatttatga

SEQ ID NO: 263608 - DNA, 707 bp, Cannabis indica
cagcttgaggctaccattggctcgatatcggtacaagtgaatagccttcaggaggaaaggggagttcttcggactgtcttccgtctgctagaagaggagaagaagactgaggaggaggaacttacagttgagattgagaagtagaagtcagggatggcgaagcaggttgaaaaagtccatgccttagagacagctggtctcgagattttttatgaatttttgaaggctaaccctcaggcaaatttcgattacctgggcaaggccaaagacatgtatctcgagtattgtgcttctcaagtggcttatggtgagcccgatgcgactgcttcttcctccggccaaaatgctgatgtacctcccattcaaacaacaaatcccctagctcctaccggcccagaagatccaaaccgagagcctgggactctagctatttaactacttctcttttatccttctttttatatagcttattcggccataaggacttttttaagacatcataaccagccaagcggtctttaaacttggaagtatttttcattttacaaacaacaggctgaccgggcagcttttaatcccggtgttacgtgcttttgttatctttaatgaattttcattctctatttataatcatcgtgcaattgtgtttgtttttatctttactaaatgctttgtacaggtgtaggtgccccccaagtgaccgagca

SEQ ID NO: 263609 - DNA, 585 bp, Cannabis indica
cctcaaaaatgaaataagtaaaaagtaggaaaaaaagttgaaataggttgctattgtgcttttcttttattgaaaagaaaattaaaatttatacataaaagtatttaaagataataaaagtaataatttttaatatattaaaataacattacttttggtgagtttttcttttatattaagattaaatggtgcataatacaataaatagatattttaaatatttttaagagttgtgatttaaaaaagaaatcataaattacaatgtaacaacatttgaagtgaaaagaaaaattacttttgtcaaatatttatttgatagctagcgatcaattataaaataaacaaactaatctaattactacaaacttagtcattttataacaaaaggaggaagaataaaatgaaatattatatgctaatatgacaattaagaaaattagcaccagaaataagagagtaaatcatagaagaggactaactagcactagctcctaaagtctctcactaaaataaaatttaccaataaaaaaagaatctactaattattagggtaaatagcggcataagtacccaaaattttgagtt

SEQ ID NO: 263610 - DNA, 511 bp, Cannabis indica
ttttgaactttgcatagagtttatgatttttaagtcgctgaagaaccattctaagatgttgctcatgttctgcttctgaccgagaatacacaagaatatcatcgataaatacaattacgaaattatcgaggaaatccttgaataccctattcatgagatccataaaggctgccggtgcatttgttaacccaaaagacataaccaggaattcataatgaccatacctggttcggaaagctgtcttcgggatatcctcttctcgaattctcaattgatgatacccagacctcaagtcaatcttagagaatactgtcttgccctgaagttggtcaaacaaatcatcaattctgggcagaggatatttattcttaatggttaacttattcagctcccgataatcaatacacatccgaagagttccatctttcttcttcacaaatagcacaggggctccccaaggtgacacactaggccgagtaaaccctagatccaacatcccttggagttgtat

SEQ ID NO: 263611 - DNA, 1076 bp, Cannabis indica
gtaaaatatttccaacagtaataccagcacagtcatagatgttgcttctggtgggacctctacgaggaaaagtgctaatgaggcttttgatttacttgaggagatgaccataaataatcatcaatggccaagtgagagaagcctatttaggaaagtggcgggtatgcatgaagttgatgccatcactaagttagcagcccaagtggaagccttgaccaagatgatgacagttcaagtgcaacaagctcaagtgacttatgagttatgtggagggcctcactcttatgacgatttccaagttgatgtgaatattttaccgatggagcaagctcaagccattggaaactatttaaaaacgacaattacaattttcttgatggacatcgtcatagttatcacgggcagttgtataaccaacaacaacaaggtttctaccagcagagaaataggccacaacaacaacaaaattatcagcccactaatcatcaacaataatttttgggtggaagttttgaaaaccaagcaaatgtcataagccaatttttggtagaaactcggtcttctatttgaaatatcaagactcaaatggggcaattggccactctcatggctaatcgtgcccaaggaaattttccaagcacaatagtggttaatcaaaaagaaaattgcaaggcaattaccttgagaagtgggaagaattatgatgggttaagtgagaagaagtcagttgaagatgtggatcaggatcaacaggcacatgcattggcatgagaagagaagaaacaagaggaaaacaagactactaaaggtctacaaaacaaggaagcttctccacccgttagtattgagcatcatgttaagatcccctatcttcaaaggctttgtaaaaacaacatggataagcagttcactaagttttgtacagtatttaaaaagttgcatatcaacattccatttgcagaggccttggaacagatgccaatttatgtcaagttcatgaaggacatcttgtattagaagagaaatatagaagacttcaaaactatggcaatcacggaagagtgtagtgcaatttt

SEQ ID NO: 263612 - DNA, 424 bp, Cannabis indica
tttgcggtgcagttttttagtttcgcggtgcgggtgcggtttggaaaattagaaaaaccgcatgtacgtgttggtttgaaaaaatggtcaaaaatcgcaccacccgcaccgcgaacacccctatccgtggtcttttaatataccacattaaaatgcatacgaatttaatactctaaaattaattaaatcccaaaatacctcctcataccttccctctttctcttccacgaccaccgcaccacctccagcggaacgcactctgaagacgaaacataagacaaaaccaaggaggatatcgcgaaactacaaagagaaattgtgaaacccaaagctccaaaatctatgagttctcaactcgcttgttttctgtatttttttttctggtttttgacgatgtcgtgaaatatcgttaaatgtcgcgaaa

SEQ ID NO: 263613 - DNA, 960 bp, Cannabis indica
aattaatatatatatatataaaggcggggcggggggttggagccgggaagaggggccgggggatatattgatatattactttggggtttttttctccaataattgaaggtggcaaagagacatagtttaattctgttaaggcaccaatgatgagagagtttttattttatgtagtggactccatctttccacgtccgaaagaaccgaggttgtcaaagctttggagccatgttactgtccctattccaaaaatccatgcattttaattttctcttcacatcaagaaccccttttaagtggattccaactcctcattcaaccatatatagattcccttaacaagtggtgggtttcactttcacaaacctaaccaaaagtttatctttttctcctcccctcctttgatttattcatctcctcctcctcattattattttatgtgtaaagctaattaacaaattaaatataaatataaattaattaatcatgatattaatgcagattccattctattattttatgtggggttccttcaaatctcggtacccaatgggtggacttgctgttttgtttgtgagcaatagggtaatggggctaacctacctaataggatctgacaggtaccagttatatatatatacatatttttcaattttgtgtggattgcaataccatatatatttataattaagccacaataccatgcattatcagtattaatatatatagagagacaatataatattaacccctctcctttctccctagctgtgtagctcagatatatatatatataaataaagtatattagtttacttttattttttgctgttgcaaagaacaatgacagttttattgtatgtaaataaaaataatatccattagtcaattcacatataatttgtgctaattatatttttataatatttcccattaaaaaaagaaaaaaaaaagttttta

SEQ ID NO: 263614 - DNA, 528 bp, Cannabis indica
tcaatatttttacatttaatctatgtcggacaatattgttcaatatgctcattctttatttctcttcctcttttatcttatttcaattaaataaataattaaaatgtagtataagagcacaactattaagcacttaagtgcttgacaccactatgtaatgacactataattggttttttctataatttttattaatttaaaataagtgagactcaatattgaactgtactaataacaatattacacctcacaagtgtactagacaccatgagtactctttagcatttttttttaagttatatatgacctaatatttaatttcacttataaccatattattttttagagagtattagacattattaatatttttatgtaatataaatatatgaggtaaataaaatatatatatatttaaaaaaaaataaagtagagaatttgttgagtagaaccacttggggctagctcaagtggccataggtgggtgtgtgagtgttggaggtcctgggttcgagtcccaggtaaaac

SEQ ID NO: 263615 - DNA, 1332 bp, Cannabis indica
ctatataaagaaaaaaaacacataaatgaaagcacacacacagtacctgtattcctagagtaagaagtggggggtctttggtaaaaaggaaaagcagagttctgagaggttctttccactaatgcagcatctttattgagaaaagaaacttgtgatttgtttgaagagaagctaagcatatgttcttgttggcgagtatcagcatggaagccaagagaattagatctcaacattggacttccttggtgtaatggcattgtttttgaagatgataaatcaactgttttagcaactttagagctcttccagtcatcatcacaaggcccagatctttcttgcttaacaaacccagatccaagaacaccattatttattgacttagtatctgaatcattaaactgagaagaagctcccccaccacaaccaccacctcctcctcctccgttaccaccaccgccctcatgatgagaaggaggacccaccaaactctccaagctcaccaacccaaaatccattttggatttgtccaccaatctacaaaacctctgaaaagcatgagttcatgaggttgaagaaagagaaagacataaactttcagattttatttgagctagagagagagattgactgagagagaggcgcatctgaagagtgcgttgggttttgtatagtataatcttccaaagactcgttttttttctattattatatataatttttatttaagaaaaaaaaagaagttagctttgagaaatgcaaaataattgggaagagactatggagagagaaagagaaagagttgaaaattggtgaacagacagggagctagtagtagcctagtaccaaacacacttggagcctctcagacatcctatgcttatgctctcacacacattatatattcttttttatttcttttctcttatctgaactccggttagtgttacacaataatttattagaacctaatttacaagaatacccttactccacccaaaattaatttggtaatattagtcctattctataattacagtttcttattatatttatgcttaaaattatatattaaaatattattttttaaattttttttattaccgtatcatttctgtaaattttttacaaattttaaataatctacaataccaaaaataaaattcgtgatattctaatttatcacgtatgttcaaaaatcttcaaatgtatttttagcactataaactattcgaaattattttaaaaaatttacatgaataatattataaacataacgaacaccttcatgaaaaaaaaaaatagtatatatttttcaagtacaaatattaatta

SEQ ID NO: 263616 - DNA, 901 bp, Cannabis indica
gcgaattgttgaatctcagactgctaaatttctggaatttgatgttgctgaaaaaattccttcaacatctcttgaaatgggggagtcctctaaaggaatttgtattcctatgtcattttcaagagatgataatagtagtctccatcctactccagttggtaatgctcccattgttgatgaatacattgctcccgatatcgaagatgatgaaggtcctattattgatgaagggcctattaatgatgaagctcctattgttaatgagaatcctgttattgaagaaattccagttgtggaagatgttattcaaaacaatgatcaacaaagagaagttattccagaagtacctcctctaagaagatctcagagacaaaagaagtcaacaaagtgtcatgataattttgtttatcttggagaaggagaatatgatattgatcattttgtggatcctgtcacttttagtgaagcacttaatagtccacaatcttcaaaatggttagcagctacggatgatgagatcgactccatgaagaaaaatggtgtatgggagctagttttattacctgatggttttaaaccaataggttgtaagtggattttaaaggctaaaagggataaaaagggacagattgaaaggtttaaagcgcgtttagtggctaaaggctttactcaaagagaaggtattgattacactgaaactttctcacctgtttccactaaagattcattcagaattattatggccttagttgcgcattttgatttagagttgcatcaaatggatgttaaaactgcttttctgaatggagaattgaatgaggaagtctatatgtctcaacctgaaggctacaaggagaatggaaaagaacacttagtttgcaagttgaaacgatccatttat

SEQ ID NO: 263617 - DNA, 1518 bp, Cannabis indica
agcccatctcgaaagaactccacagttaagcgtggttagcttggagcaattttaggatgggtgacctcctgggaagtcttcccaggaagcgtgtgagtgagaacaaagcacgctggaaacactcgtgttggtctgtagggtccagtccgtcagtccactgaagccagccaagtgacgtcctcgtgtataagagtcattctccgtgggtgtaagggcccaatggaggcttgaagcgaggacgttacaaaattggtttcgtctttgccaaatcaaccaagtgaagcccacaaatcggataaactcctcctttgagagatgttaccactgccaccacaggaaggccgaagcattatgaacattttgatctttgaacttggagtagcccagctgcttccatattttttgaacctttggaaagccccataacgcatgagttatatcctcctcctgctgcctacacctatcacagttagcaaataatgacattcctctcttcctcaattccaccttagttgggatccaatggttaaacactttccaaataaaatttttcatttttcggagttagtattgacccccataacttccaccaagcttttaatttgcagttgtttgaacaagccgcccaatccacattactaaatcttaacttatagccactagcaaccgagtaattcccattattagttaacccccaagtaatccaatccgggttgtgagtagatggaataatgccaagaacccaaggaatatcatcgttgtgaaaccaactactcacttcattaattttccaatctccattagtagttatcaacaaattaagagtgacatctttgggtatcagaaccttgtttcttagctgaaaaggaatttgtcgaggaagccacgggtcttcattaattcgaatcttgcacccatctccaacacaccatctataaccctttgctagaagatcacggccccacaacagccctttccaaaccgaagacccaaaatgacccaatttggcttcaaagaaggttttgttgggaaaatagagggctttcatcacacggctaaggagacattctggttcagttatcaacttccatccttgtttagccaaaagagattgattgaaatcttctaagtctcgaaatcccatacctccttgctcctttagtttgcacaacttccgccaattaccccaatgtatcttatgtttattggaagttgatccccaccaaaaacgagcgatcaagctttcaatttcatgaaggatacccttagtgattcgaaaacaactcattacacaacaaggaatagcttggatgaccgctctgattagaatttctttccctgcttgtgagaagagacccatcttccaaccttggagctttgcttccactttctcccttattttaccgaaaatttgttttttgtttttacccacaaaggtaggcatccctagatacttggtatgattcttgacaagagttactcccagattcgaagctatatgatttgccaaagagtcat

SEQ ID NO: 263618 - DNA, 561 bp, Cannabis indica
attaatgtaggtttcatgcatgctatttacccttgttttagtttggagttttggttcaaaagctatggtttttcaagtgaaaatgtgaaaatggttgctgtgtttgttgtttgagttcgagaatgatttctgcagttttattatgcttgattatgtagtttaaatctagttttgagtcttgtaggtgagctttagccaagtttgagttttgaactcaaagcttggagctcacatggtgcattttgattctaatctttctgggttgtgttgatgctttagaaatgtttagaggggtatttagagcaggtttggaagttttggtgtggtttaagtttgatttgggcaagttataaatttttgattgttccctgcgaggaaccggaattccagatgttcaaccggaattccggatggggttgaggaattcccagaaccggaattccggttctagaaccggtctgccggttgggggattttcagaaaccctagtttctcgttttttatatggtttagggtattgccatgctttttatcgatagggaaacttttagtttctagttt

SEQ ID NO: 263619 - DNA, 595 bp, Cannabis indica
cctggactcgggacccaaacctgaacctgaactcagaccataacatggaaccagactagggacacataaccagggtcgggacctagaaccgcaccccagtctcaatcccgaaaccaaactcagaaataggacctgagacgtgaaccagaactagaccgagacccgtgactgtgatccagatcttgactcgggattcaggtaacggggcttggaacagaccagtagtcggtgtctagatctggaactcagactaggactagaaccaagacgaagaaccaaactcgaacccagacctagacctgggaaccaaaattagaacctgaataaaaatctccgaaccaagaccatagaacaagactaggaccgtgaacaggacccggaccaagacctagaaccgaacacagaccgagcctcagacacaaactgagactggaactcgggcccggacacggtcgtgtacccagaacagaactgagacccggacctggacccaaatctggcatccgatcccaaagacagacttggacctagatagggatccggatacgaaccttgactaggacaaagacccagactgggatcgaaatgctggacc

SEQ ID NO: 263620 - DNA, 589 bp, Cannabis indica
tattgtaaaatccatcaaaataaagaaaaaaaaatactattaaacaccaagaggtatttaatcaaatattaataaatcacatcttagtagtaattaatctaaagagattaacaacaacattctcacttttattgttagtgctgtaaatacgggtacacgagcctaaaagatacgagcacaactagacataaaaaaatacgggtttggacacgacatggtacaaaaaatatatctttaaccacgacacgacacgagaagaatgaaagacacgacatgtaagcacgaataaactagtccaaaaagcacaacacacaataagtccaaaaaacacgtcatggcatattaaaaaatcttataacttatcaattataaattagttgaaataataataaaacttaaatataatactgaatcttataattctataaaataaaattattaaaatataaaaaaaaactaatattatatattaatttatttatagagtatgatataaagaattgagtatttataagtaaatatttaaattataattttttatataattatttgtaaaatattattcaaaaattatataaatataactaaa

SEQ ID NO: 263621 - DNA, 538 bp, Cannabis indica
aataggtttgttaaaaaaaatttcaataaacaatataaataaacaaacaatatataaataaacaatataatttaaaaaataaaataatcaattttttaaatttaaagctcaaaatatcataaaaataataataatctattaaaaaataaatattattatttcaaaatgatatttaaatttaaatatattaaaaataatattttattttaaaattagggtttgcaaattgcaaaaattcgaaattgggaaaaaaacccatgaaaatcggatttttgtgaggtggttgcacctccaagcagctgagacacgcgttcggatgaaggaattccagggtcctgcgccgagaaatctcgacatttgcagggtgggacgcgcgcgggtgttgtctgaacgaggggctgaccgtgtatgaagacacgggttgtctgagttagcgcgtgcgtgtacccgtgttgtccaagtgcctggtgcacttcgatgcacccactcgacagccatggcaccaaatttttaaaaattcataactttttcaattttt

SEQ ID NO: 263622 - DNA, 283 bp, Cannabis indica
agcactccaatggaggtaatgtcctcaggttctcaatcagctgggatgatagggattttaaaatggttacttatgtgaagggcctttatgctcttaatgattcatttgctgatcccgtatctcctgagattgaggcgaagtttgacgcgtggattggtcaaggcttgcttaaacatcctaggtgactattttttattaaatctgtatttgtattcttgttttattttttcagtttttattctggtttttaattattgtgtttttgttgtttgttttgttcttt

SEQ ID NO: 263623 - DNA, 530 bp, Cannabis indica
attgggaattgctttcttcttgcagcaatgtcccaatctagttcagaagtattttagaaattaagcatcctactgaatttgccatcccctacaaatccaagatttcaaaacccaaatccaaattagaggtaaatgatgccagaattagggatcacttagtgaaaattcaccaagaagacattgctagttgccacggacgcttcttgcaagagattactgaaggcaaatgtcgtttcttacgtgaagctgcttggcctgaacctccctgtgtgtcttctattcctttagcagagcctctatttttacccaaggtcacaattgcttttgaactaggtgacttagattttgaaataatgtctcctaagccacgtaaatcaaaggctccccaagaccccaatgtcacttttgaggcaaagttaataaggtcgaaggtgtgagccatcgtaggttatgtaggtgactaactacggacttgtggtattaaatacaagcgagactttcgggttaggttagtgcgggccagaaatttc

SEQ ID NO: 263624 - DNA, 857 bp, Cannabis indica
ctggccaatccagtattggtgcctaaaccaaatgggacatggcgggtgtgtatagattttaccaatctaaataaggcctgcacaaaaaactgcttcccctaccccagattgaccaaatggtggacgccacttccggattcaagctattgtccttcatggatgcctatgccggctacaaagagatcaagatgcacattgtggatcaagaatgcactagcttcagtaccgataagggggtacactgctacttggtcatgcctttcgggctaaaaaatgctagtgcaacatacaaaaggatggttaaccggatgtttaaaggccttttgggacggaacatggaggtgtacgtggacgacatgctggtcaagtcaaaggcatgtacgagtcatgcagagaacctcgaggaatgctttgaagtggttcagagttatggaatgaaacttaacccgaaaagtgcactttcggggttaaattaggaaagtttttgggtttatcgtcagccaaaggaggatagagggaaacccagaaaaaattcaagccctcttaaacatgccttctcccaagaagcacaaagatgtgcaaagtctaaccggaaaagttgctgccctgagccggtttatttccctatccatagacaagtgcattcccttcttcaacattctgaagaaattgagcttgaggttttggccattagtctgccaggcaataaagacgccatcatcaaagcgcttagtgtagtgcttgcagactaacaggggccaggagctcatcccttttttccttcttcagggcctgatctttgaaatccctatgctccttcaccccaatggtcaagatggtcgtcgtctgcaagtcag

SEQ ID NO: 263625 - DNA, 4573 bp, Cannabis indica
  modified_base (4564)..(4564): a, c, t, g, unknown or other
gattaaattgtaatagtaaaatacaattccgaacaagccacacttaaactcaaaaacgaccaacggacttgataagagaaaaaaaaaaccctctaaaactataaatttagaaagaaaaaaaatcctaattttttctcatattgttaatggaagttatacttaaaatatttatatacacaatttatttgttgcattccactgggttttgaatcagaatcaatttttgtttttgaaattttatattacttttgaaagagtaatatatatatatatatataatcaccacctaattaaatatagttttgtttattttgaaattcatgaaaaattattggtaacaattgtttgattttgtatttgttacggctgaaaatttggaacaacatagaactcaactgagtttgtttagttcatgttaaattcactattgactcgactaatttgttattatttaaatcatttttaagttagtaaaactaaaaaacacaaaccgttaaagatatataatattattggaaaattttataatggattattctaaaagagatatattaatgcaccactatctattttagtattgttgaaaaaaaatttagtctatttctttttaattgtgtattacaaaatttaataggattcaaataatctgttgtataggtgtttcttttattttatatattgctttttatattgtaatttattttgaatccgaatcgacttaagctaaaatggactaagcttgatccacccatcttaaatatacatactttttttaatattttttaaatatactatttattcttatataataaagaactttttttaatcataaggcaaatttcaactcagtatggatcatgttttgaattttttataattttacaagatatcttaagtatatcgtatacaattataattttttttttttctgaataccaaaatagaagtgtatggttacaccctataatattttatagttaggtataatatcaaataatattatcgtaaattaatagctatttttcctccgatctatgagtatgtttgaattttactcttgaacttttcactgtaacttaaattctttaaaaaaaattatgttagtcaaaaaatctatcatagttatagaaatgcaaaaatgtcgcgcattttattaactttttaatataatttgtttaatgtgggtactaatataatgtgttataatttgagaatataaacaaaaaaatacatttatagattatatggtctagtaataatattttaaaatatgtatttgtattcttagaattaatgttagtatatatttaatgtaatatgtttttttaaataatgaataaatattttattgaaaaataatatgaacacatcatgaaaaaataatagagaaacattttatttagctaagtgtaatttattgataaatcataagactaaataatttgaagcatattatcatgattattttctattgtgtagataacactataatcataaataataatatattctggatctaactgaatttatatgctaacatataagcataaaagttacatgtgaaccaaacaacataaaataatttttaatcttttattaattaataaattatattatattaaaataaattttatttaagacataaaaattgaacaaaaacttggtcgctttataaatagacttgtatacaagcatcattaacatttgaagtgccaaaaaaacctcatacaggagtataatatacatattaatacataaatatgtataattaaatatgtgttctactcaaatcaccatctaagaagaaaccaaagccctaaccacctaaggccatctctaaccacaaaacatcaaaaatactatgggttcacattaagtgtaatccaactagcctacatacccaaattctgaaacgagattgtctacaatgtcccatactaaatttagttgaaaatgtagatcacaatagttttcttcgttttaatactaagtaatatatttataattaatttatttaaatatacataatatttgtatttttttatggagtactatttgtatttaataaatagttttacatattaacgtaaatactttttttttcttttaaaaataggaaaaaaattctattggcgaagagggaaaacatcaacaatccgaaaggtcaaaaaaacatttatttagtattctcattagtgcataagtgcactctaattccgaagcatagatttcaatctttgcacatgaatgagccactagaaacagagagacatgaaccaatattataacagagaaacaaaatacaattctataaaaaatagaaagtagacactctacacgaaagtggacgaactaaaactataacaattgaaacattattgaaaatataaaacaaacttataaaaaaacacaacgaatcgagaacattcgatcacagccaccaccaccctcaagcaagcttcacccacctcatccctcaccactatcaccaaatcctatcccccaacaccaccaaagtttcaggccaacaccaaaacatggctagctgaccctccacaccacacccccacccatccacaagaggctcaatcccaaccacaacaagtctctcgacgctagcggggtcatcctcgtcatcataatctccaaccaaaacagagggttgttctgaaccatgccatgctacttcaaccctagctataacacaaatccttttaacctatgaagaccatgaaaatcaaccacaacccatttcctctctgccagggcaaaggacaccacacgactagatcgacagtagcatcaaccaatagaaaaaaccctcatactaaagcgtcagctaggagttgatattattttacttattacaattagattaatgttttgttattttttctattgcaattagaagaaaccctcacattaaagcgtcaactaggaattgatattattttacttattacagttagattaatgttttgttatttttctattgctttgtagttatatttttattattgttttatatttttcgttaagtattcttttaaggttattttttagttttactgaaacatagtatttttataattttaaacacaataattttataaaattaatacagtaaaaatataaaaaatatcgtgttagagtattgtttgtaaacttttttctattttataatatttttataaatttcaccttaataattatatattgtattccattaccataaaactgaatttgtgagaaagaaagagacaattgaatgcatgttccctcagagaatctttggctatatgtctaaaatgaaatggtgagcttttgggttttagacagtgactcacctaacccaattggaatgagtcaatgaccctttaatatttggcctaaactcattaaagactaattaattagtcttattatggtctgactttttgttcattggtcggctatctttgtcagtttggtcagtataaattaataaaataattatactaaatcttattataatattctcattgtcataaattaattattattattattattagattttatacttatatcatacataaacatagatgtggacttgtactctaattacataaataaatcttattaagaaattgagaaattattaattggtttttttttaatatttctacataatatataatgccaatactaagaatctttttgactaatataaaaggcttaattaacctaatcttaattgtttaagttaagagtgtcttggcacgttcatatgtttataattataatattataattatatatttatataaatcttgacatgcatggtttagatttgtcccctttttaaataaatgaataaacattaaaatatatattataattaagatctcaaattaaaaaattatgaaaaatatatacaaattccaatcgtgcttcatttttttattataatttttattcatgcatcaaaaaattaagattaattaggggagtttttcagatagattggggttttgaatgtgaagaatatgaagaaggttcatcaattaattatagtacgatataaattagaaactaattgacaattatataaaattaattcatttattaattgtgaattaatttaaatgaatgtctattcatgtttaaagtattttaattcattttgtttttttgttaaatgtaacgttacaaggcattaaaaaggtcatgcaggttattcatgtatataataaagtatttatatggatttaaaaaaaatatttttattcatttattttttgtaataatatatttgaactgtctaaagatgggagctcagattttgtcactattattttattatttaatgtgtaaataaaatgctactaaaaataaatttaaagaaaaaaaaagaaagaaacaaagagtcaaaagtcaaagacagctgtatatgtatgtgtagaaatttaataaagaatggtacggactgttttgttgggtctcatagtaatactataactgttgtttggtagactttttaactataaatggttaaaatacatatcatgggagtaaatatctnaaaaccccc

SEQ ID NO: 263626 - DNA, 3704 bp, Cannabis indica
tgctataagagatggtatgtttttccttatatttgcgagatggtaaaatgggacaggcgtttgggttggtatagattgtaggttctcgtctgccataacaaaaaataatctgctcatttgcaatgaatttcacagagacaaaaatgaaaaccaataaaatattattttgtttagagtattaaatactcatttcttgcctttcctaattcccagtggcaagttggagagtcaaggagacagagagaatgattgccatctgcactgaactcagaaaggttagtttttatgctgttttatgtacttgttatatcatgcgccttggaatgtaatagctgatagctatctgttcttatgggaacaaacatttcagcttggagcaacagttgaggaaggacccgattactgcgtgatcactccaccagagaaactaaatatcacagcaatagacacatacgacgaccacaggatggctatggcgttctctcttgcagcttgttcagatgtgccagttaccattaaggatcctggttgcacccgaaaaactttcccagattactttgaagtccttgagagatttacaaagcactgaatgagtatttattaactggatagagaacaatagcatcggctactgtcattacaactaaagcagttgggaggcaggcaatccttttcaattatcatgtgtttgattttggtcgattgtattgcaagttgagcttctcattattattaagactgtaatcgtagttatttgttgtaacttctgcaaacccttcatgttattttttcacccttctaataagccagtggggcaaattctatatctgctatatgagcttgagtgtagagagaacttttgtcaatgtataggtttctagcagaagcaccatccctaatatgctttattatgatcgtgtagtcttgaagcaccatccctaatatgctttattataagagttgctgtgatcgtttagtgttattttattgaaagtaaccgactcatctcatattagtaagtcttcgttttgcatttttcttgggcatacagaaaaagcaacataaaattctagaatacacagcataaatttatgtgaaaaataatgttgaacataattgtgtggtttagtataatgtgagatatctattcaaaaaagaaaaaagtataatgttagatatctggagcatgaatttcagcattactcttcattcttgaatatgtgaaagtgctttcaaataaagtaatactgagcttcaaccacgtacatgactagcaacccttaaattgctatatagcaataagaatatttagctttcttcttaatataaataagaatttctttgtgttcaatggaccttctgctgtgagatccaatggcactggcataaacaaatgatacatcaaaggttacttcgccatgcattctagccacgtttggcacatttttttacagcaagattggagtgtattattttttgaattgtcataaaagaaaaaaaaaacatatatatcaacgcatctccttcttaccaatgctcttacaccagaacaataaatttgctgcttaaaatttctgcaccaaatgaaaatgtatttcttctagcagaaagttgaaaactgcagcacacgtctactgcaggaaatatcgttattctaggctgccacttcgcacttgctgtgtattcagatatgaaaatacccaatatcctatgtccatcttcacagcagtatcatatccgagctgctaaagtatgttaaattccccaggcaaagaataaggggtatatttcttgaaatgaaacattacaatcaattgagtgtatactacctaatgcagagacagttccaccagaattaatgattctcaaaaggcaagagaatagacatctcctgaatatatatgcaaagatgaaatgttcctcctgatgtactcaacatgggcaaggctaagctaataaccacatataaatgtatgaaaactagtgattttttatcattattagtattatcactatatagtgatgttaatattgaatgatcaccatcaattccagtgccttcctctccttttggagaaaacacacataaccaatgtgtttaaacattaaatacaattttctatacaataaaagatgatcccacaaatagaagaaaaaaaaaataaagaaaattcctattgagacaaacaccctttttatacatgtacatataaagatgcttactctttcctttcaatttcaaccatttcatcaactttactctctcttactcttactgctagaattccaggccttattgctaggaaatgtgtcaaactgtcaaaaaccaataaatagatactgcaaaaagtctaacctgttcgagataaaataaataaactatacagtaatttcaatggttaactatttgatacttgagcttataaaaaacagaggcacaacaaactagccatcataatgaaatatctttccaacaaatgcaattcagaagctgacatgacagccaattgaaaatgaagagcattagatacgactacattaaaattaaacactattattaaagagcataaaatgataagaaattggttgctcaaacactaatagtttcacaaatgaaataaaaggtacatgagcattatcacataacagtcatggacataatctgacgagcaaggccaggatcttggcttaacaactccctcaagttggtctccacttcggccctttgtttctccaaataatccctagaggtctattgtcgaaattaagaagaaagaacaaaaaaaaaatgtaagcttaaaatgtttgctagtgcattggagatcaaataccaaaaaatgtaaggttacataattcataccgtgagtgaggcaatagcagtctcactatcctgaagcttcccttgtagttcattcattaagaacgacttaggctctaaaacaaacctgcccatcaaatcaaaatgaagaaaagttttttaatttcgaatcttgaatttaagcggtggatttgattaagaagaaactcacttacgttctccctgaaaaacgaaaaacaaagttaggttaatacaaagttaaattgaaaaagagagaaagaataggaagatgtttctaagttaagttaccaattgatttataggtatttgtgtcatcggacacttgacgaagctcctccaaggtcaagaaagctctcttcttttcaccttctttgccgcgcaactggttctgcacctgctcatcgtacatatatatttatatttatgccaatacaatatgtaaatatatgtagctgtaactgtaaaacaagtccattgagaaagaaacctgcttcagttttgcggagatatctatcatccgaccttgaagctccaaaaatgcctgtcatattcatactaacactgaaaaacctcaaagatcgaaatttaaacaagcagaggaaaagagaaagagtacatacggttctgttagattcgtcagccattgttgctcagacttgttaatgagaaagaacaacaacaatagcaagatacgaagacgaagaagatgaatcaaaaagaagacaaaccatcgacctctgggttgggttgggtactacggcccaattggtgtatttggcccataagttatactacggcccagctggcatttactctttacttccacgcgtataaaataaaacagggggtaagttgaaaaatgcct

SEQ ID NO: 263627 - DNA, 675 bp, Cannabis indica
gttacccatgtaaatggctggacacgcccttcgccccgaaccaaatggcagcagctcgaaatgttgacctttgatatcaatggaactatcctcaaatctctctgggatgaactcttcagggtccttccagctgttggggtctcttccaatagcccaagcattcacttgaatcattgtctttgggttaatttcataaccattgacagtgaagtgtgacatggtctctcttgcaagaagcagaggagctggagggtgtaatctaaaagtttctttgattatcatattgaggtattgaagctgatcaaggtcagtttctaagacttttcctttgtttccaatgcaagttctaacttcatcttgagccttcttaagcaatttaggcctcttgattagctctgccattgcccacaccatggtgattgcaccagtatctaccccacctagaaacatattctgcaatcatagatatattagtactcaagccatgattggggaaactcaaagctcagccaagtggctagttaattgctttttgtcaaggataaaaataaaaacagatggaagagcttaccaagaggactcctttgacattgtttatggttagagaagcagcttgaaaaccagcttggtctttcactattttgagaagcacatcaacaatgtcttcatgctctt

SEQ ID NO: 263628 - DNA, 870 bp, Cannabis indica
aatcactttgtttatgcttttttttaatttattttctatttttacgactttttttttagatttttctatattatatttttttaatatttaattttttaaaaaatacttttctatttcaattttacggtctcttgtttctattttctgttagaaatttattgggtcacaattatatatatgaaatgtgtgttgggttatcaaataaataagttaaatttatgtggtctattttagaataaagtttatgacttaagggcataattgtcatgattttaatattgttgatactataaggacaatttctaatttgatgaggggccaaataaaaatagtcaataaatattactaactattttgtcagttggtaatataaaccgtaatggttcccaatttgcagtttcctatcttttcattctcttgaaaccccatcatcaagagataaatgttacaaagaaagatttgactgcaaaattagaagatcataccattacaaaatcgatgatatggaatcggtacgcttcccctcctctctaatttattgtttgattctcataaattaattaggagtaaattttgatttacagtgttgttaacatttcccccaattcttatgtcactcactcctttcttatttttattctttgtcttcttctaccctttggttttgctaaagaccaccagagaccatatcagagaccatttgaagccaacaccattgtgacagttagtagtcccgtgatctgtaaagggaaacatcgggtaagctatacaatcccacatcacctgggaaaggtcaagtgtgatgattctgagattgtgtaggtatgagactacatagttggagagagcttaaatggattgattggtact

SEQ ID NO: 263629 - DNA, 1940 bp, Cannabis indica
ccaaatattgtagttgaataataacagtaatatttgatagtataatactatttactaaatcttttccttatacactcaaaaaaaaagtctttactccctaaatttctaaatccgaagtaaatttatttatcttattatcaaaatgatatacaattatgataagacagtatatatttatagagttagggatatgatttagctacataatccaagttagtttgggtctgctcatcaacagtttcagttaattagaaaagtctatacttctgctttaattagactttatacacacatatgctaagtctattaaatattgatcattaacaatatgatcagctaatacaacaaataactatccaatctaatgaagaaaaataaaaaggttcttaaaattattccagtcaaatgagtatatatatatttagtgcaccgtgacttcaaaatacttgaagaactttaacaaacaatatttactttgggcagagactcgtgctaataacgaattataaaactattaagtataatataaaataaagaatacaagaagaagatgaagagagaatgagtaagtgaatgagaatttctactagtttatttcaattgggtaaactcttatttatacatgaataagattaggaaattaaattaatataataaaagaaaatagaatcaagcatttatggtgattgcgatgcaatataaaggattgctgccattagtcatttcagagaatcaaagtgtttatctctctaataaactcatcacagataatgtattagtggcctttgagataatccatagtatcaagaataagaaagcaggtgcaagaggggttacaacattaaaatttgacatgagcagggcatttgatcgagtagaatggtcttttttataagcgatcatgataaaaatgagttttcaccaattttaggtctcactcataatgacatgtttatcatcaacctctttctctttctttttaaatagtgaaattactggttttgtccaaccatctaaaggaattagacaaggagacccactcttcccatacttgtttcttatttattttgaggggttctcaaggttattgaaacatgaagagcaaatcgaaaatcttcaaggccacaaaatattgcctgacatgctccaagtgtttctcatttattatttatcgacgacagcctgttattttgtcaagccaatgaacgatagtggaatgcaatcaagagaatcttgaacatctatcatcgtgcttctagtcagttcctgaatgcttcaaaatcagtaatggccttcagtccaaatacaacactagcaatgagaataattatttctgtaggtgattggaaatgcccctaaaagaatgccatgagacttatttgggtctgccatcttactcagaacaagataaaaagaagctattcagctaaataaaagagaaaatatggaagttacttcattcttggcataaaaagctcttctcagttagtggtaaggaagtacttctaaaagcagtggtacaatcaatcccaacttacgccatgttatgttttcaattaccaattaaattttgcaaacaaattgaatccatattggttaattttcggtggggatcaaatgttgatggatcaaaaattcacttaaaagctagaaattcttatgtaagaaaaaacttgctagaaggttgggatttcgttattttattcatttcattcaagctttattggctaagcaaatttggcatatttttgacatgcctaaatctttactcagtcgtttacttaaagctaaatatttttcacacaacactctcttacacgctcgtattggcaatcaaccttctatgacatggagatgtatttgtgctaagagatatttattaatcaaaggtctcaaatggaaaataggtactaacatccaagtgttatgccttaatgagc

SEQ ID NO: 263630 - DNA, 959 bp, Cannabis indica
ctggcaagttggaaccaaaaggtaagaactcagattaattaaaacctatttatacatcaaaagttttggttccatttcatgacagctcaagcatagtttttttgctttttcattttctttggtgaaattacataatcagggaggacacgacagatttgaccatgatgattggagccatgtatgtagccgtgttgtttgttgggatcaataattgctcaactgtgcaacctgttgtggctattgagagaacagttttctaccgagaaagagctgctgggatgtactcagctctcccctatgccctggcccaggtcagtgattactaacattaaagttgctatgcaatggaacaggaatcgaatggaaaattgtgtttttctttttggggtaaaattaaaactgaaacaactcatgtttggtgtaaaagtttggttaagtctagagtacactcttttaaggagtgtttccgtagactttctacctatttcaatatcaagataattttttagtctaattttttttcataattgcgtatgttatagttatttaggatcacgtgtaaattttcaaaaagttctgaataatttacaataacaaaattaagaattacctattttgttggacgcgcgactatagtaactatttaaatcttatttttaacattgtaaattattcgaaattttttaaaaatttataagtgatcttaaatagttacaacttacttaatcataaaaaaaaaaaattagactaaatttttttctaaatatcaaaacagataaagaatctactaaaacgatcatttatacctccaaaataaacttaaggttggaccctacacaaacataaatcctgcacttaaattatatcattggactgattttacagattttatggatcttaagagaagaaaaaaagttaaatcgttggccctcgtgtataagaatatatgattttttaaa

SEQ ID NO: 263631 - DNA, 789 bp, Cannabis indica
gacaattaacaatcattaaaaaataagatgaattaattaaggaaaaaagaagacagtatttaactatgaatgaaaattactcaaaaatactatttaccaacttttctatttttataatgatagctaaactaggattggttgagttagcacatgaaatttgatttgtggctaactgatagatattattgttagatgatattgattgtccccattattttttttaaccattttaacatttaaaaccaaactatatttaattataattgacaaataatttgagacaaatcgagtaaaaaaaatccatcatggaccagaaagaaggtaaatttgctatacatcactgatgactcctcttgaaaactatactttcagaaagagaaagaatggcatgctaaaaaaaagttgttgagctaagcacgttatgtgatatcgacgcatgtgcaattttctaaggcccgaacgatggagagcactcaccaaaggtgtttccgtcgatggaggaagcccattgtgtgttaacaaggtttcaaagcataacaaagatcgagcaaactaagaagatgtcgaatcaagaagagtacctaatgaataagatcgataaagtgaaatagcaggaataagtctactcagatgcctgagacaacaacagcaacaacacccataacaactctagtcctatgaaaatcttgttggagacggaaatgctactatgattgatgttgttgtgggttttgtgttctaaataaaactcaattttaatataatcttatatatttatcaataaaagat

SEQ ID NO: 263632 - DNA, 787 bp, Cannabis indica
ctagtaaaataatttccaacaataaaatattatagatacttttggtttctccctgtaaaagatattactacttagtaactaattatattgaatttcataataatataaaataatttcggtataaacaataataacttgtatcaaatttatcatggtatatttttagcatcttcctttgaatatagctatacttatgtgacaatcaatacaaattgtattgatttttgtttttatgggagaaatacttatgaaaataaattgataagttttacatatatacaaattattgaattaaaaaaaaagtataaaaaatgacaagtaaattttgaatgtttgttataattaatattagtaataatttccaatacatgtatgtgaatatatatctcatgaaataatgcattaatttacataggttcatttttagtttaaacaacatatatttttttcaatcagacaaaaattgatctattctaaaatttaaaacaattgtgaccaactcaaatttttcccaataaaactcttttcttgtgtataaagaatatgataagatttatgtatgttgtatcattaagcatatataactgaaataattacccaatttcatacatgataagaaggctagcattatgcaacattgttcttacattctatcatataaacaattatatgaaagtcacttcaatttataacattttatcattgcatcattctttttaaattagttcattttatctttttaagtttactatcgttaaataaataaatatcaatctaatttaacaaa

SEQ ID NO: 263633 - DNA, 557 bp, Cannabis indica
gccaaaaaagttcaaggggcacgatttagtacatgtcaaaattcagggggaaaaattactaattagcctataattttgttagcatatataatacacatattttaatttaggtacataattttattgacatgctacatatatttaattattatttttatatattttaattgtatgatatattatttattttaaataatatttaattagtttcgatcttattacatacaatggtaatatataattttatttgtcgtggtatatatatattttattgtatggtatatatttttgttatgtatagtatatcatttatttaagatgatatttagtttctattttattatatataatgattaaaaccaaaaaaaaattggtatggtatacatattataatagtgatatttataattttattagtataatatatatgttttaagtattaatttagtattgttataattttttttgtggtatataattttaggagaattacgtaccctatgtactattttcttaactttttattatttcaaatttacggtttgagtttctaaagt

SEQ ID NO: 263634 - DNA, 1594 bp, Cannabis indica
tagttaactgttaagtgccaaatcattaatttaaatagttgtgtaattgtactgtgaaaggcacctgccacccgatcattttgcctgaggccctttctttcttattttttgtgttttgtagaggagtgagtactccctttcttcttagacattttaacgtgcccaatactacaatggtgctttataagtggttactaaagacctaaagctggacttatgaaagaattgttagaaggatttagtaactaaagcttacaaagaacttgaattcgtgtaccaaaagactgaaaatatatatataagacttaacttcaaattatttttatttaattttaaacgtgtcaaaatatataagactgtacatctagagaatctaacaattgagaaataacaaattttcaacggcaccttaaacttactaatagaagtgaagtttgacatgggtttaaccgtctataactctactacaagtacagataattgctagcaaaactgatatgaaattcagtatattatacaacaagaagaaacagtacacgtatagactaaatagaaaaatcagtatattatacaaagaagaagaaacggttcatctgtataaacagaatctaatggactccgcagacaacgcattttgtaacactaaaaagacacaccaattccattccaacctttgatatctgaatatggcagttatgacacatcgaaagatgagaggaagaaaataaatcaaccttcctcccagtccacatcgtcgtcatcgtcctcttcattatctgcggtagcatcagcttcaacattcaaatccaccttgtaaggttcatttgcatttcctgttacagacaatatgtccatcaaactcaagactcttgaagatgaatatttcaacagatgtagatatataactttctgtttctcaacaatcagtcatcagcgagcagccaaatgcaatgttcaattaatgtttattgataattgatctataaattaacgctttgggcctctagcgaggaacaagtttagtgacaatggcatttcagaggataaatgcttcaattccaaaactggaacaagatttgttagataattagatttacctgcagcaactggggccgcttcttcccattcaacatcttcctcaccttcatcttcaacccttttcgacttcattcctacctgacgactagaggatgtactggcttctccatcgagcatttgagcgtttgacaattcctcttgtttcgtggctgcttctagttctttctgcttttctagtagagcagcataataagctttaacatattcatcctacaacagacagaatcaaccgcaaaatattctttttgtcaggtggaaaatcagatagcacatatgaaaattaagaaaaatcaagacaacattccagacctggagatttttcttatcatcattttcagtaatagattttttatcctctgaggtctctgtagttgacacgcctccatccatctttgcctcttgcttgacctctcctccacgttgttcttttgtaagattcatcccttgcttgatcatccacggcggtaaaacttttagacttgtatgatcaacttca

SEQ ID NO: 263635 - DNA, 565 bp, Cannabis indica
agattttagctgattgggatacaaaaaaacaaaacaggtatagcaaatgtggtcaacacggacacaaccgaaagacatgcaacaatcaagcaataaaatagatacagctgattatttgaattgtttaagtctctatgagaattcacacatgatgatatgttatgtttgaaagactgttattatttggcaaagtttaaatagtttgctagcagttgcataatagtttcatgacagctttgacacttgttaatgtttaattacgaaaagaatttcaatattacaatttttaaaaaagtcagatatgaatttataaaatatgattaataacgataataaagaagttgcataaccataaggaatacattgaggtaatatgagacaattaaaattacaagtatgctgaacattgaaattagtttgtatacagttgcataatagtttctataaagttgtacgactttataaaaaaaaaaaaataataaattggaaaaacataaaactcatgctgatacaaaacataaaaaaataacatataataatgtttaatgtcaaatatcctaaaagt

SEQ ID NO: 263636 - DNA, 4393 bp, Cannabis indica
tctaggggtggagtagtgatggcttcatgaaaaaagatgatacatctcattacttcagagaaattctctagccgccacctctctcttcttttctcttcaatttcgaaatccttgagtgatagagtagtgcccacacacatcaagtggtatctcaatcatagggtgtaagactgtaggagatttcaaataacaagaaagagaatcaagaacaaaggaaggagagaaagagatccaggttcagatcttagtgatgctctgctacagaaaggaatcaagggctagagatctggacggaaggagtcattatattccgctgcacccaatgtaaggtttactaaactttatatgtgtttatttcattgttttagaattcatattaggatgttaatgaaacatatatgctagtaaatctagatcctggtaaaataatttcaaacaccatgttctttggccaccatttccactaagggttcatcattagacttcactagatcctcaaacttactctccaaatgctccatcattttcttcactttttcaatgagcattctctactctactaactctgcttgagttacctctaagtcttttgttactcgcagtaagtttgggtcaacgtcatagtaataaccatccttgtaatacttgtctcttatgtagtcgtcgtcatcaccttcttcattcccgcctctagggttctagccatcgtcgaggtcatcgagcacgttctggatgtcctccccaaaatttttggtgtgggtcatgccctgctttctaacaccacccatttggaagtcgaaggcatgagagtcggcttcctccataactgtgtcaaatggagttttcttgctggtgttctttcgtgtattcaccatagtcaaagtgagacaacaactaataatctttcatcaactctcaatgaaatcaccaaattgtttaccgagatttttagaaactgattaactagagcttaaaaaaatataaaataataaacgatagacaaataaatttttatgtggttcaggcattaattatccctaatctatgagtctattgtattagccttgtaggcaaatgtttaggtagtacaagtatttacaatggtaactctgcattcctctcgcttctcttgaagaagaaagctctataggaatttcagtagagtttttgtaagtaaaattcttcacaccttattcataaaaaaaataaaagtatttataggtacatatgatggtaagggcataccctttaccaacctaaagttttgtactctacatattggaaggattggtactacaataggacgacatgaccgttggttgataagaagcttcccctatcgtgtggtgtacatttgtagtgagggattttttgcgtactaggacacatgtcgcacaaaggtttctcattttttgcgtacgcacactacaatgatatgacatggtggacaagatctgatcttgtgtcagaaaatggtgtaactgcctataaattaatttccatatggtgctgacgtggtattggccttgagactacggtcatgactcgggaccactccgcaggaggtctccacctggaggttatttaagttaattacgctctaggtcctctaagaattgggaccaacgggagatctgccaggtcccgaagatactatttgtgttgcagatggcttttcccatcagatgtccattgccggattaccaagatatccctccgaggaattttataagttatctcgattaatcatgtcaactaatacctttttttttaatcatgctacatttctcttgcttgaaaacacggataacaatatttatttaaactttattttgaacattttaaactattcagattcttttgaaaatatacaatttatcttaagaaattataatgtacacactatcacggagaaaatttaattaaaaaattctcttctatgccaaaccaaatataaatatttaccaaaacacccctttagaaggtctcctaaatatttttctaaagaacattgttattaggcaccaaaaatacttatcaaggtatagttttataaataatttattcgattataattattgaactaaattatgggcccgatatttaattataactaataatagtatgatacttctagatatgctattgttgattttaacatttcactttgagcaatttgtgtcataaatacttaaatttaacttccagtcgtaaataaatatataagtttaatgtttagcggtaataatacctaaattatatttctggaactctgggtacctaactattaaatatcaaataattatctatgtattatatttttattggtacatataaactattttttttaaaagaaaaaaacaaaatttaatgtcatgaaccaatcaagaattgttacatggcaatttatttcacttaacatccaattatctataaaaatttcagaaatatagtttaagtatttttacaattatgtggtacaaaagctccttgtataatccggtagagataaaatcttaggttctttacggtttgccaatgaaaattggggattaaggaaggccaagattaagggtgtatggaattttgaaacatatatagatataaataaaattaatttctatggagtatcggccggtgtatcgaaaaagacgagtcagttattctccagccaaaactcggtggcgtcaccttggaatagaatgtagtcgtggcaaagaacatcttttaattttcagccaaagaaaaatggatgaacagtacttttcttatttttttcattttccattttaattttctgattacaaatatatactagacatggtgaaaaacaagtctcttcaggaaaataagggacggtgaacaaggccttactttttggctgtaatagtgtttcatttttttggtaaatttgaaatcatatgcaacacgtaatatatttgaatttataatttgactcttattttttgagactcttactgtttgggtaataattcaaattgctttggtgactgaggattcaaagccttcggtttatcgattctggtaaaaagatggtggaggagctcctttgttccattgacgagggtggtgacgatttacatgaagctttttagcgttttttttggtaatttcatatttacctttattattagaattttcttcattttttttatctttattatattattaattaataatttattacatatatatacattaatttattacctttggtagcgaaataaagggtaaggtttttagtgttttttggtaattttttaattaccttctttattagattttcttttattatttgttactattatattattttaatacttttatattttaataattttattttattacatttattataacattacgttttttttacaactatctaatattattatatgaatttatttagttttactttggtgttctcttctatttatttattaggtgagttatgtaatattttttcttttatatttattgttatcaaatctattttaagaatatatatttctatatttagtccatttttaattttaattttttctttataagtgcatttattgaatttataatttatatttgattatattggcatattttacttttttatttctataattaatttagcatttaaaatatatttatgagcatttttaaattttctttattgctactttaatgtgattttgttattattatttttatttaattttaatttactttagatatgctttcacttttatacacagttgttggcaataattgtgtgatttactctttaattttagttttgggcgaaaggatattaattgtttgggtttgggtattaatatttaattttattcaatttaaaatattattaatgttttttcttaagtggtcaacttatttccattttatttttatctattttatttaattatgtttaaattttattgatacacgcattagacaattgaatgttatatttttcctaattaatcttgttatgattaatttatagttttgttatataaatctgattaaatattttaatatttttattctatgtttgttttgatttgtttctttttactaactattcaaatagtattaatatttgtttaaaagtatatatgagggcacacgggtttttatacactattgtttatagttttgataacttttacgacttttgtgccttttatggcttttgtgctatttttatagtttgtccctatttgtttagaaatagttttgtggtttggtcaattgacaagagaagtgatcctgtttgtgctcatgatttctatttcaacgactttttctcttttgacagataagtatttcaagtttaagtacttatattaaatatggattagtttactat

SEQ ID NO: 263637 - DNA, 557 bp, Cannabis indica
ttatttttttgagttaatgattctctatgtacgtacttagatatgttaaacagtggttttacaaaaaaaaaaaaaaaaaagaatatatgtgaaacagtgattaaatttatatatgaattttctcaatttttatttttggaaaaggtttgtaatattacactgaaaaattatatacattatttgcatgaggatgatctaaaattttgagttttgtaaacagcataggtctaataatttttaatatataataaaagtgtaatttttcttcaattttatcaatacagacaattacgttcaaattatcttttaataaattcaaaaaaaaaagtctctataaacaaattaaacaaaaattatagatttacaattggatatgctactaaaaaatggttttaattacagagggcattttaaaaaatactgaatttgggttaatacttttcaattttactgtcacacggcagatgttacatttatactgtattccctctttttatactgtaaataacaaaaaaaaaatatgaggcctttatctttcacaaccacagatagaatca

SEQ ID NO: 263638 - DNA, 883 bp, Cannabis indica
cggaggatgaaagtcagcacggaaaacgcatcttggtattgggcgaatttcaaatacgaaaaactcccaaccttctgtttcatttgcggtataatcgggcactcggaaagattctgtccgaggcttttccttaagccattacacctccaggagaaaccttataatctgggcttgagggcttctctgcagagacgtcactcgaccttcggtgcgcatggctccggtcaggagcggtggtccgggaagacacaaggcagagtgttgtcgtgaataactctgagcagggagttaatttgtttcctgagaacatggagcaattggggggatcggctagcaggaatcatggacatgatacaaatcccattgatttatcaagtgacaggcgtccttttaggaaggaaaatatgggagttaatgaggaagatatgaccctgcatgtgaataataatggtaatttttttgattccacaattactacaattattgattcaaaaaggagaaggccagactctagtgaggggggcaacgtgggaccacaaaacaatgctatccctgataattttgatgacatggaacaagatatggtgggtctaccaaaaaaatgggcttttggcgggtactggtttccaggcccgcccagagttatgagttgtttgagctggaattgccgtgggcttgggaacccgcgggccaaacaattctatcggatcttgttttccaaaagaagcccaatttgttattttatgtgaaactttatgtaataaaactagcatggaatgtatcagagtccatttgggatcgaaggttgttttgttgttgatgctcgtggtcacagtgggggtctgggctttattatggaaagatgtcaaggaggtggtaatac

SEQ ID NO: 263639 - DNA, 2293 bp, Cannabis indica
aaatcatgttcatcacaaaaaaattctaaggcatcattgtcaaactcaccactgtggtcactcccaacggaggtaatagaatagcctttttcattttgcacactcttactaaatttgataagattttccaaaacatcacttttaagtgtcaagaaaataacccaagtaaatcttgaaaagccatcaagaattacaaatgcatagtatttacaacgaagactagaaattctagaaggaccaaataaatcaatatgaagaaatctcaaaggtctagtagtttaaatctctttcttagaatgaaaagattttttaatttgttttccaaattggcatgcatcacaaagtttatcttggacaaaaggaatagatggaaaaccaataacaagatcttttctaactaattttgagatagaatcaatactagcatgtcctaatcttctatgtcataaccaagattaggacataattgactaatactaatggttaaacatttatttttactataaaatgaatcaacatcaataacatacacattatccttcctttctccacgcaaaataacttcattggtagaagcactttcaatggagcattttgaggattcaaagataacacaaaaacctttatcacataattgactaataataagtaatttatgttttaaattatcaacaagaagcacattttttatgcatagagagtatacgttaccaacatcaccaatgcccaagattttccctttcgaattgtctctaaaagtgacaaagccacttttcttgcttttaaagcttgaaaatctcgatggatcatcgatcatatgctttgaacatccaatatccaagaaccataagcttcagctctttcttattgattcctacaaaaacaagttcatttgttggcttttggtacccacataactttgggtccttttttgttattctagaaccctttggtacccatttagtcttgcctagatatatatgcatatttcttcacatgaaaataggaaatagtatggccatcttggttgcaatatgtgtatgtaaagtgaggtacactagatgatttaacaaaaaagtttcttaagaacttttgttttctactaggatcataagcaatgccactttatgaaaaaccacatgattggcttcctagcatgagatcatgaccttctttacctatagtgaaagtatatatgttattctttaggcttttcacataggcatttaaatcaacaatttctttcttatatgaagcacatgtagcacattgagacttacctaaaagttcctttcatttattttcaaaatctcaatttcttttaaaatcatgttggtcttctctctaagagttttatttttaacatgcgatttaccaaaatcatcaaatagttccttaaatgaattagacaactaatcatatgacatatctaagttatcatcatcattttcactatcacaatcattttggctagaaatacttaccccatcatcgagtgccagcatgtacatgtttgctccttcattctttacttcatcttcagagtcctcttcatcactattgggccattctgccaacactgcccttcctttgtatttttccttcttcctcattagacaatcaattttcatgtgtctgggcttcttgcattcaaagcaaattggtagatcaactttgctccttctttcttttgactcactccctctttgtggcttctttcgaaagttctttttgaatttcatgaacattttgtatttcttagagaagagtgtcaagtcttctatgtcactacataagctatcctcatcttctttactaatttcatgggaggaggaacacttgcatgcagtagtcttctttttcttctcaacttcctcttgttcttgagaagtcttgaaaatttcatggttcatgagtgagctgattaattcttccaatggaagtgttgagagatctttggcttaatgaatagaaaccactttcccttgataatccttggtgatacttcttgaaatcttggtcaccatatccttttgagtaagtactatgctaagagaattcaaaccattagtaattgtagtaaagtgagtatacatgttagcaatggttttatttgctttcaacttaaagttctcatatttagtggaataaactttgagttttagtctctttcatagcactagtttcttgatgagtaactttaagcattttccacatatcaaaagcgattatggcttgttcaatatttttgtatatatctctatccaaaccacatataagtgcatatttagct

SEQ ID NO: 263640 - DNA, 1180 bp, Cannabis indica
gagaaaatacaaaagaatttttgacattgtatttattaacatgtttaaaaatgttgataatttttaaaaatattgaaattttttatttattttttacttttatactgtggggcggaatttttttcaaaaatgctatgtaagttttatactgtgtactgtattaagttttcactgttgttctacggttgttttttagttgttccactgttgtttttagttgttctgttttgtgttctactgttgttttataaaaatacagtatttttgaaaaaatttctgtgtttttataaaagttaaccaaaattttagtatttttgtaagtttcacataattatttatgtcaaaaaaagcccacattcttatgtaaaggcccaataactgaatggttatatatggacaggtacaataatatttggaaaattttcaaaaaatacccaaaattttaaaaatataaaaaattatggtaattataaatgcacaattttatttaaaaatacgaattttatttacaaaaataagaattgtaagtttgtaaacaattttacatttttgtaaaaatattttacatatttgtaaatatcttttacaaaaaattacatattgtatatttgtaattaatcacttttgtgaaaagtgcaattctttttttaaaagaaacatggtgcttaatttttgcaaaatatttctctaatcaatatgtttttttttttttaattttgttgacttgttttcatctccactatttaatgagtaagatttttgttctttacccttaaaataaatgaaagacccaataaaattagagaaatgttaaaatacactagtgatgtttagtacttttttacgtgtcaatattgatattcatccaattaagtattaggtcccatataatttaatataataacttttaaggagtattgttagtcaattgcaaactaacatatctagaagtactaaacactactaatacttaatagcaatactcatagaattatagttaatacatcgattaataagtaattacattcaattctaatgagttctattaattacttttcttgtaaggataatttacaataaagataagatcgagagagtaaatactcatagttatttttaagaagttgcattgctattgagcacaataccttctataggtaacaccttacgacttagctag

SEQ ID NO: 263641 - DNA, 606 bp, Cannabis indica
tttgatttgagatgatatttaaaaacatttttcatatgaattagtggggatgaattttgagtgacatttgtgtttttttaagaggacatttgtgttttttttaagaggacatttgtgaattatgtcaaaaaataataaaaagagtgacatttgtgaattagtgtggctgcatttgaagtgatatttaggattttttgaaagttgttggtataatttaatattagattttatttattttaatttaataattattatatactcgtattattttaaagaagaggagtgctagggacactctctcttgcactctctctatagttaaatgacaaatgtcaaatttttaaattaacttatttgtacctattaattaaccataatattactatcttattacaattatgccatcttaattaaattaatacaataattattattccactaatttgattttatatacagatgaaaagttgccttttaatcttctcatcttcatagatattttctggtataaaaaacaaagaattcttcttcaatgaaataaaataggtaattactactcatttcatcttttttttttcaatatatgtattacctcttaaatattat

SEQ ID NO: 263642 - DNA, 1181 bp, Cannabis indica
tacacatatagcttatacaaattatttttagtaacataactttaaaaataatgctctttcaaacgcaagtaattaagacaaacgatacctgtgatcagtacaaatatgttcgggtgaattataaaccaaactttttttctttttgggtggaacaaccaaatttatttaatttatagaatattaggtcatgctattaaaagctgatgtaataaatcatctttcatctggattggctatattgcttaatgagtttaataattccatagctttttcttgtaaagtgtagagcctaatgagtccaaatacaatagttatctataatatgtattacataagattgttgatgggatctttgatagtgagaagcatatagaatctaatccctttattagagtcttcaattgaaagcgtttactatatgccaaattgatatgccatccacattttggtttaagggtattgttggcaattggcatattgttatatgtttataactgaaaaaatgatttgaaggctatatgtgtatattgtctcaaattgaaaacattcactgtctcatagactcatagtatagtatattgtgatcatggacagttacatttgtttcaaatggtttgatcaataacatattttagaaggatttaaaacctgatcatgtttgtcaaaagtttggcctttataatcaactaagtactcatcattggaatgaatgagtttaagataataaggatctgcttgatttgtgtgggaatacatatgatatgattggtaatgaagtagtgtagacatagcacgctttgcgtcttctcaagctcagttttcacatttcctataggatatatatagttatatatattataatatatgatatgaaatgcaattgatttaatcaagctactaatctcagcaatatgtcattcttgtataatataatacagtgtgagtgaaaatatatattaatcattttttattttttacttgatctgattttatgcctttaactgatcgcgttttaccacttcacgtgttgaaaaataaataaataaataaaaaataaatttttatttaattaaataatttatttaaaaaaaaataaagtgacacttcactcgcccgccaatccaacccggctcggatcggtcggcggcgcgcgtgtggagtggtccagtgtgtgagtcctc

SEQ ID NO: 263643 - DNA, 1782 bp, Cannabis indica
aggatgatttcattcttatcacttcataacttgttattactcattgaacttatttcttaggatctgcagtctataggtcgggttaaggaaaatagtcccattcattttaatgttttaaggactttctctttagctaaacctttcgtaaaaggatcagccaagttatcatcagtgtgtacatgatccgctctacaagctcatgtttgagagaaactctctaatagtgttgtgcttatgacgtattggtcgcctcttaccgttgtaataacgattatgaacttttacaatagtcgcgttactatcgcaatggattaacacaactcatattgttctttcaaataaaggatctcaactagtaggcttcttaaccaacacgcttcttcactagcagttgctatcatttcagactacatagtgaactgtgccaaaatagtttatttctttgatttctaagaaatagttccaccagcgagggtcggtcctaggctaaggcaagataggcccgtgcttagggtccactcttatttggggcccaaataatttttttttttaataaatatacatattttttttaataaaagtatcatttattattataaaaaagcctaaaaaaatattttctaggtccaaattaactcaaggtcggcctgtagctatctaaaaatatagccaatggttgccttggaatcatgtaataaagtgttctagtcagcatcactatacctttccaaggacagctaggaaacttctaattgtaaagaccgcctatgaatagtacttaatatattattaattatttaaagtttatgtattaataattatggaatgcatattttaggaatatattttatatatcatatatatttttatgctgttttatatttaattacctaatttctgtgattgtgttcggaagctgtggaagcgacgttgggcctctagagagtcgcattttatatggtttagaatattttcgggatatcattgttaagttttagtggtattggtattttcggggtttagttaatgaccattttacccttgtgatgttttaattactttaattagtggtgggggcaagaaagtcttttacaagacttatttttgtcttattttagttttatttgggctgtgaataagtagtgaaggattttaaaaaaaaaaaaaaagataagatagaaagaaaagaaagaagctttgcttaagcttgaagaaaggaaggaaagatagaaatctctctctctctctttcgattctcttgggcagcagctgggaatttgatttgtgtaattgaattagaggatattggttgtgattgaggctttgattaaggtaattcttcttattttctttctcttgaaaatgttgtagttaaactaggttttggtgtgaattttgggaaataggtggctgtttgatttgggatttgtttaggttagttcctggtattaattaaaggttgttattctggttataagctaagctaagtgaatattttgatgtttgtattgaatttaaagttgtgagttcaattggagctttaatggtgaattgggattttgtttgatttgttgtgatttgtcacttgggattggtttaatataatatatacaggtattctggaagttttgaaaagatttgggattgttttgaattaaggggaagaatttttgggttcccagctcagaaccggaattccggttcctggggccctgttgcaaccggtcgaccggttggtcccaggaaccggacttccggttgggaaccggcctgccggttggg

SEQ ID NO: 263644 - DNA, 1216 bp, Cannabis indica
ttgttagttaacctactttctggtcagggtgatacgtacattttgggaacatggtagtaggattgagtgggagcgctaaacatagatatggaatctatagcttctataggtacttagaagtgaaacgatgatttccttcgagcttggattaatagatgtaaatggaagagctcttgtttcagtgattatattttagttcattgaaatatcatttacaggtagctaagtgttttaacgataaaatacattgaggagtgaaacgataaatttatttctactcggtgtaaattatctatagaggatctttgattattgagattagaacgatcgttaaatgtgatagcgtatctatatggtggaacatatagagcgttctatatgactgagattgcaattccaagttctatgagtggatgcaacaaggaattaatcagttaggaaatttacctgttaagttctagttcagcttattagtagcacagttatataggccgatggtccccattctagttgagaccatactgcttttaagactcaaataattgattttgattaatcaattataattctaaaattagactatgtctagtttatgaattttcactaagcaagggctaaattgtgaagaaaatagattctaggttttatttattaattggaagactttatgatgtctaattaataaatattttaaatgacaatattatttaataatttatttaagttattaaataattagttttgacatttaaatggttagaattgaaaaattggtgtttttgagaaaatagaagtgaaaattgtcaaaattggaaaaataccaagtggggcccattaccttatggtcggccacttaatgataatttttcaattaatattttcattatttaaatgccaagtaattcctaacctaaacctagtggttaccgataaatagatagtgatggctcacaacttaaagagaatgtagaatctgatgaatttttgcctttagataaattgagcctcctatcctattgtctatagccgaacctctctctccctattttcttcttctatttttcaaaaccttgagtgatagagtgattgcccacacacatcaagtggtatctcaatcctagtctggaagattgtgaagaatccaaattgaagagaaggacattcagtctcagattttggtgatactatgtgaaagacaggatacaagggttagaga

SEQ ID NO: 263645 - DNA, 498 bp, Cannabis indica
atatcctcaaatttctaaacttaacactcaatttaacgttatgttagttgatcaataaagtgccacatgtaaatatagtattgctcaaactaatgattcttttaaaaaaaataattttgaaaacaaaaattaattaaaacaaattcatattattcaaaaagaaaaaacgttatatacatattaaatgaaatagaaaatcaattgtttattattttccatcttcttccagccatgttattttcacagtttaacaatagaccttttttttataaggagattaataataaactttgattctagattcaaattctatctttcaattttattttcatatattgaaaattctcattctataaattttctactaatattttccaatcaatgaaacgaaaggcaaactttaattcctgtatgaaaatcaaactctcaattccaataattaatagaacacatcaaatttcaagttctcaaaatctataaaataataaataaaaaaaa

SEQ ID NO: 263646 - DNA, 1132 bp, Cannabis indica
acttagcatcacaaataggaggcatgtatacagcaaaaaaaaaaccagcataaaaaccaagaaaatgcatgttaataaatatgacttcagctgcttaatttaatatatacgtaaggattagagggatgatttcattagattgataaatgaataaatacaaatacaattcaagcaatgacttggaagagaactttcttccataccaataaaacactagatcagtgtaactacgtgatcaataatagttatgccacatttgattagaaaatctacaagatcatctcctctgaggaagtgtgacttaaatagatggttacgtcatctaacaacaacaggtttgaagtttgtccatttttaccaaagtactacgttccaaatgaaaaaacatgtttgccaaaaaaatatctagataatttgagcaaaacaaatatcattcattacttcaacctttgctgcaagaaaacctgcacaaaaaaaaaaattgaaattcacattcacaaaatgaaagtacctgtcgaaggatataatcataaccaaaacttgctgtgacatctcgtgacatgtagttgtacatgaagtctgatgctagggaaacctattcaagggagacaatagtgtaagaagccacacaacataagcaatagcaaaatcttacaacagataagtttactcaccttctcagatatcttctgaacatagctcagagcaaccattcctgtgctagcaacctgccctgtggcaacctgcagagtagatgttaactcctgactactaatagttcaatttttaacttatctaagtaacttaactattgcaacatatcatagccaagaaaaaagtataacatgaatttggaaacagaaatgaagaacattttcagtaggaacatttaagggactctgcagaacataaaatatgaaaattacaaggaagttcatttcaatactattaagaaacattttttcttcaggataaattttgtttagaaaatgactgcaaatatgaaaatgatgatcatataaaaattcaagagacaaaccatcttgtctgtgttgaatctagcagcataaccaataccggacttccgatgctgaccagcccaaaatacctcaccacccatagaaaaatgtgg

SEQ ID NO: 263647 - DNA, 1025 bp, Cannabis indica
gaaggaagaagaagatgatgaagataaagatgaagatgtaacggttactagagtgagtgaaacgtggccgttgatttactttactaattactaccaattctttctgaccgttgggaaaatgccactaattctttatttattattattttgttttttttaattatttatttattattattaaatttaagtggggacttctttaagtgaatccaaggagagagaaaggttctctacaaaaaggagcaccttaactattgtatgtattatagagatttatttgtctacttcaaaaagtcaaatgaattcaatgaaccttttttttttaactcgatctctctttaattgatctagctaaatattttgttgaattttatttttgaatactattaataaattatataaaaaaattaaaattataataataattttatttaactacatacataattataaaaaaaaaaaaatagactaaaaaattctcttttttattagagtattgctataggtcatcaaagtatgtaacactactatgagaccacaacatataattagattattaattctttataatatttattaaattaaaataaataaaatttaatattaaattatatcaataatattacacacaataccctttaccatgtctcttttcattattattaaatttaagtgggagcttctttaattggatccaaggagagagagagattctctaaaaaaaaggagcaccttaactaattgtatgtactatatagattatttgttggtgtacttcaaaaagtcaaataaattcaatgaagccttttttttcactatccccttactaatgattttgacaatttttgcttttggattttgcatggctctaaatgagtgataattactaattaggggtcttatgatttggtggtttctttattaaaaatcatttctttttcagaaaaaaaaaaaaaaaaaaaaagctttgatttctccatttcatcattaaatcaactattgaatccgtacaaatgacttgacac

SEQ ID NO: 263648 - DNA, 588 bp, Cannabis indica
atttcagctaaaataactaaaaaatttaataaaaaaatattttttgattcttgctctaatcatactctctactttttagtacttgattattttaatattattttataatttaaatttattaaatataaattaattttataaaataataacaaaataacagaatgctagtaaaaaaatgtaaacaaaaaagtaagaaattctctatttagagagcttcctatttattctttattataaagagtcgttggcacagttacaacttatttttattttatattttagccaaagaatataattggaaatgctccaattttctatccatccatataatttaattttgttacctaaaaattctaactaacctaagttttgtaaactccttaaattatctataaaagtaagctatgaatcagataattttataatttattatatttcttcaaaaataattactaatttcaacctacataatttaaaataattaaattgaattaataatttattatgtgtattttattagttctacctttaaactttttttttttttttgttactaaatctattctaattgtaaatttgtaagctatt

SEQ ID NO: 263649 - DNA, 510 bp, Cannabis indica
taaaatatttccaacaaatatataataaagcaataataagacacagacattctatagaggttcagccccgagcagttcggtaatagcctaatcctcgttatttgtattgacttaagaacaaggaaggaatttccttttcttatagctcttacaatagtatctctgaatatataattcttaaataataatataaccttatgcgtattggcttataattttccggccctttgcccagtgaacattcctcactatttatagggctggaaacttgaggaggaagagtttcctctctcgttacaatgcgcataaacagaaagatcatgtgatcaatgctgaatgcaaagatcgtgggattgaggctgaatacaccgatagtgggatcgtgtgtgtgccacatccacgtaagttgatccctgatttgtagggattgagttcgtgactcatgatgcgttaagttgaattcgctaagtgttgatcattctgcgcggctcgttgaatattccattctag

SEQ ID NO: 263650 - DNA, 636 bp, Cannabis indica
aaataattagctaaacggaataggaattacgttgataaatttgagattatacagaaaaatttcagtgcaaataaaaattggtagtatatttagacacaagtgggaaaacacaagttatttagagaaatttaagaaccgatccatacctcgtaacccttcacaatggctctgaaatctataaccaaattgtccagaaacaaattacaaagttctaaagaaaaaaaaaaagtaaaaagaaaaatataagaacaaaataatcaaccgataaattcttatatatatcattttatttttcaaacaaagtttgtgcttatattgttaatgcaaaaactatgtgacaaatcaattttataatctgctatttcataggttttattttttgaaacttattttcaacaataaaagttaatcaaaaatttattaaaaagagtaaatagtcttaaataattatgatatacagttataaatagaaaatatatccgttatcaaaaacaaaaagacataaaaaaacatgttttaccatatatatatataaaatacaatttcaatatttaacatgaaataaagtttttattttctttgcaatttacacgtaagaagctgtataattttatatttatattatcaatattgata

SEQ ID NO: 263651 - DNA, 2986 bp, Cannabis indica
tcatgtggctccatcaagttgattagaaaagttgatgatagagattatatagttaaaaataatgtcttttattccaaactaagttgcatccttaaagaatttggataatctagtttcactattgggcaatgagctgttgaatagactctatggtactttgcttaacactatagagacttaaaggagaaagcaaaaagtgaagatgtcattttgagaagtgatatgaagagctagagatactttggaaaaattctaaacaataacaagagcctacttcaatctaaagtagcaaataaaaaagaggtaaatagtaaaagtttattgaattatatctctatccagtttgctacaacattattttagcaaaataaggctaaaaaatgtcaatctatcaccatgctttttgtttttcttttccaagaagaacaagcctttgatcattcataaaatgagttggagttgaaaaaagagtacacatattaagatcctatgtggtcatctccttttaacatgcattcatcatgcttatttctttgatatcaagttgagtttgaacatttgaactcatatagttaagcttggggcgttcataatggagactcataactcattgacgatagttttttcaaaaatgaagacgatgactttatttaatgaagcatctcttaggtgacacctaatattttcaactttgtcattaattttttctatatactctagcttaatgcattgtattgattttgttgtgtatgtgatggattttattactttttttggaatagaagaagctcattttgagaaagctttggaacagtttgtttcatttattatatatattaattctgaattatcttctgtctaatttgaaactatttgtacatatataataaaaacaaattcgtaatctattatgatacattaattcttatacaaagatcgataatttccatgacatagtaagcgacataagaaggaatcggattagtttattaaaatgaaaaatacaaagtcgaatgtcaagtttgtcattatcaagtccattataatcaatcaaacctcagcattcaaatactaaaaaatcaaatattttttatgttttattttttattgtttaaataagaagaagcataggttttttcaccagtagagagtgtggccgtagaggggaatgattcttcatcctattacaaaacaacaattaatgattaaaattaagattttaggaacattttgaagatattttcgtctctaaacatatatattaattggatcagttcaagttttcagttcttatatatagttcgttgtgaactccaaaattcaaatgaacacactgtcatgttttgtctatatatataaatatataaatatttatatgatctcatgcaataacacaaacaaaatacagatatatatattcacatttatataaaggggaatgtatagttaaatgattaagactataggtagtaattatagtattaatattataattattaatatatgtatacatatattatatatgggagcagagaagcagaaattaatacattgagaaaactcttaggagaggatacccgaatatgctctcaattaataatgccatcatccaaagatgctttgcttggaatccccataacactatacttaattgtctctctaacacttaagacttatattacaaacacatcttttcaattaattattcatcaattaatctcaactttttctatattaattcctttactaaaaaccacttttcacttgctatatgtacatctcttcagttggagagcatatatacatgtatatgtatattctcagtcatcttttttctttttcttcttcttcttttttttcaaattttctctaattaatttcttttatttttcttcttaatatatacttccagctagctgcttcttttaatttttatagatgtgtggttatattttattttataaaccagcaaaaagagaaaaatatattattactaaatcaatgtatgttaaagtaatttaataatatatatgtgatgatgatgatgaaaacatcttcagaattaggtgatgatgatgataattataataagaataatagtaaaagtgtagtggtggttgtagatgcatttagagatgatgggttgagagcaatagcaggggtcctcctacaaaaattgttagtgatgatgagatcaggagatgttcttacacttgttgctgttcttcaacaggttaatagccctagtatgttttctttatcatcaggacttctaaaactatgtaagacttttaaattcatatctctctgcaatctgcatctatcacacatgcactcttctccaaaatcagtaattaaaccagaaacatcatcacataaagaaaaaggaagttataattctatttttcatttatatatatacttacatttcctaattttggtatcttaaattatttcaaatttctggaaaatttgtgggagcttctgcattatactccatcatattttgaaagatagagttgcaacttattcatgtatcaaattaaaatactgaaagtatgtgttactactgaaaagaaaaaacatatattttagtcacagtataaattttcttttaattaatatttatatacaaattattattattttctttttagtctcaataaatgatgttgaatgtgactaaaaacacattagttaaaataatataaaattttttttgggattaatattagccacccacattttagtaataataatatattttagtcataattttttttatttttattgtgactaaacatatattttttttttattatatactaaataaaaaaaattcattgtatgtttatttagtttcatctaaagaagaaaaaattattttttcccccaaactttgtcacttatataattctgacttgtaatattggtgttgtcacatatattttttaactttattctgtcctctgtaattttagcgttg

SEQ ID NO: 263652 - DNA, 751 bp, Cannabis indica
gtgccccccaagtgaccgagcagacgtatgactcttggtcacttgtcttttacaaatatattgcttatctgttcggtgttttgggtttgaccaaaccttttgtacgcattgtatggtaaattataacatgctgattttttcgactcaattgaattttgaaatactatctttattcatttattgatcgaaaagtgtatttgttaccgtagtaacttacatcagagctatttgatctaatctgatcttttagcttaacatgaaataaaacaaattgcagacataagaaactgtactttaaagtggtcacccgacctgagtactttgtttcttttatcgaaacctttgggcgtagtccgcccagaaggccattcacttaaaagcaaatgttcatttagtacttaaagtggtcacccgacctggtactttattggtagtattttcttaaatgttctccattccagtaccgtggtactagaatgagttgcattttttcgtcatacttacctaatttgtatgctccggagtcgagaacttcgaccacttgatatggtccttcccagttaggtcctagtacacctgccgtactgtctttggtgtttaggaatacccttctcaggaccatatctcccacgaagaattttcgagctttcacttgtttgttgaaataccgagctactttttgttgatgggccatcaactttaagtttgcagttgctcgtctttcttcgatttcatcaagtgattctgcaag

SEQ ID NO: 263653 - DNA, 569 bp, Cannabis indica
atgtcctttaaaaatgttaaaactttcaatattatttaaaaatataatattttattttatctctttttcacattatttttgacatttttacttctaaaagtactgtaggaattttaattgaccaaaaataccctacaccaacaaacaattattaatattaaatcaaggtcaactgacctttatcaagtcagcggagtcaaaacgactttgttttgccgaagacaaaaccccttgaatcaagaactttctcgattaatccccttaggttctagcttcacctcgaaaccctagcatagagtttcttgctcgaagaaactcgatgctcgaacccaatccttaccagaaacacaaatcacacacatgcacgagatcagatctagattgatctgatctttaacacaaaaatatagaaaaatagaagtagaaaaggtaaagaaaacaccagagatttttccagaggttcacccaaaatgctacgtcctcgtttagctgttccaagtcacaggtatgatattgactggtaatctcttgatttaattacatgtattgtgtttaatccctctctctct

SEQ ID NO: 263654 - DNA, 1588 bp, Cannabis indica
gacaaaagtccttaaatttaacaatctcaatagtttgaggggaatttctaacggccaaaaaagttcagggggcacgatttagtacatgtcaaagttcgggagaaaaaattactaattaaccttagatgatttgttcatctatacatataggtgtcgtttggtaacacttttttaatcagttttctgtttttaaaattgaaaaaaaatgaaaatatttttcaaaaacatgttctataaaactgtttttacttttcaatttttcaattgagaatcaaaattttaaaaacaaaaaaaaaacactttcaatatttttttgaatatttttttttcttaatcaatatcttggacttcaatcatgactcggacccaaatccccccacgatcctggcgctgaattcgtcctctgacttgaacctaaattcgaccctgaaactagacccgacgtaaataaaatcaaaaaatgaaaatgaaaataaactttacagaacacacttgtattttctatttttaaaattgaaaaacaaaagtggttacaaaacgcatttttatttttccaaagcaaaatttttaaaaataaaaattttactttcattttgtaattaaaaaattagaaaacaaaagtgttaccaaacggcaccataattatttcataacattcacttatttattcatttatttatttaatttttttgttttgtcttatttataaatggatttattacacattaaaatatggtaaaatggataagttgtaatttttgtccttcatacacagaaacatattattacaaatgacataaaaaattatgataatttactcttagagagagaagttatgagagagataaaaagaaatgatgaaacaaagggaaaaaagtagagataaaataatatagccaaattatataaattcttattatttgagtttaaatgaaagccaaaattagcataacactcaaattactttcattttccctgaaaataattactttacgtgttataaatatttagcttgcagtttgaaaacttaattattttttgtttaatattagatatcacacacaagttttccttcattttgtgaaacttaattactacttatataaataattacttctaactttatttttagtactcatttcaatgggcttttttttcttaattttgtttattatttatttatttatttatttttgcttaatcattctattctttttgtgatcatttctgtttaaataattttttttttttgtaactacagaaagttactatacaaagatattaattgaatgaaatttaaatacaaaaaataacaagttctttgagttttaattttttatattgtatttagtatgatagaaaaataagaataaagataacttttaagacaaataaatttataattaaattgaatcattgagcagttatgtatgtagatatattgaacttcttagcaagtgaatatatatcaatcactaaaaaactaaaagtggtgattctacaatgcacccccttaaaagagatatactgatacacccttaacttgtttcggcatccagaaaaaaattttagtctaattttttttcat

SEQ ID NO: 263655 - DNA, 1511 bp, Cannabis indica
gtagccggagtagttaaaaaggacaaattttcaaagatcaaaatttcaaaccccattttaaaaattaaaaataaacacattacctaattaaaaaatttaaacatatatatattgtacttaatattacctaattaattagaaaattaattttacgtgcattgcacgtaatatcaacctagtattactatatatatcagtatatatttatatatacaagttattcggtttaaaaatagtattaaaagattattgagatattaattatgtaaggataattattttatttatttttatagttaatgactacatataattgcatagagtattagtggtaattttctaaatatagttaaagttgtattaaatgtgaaggtaaaagatattggagtttgaaaaattatttagttaattgtattagtgatattaaataaaattattatggaattaatatcaaaagatttataggtttggaaaaattcacaagtttaaaaactgctttagtaaaatgataaggaattatataactctgaataggtgatactaatagcgcttcaaaaataattcaaaaatctaagtaacacatagagatggatgcatcaaaattcaaaacttatccctatcaaaattaagctttataattataagatgaaagacttacaattagaatttaaaagttagacattaatttactttttattattattattattattattattattattattattattattattattattattgttgttattatttttaaaaataaatccaatagagtgattatatatttattcaaacaaccttaaaatttatatcattctattcattccaccaaattaagcaatcctaatcctaaaagcttttgagcaatctttctcaccattacatccttagcaaaaatctactcatcactttcatattttgtcaccattggtcttaatctaagcaacttaaaatatttgagctaaggaactctacatttactcatttactgatcacaataaaaaaaatattcatagattttttttcttatggaaagaaatatgtcttagtaaaattatcttatctctctgaatattgatgatttgtttccagcaatcttggtaccgttgaaaatattattacatgccccataaatttctatgaaaaaaccttttgtaattcgagttgtgttgaaaattcatttttcttctgtattatgcaattcgtgttttaatattgttcttgaaaaactgttttgactaacttgtaatatctctttgaatataagtttgatttcaaagattttgatgtcaatggaactgaaactttcatgaagaaagtattccctgggtcggaatatttatgtgtctttgtatttttttttattattatatcttataattcgttacaccatatttcttctcaaaattatgataactctcttagttttaatctattttcaatgatgtgcatatcgttggaaagctaactgaattttctataattttgatgaagacaacttt

SEQ ID NO: 263656 - DNA, 518 bp, Cannabis indica
gtatcagagccacatttgttgaattaattgaagagttgatgattttgtttatgaaatttagagttcttaaaattaaagcgtatatatattaagtatattgctgtatgattgtgccatcattaccatcatttttttcccgattatataggtaatggtagattcatataaatatatataattttgtttaatatgccgtaagaattcaattcttcctcttgcggttgtatatgatataatggcttcagtgcctatctcctcgattggctatacatatgtattaattacttgtaattggcttcaattacgtgtactgttgtatacatatatttgaatttaatttttgttttttttttttgtcgtccattcacaatggcttcagcggctgggtaactaggtttattgttttgtttttttttttttgggaaatttacatggtatactaacttttgctatttttttataaaaatactgccaggtggtattttttacttttttactgtgtttttttataagtttca

SEQ ID NO: 263657 - DNA, 501 bp, Cannabis indica
atcgatccagtccgatgtatactccatacatctgatactagtatactttactaatgccctggaaaggacataccactcatccaagtgtaagaaaactttatcactgattatcacatcagtgtaaatctagtgcactgataaatcatgggacttaaactttgaagcatacaatcacaattactttctactgtgatgacatcattgtgattatgaataactatatatattggatttatcaaaattgtatattaaactataaagatgaaaataacatgtaaacttaaatgacttctaatcttatattaatagcaaataagattacattgaaataagttttatttagggcgtaaaatcccaacaatattatcactaaaataatattgtagatcatatgttcatgagggagagacatattcatgtagcactctttttgtcttagttcaggctttgtcctactgagttttcctaagaaagtttttaacgagaaaacttgcaaataat

SEQ ID NO: 263658 - DNA, 1291 bp, Cannabis indica
agtatttttttgtcactgatcgataattacttgtaccttaatagtaatacgtggagaaataactgtgagcaaaatatttatgcaactgttatgaaacattaaaaatcaaaacaatgtatctacgtacgtaactctatatacatgtctctttgtgatttaatatgaacaaattcactattaaaaatttggaaaataataaaaatacactagggtaaatattttactatagtattgatgtaatttacttaagttggattgtttgggaactccagtttaactttttgacatctgcatttcatgaatttgaaaattaaagttaggacattagttttatgcgattaaactgaatttttggttgaattctagtttcgtagtagtttttctgtatttttttttcgtgaattcgaaacagctcctgttttgattgattctgatcgtcttcttaggtgaagttactggaattaatggtagttctctttctattcggatttcatttcgattgtgttgggttgttgggtggttgcccgaagtttgcgttagacaaaggtttcaatcctaagaagcatagatcgtgggttgaaggtgtgtgtaaatggtatttgtgtaattttttatctgaattgtatatttatttagccaacttaatattattattttttttttagttaaaaatgaaaaaagatctcattatttaacagtaaaaatgttgctaaaaattgtatttttttaaaattttattataataataactagactggtgaccaaccaatgaaaatagagcattcaggcacgtgcatgtaatgcagggtagaatagtgtacgtaatgtaaacgcacctagaggcgcgtgagtacatacaatggagacatttcggtttaaatgtatacggcccatgggcccattatcgtttaccgaggaaataacgacaaaatgagaatacgacgccgttttaacaacgttttcccactcaatcccaacaaaaattcaatcgcaatcatcctcaataaattttcatacctaattaattccttttttttaccacctaaattattgaatttacttaaataaaaaaatattaatagtaccatctagggtctacactatctagttattaaaatgtgatttttttttattttacattttaaaataatttttttatatatatttttataaaaattcatataacaactcacataaaaattatcggagtaactcaaactataaattttaaaaaaaattaaaatgtaatatatatgagataattttctttaaaattttatatagagtaaat

SEQ ID NO: 263659 - DNA, 509 bp, Cannabis indica
gttgctgattcgcctccttacactgttgcttgaatggggtgggttttcttacttcggggctgggtttgggtttccactgttgcagacgacaatggtggaagagatggtgaggtttttttgtgttaggggtttgaatggacaagggttaagtgtaagtgtagttctgtccacttttaattttgttttgaattttatttcccttttattttttagttttcttttatttaaattttgttctgggtttttaattttgatttttttttctaggtttagttttgtttttaattaaatttctttttaatttaattttttaattaaggtttaaatttcttttaggaaggttggcatgatttaatgccaatgtggcatgagttgatgacaaggatcgtgccacgtaagccatttttgcctttaaacggagccaaagtgacggaatagtgcagacaaaaacggaagtggggttcaggtagtttagcctccaaaatttgagttttggtggttaactgtca

SEQ ID NO: 263660 - DNA, 535 bp, Cannabis indica
agttcgagtttgggtttattcgggtcggagttcgagtccttatttgagttcggttcgggtacggattttagtctaggtccaaatcagcctccgggtgtgggttcgcgtcttgggtcttagtctaggttggatcctagccccaagttctaatctcgatctgagtttggagtaaattcatggtctaagtcccttgttctaatcctggtttgtgttcgagtttgggtccgggtccgggttctaggtgtggatttgagtttgggttcgagtctgtgtccgggtttgtgtccaggtctggacctcgatctgggtctaatttcgggtcaaggtccaagttggggttccgagtgtgggtcaaagtttggatctgggtcaggttctcggtctagatctaggttaagaatttcgatcccagtctgggtcttggtctgagtccaggttcgtattctgatccctatctaggtgcaagtctgtgtttgggatcgtgtcccaaattaacgtctaggtccgggtctcagttccggtctgggtacacgac

SEQ ID NO: 263661 - DNA, 674 bp, Cannabis indica
tacgaaacaacaatttcataattaaagctttctacccagcttgggtcgcaaatcccgtattggtgcccaagctgaacaagaaatggcgagtgtgtattgatttcatagacctcaacaaagcattccccaaagactgttttccacttccaagaatcgatcagctcgtggatgcgacagtagtgcatgaaatattaagcttcatggaagcttattcggggtacaatcagatcaaaatgcatcaaccagaccatgaacatacaagtttctgaacagatatgggtctatattgctacaaagtaatgttgtttggtctaaaaaacgctggagcaacgtaccaaagattggtaaataaaatgtttaaagaacagatcgggcgaaatattgaagtatatgtggataacatgctcgtcaaatccaggaaggctagggggcacatagatgacctggacgaatgcttcaaggtcctcagaaagtacaacatgaaactaaatcccttaaagtgctcctttggtgtcagctcgggaaagtttttgggcttcattgtcaatgcccgaggaattgaagccaatccaaagaagattgaagcgctcctggatatgaagtcaccaactaaaaccaaggaagtgcaaagtttgactactcagatcgccacactcagcaaatttgtttcaaaa

SEQ ID NO: 263662 - DNA, 789 bp, Cannabis indica
taatatccattcaaatattaataagatttgttttattattattttattatatataaataatattttattattttattaaaaataaaaattaaaagtcacccatgaatttctcataaaccaagaatttcagttatatagacacactttatatagaatagatttctcataaaccaagaatttcagttatatagacacactttatatagaatatatatatgtaaatatgatactttatattcaaatttttgttagtaaaattagatgaaagttttaaatctaacaattttaatagttcggaaaaaatttcaacgacttaaaaagttaaagaacataatttaatacacgttaaaattcgagaaaaaaattattgtttagctttaattttgtaacataatcttaatgataaatttatctaacttgtgattagtatagatacaaatgaactataactataaccttgaagagatagtaggtctaaaatttataggtagtaagtaccctttgttactattatttggaatttttgaaaatagacataatctatactataaatataatatataataagaatggtattattaatttgtgaccattaactgtaattaattaaagtaaaatatcaatagaagggtataatttagactaagcaaatggttccatgaaattgattgtactattatttcttattaatgttccaaaattttgattgatggtcttcttaatttaacaattgataatatttacacaggtaattagtactaatgcagccaatctacaaacaaatatatt

SEQ ID NO: 263663 - DNA, 540 bp, Cannabis indica
aaaaatgtcccccaactcaaatcaaacccaaacttcctaaaagcttcccaaacacctgcatacatcatactaagctcaattcaagcaattaatcacaattttaaacccagaaattcaattctaaactcaaactttaccaaaacatcaccacaacaaagcaaaccaacataatccaactcaaactacctcaatctaacctcagaacaccaaattaaaccccaattcccaacacagcagcctagagttaaaatttaaacattaagacctaacttgagcttgaaggaaaatgaagagagagaagctaaaagatttttaccttgatttagaatactcacaacctgctagaatctcacaattgatgcagaaaatcccagccctagttgttttcctagagaattcgagagagagagagagagggtgggtgtggagagaaagtttatcttaattctaagtttttcttctaatttagatatatgttaataatataataaaatgagttataatctgaatattatcctcaaaataaactcacaaaaagac

SEQ ID NO: 263664 - DNA, 762 bp, Cannabis indica
tcacatttatcacaaaaaattatgttgtaactaaaaaattatcactaaaaattgcagttttttgtagtgaaatttgtaatggcctatttgtgaagtgaagtgtagaactagggtatattatgaatattctcttagtaacccttatgattttattccagctttgtctttctatttcaatttagttaaaatatgataatcattatattataacctcaataactttctaaactaagtagatgattaagtacttattattatatggcatgagaacgacacacaagatttgtagggaggataaaatggcttgaataagggtgggatgtgggaaatgccttgaagcatgccgcatgtactcttttactcatgcgatctttatttcctctacactatatataccaattaagtaattaattcccaacacaaatgtattgtctcctcctaacacaaatatatataaagaaaaattaaagaaagaaaaaggaatttataagataaatcaaatctaagttttcttttgttctttctagctagtactacgattaataacatgttgatttaagaaaacaaagaaaacgttcatataacttatcataatattatatattttggcttttctagatttggattgggttatgacttagttcgctattattacaatcactgactttaggatcttaatcttaaggctataaataccacctacttaagcatttgaaaaagaagagagatcacatgatttagattgagattgagaggtagaga

SEQ ID NO: 263665 - DNA, 526 bp, Cannabis indica
cgaaatttgctagcactttctatggtggacattaactttttgtcctcattagctttttgtcttttagtggacattagtgaaaagaataatctgattttttatctcttatttatttagataaaaccaaagtaatatctcatttttataagttgtcaaccattggaactatgccattttttgctgccgtatgcaacctcaaatcataataaaatataaaataattaatttggtcatcaaattttagatacaatcaatatattcccataatatttttatgtattaaatgtcaacttcatatatgaatacaaaaaactaaaatccttataaaatctcaaattacaattttacctgttttacacttcctagttccttcccatttgaggaaaaaaaaatacaaatttaaagagcaagtgtctttaatttttgtatcacacattgttgaaataataatgtattttagttaatgtgtgaacgtgtcgtattgttgaacttaaaagcttgttttggaaaagaaaagaaaagaaaa

SEQ ID NO: 263666 - DNA, 1037 bp, Cannabis indica
gagccttgagcatattaatgcaggggccatcctcactcttcgagactacttcaaagactatataaatcacattggggttgccccattccagctgactcccatctcctacatgattctcgctagtttgaaagtcttgtacaaaattatgaattgggggtatcccacacccgtagagatcgagtatctttactcagttaaggtcgttccatcgaggaagaacgccgcaatgggctttttctatcttggtactcacgctagcgagccaaaaattattgtagacttgccaaataaagtgtctttcaaggaaaacttcttctggacgtctggcctttcccccattggcacaaccacgtttcgcaaactttgtaagtgattgttttcttcttacttatttacatcagtcttcctttttcaagtttttgactaatgctttttttgttctgacagctcttctgatgagacctactcctacccccgagatggttagtaagcacaggggcctgataactctcccttacggtctccgatcatgcaacttccttttgagcgaagttaacttgcgatcggtgagccttctcgctgataaagaatatacttgtgattacaaggttcccaagtattcttcttggcagcagataattgttccacctgaggaccaggcctaggatcgcttggcccaagcacaataccttcaaagcactgcccctcgggaatccggtgaagaagcatcccgaggtaatcaatgtggctggtctcctactgtacttagggctgagcgtaatacattagttaccttccaagactcatgtcttaatttttatacttggaattccattctcatggaccgcattgcatttaacccccaaaactcaaatttgggcggtaaaaccccccaaactaggaaattgttagcaatttacagtttccatccactttaggtgttaagtgtcatgctggattgtccatgtgcacatctacgtggacacagtgtacacatggcacaattttattggtctacttaaaaaattatttcaaaa

SEQ ID NO: 263667 - DNA, 2307 bp, Cannabis indica
attgtatttttataaaataacagtggaacacaaaacagaacaactaaaaataacagtagaacaaccaaattaaaacaatcgtagaacaatagtaaaaatttcacagtacacagtatttgaaaaaaacatagtatttttttaaaaaaaattaccctacagtataaaagtaaaaaggttaaaaatttcagtatgtgatgtaaataattctaattttattagtaataattacatagtgtaattacactcaattcttattcttatgataagttatgagaatagaattagaacatcttaattaatgtaattatatggtcatataactataccaaattatataaatagtgatctctcatcacaccaaaatttaatttttcataagaataatatcatatttaattgaatggctgaaattaattatacatagggtataatttgagtgtgtaaattaagttatttttataagcaattgtgcatatatatatataatttgagtacatattttactataaatttagtgaataataaataaataaaagagcatatgtatgtaatgtagatactagatagagccagccaagccatagaaatagacaataataatatatagaatagaatcccttttaagatgaacataacaatatcttaatgtgtgtccttgtgactgcctatgagtacctttcttacattaaatgtacattaaaagacaactagtatttgagaccacaattttacacattatgaaaaacatgtttgaactatacaaccaaaataaataaatatatatttgtttgcactagaaactagttttagattattttcttttgctaaaaaaatacacataatctaatttgtcatttaacaaaacaaatagttcaattaatcatttttataaaacacaaaatttaaaataatatttttttaaaaaaaaataatatgatattgtttattttgtggcaaatgttggtttcaacgaggatcaagtggtgtagattttctttcttactcttttgatagctttgacaattttgaagaccacgtatcagttatagggatcttatacgtgattcgatcttaattgttcagtatgcacttcataagagttctcataatcatcccaataagaatgacaccactaaaacaaactagcttcctaaatagtcaaactataatatattataataagcggctaataataaaaattcgaaccattaaactaaaaaaaaaaaatatgatagtaaaaatttctctactaataatttaatagtgttttttttacagtttttaattggacagccattgagtttgtttttatttttaatttcaacaaaatgtattgttacacaataaaattaaatattaaaatataacaatttcaaaaatttactaataatttaacagaaatgaaaagacaaaaaaggttgtgggcacataatgagttgtaggctgtaaaggtagctataatagcaaggtgtcatgttgaagagagattgctctcactcaaatctcaatgcaatgcattgcatgggtcatgagtgagtggccatttcatttttgccattgttgtttttatctctaactttttatatataaataaaatataatatatatatatatatgctgacccacttatcacaacccattttgtcttcttattcatattttctttttggtgatgttgatcatcaaagttgtgtttcttccaattttcaatactttttgttagtttgttttaaatcattccactacctaggatgtgatgtaaatatgttttatttttgtgggtattttaatttactatgggaatggaattcaattcaattacataatgacacattgtttgttaaattgttaatatatacttaaacaccattagtattaggtaaaataataattaagagtgttcaatattattataagttagtatttgtttcacaaagatgacaataaatgataaattaggccgatttaataaaaatttaaataattcgggacttatttgataagtcgtagatcgtgtatgaaataaaaaataacaatatatttggataaaaatattgtattgtattaattatttaataaataataaatgacctgtattagtttgtattgtaatgtttacaaggggtttgggatcaatatcggccctgaccctagcctcggatctcgaacccggacccatatcctaactaccggaccccgaccccgaccctgaccttggaccctggaccccagatccaaactcgaatttgggtctgagtctaggtctgggttcaggttcaagtctaagtccatataggtttgggtttg

SEQ ID NO: 263668 - DNA, 854 bp, Cannabis indica
ctgcttatttggaaagttgagctctcccttttccctatatatagcagcccttgttcccttctcttgtatggatcacaacccacgaattcaagagagaaaatagagaggaaatttcgaaattccttgtgagagagaagtgcccacacacatcattcagtacctcaatcatagtttggaagactgtgacggatcacatccaactgaaggacattcagactcggatcttgattatactctgctagagacaggaatcaagggttagagatctgagtggaaggagacacctaattctgctgccatcactgtaagttattcttaacttttatgtgttttgtttatcgttttagaagttcatatttaggttgttaaatcaacatacttgtgagtagatctaagatcctggtgaaattaattccaacatccccttcattccattgaatgatatagatattttttgacaattgttgatgataaatcaaggtacacttggacatatatgctcaaagcaaaatctgatgcaccatccatcatccataattttttttctctaatcaatacacaatatcaaaccagcatcaaagctgtaagatccgacaatgctaaggaattaaccttaacacattttttcaacaccaaagggtttattcaatatcattcatgtgtaggaaggccccaacaaaactcagttgttgaacgaaaacatcaacacatacttaatattacttgggccctagcatttcaatccaacatacctgtaacaccctaactagcataggcgtattacgttatttttaaacgtactgtgcagctcgttgctaatcaacgagatttatggaaatcgtgattaattaaaa

SEQ ID NO: 263669 - DNA, 612 bp, Cannabis indica
tatatacattaatatatataataattggtgagaatatttatagtgtttcattgagacaatttctaaataaagtgtcaaattttattgtaaatctttgttactaatttttttgagttagtttgccacatttgattaaatattcaaccaaatttaatatatattttcttattttgtgttattttaaactaggaactaattcgggttttgtacggtttttacaataattgtaatatttttaagttgttaaatatttgtaccaaatgagttataatctatatacaaacatacaaatataaaggaaaacacaaaaggaatttaggtggcatcttagattttttcattgtattttcaaaaattttgtgagatttattttgttttaaaaaaaattactacatatacaaacttaaagtcccacatggtttagaaatcattaaggtgtgactactacaataatgggctttagaggcccttatttttgttggaaattaaaataaagaactacataggattgttaatctgatgaagagttgtaaaccccttatgacattattttttggaaataactgacatcatagagtgtgctcctatgtcgtcggttatttctaaataatc

SEQ ID NO: 263670 - DNA, 562 bp, Cannabis indica
cctctgaagttgttggtgaaagtcttgattgaacattgcaacagcacccatttcagatctattgaaatcaaatgaagtcgataggcttggtatttgtgattgctcaaatcttctacacattggagcaaagtgtgaagttgttccaggcatgatgggtgtactaaaaagtcgaaatttataggtactgcacttacctaaatggaaaggtttatcacatctggcaccatctcctcttttattcttataaccagggtaatttttaatattgaactccacacattcaatcaaagctaatgagttccaacttgctagttcctctaggttccagagggaaaatggtggtgtcgttttgtggtttacatgaatttcaccattaggctgaagcatgcttcttgcactccaaaaaaatccatgtacaagtctcctatgcttgctgtcaaggatttacattgccaaagagaaacaaagaaaaaatctttgaagcccataaacacaacaaatacagcaatgttaacacatactgtcaaccaacaaatgccagaataaaatttatgttgtaaac

SEQ ID NO: 263671 - DNA, 2397 bp, Cannabis indica
ctccaaataaaatttaattcaaaatacttttatgagttttgtacccatattatcctctcatactcacataactaagacataatgtcaaacataatagatttgtgttctttgtagatagatgtgtaggcttgtgggaaagttgggataaaattttgactagagaaaaataaaaaatatcgtgaagttataggagtaaaattggtagaataattaaaaaaagaggtaaatataatagattttaaaagagggtaaaattaaaaatatcaagttaaaagagttatgtatacaatttagcaaaatgtcaatggtaataagatgttaaaaaagaaatgggccttgccttacttaacttgggcttctttgcttcaactttaggccttttacgaaaataagaaaagaaactctaatcaccgaaaaacaaaaaagtgtgttataaccaattttacttcatttttccttacaaaaaaatatattatttcattattattgtgaaaattaatttagttacacatactttacactacactaaatagaacacaagaaactaactactacatcattttgatcaaagctcttaaaagtttaaagcaattgcattacctagcttataaataaaacaccataaccaattctcacaaaaataataaataaataaccctatatcccaaacacttgcaatgcttaggcaacccttttcaaatttagaatataattttccttaactacccaacaattaataaaccctaaccaacttttatataatcacatcacaatcatcatcatataataatagaaagcttactaaaaatctcaagacaaaaaataatatgaagagtaagaagcaagttgtttgtgtaattttacaaactttatatttgtgtgtatatcctaatggagaatgaacaacaaagatgcgtccacactcagaaaagtattcaattaatagaatataattattaaacaaaaaaacaaaattgtaattaagtgagaaaaagggattcaaagtggaccaaaaacccacctttgaattttcctttctttcactttccctaattccaatacccaaaaactcagactttcaaacctccaaatccaaattttgcccaacttttcaaaaagcaaaggggacaaccattgggtcttggcccactaaggaagactagaataaaaacaaaaacaaatcccacttctttttttgggaaatcggcttataaaaattaaaatggtatgaaatcttggcaattttgattatttttttaataatataataaaaagaaaaaacacctctaatcatattaatcactatgtctttgagctttttcatgggattagagtcttcacatgacattttgtctatttgaccctaacccatctacaatttacaaaacccaatcacattcacccacttcattctcttattattattataattattttcaaaagtttaatttgccatgtgttctaagatgctcttttcttcacgcatttctgatcatatgtttttctttttaataaaatatatttattttcagtcttgattaaattaatttgataatcttatatctaaaaacacatctcggaatttaatgagtgaagccgcacattatagatcgaaatgggcttaaagtagattattttacttgggaacactaaaaacagtaactttgactcagtaaatttaattattaagtgttactatattcatcattttataccttttctttttatcctttcatatataaatgacttggcaatcattgaatatatattcttgtatcatccgaatctttctcatgaaaactagtagaaaatctagaccactcatctttgtatgggcccaaaagcccatcagtaatgtccatactgcatactactccttatctctctctttcttatttttctcatatatgtatatcaacacctaaaatataaagtaaaaacattacacttaaatgacatcacttagctttttcaaaacattcgagacaaatatgattggttgagaaaatataaattgtcacaataagtgttattttttagtgcatattttaatttgtatgtattaagaataatagaaaacttaaacttatacatcacaatatgatttttagttctaaaatctaagagcattcttaatactttgaacacatctcaaaacatgatcatagtgttagagcataaatacctgctaaaatctacacaaaaacaatgtttattgtttattgtttactcttttatgttttcctttttacttgatttggttagcctattatcatctcacttaatatttgtcattactcttttgagtttttcctttttaactaattagtgagaattcattcctttcacataatattaataaataggccacatacacgtattaaattttgagtgagt

SEQ ID NO: 263672 - DNA, 585 bp, Cannabis indica
caacaaaaaataatccaaatataaaagagaaaaagaacaagatctcaccaaaaataaaacaacacaaaatcactaacagtcgtataaaaatatgacactattaaaaaaagaaatgcaatcaaacagctaaaaaaataaataaaaccaccatttgttgaaacgaattagtaatatatatataagaatctggatctaaaaataaatgaacaaatattaaaataattaaaaaaaatgaaaagttagaacattgaattatgtcataaacatctaaactgcaacaaaacatgtcccatacaaaaaatataggaatataacacagaacaacaacaatatctcatagaaatgagccaacacactaatcaataaacagttctagaaagacatgacaataataataacaaaacattgcagcacctgaactatattgcagtaaacatcgactccaacacttacctgaaaatttcaaacaataaaaatcaaacaataaaattttaaaaaatttaccaaatacaaaaacacgaagaaaaaacttgtactgatatgaaatatttttgatgtaccttggtaacgcagattttcgttaac

SEQ ID NO: 263673 - DNA, 1690 bp, Cannabis indica
ctacttctttagaaattctcccagtgtttgaaaatacacaatggaatatttttcttcgtaacaatatttataatattatctttataattttttaaaaactaatagtttatagtgctgaaaatagatttgaagttttttgtacacgcttggtaaattgaaatatcaaattaaaattctgttttcgataatgtaaactattcgaaattttcaaaaataatttacagagatgatattataactataacgaataccgctaataaaaaaaaaaataataattccaacaagtgattttggacgtgaaggttgaataaaaagttgtaattatcacccctcctacacttttatactcaccctaaatgattagttatttgttaatcaactattaggtgacgtttagtttactgaaatgtaattgtaatgataataaaaataataatagaatgtaatggtaatagtaatgatgtttggtttattttgtaatgaacattataattaatttcttttatttgatttgggaataaaaataaaattaaataattaagtaatatattgacaaaaatattctcaatttatttattgtcaacatagagaaacagagcaaggcaaagagagaaagagagtttcagcaaaagcttaatattattgatattataaatcctttatatagagaatacagaggatacattaaccaagaaaataactaccttaactaacaaacataattaactaattctatccaaaacagaaataacagccattagttaatattatttacatccccttcaaacgaaaagggatattagccattttgagtttgaatttaaggtagatgaatcggtctttagacagaggctttgtaagcaggtcagccacttgatcaacacttggaacaaaacgtactgaaagttgtttggccaaaatttgatccctaacaaaatacaaatcgatctcaatatgttttgatcgagcatgaaaaatagaatttgctgcaaaagtcgtagcactctgattgtcgacttaaataatagggcattgtgaaagagtgatcttcagttcagaaagtaatgagacaatccactttaattcagcagttgtgttggctagtgcacgaaactcacttttagtgcttgatctagcaacaacttgttgcttcttagagagcagctgatgagagcgtctgtcatcaatacagctggcccaatcagcatcggagtaactttctagtgtcaatgaagttgctggtttgatcaacaaaccctctgaagtggtgcctttgagatatcttagcaaccgtttacagacttcccaatgtgagattgttggagctttcaaaaattggctaagtttgttgattacaaaagcaacatcaggtctagtaagactgagatattgtagtgccccgattgtaatcctgtataatgttggatcatcaaataattctctatcattgagagatagtttgaaagtgcttctcagaggagtagaacaagttttgacaccttttatgtgaaccttgagtaagagatcttttatatactttgtttgtgacaggagcatgccatgatttgtctcgatgtatttctactccaagaaagtaatgtacttcactaatgtgagcttggatttaagaagtaaatctcagcttcatcgagatgacgagcctcgaatcctaaagagttatggttgcaag

SEQ ID NO: 263674 - DNA, 1198 bp, Cannabis indica
taacgtctttgtaactgtctttatgttctttagtcttgatatttgttgtatctaatgtaagggtatatttgtcaaaccctgagagtggtattattcaacttaagggtaaataagtgaatctgtaacaacaaattccacccagattctcttatttacccaaggatagttgatgatgctatgagggcttgaatgaccccaagggtcagtaccatttgtttatccctagcaagttcagtttgaacttagctaggataaacaccttggtcttcatgtttgtgacacctccttgtgtcaccttgtttttctctcttgcatagatcaagtcataaaacccttccatttggttttgtgactttctaaacgcaagtataacacatgttgtcttctttaagtaccttaaaatccatatgataatcaaccaatgtatcttcccagtcaataccatatacttgctaacagcaactatagtatatgttgtatctggtatggtactcaacatgaaatacatctttgaatcaatcccattagagttgaggatcttactcatatcctccaactctttatttatcttactgcatttttctttatgtctaaaaggccacatatgtttcacaacactctttcccttgggttttggaacacaaacccaagtcttctctttactcaaagagtatgtctcttcatccatagcacagttccacttcttagcatttttgctcttcatagcttctccacaactttctggtttgttcttctgtccttgcaaagcacttaacagtgcataggcaatgtcttcattccaaatgttgaagctatacttaggattctgtctaggtgctcttttaactttgtctctagtcaactggtagtcttccaactcctctgcttgactttcccttaggtttccttgttccacatgaacgatcttctctccctgttccacctgaacagtattttctccatgttccacttgaacagtgttttctccctgttccacctgaacagtgttctctccttgttcatcacttggaggtcttagatcaacgttgattgagttacctgcattgttagtactagggcaagaacctaaaacatttgggttagtagcaatgcatggaaaaatattttcatcaaatattgcatctctactattaatagttttaaaacctttttctcttacccaaagtctatacccttt

SEQ ID NO: 263675 - DNA, 561 bp, Cannabis indica
ttgaaagttgaaaataatatttttatgttttttattttatgagttttaaaaaatacttttaaaaaatttgaccgaactactattaatttttaattttttttttaaaaaaaaaaaactagaaaattatttttaaattattttctagtttctgtttgatgttatgtgtggttttgagaggttatttttgtgagaacagttggggcctgtagcatttaagcacaatcatccatggcgttgaccatagccacttaccatcggaaagcaagaaaattaatccgttggcaatgcttccaacctgtcaggtaaagcatttcataattcaccaagtgggtcccttcctactgaatccaaaacaacatcaaatcagagaatgaggcacgtgacgtaccataaggtacatgggcggtgggtttcccacgtagcagtgttatattggatgttgatgctgtaatggttcatttataggtggacccattccaccgcccaacctttaatcaagcttttaacctttgccaaccttgaaatccctacatttacctaaatatgagccatctctgaatg

SEQ ID NO: 263676 - DNA, 1141 bp, Cannabis indica
aagctaaagattgggaaatcaaatagttggaagaagggcaaaatatgaagagacgattcataatgactctcgaaactgtacaaacaccagaatcaaaggatgcgttttttccaagaaaatattttgacaaaaataccctctgtaattattaaaaagctctttttactaaaaaagaactttgtaaggagaaattgttatactcaaaattcagctgcaacctcaatgcacgacacgtgtcaaaataaagggaatgtaaatcaatgccattacttttatagaataactcattaattacgtaagtatcagagtatatttgtaactcgctgactataaggtcttaggcgaggaatcaatgaacaaattggcatttagtatattagcgagaaaccatatgtcactaaatgcgaatagtgaggcaccaaagaaagcgacctgtatcaatcatggacatgcttagcgtacaatgaacaaactaactgtaaaagtcggattggctcaagagcaactaagcgaggtgaccatctcgctatgggaagacttcctatagcttcatccgctaacggtaacgaggcttacaaccctggcgagttagaatggttctttttaaataagaaccgcgagcgacaccaaacatacattgtcgaccttggaaagaagaatggccccagcttgctattgggatcaatgtaaccaagtttctattgagacatctccagatacaacagcttaagatgtgttcaatacacgattattttgacccagtaaaagcgagaaaatcacagctatgcgattttcaaatcataaactgcatttatattacgcgatatgtaatcaaatcccacgattttagggataattgctgtaaacatattccggtcaactttgtaattaattgtcgactatgtaattataaatagtgacaaacaagagcaaaaaagggacaaaaaaactcatacaggaaatttcctaaaataaaaataagaaatctgaataagattgactcgtggactatacagaatttaaactgcaaaaccacgtaaaaaaccttctattcatatattatttttctatagcttttatttttctgtgtgaaattaatatcgtgaggctcaattttagttaacgaaaatatgcgttaaca

SEQ ID NO: 263677 - DNA, 639 bp, Cannabis indica
atatattagattgcctttttacatagtcaagttattttatgaagcataacatgcatattaagttatttttttttcatgtaaataaatacataattttgtaagaaaaaaatacataaattaaaagataatttatgcaatgtctatgcctttatcaggctgtttaaaaccgaaagtcatggaagctttggctttaatgtacgctcttcaatggcttaacgatcaccatttaccactgcactacattgaaacactctttgcttgtggttaaggggctgcaatcttctcaagcctacatatctgacttctatagtttgttagttaatatttctcatttagcgtccaatttccctggaggaaatgcctcatctcctaatgcctattgtattttaactatggttttaatataatagtattttgtcccctcgaggacatccgataatataatagtatttttatctaaaaataaaataaaattgatggtatagattattttataaaacagaatagaatgctataatatagacattaggttatctttctacataatcagtgtaagaaatttagttctaatatataagaattaacctttataattctagcttcaagatcatatttaaacaaacaaatgttaaatcaaaa

SEQ ID NO: 263678 - DNA, 907 bp, Cannabis indica
acacatatattaacatatatataaaatagaacgaatagtactactcttatatttataattaagttcatatgtatatatttacctgaagatgagattcaagattggcaaggataacagctggaatcattcctctaataccacctccatctatgctaagaattgttatgagacttccatatcttggccgcaaaatctttggtgttattatttcttctaattcagccatatatatatatgtaatatttatataatatatgacttatatattgttcttgggagtttctttttggtttggaaataaagaggaaatgataactctatttatagatgtttaacatgtacgtacgaactgatttatttactccccatttttagttctttattttttaactcacaacttgttaatatatataataccacgagtacttaattaatttcaaaagggaataaataaatgcgatttccatgattcaatcttatcctatattaatattaattattttcacattttttgcccaacattaataatgtatgtatagttgttaaatattaatactatatttataacagccatatttgttgcatgcatcattattataatattatttcgtgatcagttctacctacatataggatatcaatgaatatcattttcatatttgagcaaacctataatattgaatagtggccggttaattatatatattcatctaatatattttacaacatataattttagctacatgcttatatatcttatattaatacatcttcccgtatatatgaaaaatatcaataaaatatttaatatatgatatatattaattgtttaattttacctctctaataaacaagtttttctctatgatacaatctatactttgattaatttttttttttttttttt

SEQ ID NO: 263679 - DNA, 637 bp, Cannabis indica
tgtatcaaatatcaatgtggcatgcacccctttttttagtaataaataattactaatttactatcacacatctttagattctatgataggccttaataattaatatcattactattattcaaaaaaaaaaaaaataatcattactatctgtatatagtaaatagattcaatagaatactaatcgtattctcttcccagtagggccaaaactattgagtcaattttctgtgaaattaaatgtgtgtatacactcttaaaccagtatcaccgtaccagtcgacttgtcgtcaccgtcaactcacccacaccagtgaccagtcgactcgacacccacccacgcacggtaggcacccacccacgacgacaactggctcccttgtcggctcagttcggcgtcccgtgtccacccaccaatcggcgacggcgactgttctcttctccgactgcctcagcccaataggacccgaacccgattacacccaaccgggaaacacccgacccgatacccggcgcacccgaacaccgggttcgggtgtgcacttccaaaactcgaagcccaaaaacccgaacccgaaaccacgaaaaaccgaaaacccgacacttattaaactagcttcctaatcaactacttgatgaa

SEQ ID NO: 263680 - DNA, 279 bp, Cannabis indica
accaaaatgggataagaactcataacactctttgtcttttagtaattatttaagattatttggggatgatgtagggtatttgtccggcctaaggtgaggtgagtaaggcatgtgtcttaggcacccgaaagtttaagttttgaaatcgtgagaaaaaatattatcagtatgtacataaaatattaaatgatatgataatatatcgagatagtgtttagcagggattgttgagaatcatggggttccatctcaaaaccaattggcaatgagtggagtagc

SEQ ID NO: 263681 - DNA, 518 bp, Cannabis indica
atgctcatgatacgagtataacagttaagaaatttagctaagtgatgggtctatgagagatgagtcttgttatttgaacttagttggaacttcctcctcaattccttttggtggtcactccattgtaacatatatactctaagtattatttctcctttatatggagcaggtggtattaggtagtgattaggggagtgagtgagtgagggaacaagggagagcaagagagcacagagagggaatgagaacacggagagagagcagggagagagagtgggaacagggggacagagaacagggagagagtggagcagggagctctgatgtgggtagtatggcacggggagctcaacctgtgccttggcccttcctcatgttggctctccctctcgtgtggtgtctcgccttggtagttggcctcttattttcttgctcatacacttctaatctagacatctccaaaaattacacttaacaatgttggggagtcaacacttgccccctagtctataagaatt

SEQ ID NO: 263682 - DNA, 507 bp, Cannabis indica
aaatcagttatgtctttttcaccaaatacttctgaggcttcaaaacaatcctttcaaaatattcttggcatgcccatttgtgagtgtcatgaatcatacctgggccttcctgcgtattctgaacgggataaaaaacaattgttcaatcaaattaaagagcgcatttggaagttgttaaatgcatggactgataagattttctcggttggtggtaaagaggttcttctcaaggctgtcattcaatctattccaacctatgctatgagctgcttcaaacttcccgttaaattttgccatgaaattgagagtttgatgtctaatttttggtggggctctacttctgaaaaaagaaaattcattggaaacaatggaagtttctttgtaaatcaaaattggaaggtggtctcggtttccaaatttatccacttcaatcaagcttttggctaaacaagcttggaggttatttcaaaatcctgaatctctactatatcgtgttctcaaaggaag

SEQ ID NO: 263683 - DNA, 978 bp, Cannabis indica
aagcatggataaacatcgttttactaatatatggtcttgatagggcaagggagtacacagctgggcccctatcatgctggtgacaaggtgcttcataagtcacctggtcaccccccctaaagagcttattggtgttttaagggatttccatgaacatagatgattttagctctccatacatatgtgagtggaaatacaaagaaagaaagctaaacaacaaaagacgcccaaccccaatgaggtgcttggtatacgacttgactaatgatcaagcaccaaggcatgctcatgttacaaaatggccccaatgtgggtgtgccatggggcagcacgccacattctccccaacttaattgtttggcgtcctcgacgaacctgctgcatgatcttcagtcttctacataaactactgcaagtcctccgccttctcccagctgatctcgtcattagcaaggcccttccatttgaccaggtactcttttctcttctttttcttcacacgaatagttctttctacaaggattcttctagttctctactgctgcatcgttgaatgctgatgtcgtccctggtagactggttgcgtgctggatcttctggatcttcatggtacggcttgaggttgctgacgtgcaggaccgggtgtatcttcatccatgaaggtagtttgactttgtaggatgctagatgactggaatagggccctcgtatttgcgtacgagtctgatgtccttgtcccctcgaaatctcaattgttctggccttagtttgatcaacactaagtcacctgccttgaactccaacggtcagcgtttcttatcttcccacttcttcattctccgtgaagctttctctaggtatgcttgggcaatctctgtgttcttcttccagtctttcgtaaaatcaaaggcccgtggattccgtccgtggtattcatccactgtgtggggtaacagtgggtgctgtccattcacaact

SEQ ID NO: 263684 - DNA, 719 bp, Cannabis indica
taagagaaatttgacaattcatgattaaaaattgcgcatggtcttttagtatgccacattaaaatacatagaaatttaatactctaaagttaattaaatctcaaaataccctcctcataccttccctttttctctcagccctctcttcctctctctctaactctcaccaaacccaactgatacccacaaccacagaacaagattgaaccagacccagaccaaacccacgaccaccgcaccgcctctggcgaaacccactccgaagacaaaacgtaggacaaaatcaaagaggatatcgcaaaaccacaaagagaaaccgtgaaacccaaagccctaaaatctcaaccaccccgaaatccctacccatcattggaattctcaactcgattattttctattatttttttttaggtttttgacgatgtcgcgaaacatcactaaatgtcactatatcgcgaaacatcgctaaatgtctctatattgcgaaacatcactaaatgtcgtgaaattatactcaaattttcacgatgattagcgatgtgctgtgcatttttttagtctcatattacaaatacttcgctaatatcatcgctaaatacacaaaacattgccaaatatcgctaaacttcatccctaacatcagatttgttctatcattacaaatacatcgctaaaatatcgcaaaaatattgcaaaaaaactaaaaaactagaaagaaa

SEQ ID NO: 263685 - DNA, 609 bp, Cannabis indica
atatccaaaaagaatgttaagaaagttacattgaaacatcaaagtataagacgaacaatgaaaatgacttatgttatttataatacacgagacatgtatttattgttcatcattccctgcagagaatgatacgaattgaattcaattaattttaaaaagtgttcgtattttatatattagtcatgttattatacattgttattacttacaatatttatattaaaattattgcatgtgacatagattaaagatcaaattttgcatacatcttgaagattatgcaaaaacaatattcatatattctttgaaatattgtaaaagaaattgctgaataatttcttatatttttatgtgaaattaattaaatgcttaattaaatgcgaaataataaaactgatactgaaacagtttttctgtagctacaaaaaacaactctgtaactccagaaggaaccaaaacaagcagtgcagaaaagtaaaaaaatacaagatttttgtacgtggtttcaataatcctttcagattgttactagtccatggggccaggcccagagatagtattcattagataggtctcaaaaatacaaagtaattgacttatgcataaata

SEQ ID NO: 263686 - DNA, 1117 bp, Cannabis indica
aatattttcttagttgatgattacaatcggtgtgttttggacctacttgctaaccactaaggatgagtgtctagaaagtttagaaatttgaaaactcaactgaaaaactaaaccgatgtcaaaggttataagaaccttaggacaaataatggtttggagtttgttaactctgagtttgacaaaatgtgtcaagggttcggaatcactaggcatagaagcgtagtgaagacgctagagaaaaatggtgttactgaaaggatgaaccgaaccttgttgaactaatgttagatgtttactgtaaagatttgggttagataaaccattttagtcacagtttagtgttaagcagttgttccactcaggttgaccggtacatctgaattcggaaacgaggtaggattagtataatgatatgcatatgtgtttacatgtttagtgtgcatgtttgttaagcttgttaggttacattgatagcaggatcaatatacgtagaattgtattggataccgataaatgtatgtttggctcaagtactatttgacactatcacatcggtacgactatagtatgactagagtaccgagtataggttgatattattgtcaatgtaactgtgtaggtatattctagactcagtaccaccttgggtgcagaggtaagattataattgggtgtatgggcacctaattgtaattctggttatatttatgattatgattatgattatgcttttcttagtgaatttgtcgtctcatagttattgtttgcatgtgtaggtaagggcaaggctaaggctgagcagccgtgagagcgagcggatgaagattgtacatgtcagggcggttaggcctggagcatatgatcttgggaacaacaagctgtattttgtgtggccattaggcgacaacttttgtatagaacattttgagtcagttgtaaatatttaatacttgggatctcgattatataaaaattatttatattcattatttgtaatatcaagattaaaatagtatttaatttttttttagaatattaatggtgcgaggataattatctcatttatttgtgttgttagtgagtagagactattgcttagagtagttgtaccaatttt

SEQ ID NO: 263687 - DNA, 1363 bp, Cannabis indica
gattctttggagtgtttggggggcccgtaatgatctagtctggaatgataaggctatttctgtggaaagagttgtttcatctgcaattacttaccttgatctttggaaatctgctcaaaatatcaatggaggagcttcgtcttcttctagtcagcctcgtgctggtgttgagcactggattaaaccatctttgggagagttgaaggttaattgtgatgctgctctgttttctggagaaaggagtcatggattgggttggattgccagggatcatgctgggttgtgtgttgctgcggcagctgtcaaacaccgaggagatattgaccctgttgttgctgaggcgctgtccatgaaggaggctttgagttggattaaatcctgttgggaagatagcaggactgttgagggcttttgtcctacagcggtaatgttggagtcggattgtcttgtgttggttaatgctattaatagcaagagccatattctgtctcctcttggtcttattgtttcggattgtatttctcttatacgatccttttctagttttgatatttcagttcagtttgttaaacgatctgggaaccaagcggctaactggttagctcgttcttctggttcatgtcctgatcgtatttccagtagggggtctgtcccttctggtttggaagctattttgttagctgatttgctttaatgaaagttgcaatctttgtttcaaaaaaaaatgatcctcgtaaaataaattccaacattgggaactgatcccagacccagacttggacctagatagggatctggatacgaacctggactcgcacccagacccaaacccagaccgggattgaaactcgggacctagatccagaccgagaccctgaccctaacccagacctagacccacatccggggcccgaacttggacttggactcgaatccaaacccaaatcgaattcggacatagacctagacccggacctaaactcgaactaggactcagaccctgacctagacccgaacccagatcgggatcgaaacttgggacctagatccaaaccgagaccttgacccagacccagacctggacccacactcaggacccaaactcagaactggactcgaatccaaacccaaattgaatctgaacctagacctagactcggacccagatcgaatcttaacctagacctagacatgaacccagatctggacctcgacaaagatcggaacccaagcctagactcggaccatgacttgaaccccgaccgggtcctagactcggaccaggacctaggactcggacctagatgggggaccttgttgggttttatgccgtaaataaatctcatttcaatataatcagatt

SEQ ID NO: 263688 - DNA, 758 bp, Cannabis indica
tatctttaatgaatttatctcacacatttttccctagtcgggttgcatgaggtgccgactgtttctcttcgtcaaggttaacttcgttcatcccgtgtggcaagttttaccttgtttatttattattgcatctgacacgttgtatatcttgggcggacactcaaaagaatatttcacccgatatataagaaaaaaaaagtctgtaaaaatgtaataaataaataaataaataaaaaagaactcaaaattctgtaagaaaaaaaatgtaaattttggttgttttttggtatttttaaaataatcctatagtttttatatactttcaatagaaatttaatgttttgttgacttttttatgtttttttattaaaataaagtttattttacattaatgtatcgaaatataattgtaaaatttaagctaaatataacattgattcatttttaaactaaatttagcacaaaatttacactattcattggagatagtcttacaaccctaagtttcgatatcaaattacacatttatatttcataaaatagtattaaatataccttgaagaaaattttagtgaaaaatgattttaatactataataatacactttattagagcatctctaaccacactctctaaacagactccttagttaaaatagagagtaaaacttaaaaaaatgtgcttcaaccatatgaaaaatggctcgctataatagagaatgaataggaaaatctataaatgtaagagctctatacttt

SEQ ID NO: 263689 - DNA, 1413 bp, Cannabis indica
atacatattacaattagtgatctttttctctaagttttttcgttcatttttcgtagaatctgcccctatttataggaatatagattggtaattatttacatttaaatttgaatcacataactgtttagtgaaacgtgggagttgatcaggtttcactaaaacacgtgtagataacaattgataaccgcatatcgctgcttatcattcttatcttcaaggcggttgacgctgacttggacagtggtatctcgctttgcctatagatgaccaatgatgagttggctaatcatatgacctcgcagactagacaatcatgtcctgcatatttccatgtcaatacacttagttattataatgtagaatatacgctaactgtttcaacaactgactcgcctcgttaatatttccttatgtgtagcaaggtgaacgtctcgctatacactatccgtggttgattcaaaaaactttacttataaacgagtctttttcttgggattgcgtattccaaagtaggttgatgtctcatcaatacagacattaatagtcttgtatccttgtctcgcctaagactatacagttagcgagttatgaatatactctattaattctatatttaatgagttattccttttttataattgttattatatctggtggttcatattaaacttaattggcacgtgttacactctaaagtgtagctgaatttcgagtataacactaatttttttctagatgttaaaatagatacaaggtacattggtgcacctcttttagggaatctattagaaaatcaccaaaacatttagaggataggtatttttaagtatttttcttatttatatattagtttgttatataatgtctaaaagttatcagtttattatttttgtatgtttatagttcgagaagttatatttgcacattcaaaaattataattatactctattttaatcaaataattatatatttattcatatgtaaaattactaaaatatacaatttaaaattttagaaaatgttatagtcccacttaaaaatggtacatcaatttactcatgttctctttcgatacattggagaatttaaacctaattttttttatagtcatgcacattgaagttatttaagacattctctaaaagttataagaaaattagaaaaaactaatcaactcaaaacaaggttcaaacagtatattacaatcgtgattattttaattgatacgcatgtgagatagactatttaaacattattttctatattgtgaatttaaattattttaaatttctcaattttttgcaagatttcttaaatgacaataacatacaagaccataaaaatttgactaacaattttcctcgatgccgaaatgcatgcacccttttttagggagtgcattgtagaagcat

SEQ ID NO: 263690 - DNA, 1567 bp, Cannabis indica
aggtctgtgggatacggtattacacattcaatcatagagaataattttgacactaaacaacaaaatttacgtagcttcataatcctaaaaatacactaaagtatgaatatcaactaaatccgcaagcatactaatacccaggtatttggggaaacatagtactggcaactaaatatacaaataaacgtacaagcaaagacctaattaaaaatttccattgaaaaaacagcttaaaagatttgagaagtaggtcctcacctcgtcaagaacaagaatctctagtgaaccactaatggatgctgattgaagaacaccaaccgacatacatttcaagatacaagcaggagtcgaaatcagaatatctggtggtcctgacaatgcatttctctgcaatttaaactcaacgactaaggatcaactattgcttagcaaaaaaaacatgtcccaagaaagtaaacttccaaatagtcaaaaaagaagcaaagaacaaaccaattccgaagcagacatactgcttttcaactggataactttcaactgaactctacacagctcaatgagtgacaagacttccccatatacctaccaatacattatacatttacgtattcagaatcagtcaattcaaccaaaataaaaagtgggaaattctgaatgaatattttataacctacttgctgacagagttcccgagttggtacgagtacaaatgcactagggccaagtttggttcttgcaccagtatcgacaaacaacttctgcagcaacggaacaaggtatgcgaaggtcttcccagaaccagtttttgctcgagcaaccacatctttaccttcctggagatcaaaatcaatgacactattaagatcatttagaaagccaaaaatgagtatactaatgaatttgaagagaaaaagatgtggatataatggattaagtggaaaacttactaagacgagaggaatagccacgctttgaatgggggtgggtttctgaattcccttcttttgcaaggcacgagttaggcgaggttccactccaagcttttcgaagctgggctcctcttcatcctcttccacttctttgcgttcgggtacgttctcgggtttttcaattgtttccgccattgaagacagggaaactttggcaataataccaaattatgatgcgtggagacgaacagagtctacagaagtagaacaactagggtttaaggggtttttcttattttgacaaaacttctcttttcccctctctctctctaaaatcgggtcggcttacaacattgaagcccaatatatttttattttgaacgggccttatttcctctttgtgaaaattaccctgattttccaaaactttgttactaatattaattttgatcactaatggcatattttagtttttaaacttattttatggtatttaagcaatatacatgtaaacttaattttaacgctaattaggatttttttctcccggaactttgacatgtaccaaatcatgccccctgaaatttttagctgttaaaaattccccctgaactatttagattgttagatttaaggac

SEQ ID NO: 263691 - DNA, 1347 bp, Cannabis indica
tgtgttcttgatcgaggtgaatgaatctcacaacgggcatctgtgcttttaattagtgtttttcttgaacttttgcagattgagctttcttttgttcagataaaaatggcatctactcaccaaaaaaacaaaagagcaaatgtcagtaacatttttttttctgtttttttggtaatcttttcaggaaataaagcatatttcacttgttttgaattcaaattttgtgtaaacttttcccaatttccatatcatgtgtgttatgccacttatggaggtgttgataatataatatgccttcttctggtcatattcttttcatatcacttattatgacattgttgcagaagcactatatgacatgaatggtgggcttgtgagtcaccaatcaacaatcattattattcatcttcatgttcatcacttttgtttcgcaaaaagggtatctattttttgagagtaatttacggataaatacttaaatttagctttcgcatgtgaagaaatactcaagttataattttagaacttctgtaagtacttgatcgttaagttttaagtagattgtcacatgacaatctttaattagtctaagtcattcaaattttatttttatttaaaaattaatttaaatatacaaataagaaaatagcacgtgaataatgacttgacacttaatggataggtacttaagaaaattcgtattattaattaaacttaagtatttatttgttattaaaaagtaaatttaagtatttgcgctgtaaattattttttttattctttttgagatttcaaacttaaatttgttgtcttttagtgaaaaaaaaaactatatttgaatacacaaaaaattagttatagaaaacttcctataaattaaagatattgctgaaaaaattcaagagagatctgaaaaagaatttaagaaaagtcatgaaaagtattggtgactatatttaatggctaataatgtaaagtataaacctttgttcaaaacccctcaaaaaaaaaaacttaagttcaaaagaaattaatagtacaatggaccccaacttgcataacactattaataatgtgtgtaaagtagtacatcacatcactagctcttacaaaactaaatactatcactaaacttgtctttgagttttggcattaaaatacttaagcttaaatcttggattcttaactttgtcttaggttaaaatttgtgggttttatgcttttaaccctaatcttaatgaaatggggttgagtaatgaaaaaagaacaatcattatgttctttagttagacttttttgtaagtgaaaaaatattaaaatcatttaatagactttggacatgtattt

SEQ ID NO: 263692 - DNA, 494 bp, Cannabis indica
tatgaaggacttaaaagttatagtgtcgtaacaactatcgacaagaagcatctatagttgagtgctacatatctcaagaggctatggaattttgttcagtagttacatggctgcagttgaggcaataggaaagagacaaaccaacaacagtgacccagatgaggttgatagaggattaagggggaaagggacaatggtgacagtgtccaagcttgaactagatcaagctcaattagtcgtgatgaacaataatgcagaggttcaaccatatataacgtaagtagcttttctttgattaacattacttaagtcacgatgaacaataacttgatttaccttacttattttacagtgaccatatggagctgttacaatcaatggttccaagaaatcataaaaataaacaaaaatgggttgcagaccagcatcgtcaaactttcattgggtggttaaggaataccattatagcaaagttgaacgaaccgaatcatgga

SEQ ID NO: 263693 - DNA, 624 bp, Cannabis indica
attcctatataaggaacacgattcagaaagccaaggcaagcagaaatatgcctgaaaagtgaatgaaagaggagaggatcaatcttgaagactcggagcgatatcaccatctagtttctttcttttaccctctaatttattttttatgtctagttttgtttcagaattaaacatggatgtttttattattgttatgagctaaatttcccatttagggaggatgatggaatcttgtttgaagttttgcctagttaatgaataattgccattccaccatcttgatttgtgaaattatctatatttgtgtttaaattccatgtgtaggcttcatcaccttctacattttctatgatctcaattcaaaatatgaaaagtgagaattgagaatgctaaaattggataatcgaggttctatgtgaaacgagagtatctgcatgacctatatgacatttagattattacttaatgctgattactaggggtgttcataaaaaccgaaaaaccgaaaccgaccatcaaaccgaccagaccgtaactgaattttcggttccacgtcatcaccgaatttggcggtcggtttcgattttggtttttttgacacggcggtcggtttcggttcttgaa

SEQ ID NO: 263694 - DNA, 643 bp, Cannabis indica
atctgaacgaaaggagtcatattattcatattgttttagaattcatattaggttgttaatccaacatacttgttagtaaatctagatcctggtaaaaataatttccaacagggcatgcactcaatcactaaagcttgaattttaatggtgaagaacactttagtactcgaattagaagagagaaaagaagaagaagaagtctcaaactctctagttgtctgagaagaagaaaactaggtcaagagtcattaattaaataatgagaccattcttttctatttataataattcacttagggttaggattgaattatttggaataaaaaaatgataaaatactagcaaaaataggactatagtggccgacccctatgtgggcccaacactagttagatttttgccatttttcttaaccatttatatatttttttttcacaaatgccactttttgcaatcctaatcccatatatgtcaaaactatttatttaataattaaaattaattatcaaataaaattgtcatttataatatttattaattagattccacgaagtctcttaattaataaataaccctaaaatctattcttcacaatcaagcaatttcttagtgaaaactcataaactagacacagtctaatttt

SEQ ID NO: 263695 - DNA, 563 bp, Cannabis indica
cctcctcagcaattaaggctagctctaccactttcttgtacaaagtgtcatgtgaagtggtaatattcaagtaccgactgatcatggcattcagtcctctcacatatttctgtttcttggtgaaatctgtgggcactagatcaccagcaaacttagacagtcgatcaaactccagagtgcattcggtcacagacattttcccctaagtcatattcacaaagtcttccatgtgtgaagtcctcacagcgatgttataaaatttttcctcaaacagactcttgaattactgccaggttattatactaatgtctcgagtctgccccacaatatcccaccaaatgcgggcatgatcttgcaacatgaaagctgcacaattcactctctcagtttatgtcacccccatattatcaaggatacgggtgattgtgctcatccactgctcggccttgattatatcagtacctcccagaaaattcaaaggttggagcttcacaaaccgctctaacatagagtctctatgcggcattataaacccctggttacccaccactggcacaggtgct

SEQ ID NO: 263696 - DNA, 532 bp, Cannabis indica
tccctctgtattctttccactacgttttttatttcttaaatttttgtgtcgttttaactttcgttgtactgaaaacctcagaagaatcaaaatgtagtttttattatatccatgagtcaccattaatggagacccctggaatcgatgtatctgtttcacgataataaagatttttaagtgggaattggttaatgttattgactgttctaataagtcttgattaagctggtacaataccagtagctaaaacaagaacaatagcaagaaaatagagggaacttgtgtatgtattgatactaaaacctcttaactcttctataccctccaattctctttagtatatcctatatattgcattccttcactaacccaacccttaatacaaaggcccatatacctttttatttaggtgggataatttcacagatgcacaaaaataacaaaaatacggtttcacggaattttaaacatttttatgatttttttgattttatttacatgaaatacggtctttttatgttgaaattttgtt

SEQ ID NO: 263697 - DNA, 922 bp, Cannabis indica
taaatttatttatttatgctgctgtgagttagtaatcggtctggagcaatgaattttacttcatttttacttggttagcatctttgcagggggtaaccaaatcaaaaactgaggcagctggacctccacttgcaattaccgtgagaggtgttagggagggcattgtcaagggtcgagctctctggcagatgtttttctctatagcccgattttctagagtggcacttaactatttagccaatcggacaaagcgggtagctagatgaaaaggtctgcattagccttattgagagctacatgatatcttcattgtgtacataacatctgttaaattttttgtttgtcattgactgtctggaatatggtttgttgttcccctttcagtttaaaaatcttgtagatgtagaataattaagttgaggagacactgtatttttacagattgcacgagtaactttttattatccttttttcagcttagacatgttttgtatgcgttaggtgctcgtgtagtaaaatcttaggcttgttgaatgcttgctgttttttttgttagtgttttaaaaagtaaaagaaaaaattgttggagaactctggacttagtgatgtataaattgttgaatcgttcaaggtttaagtcttagattcggctgtacagtaataaggtttcttcataaatggcacttgcaaatgcagttttgccatattttaatttgttgtaatggttgaagttttatagttgaagtacaacctgaattggactacaaaagggggaaagaattagaactattgatttgagtataggatgatgagaattgaaacatgtattaggcaatgtcatgtggtgtttctgaaggtgccattcacagttttaatggaagacgaattagtgagacttaggggtagtgaatttgttggcggt

SEQ ID NO: 263698 - DNA, 859 bp, Cannabis indica
aagtcttccttgtccccaactttccccatcagtcttgacaaatattatgttccatttacaaagagtaatggagatatagggtccccttgccttaagcctctcttagattcaaagaaaccatgtaaagttccattgaacataagagaaaacctaggtgttgtgatgcattgcataatcaatttaacaaattggacaagaaattgtagcccatatagtattttttctataaattctcattcaactatgtcataggcctttttgatatccaatttgatcaaacaccctagtttgttggatttcctaccataatgtcttaccagattttggcaaatcatgatgttgtgccctataaactacctttaataaaacctccttgtaagttagagataatatcaggtaacattaatttgattctagcactcaaaagcttagttgtaatttagtaaatagcattgcaacaagtaattagtctaaaatctttgactgtgttaggacattttacctttagaacaagggtgatcttgagttgatttcttgaggatcttgccaaaacccaactccttgctcaaagccacaaccaattccaatgtgctccacaaccaaattgttaattttccatttatgctacaaagttcatgaatttttcttatcaaaaatatgtatttttcatcttcaatatcatgtatttttttattgttaaagtaatttttcacttagttctttattatgcaaaagtataatactattcgattaaatttctttcattaaattgtttatatttaatttttagaatataagtgttatattttgcctacacatagtttcttaaattttgtgtagtttcattaaattgtaacac

SEQ ID NO: 263699 - DNA, 757 bp, Cannabis indica
aaaaccaaaaatattgtggcagcagttgaacaagagctcaactagatgatccccatcatcgaatacataaccaaaggcgagttgccccaagagaggacactgtccagaaggatacagtatcaagcacactgttatgtgatgatggataacattctctacagaagaggactcagcatgccttacctaaggtgtgtatcggacccaagagaggacactgtccagaaggatacagtatcaagcgcactattatgtgatgatggataactatgcgtatcgtttggccggaagttgggtcaggttggagacaaaatggcttgtcaactcggaggcgaaaggagcaagagtaggaccgacgaagcggttgaaccagtccgtcggagggtccatgttcaggtaccaagcgttcctaaaggcctccttgcgtaaggaattttactgagcctcctgtaacaccttttttagggcttccacctcggcattcccccttgtgtacttggccatggcatagttatgcttggcaatccgaagttactgcctttcctcatctacggggacgggagtaaggatgatgctgggaggtacagtgtattcctcgacttctggcagaatccatgaatcagagctgacggctggagtgtccacctgttggaaattattttaccaggatctagaattactaccaagaatgtttgattaacatcctaatatgaaattctaaacaatgaaaataaacacatataaagtttaggaaaacctt

SEQ ID NO: 263700 - DNA, 1082 bp, Cannabis indica
aatattgaataaacctaaattaaaccaataaatacatatgaaatacatctaacggatagaaccgatccaatccaacatccaatgaatgttggatcgattggatgattgaaattaattggatcagatcggatggtaaaatctaatatccaatatataattggtcggatctggataggcctaaaaacattagatgtgatccaatgaacacccctagttgtaggaactgtgggggtcgactatggcttcttatagcaagtctgttcgtgatctagatgaggaatctataactcaagctcagaaactcatagacaaaattgaatgaataatatctctttattgtaataaagtgtagtagttacaataagggattaacaatgttgttcaatgcctatttataggcttggtgcttctgttggaataacagaatcaacggtcagtcaagctgaccgtccttaggcaactaacactaactaactcggtcacatgaccaagcacctagactagcaattaactaacagaattaatcctaggtaaggtgatattgtctttacgaactttgataaacgccctcgaattaagattctcgtcgaacctgccattcgagagagggagcttcttcttccaacatgtttcgtctctaaagatagcaacagcacacaaacaatctttcaagcaagaatctttgcaatcctctccattaaaaggcttcagcatgacataatccgataagggccaatctgcattgtgcaactcctcaacatcatagagatcttttatgttgggagtaagctcgtcttcagcgcagccttgtatgaaatcgggtttgcagcttccatattcgtcgttgggatcaataaaagagtactttttggggcattggcatgttggtcttgaatcttcattgagagtacaaatgctgttgtatccacaaactccaataccggcagagacaagagagcgttggcatatgttttcgggtatggaccaaagaacagtccatttcccatccccattggatctcttgggatgataatatttagtgaaaaagaccatcaaaatcaagagtagctcttatataagtt

SEQ ID NO: 263701 - DNA, 1288 bp, Cannabis indica
tccttgatatggaatatctagctctaatactcaataaagtctctcaaaaaaacagtttaaagtttcttcatcgctgtcgtgctttaaattgacctatttaagctttgtagatgattcttttgttctttaaaggatatctgccttctataatgcttcttcttaaaagcttcaagagattttcaaaaacttcaggtctccaagcgaatgtctctaaggctaaaatgttctattcaggatagagtgatcaggatgttaatcaagtgttaaatgattcaagtttcaaacaaagttagctcccctttcgatatctaggagtcccaatttactcaaaaatagtatctaatactgattgtgaagttcttgtggaaaagatggtgcaccctattgaaacttgaagctctagacacctctcatatataggtcatgtggtacttgtagttattcattcatattggtcttaagtattcttagaagataatgctgaagaaaattgatcaaatttgtagggcggatatttggagtggagttgttgatgctagagggtcggggtatatcaaatgcattgatgcatgcaaaccaaaaaaggaaggaggtttgggtttcaagaacattgaagaatggaacaaaggaataattggtaagcatgtgtcaatcttggcaagaaaaacggaaaatctttgggtaaagtgaatccatcctatttatttaatgactgaggattggtgggagtacaatactacctcaaattgtagttgatattggaagataatgattcaagtcagagatcccagtttgagaacctaaactacttaataaaccaggtatgtaaaactctattttctcccccttctcctgctatctggtacactgctaatgtttggatagcttttcctaatattgttttatagcttggttagtggcttggaagaggctcaacacgagagataagttgataatgcatggggctgtagttgaatttcgttgcttgattgtgagatttagcctgaaaaattattatcaccttttttttttactgcgagttctgccaaagagtgatcaaggagctgcggaattgggtggggattggttcaaactttaaggtatttttaactacattcgaagatgcaaagtgagcaaaatgagaagagatacctatattatgtttttaatgcttgtaattatttgatttgaactgaaacgaataggtcattgtgattgcatgaagtaaaaactcctataactattgttggaagatcaaaaaaagctaattgtaaatagataaatagga

SEQ ID NO: 263702 - DNA, 636 bp, Cannabis indica
aatattacgtgaactattaaaaaatttatcacatgaagtgtacatgtgagcagttctctgtggcacgaggtttttagacaggagtgtaaagagtaaaacggaatgagagttcagtaggttgccgtcaaaattttaatttttgtggttaagtgttaaaaaatataaagtttaggtagttttgtcaccaatattcattttttttaacttacttttgtatttttttttgttttaattaataaaatatatataaagatataatatttaaatgataaagagaaaaatataaaaaaagaaattaatgtatagtataaagtaaattagaggagtattattctcaatctcttattacactattataatctcttactcaacctctctatcagaaaacatatcttgaaatattttaatttcaaatttttttcatgtttgtgtttgtttatcacacatggtacaaatttcgaaaagattatagtgttcaaaacaagtttgaattttttttaaatacacatcgtgaactaaaatatcaaaaactctatgcagttattattcaaacattgaccaaatgtgcataaattgattaaaagattggaattaacattttaatatgagaggtaaaaaaaaaaaaatgaaattttt

SEQ ID NO: 263703 - DNA, 565 bp, Cannabis indica
ctcttccctactgttcagatctgaaaccggttgaaccccaccctgctgcttctgcactgcgatcgtaccggcgtcactccccctctcctggtcgacacactgttccgaccctgctgcttcagtcggcgccttcaatcccggcctttgacctagttttttccgtttcgccatggaacgagagaaaccgtggtcaggaggcgttcaattttagaagaagaaagagaagtatgataaatgtgagaatggatagacactactttgcttcacaaattatatagtatttatattgagagctacttgagagtacaaacgatagagacacaagtacatatattttggcttttatatgatttattgatattaaccaaaaaatacaaattaaatcgatcattattaacaaatttaattggcctacccctagtcctctactaaaacttgatcctcatatattaaaaaaatttccacgatataagttagcttattttgcttcgtttgtttacttattaggctatctcagtattcaaagccggtcatttttctatggaaaatagaaatttcgcttgaa

SEQ ID NO: 263704 - DNA, 1272 bp, Cannabis indica
gtttagatttaaaattttaatactcgttagtgttttgggaaaaacaatcattattctatagctattatgacataggacccggatcgtcgatcgttctccaatcaggtcggccaacatacctgaaccgaaacttgaggtaagaaaaatataatttgatgcaatattcttggcgacgtatcgggcgtaggtacgggcatcagtgacatatgataagtaccgggcgtaggtacgggctcgtctgattagacgatgcgatatattagtgccaagttgtggcacgggctcacctaattaggtggcacaatgatattatatatgatattgcattatgacacgggcttgcctaattaggcaatgcaaatatgtgagtatatctatttatatgcatatgactggttatattacctactgttgaatgttatagtttaattattatgtgataatgaaatgtataattagctatttaatgtatcatttttttattacttttcttgttgagtctatgtgactcacaggtgctttgtggtgcaggtaagggcaaggaaaagttagaacaaccatgagatggcggtcttctccagcaatgtacatattatccccaccagcctgggtgttgtgtttccaggagttgttttagactggttgtgtctgctgtattttgaattgttgttgtatatcgtcgtttggataaatcttttataacagagatccccggaactcctttttactgccgttataatgcccgtttttagtattttattttggtcaagtttttattatcctcacagtttttaataattaattaatatattagtattaaataagttttataaaatcacacacgtggcgttcctagggattagggcgttacacacttgcttcttcacactttgttttttgcccttgagagcagtttgtcgtatttcccacattagggtctgttcgagtcctcgctctatgggtttgggaaaaatgttggtgatttctagcaggtgacctacgttctcccggttgagtcccaagatcctcctcattgtcatgaaggatttctcgttcatcaatttccggttgtctcccatctgactgttcgttctgatttttagggggtatctcattttccctgggttgttcttcccgggcattttcctgtctcctggttcgtgagccacgaggtttgcctcacggtcttctcactccaagttcaggttgattttgagcattcgtccgttgtgccaccctggctgaggctgcatcacgctctaactcagcgtt

SEQ ID NO: 263705 - DNA, 658 bp, Cannabis indica
actaacatgaactcatcttgataccttgtaaatctttacttgttaacacattctttcctcttagaaatctctggaacgattatcgattctgcatcctaatatgaatctttctagcgtactttgtcttcactcatacgctttccgggatgctccctgaaagatttcccctcttgagattacccaagttaagtatgcttaactccaaggtaagctcatggtgggttatcaaaaagtagatgcttctttgtcgttcctaattgtttttcttgcttttgtcctttcgttatttaaatctaattttcattactcccttcattgttctcttacaattcctcgtcgattatgttcacttatgcttgagaaatttccatcttattgtaaacttgaatcttatccatctccatttagtttaacttgcatccatttcctgagttcttagctaataacaattgatcaagatccttccttgatctcaaagcttcgtatctgtgttaggtagaaatcttaaaattccatttttaacacacccagaaatatacatatctcaagtatattctctgttttattgaaaaccccttagtatgaaataacattccaacttttagtcagtctctcatcgatggtgttgattcatcaacatctaagactcttatattct

SEQ ID NO: 263706 - DNA, 1700 bp, Cannabis indica
aaaaaactgtaaatgtaaaaaatattctttaaacgtaaaaatataaatattttacaaaaaaaatagtgtcttatgtaattattcctttgttttaaagggacttccctacaattacatgaataaaacgattaaatacaaaaactactgggcaatacccaataccaaattgctttttaagtaataaaacaccaataaaaaaattaataagaaaaaaaaatttgactgatggaatttttttcaagttaatgatcccctaataaaatcgtatagattccattaatgagaaaggagcaagccagatttgaactctcacgctgtgaagaatcttggtattaaacttgaaagagttgcaaaaacagcacattaaacggtaactttaacaaactaataagagagaaaacaaacaaccacaactacggctaacgaacttagaaatatacaatatacgttgttcccctttgttttgtcaactcaatatacgttgaccccccaaattcacatctatatttttccctacaaaatttaatcccttccttcttattcatgatagaactgctcaacaatggcatcaccttagggcgtttacaaaagccatcaaagaatccacatccctcttctctgaagggtactttattggctgagctgagtgtttagggaagaaaagtatggtgggaaagcttcctagctgcaattcactctttgcaaactccttgtgctcaccatctgctctgaactttccaactttgacattgcttccagccaatttgtcagccaattccaagtaagatccttccattgcctggcaaaatgggcaccatggtgcatacatcactacaagccacggttcctttctgttctccaactttgtcaaattctctatccctgaacggctcaaagtcaccaaatttgatgactcgaaaatgtctgattctgcagcagctccacttgcattagctgcatcattggcctgaccatcttcctgtttgatgtttcccttgtgaagaccacactccttagctttggcatcctcccaccaccaccttccttctctttcgtgttgtccaggtagaaccggccttgtgcatggttcgcagccaatggagacgtagccttgagaatgcaatgaattcacagggatttccatggcacggaggaagttccaaacatctccaccatcaacatttgctacagggttccatttcacaaggctgccaactccaccatccaagccctcaaaaacagggtcgacttggacaactgggatttcagaacgagtacctggagattggtctttcctctgacctgtaatccaggctcgtagccccttaagagccctcctcaggggcctcaccttcctcacacggcagcactcttggtggccatcttcatagaaagagaagagccctttgctcctcactaatgcctgaacttcaacagagtctggaaacatgtactcaatgcggatgccatagtgcttctcaactgtgtcgaaaaattgataagtttctgggttcaacctcccagtatccaaactgaaaaccctaaagggtcgaccagttaaatgtgcatactcaatcaaagcaacatcttcagcaccactgcataataaaaggttcggattgatgaggtaaccatcaaaacagagaagatcaaataaattacatctaattctatcattcaataagtctagatcattaaaa

SEQ ID NO: 263707 - DNA, 1949 bp, Cannabis indica
gtcacctgatgctacttttgtatgtacaaaaacataaaaaaaaatggtagcagatttggtccgatggtagtccgatgggtggcccgatgggtggcccgatggtggcccgatggggtggtccgatggtgtaaatggggtgatgtaaatgggggtattttagggatatcataaaagttatcatatcttacaaatattaattattatttgtttagaaatttttttccaaccaaatgtaagcataaaaaatcaaatttcccatacttaactacttacgatatctaatagctaattaatgaacaagtcatcatgctttatactctagtttttcactaagtcattgttggatataataatttaactatcaaaatttaaattattttttcaaatatcacaatcttttcaagaaataacgttcatgtttttattctttaaccctcaataaatttgtaaagtttatgtccaaaaattgtatgggttatttattttcaattctgtgtgcttccattttaaatttgtaaaggttattaattgaagtttttactttttacgaaaaatataaaatttcaaaacagaaaataataaaaggcatgagcttgggttctctctctttcaatggcgaagaagaaaagaattctactagaagcatgttctcatatcatacccatcagatctcctttcaaacctaacagactttgatgccattaattattagagagataaagagaaaatatttctttattattctgaaaagtgtgttgaatatcacaataaatgtgttttcatatggggttagatatccaaccttagaatacacaccaaaccaaaataagaataacctaatccctataagtataaccaaacatgaaaaagaattatttaatacttaatatgccccctcaagatgatgtgtacaaatttgtgacattcattttggtaaataaacccttaaaattggatgtaaaaagaggcttggtaaggagattgacaagattgtgtttagtgttgacgtggagaagcttcaactgaccactttgaacctattcagggacgatgtggcaatcaatgaaagcctagcaaaaacacagtcaaaatttatgaatgcggtgaatggcaatctaccctctctcttggaggcatgcgaagaagctcagttggaacctcaatctagccaattctacatattgagaaaatcttgggctgatgaagctatcgttgtagagctccaatcaaaatcaaaggacatgtgggccaaattaatagagaaggttcccccaagtgctaagaatggtcaggtatatgctaaactagatcttgatgagattgaaagtgaaataaattattagaaaccgactatagtgtgtttttgtaatgggtgctaatcccccattaaaagtgtttaaaggttttactaaacttgtttggggcaatctaggtttggaaagaattgctaggatgaataatggtgttactttggttaaattttttgatgaggtttctcttgtgtggctcatttcgataacaagcctgtgattatgcgaccatggagtccggatttggatgttgccaaattgaataagtctgttcctgtttcggtgaaaattcatgggctaggtctaccttattggggtatgaattatctcatctctcttgtgagcacaatcagtactctaattgtggtggatcagattactaaagactgttctcaagctcaatttgcgcctgtcttggtggatatatagattaaatagaatatgccttttgtgattaattttgaaaaggaatgggggtgtcttgactcagcccctattgcttatgaatggctccttactaagtgctcgaattatggaggctttggtcattatggagatcaatgaaggtttgggcacataaggcaaactaagaaaacagtggtaattgatgagaggaagaaaactgtctctaaagaggag

SEQ ID NO: 263708 - DNA, 1985 bp, Cannabis indica
tttatcaaaatacttttacaaacgtgtcgcacaaagactacaaaatatagcccaagtcgtcctaagactgaacattccaagtcccactatctcaacatgtacaatcatcccccaagccgaagctcactcctgttcagcctttgccttttcctttacatacagacggaaataatatttgtgagtcgacaaactcagtaagaaaaacacataataaataatatactaccgacttgtatctaggtgtcaatacacctatccaaaaggcttatcagataagtaagaacgttctttactaaggtacgaccactgcactacatgcactacatacccttactatacaagtgttggtagggtttgcccgtacctgagtacccctaagtgttgtaccacatacactttgtacctattcgtactagtgttggtaacatcttgttgtactctttaaacattgtacattataccaatgcactcagtaccgctaccgtactagtgttggtagtgtaagaatcacaaaatagcatgcatatatcacacatacacataatcacatatataccatgttctatgctagtcttaccttgttttcgaattcaagtgtgccggttgacctgaatagaaaattatgcgctgaacagagaccctatgtcacaacataaattttataagtgtttactctagaacatttctttaatacccgaagagaacctagggtttatatactgaactttgtggtgaagggtccttaaaataaaatacatcatttggctctagtttacatatactgtagagctcgttattaactttaaaacagtatatagaacatctgaaatagacaccggaggaaaaagttatggccaaaatacaaaaaaatgaaaaaaatggccttccccaatactgtccagccaaccgaaattctggttgtctgagtagatttaacacaaaacttctcaaacattaagcttccaaaaccttcttaaatcttccccaatcaccatcaaactttccagagcaacaatatataacacattaaacatattttaaagctcaaacacaacaattacaccaagaattaaaaagtgccattgtagagcaagctttgagttcttgaactcaaactttttcaaccacacaattaaacaataacaacaactaaaatagttctaaaacatcaaacctaacctacaaaaaacaactccaatcaaattcttagcaaaacagtgactaactcaacatttcatgcaaaactttaaaacttgggaaaacatattagttctagggctcaccttagcttttacgttccaaaagcttcaagctattccttgaattcccagcaacaatcatcaaagataataggatgaacccttggttctatagctgctataaggaaatgagggagagaatgctagaaatttggtttttcacttgaattttctaattgcataaattaaaattaataaagtattgttgtattattcttttaattagaaaaaggctgactgctacctaaagagggaagacacctatccttccaaaatcaaattccaattctacccttgccttaatgcataaatcaatgaatggcttagaggtaaaatggtccaataccataaccccgcctaaactcaatattttaagtatctcattgtttgtcccactaataattaggttctaaatttacccatgtgattctaacagccatccatcacattttctatcgtcgccgagcaaaaattataaaaattgtataattcatatttaacataaataattctcttagagtttaataaaatctccagaattgagaaattcttaactcttatgcccatttctaaaatagggtccacaacaatatataattatacaaattaaaaaatatcaatatttaatgctaattgcctttgctaatacataatataaagatgcggtcattacaagtaagatgttagagcatttttttaatggaaatctatagaagcttctcgact

SEQ ID NO: 263709 - DNA, 574 bp, Cannabis indica
ttgaaattaatcaaaccagaaaataaataaagaataaaccaacaatttgatcagatttgaacaaatgaacaatgaacaatgaacaaatttagacaagaatatagggagaaaaagaatcaaacacaaccaatcacgaggttcgaacaagtgatgctgaatcacatccttactccacagcaagcacaaccccaatggctcgaatctttattgagctagaagagagaattacaatgttgatcatcaatgtgttcttgacacaatcactcaagaagcatagcttcatttactaatcaatgtcacacaaaagacactatgattaatcacttgataggcctatacaacaaattcaaatctctatctctcttgcacactaaactagctcttgtaacttgacattttctcccaaaaactgtgttgcaaagcaatagcaattggctatatgaaaacgatcctaatagtgataactgacagttaggtaaaaccgttggtagttataagaggttgagccaaacatgtctatttcctctattagtgaccaatcacaataatacactatatctatatatatatgtgt

SEQ ID NO: 263710 - DNA, 1448 bp, Cannabis indica
agatgctcttaaaattgcctttgcagaataatatgatatcatctgcaaagcttagatgattaagcttcaaagcactacatctatcatgaaagtagaattcctccttttcactaattttctccatgattctacttaagtattccatcacaagtacaaagagcaagggtgatattagatctccttggcaaagacctcttttggattcaaagaaacccttcatggagccattgattaggagtgagaattttggtgtagaaacacaattcattatgagggacatgaatttgtttggaaaactaaaggctcggagcagctcttctaaaaattcacattctatagtatcataagccttttgtaaatcaagtttgatcatacagtttggtctgatagatttccttccacagtgtcagatcaagtcttggcaaattataatattatgagctataaaactgcctttgacaaaccaccttggtttagagctattagatctcgtaggatagtttttagccttgaacagatcaattttgttgcaattttatgtagcacattgcagcaagcaataggtcaaaaatcacttatagtgatggggcatttcatctttggaatcagggtaagcatggttgaattaatctcctgcaacaattgacccgattgtaaaaaggaaataatggctgcacagacatcatgtctaattagctctcagctatcttggaaaaaagtaactgctataaccatctggaccggggccttgattctaagaatgttgaacactacatttttaatctcccaatttgagtaatctgccattagcaagtcagcatgttatttagttaagagagggccacgctcaataatgtaaacaaaacaggctgcctttgcatcatttgagttccaaaaagagccgagttggtgtctccatcttttgatggatcatctactctaattccttcagcattagtaatagaaaaagattttattttgagaatcttctctctctaacacttaaatgaaaaagagacgagttggtgtctccatctttagcccaagaaagcttagatttttgatatagaaaggagtataaaccctcatgtacatcaacatatttttcccttgcttctaattctctgtttagtaaatccttgttaacaggatcagctttgcgtttgtcttaacactctttaagctcccattgttctttaatatctgccccctgaatgtctaaaaaaccagatctatttatatttttaaggactggtttaagagctcttagttttgattcaacttggtacatttttgtgcctttaaattcctactcccaaactctataagtttctgcttgtgtgcattttatccccaacgagtacgagattttcttgctttgtgtactcattttttcaatgtaataataaatagcctaaaatacataggtgctctagtctagctattgg

SEQ ID NO: 263711 - DNA, 1147 bp, Cannabis indica
acctcaccattttcggaactaggttagagttttattagcttagattaaataagtattttcttcgatttcacgcaattcccatgggttcgacctcgttcttcacaatctccatactacaataaagattcgtgcgcttgcgagttgataaatgtaaaacgtaccattttggtatacaacaggatgccattggtcgaataatgtgattagccgagaaatgtgactagccgagcaatgtgtttgaatgatatggttcagaataacgaccaattgtgcatttttttttgccacgtgtcactctaactaatgccatgtcacttaggcgaattcttgggataacaggtgccacattaaaaagtaatattgatgccaaaacttagtattaatgccatactcatttttttaataaaactaaaacaaataatattaaataatattgtgtggcaacataatgataaatttgaaaagtgcttatcactagtacttttaaaagtaagagtgtcaaaaatgatgaggaagagagataaaataaaatattaagggttgtttggcttcataacttaaaaactgttttaaaaactgtttttactttttaaaaaatagaaaataacttctaaaaactataggggacgtttgaccaagttttttaaatatagtttttcgaaaatcgtatttttaaaaactagaaaacagaaaatattaaaatgttgttttctattttcaaaaataatttttttcttaaaatattcttttttatatttttgctcacatacacaaacttggatcgtggacccgaacacggacgcagaccccaaaccagggcgcgaaccctggactcaaataggaccccaaaccccgacctagaccttggacccaagactcgggccctggaccttggacacaggccttggacctagacccggacacacacccacacctagactcatgtgggttttatgccctaaataaactccatttcaatgtaatctatttattcaacatcaataaagaaacaaaagtatttttcaatcatttgtgtatgttttggttcactttatcaattgcttgtctatttgatttataaattcatctgaaacccttttcacatacttgatcctgtttattgtgttagtcatcacattaggaaagt

SEQ ID NO: 263712 - DNA, 970 bp, Cannabis indica
attttttttatttttattattgtgtttgattatgatgttcagttaaagataaaaaaaaatatgtcctactaatgaagagaggtagaagcttcaacctgaaggtttatttcttgatgaatctattgatgaccgtggtatatcgaagcaaacttttgagagtggttcatcttcaaagaaatctgattcagaggatattgatttgatgaaatctaagttggagatggtcatttcgaatcaagcatcattggctgaagacttcatatccttgagatgttttgttgatcttaatttcaagtctgtaatgactgtaattaaggatatttagtagaatgttaatgtcattcatcgtcgcccttctgatgaggtatttaatcgtagtttattgtttctgtttattcatgctttgtttttagtttctttactgttttacttaagtttcatttgtgttgtttgaataagggaaagtcatatgatgagttagtaactcaagattctgatgatgatgatgatgatgatgatgccgaggatgatgagaaggaactgccgatcctgaaaatattaattccgactccgatgatggtgatgagttggttaaagatggtggtgatgctgatgatgctgataagattgttaatgatgttcctgcttctgatgtgaatccatctgaggctgttgaaggcagtgatgagagggctaaggatgttgagaagcttaaggctaatgaagccaaaataaaagggggcgaatttttcgatggttaagccagcttgaaattgatgatgatcaagttgtgttggctggcttagaggctgttcgtaaaatccatgtaagtgtatacttaatttgtttgcaagaaaattatgttttattttggttgcttaatattttaatgtttgttttgcaactgtttaattttatactttgttttttttaggtcccacaacccaatccaaatgttgttggtgaaaag

SEQ ID NO: 263713 - DNA, 1758 bp, Cannabis indica
atatgcaagtctcaactggatcttcggtcctgctccatgcgagctatgctaataggactagacactttcagggtcacatcatccccctgaattcggtttaggcaaggtttgcactcaggtggtctctcactgacatctcagctctcctcaaggagagtgagtctacgtgtcattttatgtgtcgttccaaagagatcgtcgctcgcctgtgggagtcgaccacaccctcctttcatattcccactaaggaatatggttatcacatgtcccaacatgcttcctcaatggcccatgatgagggggagggtgacgtaatagagctggagcccacccatcctattggcccattagaagatgttgaaatgcaatagcccgacaaatatcctccttcattgagtgttagccttgacaattaaacacttgaggatgtgaatgtgggaggcttgagttacgcctctaacatatcatttgacactttcaacattcaacacctcttccagaatctaaaggtccttcatgtttgccctatggttccgattagatggcatggtctcaatccctaatgaaccaatactctagcggatacaactgcagcttgggtgagttcacctcttctgactggacttggctacccaacttctcagtagacgggcatcaagaggctgctctcaaatgcaacatatgggttagtttacattgccattgcctttattcaagttactcactgctgtttctttttggtgacctattaaccgtaacttttttttccaagcctttgtcttacagcaatatactcctagaactagctctcttgggaagggggatatctcatgcctgcaataggccttaattaagatggaggagtctaaccataaatgcaaagctcttcaggaggaagtaaatcgtcttcaagctaagctaactaaggattaatcctcgatggctagccttacccaacagcttaaagattccctctccatcttgcacactcgcatgtctgagaagggatgcttagagctaagatcgataaggtgcagcatcgcagctacaccattagagtgaggaacaagaaggagtcaaaagagaagattgaacgcttgctatatgcggtctggatacaaaaccctaatcgttattacagcattctaggttcctttgcaacacaaaaggttgaaaccttataggcaaagtgtggtgaagcgactatggcgtgccaaggcaattgccaacacgatccaagcccgtcacacagctgtaacaagtagactctccttcttgtggccatatttatggagacccttgagacttaatttttttttctttggtttttcttttatatttttggatgactgtagaactctatttttattttgtgttcttcaaacattgggaatcatccttggctgagtaactttttaagttgcccttggctgagtggttctccttacattggtaagtggacctcctacatttctttttttttttatctttgagttatcaagatgatgctagtcgagtgtctcttgggacaactctttggccaggcaactttccccactgtggccagcgagttttattttgagggagtatggctcttttgagcagtctcaaccccttatcatttctcaatcctttcatttagatgtgaggggacttattttacttgactacatcccctttgtttgtaagtatttgcttacatttgagaggcgtccctctcatttcagcattatgtcatgggtgtccgttaagatctct

SEQ ID NO: 263714 - DNA, 1542 bp, Cannabis indica
agaacacattttcaatgggaaatgtggctgattcgcttccgaagactaatcctggtgcggtgaaaactggtttgaattggggagcttcagggaatattagtagcaataccaatgctaataataacaatcgaactcaaaatctcggcggtggaggctttggtgttggtattggtggtggtggtggtggtggtggaatgaactcaaaagacccatttggttctttgcttaactttgctccaaaaccatctgttgatctcaattcgaagaagaccaacaatgcgaaggttaataataataataatactaatgatgatatttttgggaatttccagaatgctactactaaaccagaatcaaatccaaataccaacaagaacacttttcagactggtttgaatatggatgattttgttaagcttccaactcagaattccacgcaatcacctgttagtgatcctcttgacatgttatttcccacgaccaaggttaatttaactgaaagcttcaatcaatcaacttcaaatggatccggacagcaaacatcggagatggatagttggggattcgaaccccatttcgaaggagatgatggtggtaccaccactgaacttgatggacttcgccgcctcctctggtgtaaactcgtccatggcgaagaataaggaatggataactacaagcaaggacagtatgctgatgccatcaaatggctttcttgggctgtcattcttcttgaaaaagcaggtgacaacaatgctactttcgcggaggtcttatcgagcagagcttcatgttacaaagaagttggggagtataagaaagctgtggcagactgtacaaaggtaatttgattttgttctttgtagctcttaataattcttgtgtttctaatttctttattttgtgtgtgtatggtgcttttcctgtaatctgaatatgaaatgtattttcatgtgatcatacaaaacttatagattttccacttgattgatttgattctggtatttattaaggtggatcgaattacttatggattagcaggacactgactttgtcaaaacatgaaagtagctcatatatatcatatcatggctacttgtatgtagactcggtactccaatttataaacatgagtggctattttcatgttaactgactactatcttgaaattcgaatcttttattctgggacaggacaagattcattagatgacattatattttgacttccttgtaagaacgagtgagattataacatatatttgaattttatgtaggtgttggaacaagatggtgcaaatgtatctgttcttgtacagcgtgctctcttatatgaaagcatggaaaaatacagacttggggcagaagatctgagggctgttcttaagattgatcctagtaacagggttgcaagaagcactgttcaccgcttgaccaagttagcagactagagatttttcttcattattctttccaaacttcatttcattatgtttagtgttattactctcgaatttataccattttccatgttactacccc

SEQ ID NO: 263715 - DNA, 2029 bp, Cannabis indica
gtgtttatttcatcgttttcaaaagttcatatttagggtgttaatcaacatacttgtgagtagatctaagaacttggtaaaataatttccaacagatgcaacagtgaatacatcagcaaaagttctaggaaatggagcaattgttagaaaccatgatggccaaatcattgctgcattatctaaaccagatcaattgtacccttggccactcctcctcttttgtctggcaaagcattcaatagagaaaagaattgctacacaaaggccttatcacaaaaatcagtattggtaagaacacatctctaattcatgattgttggatatcctctttcaattgattcccaccaaaccccttatccctaacagtgttgcttctttcataaaggacaacatgacctgggatatcacttgtctcaactagtgttatccccctcatattgtccaacacattctttctatcccttccctcttctacccatggaagacaagctcatttggaaattcacaaaatcggaaacttactcggcaaaaataggctaccacttaagctattcaaatagttcccctcctgatatcccatcctcgtcttctcgatctccttggtggaaagctctttggcatctcaatctcccatctaagtttaaacactttacgtatagagcttccacatccacccttccaactaagaaagattacccaatccccactttgtggtcgttgtaatagagagattgaatcaattcctcatgtcttgttcttttgcaagagagttagaagagttttgaaacgtactattttctatccctacttatctctttcaactactgtttattttcatgaaattttttttaatattttctctaacatgaacaaagaagaagtggagtttttcctttgtatttcttagtttatctggcataacaagaacaaggagatcaagcattaaacgacggatcagcctcatgccatcccccatctcgctgaaaaactacctggcagaacacaaagctacagctactacccatagcacaccagaccccaaagccaattctactgccacagcacatggattcccccctccccttcgtggccttctcaagcttaatacgaatgtggcttccttgcatgaccacattaaagcaagtcttggtggagtaattcgcaatagtgagggaggtgtcgttgcagcgatagcttttcctcatatagggggaggagacgctgcaatccttgaagcaaagtctattctcaaatctcttcactagtgcatagaagagtgcttccctcttcatcagattgaaactgactgcaaagcagtcacaaacacaatagcagcggcaaaataagacatctctctatttggagacctcatcaacttaattaaatcggctttatctcacgtccctaatgcctcgatcactcatgttaagcgcactgctaatacttttcccacaaaatcgcaaaattagctctaaggttagatcaagctgcaattaggattggagattacccatgtaatctagttgttcttctcttttcttaagggcatctctcctctaaaagaaaaacaaagttgtatcttaatgatggattaaaatatctatgaagactaataacattttatatatttatgaggagagaaggactaagaagagagatattggcataataaaatatgtagcaaaagaaataatatttgtaagataaaacatacgtatatatattataaaaatagtattatatatgtatatatagaaaaaaaaaatttataagtttattattagaactttccttttaaatatttgtatgtattattttattattttgaagaatattttatagttagaatattattttaaaggattttttctataataggcaattaaaggcaccaatttacaattttaccctagaaagggaaaataaacaaaaatagaaaaaaaaacttttaattttaaaaaatacggtgtcaacaaaaatcacgagagcagctcctccttcttcgtgacctagccgaacgacacctatc

SEQ ID NO: 263716 - DNA, 2513 bp, Cannabis indica
atatcaatattttatataatattatgttaaattttaaggtttagtaaaaatattatataatttatatgctcataaaaactaataacacatagttttataaaaaaaatattacataaaatacaatttaatataatattataaagtacgatatataaattttaaatgtaacaataatatgtttttgcaatccaactccatctcgaaagatggagctttatatttatatgtaatcaaaaaagacaaaatataaaaataagttcataaaaaaataaaactggttctaaactaaagattaagttaaacaaaaaaaaagatttacaattaaaataataaaaaaattggtaattttgttaatctcacttgtggtaatacccaaagaatagtaacgtgacaagcatccttcaaaaaaaatcaattaatacacttattttctagcataataataattatgaagggtgaacttaaggtcacttttatgctaattatgctttcatttaagcacatcaaagtcagagaatctacccacaggttagagatagcaacaaaatttatgtaactttggcacaaagacgaaaacacaaaataatgaactttaaatgcttaccaaactattcttttcctttgtcaaacttagctgaccctattctaatgagatattattttcttgggtttttcttttttttcctctcctctttcaatatgaaagaaaattttgtttttaatttaatttcatatgtttatttagagtcggtgtgttttaagcagttaaatttgaccaataggaacaaagaaaaacaatgaaatgaataaatccaagaaaataaccaaacaacagccatgaattatatcaccaaccacaacagcaccatgtgacactaaaactttacatcctttcatttctatctccatattgttttggcattaaatcccaaaaatactctctcatgtcatatatatacatatatacatttatataatctaccatactgtattatttgtaaggaaaaagaaaatggtcactcttcagaataatgtggtatcattttcaaataagctaaatataccatgtttccattttcttcccctttttttaaaaattaaaattgatgtaacattcatttattagtgttccaagtgtaaattttgagggttagttcttaacatttgttcaagtaatattaaatttaagttcaagtaattttgagactaaatagtgttcacaagtttaataatcaaataaagcaccaaattagtatctaaacaatagaactaaataaataaataatgggattaaagcatgtgggatgtagaaggattttggatcttgtgaggaaaaggataaaaaagtgttaataattcagaatatggcaacaatacctaaaagtaatgccacaattttattttatttttgtgtaaaagaaaacattagtagctagggaatgttccatacaaattagcttgtaccatactccatggtattccctattcatattcaaagaaagaaagaaatgcacatttgatttgagatttgaaagtatagaacatttacaatacattaatgatctctcttttgcatgattttcttcaaaatgtaataaaataattgaaagtggtatttcaatttttctaaaactacaaagtagttattaaataatgaggtagaaaagtagaataagaaaagaagagaggaaaaaggaaagagatagagggagccagttgtgaagaagggacagcaaggcagtgattgggggagggatattacggaatttagggatgtgagtatttgtcggctctccttttcttactttctctctaaatatttagttatttatataggtaccacgtgattctctttaattaaattacccaaactacccttctatcttttaaatcaataaacctctctataactactactatctagttttatggacaaatagtattttcccactcaattataacattgatgatgttttacacctcaaattcttttgtaattgaatagcaaaaatctcatggtaactccatctctaataagaaaattaaaaagtagggttgagcaaaaaatcaaagaaattgactaaatcgaatacattaatcgttaatcgttcgaacaccgaaaaaacaaatattgaaaaaactaaaaatcaaaaaaattgactcccattaaaaattgcctttgcactgtcggttttagtgtcaatagtaaaacaactgattaaactgagaaccgatcgaacatatatattgtacactatacatatataatataattacttttatacatatttaatatacaattttattaagttattgtatgtatgatttgagtttggttttgatttttggggttggtttaaagttattttagctggttttggcttgaattgttgcttgttgttgtgtttggactgttcttccatggtaaaattgatttatgaagtttaaagttgtttctattgcttgagttaagtttattatggcttgtataggtattctggaaggtttgaaat

SEQ ID NO: 263717 - DNA, 1183 bp, Cannabis indica
tagccgccaatatctctaataaatattataattctataaataaattaggctaattaggattttttccctagaattttgacatgtaccaaatcatgccccctgaacttttaaggtcattaaaaataccccctgaactattgaggggcatgatttggtagattcaaagtctggggagcatggtttagtacataaacaatcactgaaacagtataattgaatgaaattagataaaagtccttaaatctaacaatctcaatagttcagggaaaatttttaatggtcaaaaaagtttagagggcatgatttggtactgttgcccctgatttctcccaaaatacgtggaccagtatgacgatgacacgtggatctaaggggtgcaactctcaagatcaatcggctaagtctcctagctttaggagtgtcgccaagaatataccctctcggaggagaggtaaaagctccacgtactcccggagactagaggaacgccaagggaccttcggggggaacaagacattatttgaacagtcaccttgcatttaatgtcgcatgggagaaaacgtattggaactgccataagcaataagtctgagagcgtaacccctcttatgcagctattacgctatgattaataaggctagtgacagctactttatgagggatcacatcaatcaagaagggataaaagactttatccacctaacccctaagatacctaaggtataggtcatgtatttcctattttgtatcggctgggaatatgtgcccctactgaaactacacagaaagacaagtgcttcagttctagggatcaccctagaaaaacactataaataccccccaaatacactgagataggggtcgagaattctgggttcataagaattaaagagagcaactaagagagaaaactaccaagaacattctctgtaataaatactctcataaataagaaagactcgtggactaaggctcattaatgccccaaccacgtaaaaatctcatgcattaaacttcctacaactttctcatatatattattaaattgattaccgaaaacctcggtcaatattttggttgctttcattgagagctgaaggaagcatctgcaagtagacacaaccttgtaagctagacatcaatggtggaaacgtacgcaacatacgtcagccttgtcctcctc

SEQ ID NO: 263718 - DNA, 2398 bp, Cannabis indica
ttcccgggaccgacattggaagttagaaatggagattctctggtgatcaaagttgtaaacagtgcacaatacaatgttaccatgcactggtaaaccttaagccttaaattctcaaactagactaagctttcatgtaactcatggatgcatgtgtttgctcctacatcacctcatgttgcttttaaattttagttcatgctttgtaacttgttatacttcaggcatggcattcgacagctgcagaatccatgggcagacgggccagagtctgtcactcagtgcgcaatccaacctggtgcagcctacacatataggttcacaatcatagaccaagagggaacattgtggtggcatgctcacagcagatggcttagagctactgtttatggagctctcattatttatcctaaattgggttctccatatccatttcctacacccaagaaagaatttccaattcttcttggtaataacaaaacaccaaacgtttgtttgttttaaactatttccacttcaattgtttcctccaccactacttgacattttcaactttgcaaagtcatctcttaattagaattgttggaaattgacaggggaatggtgggacagaaaccccatggatgtcttgaggcaggcacagttcacaggaggagcaccaaatgtatctgatgcatatacaatgaatggtcagcccggtgatctatatgcatgctcaagcaaaggttagcctaattctacctccaactataattaactttaaattaccaagcttgaacatggagataatccttgtatgcacatctgataagagtttcaaattcagaaactgtgagaataccagtggatacaaaggagacaattctcttaagggtcatcaactctgcactcaatcaagaacttttctttgctgttgccaaccaccagttgactgttgtggctgccgatgctatgtacacaaagcctttcaatactcgggtcattatgataggacctggtcaaacaacggatgtccttctcacagctgatcagacaccagcccactactacttggcagcacgtgcctaccaaactgctatgaatgctgcctttgacaacaccaccaccactgcgatccttgagtacaaggccgcatcttgcaagaaaggcaattcaactccaagaccaatcttaccacaattaccagcattcaatgacacagccactgcaagagcctttactactgggctcagaagtccttcaaaggctgatgtccctacgaaaatagatgtgagcctttacttcacagtgggtttaaggctaaacaactgttcgaatccaaatagccctcgttgccaaggccctaatggaactcgctttgccgctagcatgaacaatgtctcttttgtattcccaagaaggacttctctaatgcaggcttactaccaaggtatacctggagtcttcaccactgactttcctcctgtcccccctgtgcaattcgattacaccggtaatgtgccacgaggactatggcagccatctactggaacaaagctatacaagctgaaatacggttctagtgtacaaattgtattgcaggacacaagtatcgtcacaacagaagaccaccccatgcatcttcacggataccatttctatgttgttggatccggttttggcaacttcaacccacaaagcgacccagctaacttcaacctctttgacccagcacagaggaatactgttggaactcctccaggtggatgggtagccattcgttttgttgctgacaacccaggtaactttcttgcactatcatgtgagcaaacatgcttttataccaagcatccctgccaaatagaaatatcactaatttaatacttctcactcattgtctattgcaggaatttggttgatgcactgtcatcttgacgctcacctttccctgggtttagcaatggcttttctagttgaaaatggatctggacgattacaatctgtgatacctccccctgcagatcttccccgatgttaaattatcaatatggaatcaccaattgttaaatccaaacatacccagaaggatttgtttttcttttcttgtgtgctttgatttataataattatgtatttacagattgaaatatatgtatgtatctggagtagtaatccagaattagactttcttgaattgaaataggtgatttgtcatgttcttaggtttatgtaatttgttctttgattgaaagaaaggattacaatatctgtgcaataaacacttatcaaatttcacttgagcttccttttcaatggtaacaactcagaaaacacaaacatcagatgttatcaaagtaacatgtaaattagatgcgaccaagtagaccttaatcagttattacttcaaaatttaaagccataa

SEQ ID NO: 263719 - DNA, 1273 bp, Cannabis indica
atttaagctctcttcaactatgtagtcccatacctacatagtctcagaatcatcccacttgaccttccccaggcgatgtgggattgcacagcttacctggtatttccccttaaggatcacgggactactgactgtcacacaaggttacattatcattgacaaagctcctacacaagaaaacccagtagacatgaggacaaacgtgattactcttagtaagttcaagcactgggtaaaattactaagaattaatactggctagctataattgaatcgagctaagaccctcagatggatttacagaaagattaatagtccaagtgaggatttaggtagaaatttttgagttaatcttcacttactattaatctaagcttaaactattacaagaaaaaagggctctgactcacatgtcattttacacaagaattacaaatcagttacaacaaattgagaaaaggaaataagagaaacaagtgagctacttctaactaccacaatagacaagatcactctcctatgcctatacatacttgttttcttcaagcttctagtttaggtttaagctgtagattactccaaggaagctctgagatatagtttcagaaattgagagagttagagagagaaacattgtaatacaaagaaagaaaagaacaagagagaaagatatacttgaacgattactttgtcgatcttctgtgacttagaatccttgcaaaacaccttgtaattgtttgaaaatggtggagcacgagccaaccatctaagaatagccaaccatctaagaaacaactcaacaagcacgtaactcatttttaagtgaactttggaaaaaaattactagagttttttttttctttattctttgttattttgtgtttccatatatggatcgatctagatccaagggtttgtgtggttgtttgaaaaccctaaggttgcgagctagtttttggctccgctatggtttgcttgaggaaggatagatcaaatgaactttggatccttcgaggaattcggttttgttgtgggaagaaatcaaaatggtatagttttgatcttgaatccgagggttgacaagtcaactgagattggaaaaggtcttaaatgatcttggttcaatatgagttgtttctttttgttggcgtaagtatttctgtaatttcttattattagttagcgactttcatattatttattaaaataaattatgcaggactcgatattaatacgcaccaataactttctgatacctcttgtggtattgctt

SEQ ID NO: 263720 - DNA, 3052 bp, Cannabis indica
gaatgtattatttttaattgtttaaataatagtaatatagtaattaaagaagttaaagtacatgtaaaaattaataaatacataataattagcggtactataataaataaaaagagtaaaatttattgtgagttaaattatttacaatggtatatctcaaatttggcacaatttttagtaagtgttaaatttgacacactttttaaaatactatagagtagttttttttttttcttcgctaatttataataatacactacttatttagtagttgagatgctctgtaatatgttacaattcaacaaattacaaaattatttgcctcaccactaaatcatttaaattaataatattacatacatggaaaaaaaattatacataataacatagcattgtttttctaaccaatcacatttatttaggttcggagcaactgttataaaaaagaatgtcagtacctcagttttgtatgcacacatacaataaatctttaatgaaacaattcacattaataagtcatcatcttacttatattattatatagttactagttaatgggaagaggtaggccttattttatttatttatataaaacaatgtgcgaatatgtacaaaactgtgagattcactcatagtgattgaaatgagaacaaaaattgtattgccattctattcaattttgttttaaaagctgcccccaaaaaaaaaatacaaaacaaaaagcacaacccatatttgtttccttacagaaatctctaatttcattcttaaggattattattttttgcccatactaaaacaaatagtattatttattcaatgtcatcacaattcccttattattgtaattggatttaattgcaccaaatctgagttgaaaaatatatacacttgaaaaagagagaaaaaaaaaacttaggtgtgtgtgtgtggtgtgggcctaatctcgaaaatgaaatagaaactgaaaaaagcctttaaaacagccttgagtttcggcttcatacccaagagcaaaggaagatggatggatagtaataattcacaattatttgttgtatattatattttagagaattaatgtaagacaaaatagagaggtcagaatatttcagaagcaagtgtccccttaaatcccaacaacctacactgttaccatgttccccttataccacgcccgtttttgggttctttcactctcacacattttttttaaagaaaaattcacgcatgagtccccaccctcattcccataccccactactaatagtagctagctacttctaataaatatatttgcaattcacattccatttatgatttatgattaatgcttttcttttcaatcaattacatgttacaattataacaatataaatgtttttactctattataaaatatctcaatcatgcacattcatttgtctttttctgttaaagtgcatccaaatctccattattatgtttgctaaaatgagttgtgataaagaatcctacataatgaaagtaaaaacaaaaatgttaggcaaaagaaaaaataatgactataaaaactaaaccatattattggcttgagatattaatataatgactaggatggggtcagtcctgtattataagctattttagtttctgatgatattgtcctccattgcaaatatgtataatagagtagagccaggccatggccctagtcaaaacaaagaatgtacagccgagagtagtgaatggtgactggtgactagtgactagtgactagtgactagtactactgcggtcccagccccaacacatatttgtgggccccgcacccaccacacatcatttcttttctcccgtaatactctacggcgccggtgtagtggataaatgtgcaatacggctcaaaggccacaatcaattgaacagactactgggtctaaatatatacagcattgcaattacaccttaatgtttaatatatgtggtgttaaagttttataatctataatgctattttcttcaaaatagaaagaaaggtgaaaaaatgtaaaaaaaaaatgacttcaaataagttattttaacacaaaatttaacgaatgttaccgacattattcgttcttcaaataatattttattcaatgtattatttaaataaatgtggagatcaaacaaagaacctcatgtatggaacacttgtttggggcgagttatacatgttattatactactcatctgccactcctattaggttggcccattgggttcaagttatatatgttattaattaaaataaaatgggtatataatatgattttttctattttattatgcttaattaattgtaaaggcctcattaaaaggtaaaataaccatttataaaaatatgaggaaaaaataaaaattttaatatatatagcatgtaaattttttatttattaatttttatgaaagagaaaaaaatttcattaatcaaccaaccaaaataaacaccaatggcaaacaaaccacaaccacccaactacaagcccctcacttcctatttatcatgtaataagcaagatataaatttatgtttatctatactcatctttttgctttataagctataaattacactacttgttcaatatcttcaatcatatgtaccactgtaaaagaataacctcatgtatatatctattcctgttgagtaaaataatatatgttgacactgtcaaagtagcatgtacaatagtcttcaaacacccaaaatagtagaaatccaaacaagccaatcatcatatttcaaaggccaagcatcaaaacccagtcaccacttaaagaggccttttactacctgaaccgagagaggacattcaaaaataaatgctcatggctttcttccttatcatcacaaattgggcacaaaacaaaattcaccagaatatgaaattgaaaccgaattagaagaattgttgagaatcatggggttccatctcaaaaccaattggcaatgagtggagtatcccatgttcttatatatggctcaatacttttacatttaatccatgtgggacagtgttctccaata

SEQ ID NO: 263721 - DNA, 576 bp, Cannabis indica
aggatttaaactatttttatgatataaagaatgtgggcctccacaacggtatctattgcttcagcaaatgggccacttctgaaattaatggggtagaaggaatggtttccaatatgggagattggaaatctaaatggttctgtgtttaaagtaccaggaattagaaccgattttaatcgtcgacctagtacgttgcatattttagcacttagttaataatcgtgttaccttatgatatcgactaacatgttctttcttattgatcgcagatagaccgcctcgacctgtactggacccagctcgcaaagaagtcgctgaagttctcagtagtctccatgttcaagttgtatatatacgagttattgtttatttttaacttatcttttcttgtcctcgcagaaatgactttcctggagcaagctcctgtgctcaatcgcaagtcgaagactggaacagcaacgacttctcctgtcgttcctcagaagaggaagagtgacgtcatagttactcatgccgctgactcgtccaagaagcaggtgaagccttcgcatgacaaggggaagaaggtcatgattg

SEQ ID NO: 263722 - DNA, 1037 bp, Cannabis indica
cctcccgggctcgcgcctggccttggcaacagcctcgccctctgccctcagtgcttcccggtgcttggcttctagcctatccctccgaagggcagggtcttcacgacttcgtctatgcccctaaattcggacaagacaaagccgtgattgactaggttcttggaaaggcagccgacctctgcagcaagctggaaaaggaggcaagagtgagtaaaggccttaagaaaaataatgagaaaagaagtaaaccacggaatacttaccacagtcaaggaatggctgagatcctgaacttgaaagacggagttcaaggatgcacaagcagcgaaccgtttaggcgcgcaccgggttagctgggagacaaactcgccggtcatctccgcggcaaaaggagccaaggtaggcccgaggaaacgattgaaccagtccgtcagggggtccaggtttagatcccacgggttctggtagttctgatcgttaagggaattttgcatttcatctcgcaaaatcctcctcaaggcctccacctcagcatgcccccgggagtactcgtccatggcgtaattgtacttggctatccgaagctcctgcctcgcctcatctccgggaaccggagtcagcacaatgttgggaggcactgtaaattcctccacctcgggagggatcccagaatcatggctcggggccggagtgtccactctccgcggccgtttaggtgcctcctcagctaccattttgcctttgcgcttgcggatcagagcaacctcttgctcttcttcaccttcttcaacttcctcaggaagagcccattgctcttcttgaccttctttagcttcctcaggaagtacctcctcctcatccactaagtcaatagtgtctggaggggcactggaagaagccttcatgggggtgaccatctgggaagaagttggaggaagggaagcatcaggactgtgagctccggcaagggtggccaaaattgcctccatgggattagctgctgcaacaagagaaaagagttaagtgttagaatatct

SEQ ID NO: 263723 - DNA, 3372 bp, Cannabis indica
tttccaaactactgaaaaagtgcgaaaatcatttctaaataaatcgcgttttcattatattcttctgattttatcaaaagaaaatataacaatttatcagtaaatatattttataaaagcatctgtcatcgtaaaatacctatccaaaatttattttatttttttcgaagtaaaatggtctgtatatattgattatatataaatatagatttatgtataaactataatcatacaaaaaataaattgttttttaatttatatgaaataaaagagaaaatgaaaatttgaaggggcaaatggcccctcgatcagccgcatatatgactcaatgctcatcaacccatttatataaatatatatataaatagaaattcataaatatatattattttaggttaattactttgcaacttgttttgcaaaatattattatatattatgtactactttatctatatggctggagagagaggttctatttttaaaattaaagaaaagtctgtattgaaagtatataaaaagaaataatgaacactaaaataaagtgaaaaaaaatgtccacgtataagagtagtacaacagccttgatatagaatggctagtataactcttttttttccttctacaaactaattttgtacgttccacctatcacacaatgcttttatactacaatatacataatagataacaaaaaataacaagtcaactgttccactatttaaaaataaaggttatacatatgacttgtggtgatgttatatatatatatttatctatatattaatgtctctttttaagaaattaaaaaaattatacatagtatatatataattgtttatatataactacatcaatatataacagcagagagaccatatacaaatgtttatacatattctctcacgtaagcacccgcatataaaattcgcaaatgcacaaggcggcctagtgataaaactacaaagcgattcaatctgtgtccgccgtggccaagaaccttttatataaatatacaaaagaaaatgcatatattcatatatagacacatttatatatcttatttcttgtctttttgactcactagtaccatgcaaatgattttttaatcaatattcgatctgaataccataggtgtaaatagttcgtagtcaaagaaatattaatactgcatgtataaataaaattgtatagaaaattataataaggggtattgagggcaaaattatatgatagctatataattggtaatacttaattattccatgcataaactcattttttatggtaaaattttctaaatttacatttcgttttgcttttttactattctgttagaatgctttttcactattatgttagaatttcatatttaagtgttaaggtaaattatttatgtcgacacaattgtacacagagcatatttatttttgatatgatttaattatttaatactataaaaataattcaaaaataaaattacaaaattaaaaactttttttttctttagtttcttttcctccgtctttttcttattctttaaacactgagagagccaacctccaatcttggaccctctcaacgttggctgatggttaccccaaccccaaacgatggcacaacccaagctttaacaacggcaagcggccccaacctcctaaacgacgacaagtccaagaaatcataaaaatcatatcattattatcacaacaaaaatatgttcctaaaaaaaatcaagcccaagaaaaccccgaatctcatagcctcctcccttctctacctagtgaaaaatacctaaaatatcatatctaaaaatccctaaaaaatcattgtgattagcttcaaacatactcctttacatcgttagagtgcacttcaagaacaagtccacgctctaaacaatggtgtccccaaccgagtggtcgaaaaccacctctgtatggtgcttgaaattagagcaaaacacatcagacgattttctctttttccctgttgttggaagaatttagacaacactaaatcatgtgagtactctagcgagtaccccaaagaatatagtatataataatacactaaaaaaacacgtaaatcatagtggttcagtaggagcatcgaactctcagcctgcctagtccacttttaaaagagtactcttgctctgtatattctattatgattagcccaaattcctttgaatggaagcacctacttataggtggtaagcgaacaaattgtggttattatgatagaccattaaaaatattgataggcctattaattacattgattacaatagttataaagtaaatgtaacacttgctttaatgacacttgaatcattgactgttatttttattgattggtgtgtatttacacattttctggttgacatcgcagttttactaaatgtgtaaggtgtctttcttgatactgtaagatatctcttttacctaatattgtgaggccatttcgataccatgagttctctttagtgtagtccttctcacgggggaggagaaatttatcccaacaacacatgtccctagttcttcagtatagcttgttttgcgttggagaactaaaagtagttcgagcccgcctttgttgttttttaactttacaggtttcttataagaacatggcataatagtaatttgtgaactttgggaggttcttataaatgcatgagcctcttaggattcttattgatgcatgaatattgtggggttcttattgatgcgtgaacctcttgggatccttattgtcacgtgaacctctcggggtttgtatcaatgcacgaacctcactgagttcttatcggtgtgtgaacctctcggggttcttatagacacatgaaacattcggggttcgtattgatccatgaacctgaaggagttcttattggtgtatagattgctcaggattcttattggtgtatgaacctcgtagggtgcttattaattcatgaaacaactactacaaggagcaaaattctcttcagtttaaaatttgtaattttttaaaaatcgtcactattaaaaatatgtgactatttaaaactattgtctataattgggtcttcttgacagttttaaatagtcgtaaagaatccatgatggtttaatatagtcacaaaaagttgggcaggatttttcattaagtatccccaacggtttaaaactatctggttattgtagcatttttaacacgcaagtatacgtattgttagcattatagactcacaaagagtgaggtcgatcccgcaaggattgtagttaagtactttaaaactatatttattattctatttagttattacaatttaagaagaaattagaactaaaaaataaaataataaaaacaataaaaaca

SEQ ID NO: 263724 - DNA, 842 bp, Cannabis indica
acctggagtgttcggtctcgggacatctgggatttccattttgtagtcgatgtgcgacctgacatttgtattttggatatttttataaaagtttaacaacgggatcccgacacttataaataatatattaaagtttataaaatttcatagttagtattaaaagttttaatttgacacaatttttgagaaaattctttagttagcgaagatagcactgcaattaaaaaaatcactgtaacgtgccttagcattagggcgttacagaaatagtgtacaaagctgtcatcaacttgcaaaaggctggcctccacactcaaaggctggcctcctctttgtggagctatcgtgacctgccaggtcctataggccttgtcctgccaggtcctgctagaaccatggtcggccaaacttccctgtaggtctatgggtggctaggattgacctggcaggactatatgtacaacccaaaacatggacacaaggcatgagctgcgaattgagccctaaaagcccaacagtatggctgaacaatatctaaattcaagggcactttagtcttttgtaattatctaacaaactatgtaaatatctaggatttaaacttgtaatctagggtttaggcctcctatataaaagcattaaccgtagcctagaaacctaagtcactaagcctccaaattgttctaaatcaaaaccctagtctctctttctctctctctctctgctacacgaccccaagggctctccctttcctctcttcatctctctcacacgcctctaaggcaatctcactctctcattagatatattcatgttttatatccttatagagagctatatca

SEQ ID NO: 263725 - DNA, 973 bp, Cannabis indica
ggcttggactttgatggtcttctcggcctcctccttcgtcttcttaacttcctcttttgccttctcggcctccttctttgctttctctgcttcctccttcactttctcagcttcttgcttgaggcgggtaatctgctattgggcgttgtctcgttgctcacacacaaccttgcattaggatactaatttgtgagtctcgccctccaaatactcgagccgctcagaaagtagttgattggaagcaaaaaaaagcaaaagaagcatggagaattgcaaacagatgaatataaaaaaggtataaaaagataatataagtataataacaaagccgatataccatgaagtgacagtccaaactccttgaaagcatctcttttggacttctaagattgagaaaatcccaatcagggggaaggagagtttgaagtttgcgccaacaggcgaccccatttgcctggggaaatttaggatgaggggtctcgatggcctaactcggaaaggtagtagtgagggtcacctcgggatgaggggcattggcgtttggaaaaattggaggaggaacttgctcttagatctcgttgtccgaaaccttgagatcgataggctcgatcagtgattgcttcttataggcggcggttttcctttgcttcttgggaggaatcacttcagcaacagtagggactccaaggttggatgtccttttcttccccttacggtctaggatgtcttaataacctatgtctgcaaaacaagacgaggcgttacaatcattgtaaaagtcgattaaaaaggggaggagtatacttttccacctaagggatttacaaaaatcactagaaggcgagctatcactagatgaagggatagaaggaccataatatttgctaaaatccctactgctggaaatattttacaaggatttagatttactaacaagtatgtttcattaagatcctaatatgaatttctaaaa

SEQ ID NO: 263726 - DNA, 798 bp, Cannabis indica
ggtagttttcaatacgtcttccccatgcaacattaaatgcaaggtgattgttcaatagagtccagcacctcccggagctgccttaatatggccctggcctccaggatcataaagatccttctcatatcttttccgggagtcatctttccagagacactcctctgttggctaaaacttggttgatttctttaagagctgatcctctcagctccacgtgccgtctatatacaggtccacgtattttgggtaaaatcaagggcaacatttacccccaagccttgtttggtgaagagtaaatgaggcttgtttggtgcctctggttggctcattgatgtcgtggcacgtgcttcaggcgcgtgagctgcatttatgatagtcatcattaacatttatttctttttgcaggcaacgattcgccaactgtccattaatgatccggtgcatttaatcggtgtcagaaaagtactcaagcgtttttaaccgccctgattagcatttatcccatccattggatttgcagaatgcgaatcgattgcaattcccaccgtacgatgacgcctgatcacagctgctttgcacccgttttggcctataaaagccagccttttttccttcactgggttactttcaccacttcgccattccacctcaagaacacttactagagaaaattccagcaaccatagatttcttactactatttctccgtcgctctcgatccacattctaccgtcgatcgacaccaacccccagctctcaacctttatgttagttttctgggtactttacgttttttgt

SEQ ID NO: 263727 - DNA, 725 bp, Cannabis indica
ttctccaactgtaattcgaaatcttttgatttaagtgtagcaagaacatcctccaatacaattacgtctctgccatacttgatggtttccttgatttcttgatatgcaattggaagcaatctcaacaaaatgatggcgtgactttcttcatcaaccttgtgatttatatttgccaatcctacaataatctcattaaatctatcaatattctcatctaaaaaagagaagaaatcattttaaaattgtataatccttttagcaaattaatcttgctagcaattgatagctttaagtataattcttctaatttattccaaacccctttagtttagtcgtcttctctgggatgagtttccttcgaacactgttcgatagatacatggtgatcatgtagtacgctatctcctctattttcgttttttcctctggtttattttctgccaataacttctcatctccaagaaccttggaaactttttggtacactaggattccttttagactttctatccatagtgcaaaatccacagttccatcgaacttttccaattcgaatctcgccattgatgatattcaaagtttcttcaagaattgcagcacaatgaatcgtgatttcgcgttcttgatcgattatcaagctctgatttgtgagaaaaatacaactaaatgcacagaatcaaattaacaaaatattaaacaatcaaacaattatcaatgataagatt

SEQ ID NO: 263728 - DNA, 1499 bp, Cannabis indica
tgggcaccggtggcaaggtgagaactgaaggaatttgttctcaagtggagcttgatttgggagaaattcaggtcatcacagatttccttccattagaattggggggcgcagatgttattttggggattaaatggctggaaactgagaaatatgcaagtcaattggaaaatgatggtgatgaaattcgaaatggcgggaacatgggtgacattgcaaggggacccgagcttatgtaagtcacccatctctttgaaggctatgttgttaacagtcgaaaaaggggtagaggcatatatgattcatgtcggggcattgtccgtggctgaggatcaacaccactcaccgatccctgctcctattagtcagcttctggagcaatacgaagatgtttttgagctaccaccagggctgcctccacaacgccaacgggaccataccatcaccttaaagccaaacacagggcccatatcggtgcgtccttactgctatgcccagattaaaaaaggtgagattgagaagatggttcgagagatgctccgtattggcattgctcagcctagcactagtccattctctagcccggttttattggtgaaaaagagagatggcagttggcgattttatgtggattactgagctttaaatcgagcagccgtggcagacaaatttcccattcctgttattaatgagctacttcacgaacttcatggtgccacggttttttccaaactagatttgaagtttgggtatcatcgaatttgtatggcacctggagatgtggaaaagacagctttttggactcatgaggggaattacgagtttctagtcgtgcctttcggcctcaccaatgccctagccacctttcaagctctcatgaatgaggtattttgcgatttctgaggtcattgtgtcttggttttctttgatgatattcttgtgtatatcccttctttagcagctcatgcaactcatcttcgcttggttctcgaccgactccgtcaccatcgcttgtatgccaacaagaagaagtatctttttgctcaagctcaagttgactatttgggccatgtgatatccgccaagggggttgcagtcgatccaagtaagattgaggcgatgcttcgatggccccctccatccaccattaaggacccacggggttttctaggtcttaccggctattactgtaagtttgtacaaggatatggtagcatttcccatcctctcacggatcagcttaaaaaggatgctttttcctagtcctcctcagctcaaatggcctttgaacgattgaaggaagccatgtgcacagttccagttttagctcttcctaatttctccattccgtttgtacttgaggctgatgcttccgctatggggcttggcacggttctgatgtaaaatgggcgtcccatcgcctatttcagccgcactttgtcccctcgggcccaatccaagtttttctacaaaagagaattgatggccattgtcctagccat

SEQ ID NO: 263729 - DNA, 1147 bp, Cannabis indica
tgttattacatacaaagagagagtgcaaaagagagtgggatagaaagtttctttagcactcctcttaaatttaattaaaggaaaaaaaaaagaaaatttattaatataataaaaataatgatttaaaaaaattaatttcaatgtataaaaatattgaaacttacattatgcgcatgagaacaactctttaaaataaaaatgattggaaaaacttttaaaatataaatttaaatgtcttaacctactttaatcattaaaacataacaaactcaaatgtggttattttcaatagataataataatcatgttggaccgaaaatgatatgttttaaatttattaactcgtgttaacttgaaaacttttcctggtaacgtaaacatcaatgtacacatggcaagaaggatgatgtcacggagttaagtagacccgagtcagagcagttgacctgggaggggaccctagctgtgcgcccacgttggctttgggagctccgagatagtaagttggacttcaatatcttgaatccaactagctatctttcagtattttttaaaattttttgatgtgttattttcatgggtgctagaacaaggcccagtgtaacgtgcgagccaagatggcacgttacaagcaaggtgatgcccacaaggtggccaagtggtggtgcatgctggtgtgcatgttggtggcatgctcatgcttagtttatacgacagtgatattttcgtaaatatcttcaatattatccgaatcgggaagggacttgataattgctatttatttgggtctacaaattcaatggttcaattggatttgagaaactttgtgatttggtatatggtgatgacaatatgtctacaaagcaaaaatcatatatgttttcggtagaaggcttaaagcttagaatgctctttaaggggggagtatctggtgtcagctctcccccaccttagcaccttgatactaagtgagctactactagtcagtaggactagtagggcaggcatatgaggaccacgaggagactcatatgtctccatgagttggaatactcatggagattatcgggccgacccagtagtgcatctaagaatgctggcagaggttagcggttacttttccattggcttgccgatatgccgcttg

SEQ ID NO: 263730 - DNA, 1007 bp, Cannabis indica
atgaaaagaatatgtgtatggtatatgcatattgatattgatattgatatacgtaatacgtctgagttctaaatggttagaagatgtggactaaatgtgtgataagttatgaagtaagggcaaacgaatagcctgattagtgagttgtctgggcttgaggcaaatggtaaggaagagaatcctttattgctgcaacactgggaacatgtaaattctgatatgcaagatatgattagacaacaaggggaacagatgcgagatttgagagaacaacaaactcttcttgtgtctattcctgtaccactgacacttcctattgtaccactggatgtggtgaaattcatggaaccaacttacgagtagatcagaaggcgaaaactaaatgaaccactaatcatgggatagaacaaaaggttctaaggtggctaggatagtggtcaaggtgagaataagaaaagacaaccttatcctgagtgttcaagatgcaaaaaggtgccatttgagtcaatgtagagccagatcttattttattgtggggtagtgggtcatctgaaaagaacccacctccagttaagaaagaccaacgttaaaggagaaaagtgtacgggtcctccccaagtgctcgttatgactcaaggggactagagtattgttctttcgaccgactcaggttagaattttatgggcaatattatatttgctatttcaatttatattggtattgaacagtgtacattcaatgagggaacatcaaaagatcttaatagacaatgcatgtatcttatttagtgataactcatctgatagggtagaatattagagaaatgacattatgagttaaatttactaatatttccaagtggaatataggacataagtaactaatggaggtatccattaatttaattcagagaaaagaatccttttatttagaagtgatctagtattagtaaatgtgggataatttatgagtattgtccaggatcctagtgttggaaattatttta

SEQ ID NO: 263731 - DNA, 925 bp, Cannabis indica
actaccatacccatctggacctggttgataccaggaattgaaaacaaagcctcttttacttcttgtttcgtgtaatctgccagaagaatagttttatgcaactcagtgatcttggggcccagattgactacagatctcagtaccttccttctattctgcatactagttcccaacaacttctcataataactcagaaaagcattttgaacatcatccggagaatcaaaccatgttccatgctcgtcttcaatcgagaagatcttattttgaattcttcttgatctcagagaagcatggaagaaagccgagttctcatctccataggaagcccaatttagcttagctttctgtgacatgaacatagaaaaagctttgtgaacttcattgtacctcttgttggcttcttgctcagctgccatcaattgaaatgaaagtgggttcttggtcattgcagcttgggctgctattagatcattccttgcaatcatatcagctttttgaatatcagagaaaccctcttgatttatcaacttgagcaccggtttcagccgtttgagcttagctaccattttgaacatccttgtaccagtaatgtctccttgccaattttgactaacttttgcattaaaatctggagcaagtttccacatattgtaatatcgaaaaggcttcttccccgagttccactctcgataaatagacacaagtatagggctgtgatcaaacgataattcaggaaggaacacagcttccgaatcaggcaaagcaccactccatttcgaattaatcatggctctatctatcttcgaaaaaactctatcttcgggcttttgtttattattccaggtaaaaaaagatccagaatattttaagtccatcatatcacatgcctccatacaatcccgaagtcgtgtggaaggattat

SEQ ID NO: 263732 - DNA, 1147 bp, Cannabis indica
ataataaatatagttatgtttaaggtcagtatccatatatattttaaatgtataattaatattaataaattagtttagagtggtattggggttgcttagttgcaacaaacatgctcctatattgagtggctgagaagctacgtacaaataaacctctctgtctccactctcatagatgacttgtgaggcaaatggtgtataatacataataatattaatattaataataataataataataataataccatcatattttatactattttttttatattgtaaggtcggtaacataataataatttcctacttagaatacttgaccatgtacacttcgctagcagtttcttccaagctagttcttcttctctcctacaatatatatttaatatatatgattatgatgcactacgtatatatagctagagaaaggtgacctaaagaaagaggaacccatgatcagatatatatactttgctttcttatatttattccctattgttgttattatatatatgtagagtttaagggtactttttttttggcttaattaatttctttatattttaagtccttaatttatagtccttacgtgccgctcacaaccccgcccaccaaaaataattcttcacgccaagaacttgcccatatcacatatatatccatccattgactaattgccaaattatatctatattaatagctttctatatatatatatacatatatactgaatattagtatatatacatatgcatgcatcatgctgtatttaactttaactgatcaatctacgcagaccaaaaatttctagtaattaaaaaacattaataggagaagtacatttggtgataaattttttactcttgatgaatacctataaatcaaagttgaagatatagaagtagtatagtttaattgataatgtttgtgatggatttatcatgtatatgtacaaagatatttatatatttgtacatcatgtatatatgtgtgagtcaagtatagtagtggggtggactttccttgctaatcctgattaagtccattggagcataaattaattatgatatatagtatttttttttaatggtgatatatagtattattagttgtgaaactatatgttatgtagatatatatatat

SEQ ID NO: 263733 - DNA, 867 bp, Cannabis indica
gtatcgtaagagttaattacagtagagttgaggtaagaaaaaataattatactttatacttgtgctttttatatggtttgagtacctaatgagactggttgaataaattgtattgaaactgtgaaatgtgatagtttcagtgaaatagtgttttgtcgatggattgtatatggctgtttaatcatgttccaggtacttaaaagtggttggaaaccacacatgtatggtgatgtggtaagtgagacagtgtacgtaagggtgcactagtcattggtactgcattctagttaagaatgtaagacactccagatttgtatggaagatggagtgtgagtgtgtgatatttctctattagtgtggctgcctctattgaaaaacatgatgggtttgttgtatggttgatgtatatgattgtgctatgctggtacatggtattttgttttttcttacttggctttgcagctcaccccttatttactccctatgtgcagataagtaagcctgtaagctttcagtgacaagttgagtctgggcagcatggggtgtatctcgtgagatcatgtaactgggtgtggtcttggtcatcttctgttgaaagtcacttttaaatttataaaacatattgtggatgttgtcatttaattttctattacatttacttaaatagtattactttattttcaactgggtacccatattttaaaaattgttattttttttttaaaaaaagcaacattagtatcttaacgctggtttatttatgtcactttattttaagtaagtaagggcgtaacaaatggtatcagagccacatttacattgatcttgaattcacgcgacatacacaccatcgctgcaaaggatcaa

SEQ ID NO: 263734 - DNA, 1085 bp, Cannabis indica
tatttggatgacactagtgatagattactatgttatgatcatgataggaactttagaatataactgagaaagtaaatctaaccattcatatggatagaaataacttatcagaattttgaggataagataggagaattttgcaaagtctattcgaatgacttgggcaaaatacctaatcttcatgaaatgttttatggtatctctaatgattacttaatcttaagcaagtattttacattaatgttaatactagaatgttatgttgatgacttagtctagaaggaacttatagtttcaaactaagataatatgtcacaacaagatatccctaaaaagcaatagtaagaggttaaatgtacttctatgtatgaacttaactagactcctattgttgagtggagccatcaaagatgtaatcaaacaaggaacattaggagacagtcaagaaagatctctgaaagtgacctatatgtaagatggtaatggtgtatattagaatccccatatctacaccaactcataacctattcgagatggtggttactgtgggggtggaggaattattctagaaggatgtaaaaactcatctatgataatttaagctccatcagtgaagctaaataactaagttgctttcgaagagcactgaaaaagttattcaactgaagaaagttcttaactgtgttatctctattctatttttggatagaattagagatatgtcttctgtatattcaaatgcattttaataagcagtaaagaattcagtatccctagatgagtaatgcataaagaaaataatgttgcataatcttttatgaacacaaaggaagtaatggcggagagagcagtagcttaccatagacttacagttctaggaatttgggttagtcaagtacactaaacttaatctggatatcgagacaattgattgattgaaatgcactacttgctttatgttagtgcaagtgggagtttgttgggattttatgccctaaataaaacccatttcaatgtaatctgatttgttctcaatagaagattagaagtcatttatgttcacatgtagtttttcatgtttatgg

SEQ ID NO: 263735 - DNA, 634 bp, Cannabis indica
tataatgaatatacatatattatgctaataatattaaaataactcagttaaaaaaaaaaccgatctcacaaactaaatatataccgtaatattttatttataataaatgataatattattggtatttaaatttatttattaattcaaaaattctattcaaattaatataatagaaggtaatgattcaatcctacgctttttaaagtatcaacattaccctcctcaagggtagttataatactaagagaataatattccaagcctaaagactcaaaacaaacaaggtaatgtttcacattaccattcctttattagcattaacccactccaaacaccccttaataagtgaatttccagccaaaagaaaaaaaggaaatatactagtatgtgaagttaaatttatattttgttttgtcaaaaaaaaaaatatagcataaattttttagtttaattttttgcatgatcatgtgcgttatagttatttaagactgtttgtaaattttcaaaaaattctgagtagtttacaatatcaaaaataaggtttgaatattttattacaagcacaattattttttcttatacttgttgtaaatatttatttaaactttaatataggagtaaattatttaaaaaa

SEQ ID NO: 263736 - DNA, 1342 bp, Cannabis indica
caagaggtacaaaactgataacgaccaacgatttaatggcagcagtgggcgaaacattccagaatgccctaaatgtaccaaatgtcatctcagcgagtgtcgcgcaaaagcatgctacagatgtggaaaggaaggacataccaaatgcaattgcccactgtggggacagactgggaacaaagcgaaacccaagaaagatgacaactatgttccagccagagtttttagcatcactcaagcagaagctgaggccagtcctttggttgtatcaggtcagattcctatggccaacaccacttgtaaagttttgtttgattctgatgcaactcattcttttattgctagcacaattattaatcatataaatgcaccaaatgaattatttactgtgggctttgggaccatgttaccatctggggaggttgtaatctctagaaactggcttagggatatacctattaggatagatggtagggaattatttgtagacctgattgtattagatttatttgattttgatgtaatcttgggcatggattttcttaccacatatggagcatcaattgactacaagcaaaagaaagttgttttcacaccagaagatggagagacattcgagttgatgggggtaggaaagaaaccccgcaccctaattatttcggcagtgaaggctgggcaagttttacagcgtgggtgcttagggtatctagttaatgtggttgatgacaccaagaaaattgaaagaaagctggaggaaacacaggtagtcgctgagttccttgatgtatttccagaggagttacatgggttaccaccacatagagaaattgagtttgtgatagaattagtgctctggatagcaccagtttcccgcgccccatagaatggcaccatctgaattaaaagaactcaaaatatagttggaagaattgcttaagttaggatttatcaaacctagctactctccgtggggcgcaccagttctatttgttaaaaagaaagacggtactatgagaatgtgcatagactaccgagaactgaacaaggtgactataaagaatcggtacccattaccaaggattgacaacctgtttgaccagctttaagggaaaaaggtgttttctaagattgatcgtcgttcaggatatcatcagctaagaatcaaaaatgaaaacataccgaagacagcctttagaatgagatacgggcattatgagttcatgttgatgttatttgttatcaataaaagtttagaagtcatttacgtttacatattgttttcatgtttatggtttaatatatatacaaactctgttaagtccagaatatatagtcatttaca

SEQ ID NO: 263737 - DNA, 1983 bp, Cannabis indica
ctcctctcttccacggccaggcacttcacttctcttgctcgtactgagctgttcgggcatatctctctcgagctttgcccgtgtctccagcgatgtgcgggcctccaataatgacttgcaagtgtccatctattggcggaggcatcagatcctggttgttctgaccttggttggccttgacatacttctgtaagtgcgggttgtttttcttgatcagaagttctatttcccgcttcaagttgtaacattcgttggtgtcgtggccgtagtctccatggaaccgacaaaatttcgtcatgtcccttttgctggtatctttcttcatgggcccgggcttcttgtacggaattaacgactgagttgctatgtacacactctctatatcttcagttaagatagtgaatgcagtgtgtttggcgtgatcacggggagtctgtccgggcttttcggtgaactttcccttcttcccgtttccttgcttgtggttgttgcctgaacgcttgccacttgaattgctggaataatggggaagttgggcggacgttccagtggaaggaaccttcgttttgctcggcttttgctcaccttctgctcgctgaatggcttcctcgagcttgatgaaaccttcggcccggtcaaggaaatcactcattgagtcgaccggtccgtttttccttatatccttccacagttcgccaaggacttcaatgccccccagtatcgcggataactttccatcctcggttacccgcgacaccttggtcgcttccgtcatgaatctgctgatgtatgcccggagtggctcgcctggtcgctgttttacttcgaccaaatctcccagatgcaatgggagctggcgtgaggaagagaattgtgcatggaattccgaagagaaggttttccatgaactaaactttccaggagccaacttgaaataccattgctgtgcggcttccgacagagtggcggggaagattctgcaacatacgtcccctcgcactccttgtaaatccatttgcatctcaaaatacttgagatgggagagaggatcttctctcccagtgtacatcttccacgttggcatcttgaacttgtggggtagtggcaggagattgatctctggtgagaagggagttccgcgtgcacggtctaactcaagatcattgttacgctgtccggccatgccatgaaacatattcttcagttcgtcgagctgagcctgtacggctgggctgacttgattggaattttggtcgggttggattacatcaacgtctttctgggcgaggatttaagtatgggcttcgggctgcacgatcgttgtagtattctgctcgtctgttccccttcttctgtttagatcgtcccttaggtcatgggtcgttccgagcctattgaacacagaagaacctggctgcctcagcaattggttcgcttggttgacaggcggaatggctccattattctgcgtggatccgtcgggtatggctcctcctaatgaattctcggacaaggtctgcccgcctacctcttggcccacgagtggaactcatgatcggggattggacggctgaccgttggttgtctgggaggcattcatcgttggtcatcctccgtttctccaaagggaatgacgctcgacgtttgttggcctacagtctgataggctcttcgtatcagcacagtagcttgctgactacgatctttgatttctgcatggtgagcccttaatgcctccatctctttgtccctccattcggcgaacatacgcctctattcgtcaaatgcgaggtttactgcggcatgcagttcctcctgatctgatgcagactattgttgtgaccctgcatgggtccgagcgcagcacagagattttgtaattcggttgcgtctctgatggtcgttttggcgttgatgcctggtggaatgtcgtgttatgaacccgcctggctgtgtgcgaaaccgttattcccagtctcttgc

SEQ ID NO: 263738 - DNA, 1068 bp, Cannabis indica
aatcgtcctttcggactgcccatctgtctgaggatggaatgctgtactgaactttagttttgtacccattgctcattgcaaactctgccaaaacttggaggtgaacttcggatctctatccaaaactatagattttggcaccacgtgaagccttactatctctttaacataaaattctgctaactggtccactgagtaggttgttttaactggcagaaaatgggcagacttcgtgaatcaatctaccacaacccaaatagaatctgacaaacttgtggttctaggtaactcaaccacaaaatccattgtaatgtcctcccacttccatttaggtagggttaaaggctgtaacaaccctgctggtctctgatgttcagccttaatctgctggcaggttaggcatctcgatgcgaattctaccaaattcttcttcataccgctccaccagaagtaaggtttaagatcttgatacatcctggtggtgccaggatgtagggaataaggagtagtatgagcctcttcaaagatttcattcctgagttccacactatttggaacacaaaccctagttttaaacaatagcatcccgttgtctgacactgaaaaatccctggcttgaccagctgaaacctcttctctgatttttactaactctggatcagtcatctgagcgactttaattctttctaacagatcagattgcagcgtcaagttgtgaagcttgcctaccacaaactcaatgctagatctgaccatgtcctctgctaaatggggtgagatctgaatcatgctagctacctgcccgggacccttcctgctcagggcatcagccactacattggccttcccggggtgataaagaatctcacaatcgtaatcctttactaactccaaccaacgcctctgtctcatattcaaatctttctgagtaaagaagtatttgagacttttgtggtcggtataaatttcacacctttctccataaaggtaatgccgccagatcttcaaagcaaatactactgcggccaattctaagtcatgagtcgggtatcgctgttcataatcctt

SEQ ID NO: 263739 - DNA, 1359 bp, Cannabis indica
tttgaggtgtcagtagtcgataaataccaattgagtgaccactgtgtacatttgtgtatcgtaaaagtaaacatctcaaatttgcaaagaaaagtaaacataaaggtggcatttggttggagataataaaatggaatggaaaagaaaggaaacaatctccattctattcttttttttggttgcatattaaagtgttggaataacctttccactactttggtggaatggcaattctattttgaaatggaaggaaagatcattccaatgcatgagaaaaatttaataattttttatcaatttttttttatgcattttaaattttattctattcctatttcaattctcattttcattcctattcctatatttttattcctcccaaccaaacgccaagaaagtattttggtttcgccagaaacaaccctaataaaattaagttatataaaaagatttgatcaaattagcatctaaaatttggtcttcaagtattcaggtatatatttgactctcctcatagaatggacacagtagtaatcctttcctaattgttcaatgatactttctttatctgaggattttcatttggcaggaaagtcgttcatcagtgaacaatgagaaacctacatcatctggtaaattttagtgcaacgatttcgagtgtgtcactacacaaatgaattgttatttaaacttgtgttatgttgcaatacacaggagggaacacatcaacaaggacttggggaattccatcaatgtctagtaattttcttaaaagtaaagatttccagtgttcttttagataaatgagttttctttaaacttggggtatgttgcaataatataggtgtgaactcatcaccaaggacttgggggattccatcaatgtttgggaccagaggaggatcatctgaaggaaaaccagttagcaacacaactgtagatgagcctaatggttgttctaatcaaatgccttgtacaatccaattgacagaggtaatttcatatttgccaaatcccaataaataattgcggtaattatactcaaatcatctcaattattgtagtttagtacttaattttttctttttttgcgataataatacacgatattaatattttgttgtataccatcaatttttgttatcagcatatattattactttctttattctgtttatatttcaaatattcttttgtgttacgtaaatgtgtcacgtcattatttaataacaaaaaattgacggtttgtacctaatggtaacaaaatattgtattattaccgaagaaaaaaatgatataaaagtgcgaccattagaaagatttgagtattatcgcctcaaataacctttttttttttta

SEQ ID NO: 263740 - DNA, 723 bp, Cannabis indica
catggttagtagcaccaattgttaagaacattcttaagtcatctggtaagccttgttaataggtgtatgggcgcctagacacgagtcgtgattatatggtttgttgtatggtttacttactgagtctgttgactcacagatgctactttgatgtgtaggtaaaggaacgacgaaggctgtgcagaagtgagctctaggcttggatgaagattgtacatgtcgaggcgacgcgacttggagtgttcggtctcgggacatctagagttgtattttgtagttgctgagcgaccagattataaatttatttcaattaagtttgtaaaagtttaagttcgggatcccgaattttgtaaataaatatataaaagtttataaagtttaactattagataaaaaaatttaatttgacacgattttcaaggaaaacccttgatttagcaaaggtggcacatttattggaaaatcactgtggcgcacttaatcatcaaggcgttacaattttggtatcagagccgccaggtttgtccaccgaagatcatcaaggcatgtacaatcatcatcagagaaaagcttggctcacggttcaataagtctttacttttttagtaatgtatgtgataagaaaagcttgttaggaagcatagtagtttataattgtttattttaatgcattaccttaagatccataagtgcggtagtaagattgcaaattgggttgttgcc

SEQ ID NO: 263741 - DNA, 1094 bp, Cannabis indica
gaaatgaagttctcatctcctttactgtaagtaggtccagctacgatactgccatcttcatggttataagttggacctagggaaatggcgttttcaacactcttgctataagagttacccattgaattggtactactctctaccctggtgtatgaactccccatagatgtggtcaatgtgttgtcatgttccctaacttcattgactttaactttacgaatcccaccaaaattgagacatgatgaggggtcgtcaatggtatgagacattgacaaacccactgatggactgcttccatattgattatcaaaactctttcttcccgaattcatatttccattaccaatagattgaatgttcctatcaaccaaatttacattccgcatttgttcatatccaaagagtcggtcagtaaattgccctggaactgactgaaaaccagaagtgttatcccaaggagaaacactcatatgtgaaactcctgaaacaggtctaccgttaacatcctccattgcgtgcttcttgttgaaaacttgtggtccattggcatccataaaccactgaccccgttttggctcaattctagaaggattatcataacccatctcgccatcaacatccagcatctcgatgcatacaaacgcttttacgaaaaagactgaaatagagtttatcaggaaaaggtattgacaatcttaaacttgcaaatagaagtattaaatcacctcagccaaattaatagcatttttcaaaaattaaatgctataaaaaacaatattttggttaataattatatataaaatgagaatgaaacgaaatgtgcatatgaaatatcgaaagcaactaatggtagatagaaataaaaatgtgcatatcaattcaaattacttgtcttgcgttataggtaggtatgattcccgattcctttaatgtgaaaatatcaaatactattgcatttacctcaaccacgagtatcaatagaagaatatgaactatctccaataaaatgatagaactttaattgatatctaaactttttaaataaattcatctcatacatatgaactctatgtttgcaggatccaattcaaatg

SEQ ID NO: 263742 - DNA, 900 bp, Cannabis indica
acctgtacaaagcatttcgtaaagattaaacagccacaattgcaagttgattataaacagagaatgaaatccattaaagataacaaaagcatgtaataccgggattaaaagttgtccggtcagcctgttgtctgtaaaatgaaaaataattccaagtttaaagagcgcttggctggtcatgatgtcttaaaaaaaaaaggccttatggccgaataagatatataaaaaaaggaagtataaaagaagaagtacttaaatagctggagtcccaagctctcggttcggatcttctgggccggtaggagctggaggacctgttgtttgaacgggaggtacatcagcattttggccagaggaagaagcagtcgcatcaggctcaccataagccacttgggaagcacaaaactcgagatacatgcctttggcttcacccaagtaatcaaagtttgcctgagggttagccttccaaaagtcataaaagagctcgaggtcggctgtctctaaggcatggaccttttctcccagcctctccacctcggctgtaagctcctcctccttagacttcttctcctcttccacccgacgaaggacagctcgaagagacgtcctttcatcttgaaggctattcacttctgcagataaggtttcgatggtctcctcaagtcggtcagaagcctcgagatccttagtcaactcagttattttcttctgagcagtaaaagcttcttgttgacttcacccagctccatccgaacagctccaagttccaccctggcgtcatcagcgtccttcctggccaagtccacctccgccctcatggtgtttgacagagccgcattcttggaagcagcgacttagttcgggagtatgtgtagccaacttcagaccagcctgtgcaga

SEQ ID NO: 263743 - DNA, 544 bp, Cannabis indica
ttaatataatattaatttttttattttaaaattattataataataaataatatttttattataatttttaatattgtagttggagtaaaaataattttttacactaaattgacactaaaattaatatgatctttgaatactaggattcttaaaagataaatggtaggcgcccactttgatttttcatgtttgctcaaggcaattgttatcccatgttctttgaattttcttgttagtttcgggcaaacaaaattttctttgcttgtggataactctcttcacataattttgaaagtgatacttctttgatcattagctcattttgaaagtgatatttcccattagttaatttctctttcccatttgaataaacctatttttaagattttctagttttcttctaaaagaatgtttgggtaataaataaaagtcattgtgtaattcaaacgagttaagaataagatcattttgtaattcaaacgaactaatctctctctcattttgaaattatttgataaattagaattattctttatattatttt

SEQ ID NO: 263744 - DNA, 939 bp, Cannabis indica
atataatgtaaaaatgagaaattgttctaattaaatagaaaaattaatcataaaaactcaattttttctaggggcttattcatttttatacttaaaaacaattttttttttgtatttttacagaattctacatagaaactcctactggaactagcggtgcaacttaaattgtaacaaaaaagcatacagaatccctattgcaactagcgctgcaaccactttagaaacccaaaccgtaaattagtaaaaaaaaaaaaaagttaaaaaaaaatagtatataagggtaattcccctttttctaatattacccattcatgagtaatacccattataaatgcaccaatttatatacatatatatacattctatatactaaatcaaagtatttccaagacatatactttattttattgtaggtgctatattatttgtttttaaatgatacaacaaataattatgtataatttaacttatttatttatttttattaacagaagaaagcttaaaattaataaatttttggagttatatttatttattcaatgtgtctaaaccataaatgcgaaacttaagataatacatatatagaacacttcttaatgggtaatacccattgatgggaactaaaaaaatttaataaggtaataatctaataaccttttatgacaagtttctaaaaattatttttttttaaaaaaatatatttattttttataaaattgaaaataataattacaactaataatttgaaaaaaaattataaattatttttaaaaattaattaaaattactactttattattttatgaaattatgagtttattaataatttattattgtaaaactaaaaatcatttacatgtatattaatgtgtttttttaattagtaagaataggagcttgattgtggaatccaattgtcttaatgttattcatatc

SEQ ID NO: 263745 - DNA, 721 bp, Cannabis indica
cacaccaagaaaaagaaagggcagaaaatcgaaagtaatctctcctatgccctaaacgaccagtatacgaagaacgtatggtcttttgcaaaaaatagtaacaaatgcgtgacaagagtaatcctatcaccagaaatggtgaacctagacctgttacgtgaagaatctaaaagtttgcattcccagaaacttcaaatacaaaacccagaaaaaacaagcagataagtaaaagcatgccatgcacattaacagtaaagcaaggggtgcaagaaacttacagtaaagtgttgagactgggggtcctgctgtaaatcaaacgaagataagaagggctaacagtagtgaacgaggatgaactggaaaaaattgcaaagtgttcaacaatgtttttcttggtctgagaattttctctctttgggaaatttgagcaaagttggcaagaaatgggaagtaaccgaaatgaaggaaaggtggtggcttttataggcaaaactgcatgaggaacaggcactatcacctaccaatcaaaaggtgggggaaacgcacgattcgaattctcaaagatcaacggaccagattgatttttaattaaggcggtggaaacgtttgagtatccgtctgacaccactaatgcgccgtatcaatcaatgggcgtgaaacgaatcgacccttgcaaaaagtgaatcgctgcattaaaagccatcattaaatgcaccctcac

SEQ ID NO: 263746 - DNA, 445 bp, Cannabis indica
taaagtataaggtaattttttgacatataaacgagttttattagttgaaaattttatttttatgttcatttacattataattatttatgaattaaattttaaaaaaaaattaagtaatttacaataataaaaataaaatttatatattttgttatacttgttattatttttttattatgcgtttaaatttaatttttaacattagaaactattaagaattttttaaaaattacaaataattttaattaattatagcgtacgcaacaaacagttaggtgtctgccaaaacgaccataatttttaaaataatattgttacggggtactaaaatgtttaacactattatgagatgacgtcatataattggttagtagtttgttaatttttattaaattaaaataagtatgacttaatattaaattatacttcgtgttaagtactataa

SEQ ID NO: 263747 - DNA, 1009 bp, Cannabis indica
ctaaattctgatcaaccacgtgctgaacctgcggcggtggtggcacgccggcggctgcggcggcggcgcggtagacggcaagatcttgattaacgaggtcgagttcagctttcgtggcttcaatctttctcaagagttcttgaatgatatggaagcaaccgccgacagggtgggcggcgcgtgcatcggactggaatatgattgttcgcatggcttgttctctggcggcaggggaatcgagtttcttgatgattttggtaatgttactgacaccgaagagcttgtgtgcgttgaggaattgtctatggctgtcgtgagggaaataaggagccaatatacaatcaggggcacactttctacgctggtatttacaggcggcgcaagcttggccgttaccgtttcctttggacgaagaagacgaggttgaagacgatgagtttgatgaagtgggtaatgtggttgttgtttgagggttcaggctcattgttctctgagtatgtatatatatatatataatataatataatcgattataattgaaatgaaattatgagcaaagatttcatagcgtttccggtgccgtggccgtggctattgggggtgttattattattattattattatttaatttctgtttgaatattaaaataataaatagtaatattatgaatgaagaagctgttttttctgaataggtttgttaatttctttgtagggatattgaaggaaggaaaggagaagtaatgaattgagaggtaaagatcttaacagattctgttttgaaatcctattttgggtactcactcactttgaataataatgattaagaataagattatatgcaatgcatggcgtgacatggaaattaaaaaaaatatattattattattattattttgtttaaaagttttttttcttattaggaaacggaaaaatttgcacatgcaaaaaaattaataagggttaataaatcaacaaaattaatggatcttgatcatattcatacct

SEQ ID NO: 263748 - DNA, 569 bp, Cannabis indica
actatatgttttggacttaatagaatttagacattaaatataatcatgaaataaatcatgtgaaccatgcaacataaaatgattttcgatctttattaattagtaaatctgattatattgaaatgggttttatttagggcacaaaacccaacaacacatgcccagacacatgctcgttacaaaagacccaggttctaaacaagggcctagagcacttgcttggtattaagaaccaagaagtaactaaccttgctgctgaggcttccaagttggagatggagcttgggaataaggatcaagcgttgcaacttgctcttgctagcgaagaagccatcaaggacgagtatgttggtttgtcctccgaggcattatacgaggtttatctacataagtccaaggtcaacttctcctacatgggatcttgtatccatgaaagaacacttgctcaagggagggagctctacgagaggaggatgcgaacataccgggttgcccagactattgtctagcctgagaagtcatcgtcgagctatcttgatgaggctatggttggccagtgtatggaggaa

SEQ ID NO: 263749 - DNA, 575 bp, Cannabis indica
atgttttgaagaatttattcggaactctaaaaatattcaaccaggtgctgccattcaaagtgatgatgtctcatgtgtgttttgtggagaagggcatgtgtttgggaagtgtccatctaatccggagtccgtttgttacatgggaaattagaattttaatagaaagaatggggcattctcaaattcttacaatcaagcatggaagaatcatcctaaattgtcttggggggttcaaggagcaagctcaagcaccacaccagcccaaggaagacaagcatatccaccgggcttttcacaacaaccgcgacattcacaacatgctcaaaattcccgaccgagttctttagagagtctaatgcgggattatatggccaaaaatgatgcgatgatacaaagtcaagctgcctctcttcgaaaccttgagttgcaacttggacatttggccaatgaattaaaagttaggccagaaggttctttgcctagcgacacgaaaaatccaaggagggatgggaaggaacaatgcaaatccattcaactaaggagtggcaagcatctgaaaaattctgaggaggaaa

SEQ ID NO: 263750 - DNA, 4037 bp, Cannabis indica
gactcggtttacacacctaagaataccagattactaaaagaagctgaaacagccggtgctatcatcgtcagtggagtcgaaatgtttcttagacaggccattggacaattcaatctcttcacagaaagacaaggtatggtcaggttgttttttttttttttggttgattttttatccttagtttactaatgaaaactattcattgtgtggctattactttccctggctttgcagctcctgaagagttgatgcgtgagattattttggacaagttttaatgttcttcatcaatggaaatacacaagttttaatctgattatgcatatgctgataaataatggaaattcaaggcaaaaatgtacaagtttctatgaagtttattatatttatcattgttatgatattatgattttttaaattaaaattgtatcttgcatatcgaaggagtgctaccaaccagccttaagtggggtttttttttctgaatatatgtgttttataaaaaaaaataaaaatagaagttagatcttctggtcattacaaaagataggactcaaatattgaagatagctctaccataccgattacactgttggtaaagtccacttgaccacattatgagccgcgaaattacaagttctagaaataaaagaaaattacaacttaacataaaagtaaagagatgtttactgttacacacataataattaatgccccaacaattgttagtacacctcagagccttgataattgttttagaatcactttcgaccaaaacaaaaggatgatgttgtgaaacatctgtctccatggcaagcagacaagttgcagcttctccaatgaggaaatcaaagaaattgagcattcttgtagccacccacaaaacaactttcttatgatccctcgctattgctacaacgtacatggtatctcaactaactttgacatcacaattgattttgacgcaatccactagtggcggcgaccatgtaggtgactcaataaacttcaaagaggtaagtaaacaagatccataatctgcgtaacaaaaatagataaagtcaatagcatgtttaatattacacaggacgttctagtgtaccctgtcattgcgtgccctctaaatcatatccaccacaatcgaagcatagagtaacaattttttagtatccgccccactagaattcaaattctaaagaaatttaacccaatcccaaacacgagctcctgaattccacactagcataactccttaaggggaagactgccacagatgatagtcgaagtttcagtagagaaagagatgttccattgtctcatctttctccctgcaaaaggggcaagagatctcctcaatatgcattttcttagcgagagaggcacgaataggcagagaattagagagaatgctccactagaagactttgtgaagctccaaaatttttgaattccataatttgttctaaagtgttggggtaacattgcacgaaggagcacactcaacagcttggataaggtaggcagacttggtggaaaacaacccattcgattctttactccatagccatctatcactcccttgaccactaggcttgccacctttgattatgttgttgatagtttctaggtcaaaaaggataatgagttttgagttatctcagtccccattaggtaagagtaaatctgccactttcctcatgtcctccggtggatgagtaataggcttagggtagaaatctcgtccatagataacacacgagtcatcccaaatgttcgtctccttcccatccccaataagcttacacactcctttcttaagaagttttttagatcgctcaacgttcttctagaatcacgaatcagagctcttaaaggtacactttaagaacttgttacctctaagatatttggcccttaacaatctatagcccaacgattgctcctcgttaagaatagcccaaccccacttaacaaatgtaaccttgattcatttccaaggacttacgaaaagcaagaccaccctaggacttgggaagacacaagtggttccaggccttcaactagataccatcattgccctgttcacaaccccaccaaaagtctctaaccataccatcaaccttcgcggaaacatttttagagagcttcgttgtctgcatagtataaactagcaaagcaagccccaaaaatttgatcaatgtggctcgtcccgccttggacaacgtcttcaattttgagccatgaagcttagatactaggttatctaagatgaagttgaaatcagcatcctttcgtcagaatctaaataacgggagccccaaataattgatgttacgtatggtattgttgagacccagttcctgcttgatgcctcttttcataccctcattagtattgttattcaagaatattgaggttttgaatttattaacactctgtcccgacccgttacaaaatatttctaaacattgccaaaagccccttgcttccgctaaatttgctttgcccacaaaaatcatgtcatcaacgaagaacgtatgagagagcttaggaccatccctactcaacttcattcctctaatagttccattatctagcgcgtttttaagaatacatgagaggatttctaccacccaaataaaaaggtaaggggagagagggtccccttgtcggaggccacacttcggaacaaaactactcatcttgctaccattgaggtgaaggttaaaggaagtcgttgagatacactgtcgaacccaattacaaaacttaatcggggccttgaacctacaatgcacgtgatcaatgaattgccagcttaatttatcgtaagctttaaccaggtcaatcttaatagcaaacgacccttctttccttatcttgagtttaaacgagtggatgatcttttggataagaacattgttatcctaaatattttgaccatggatgaaagctgcttgagtaggacatatcagacgagggagaatcggtctaattttgttagcaatcaacttggagataaccttgtagataacattgcacagggaaagaggtctaaattgggacactttttttgggttgggaaccttaggaataagagtcacattcgtagcattgaaccctcgttgcatcatccctgacggaaaaaaatcaataaatgcctcacagaattatgccccaacagagttccaataatgcttaaagaacaaagcagtcataccatccgggcccgggggccttcaagctccccatagagaaaagtgtctgtctaatttcatcatgccctgggataatttcacgtccagcttgctcaattggagatagatgatccaagatcaaatagtcaagattttccaagggtccttgggatggattagaaaaaatgtccctcaagaagtcagtaaatttcctaccaatctcatctctcttagtgatccacatcccattcttgttcaaggtactctctaccgagttacgcctattagtgatcgtggctgataaaaagaacttggaacacttatcaccatctttaaaacaagaagcccgggatctctactgccaaaacaaagccttctgttttaacacctcattaagggcctttctagtctcagcctcctgagtctaacttctagtaccaataggcattttctgaatattctatagttggagctccagcttggagatataagtatccaacttcccaaactgctccctgttccatctactaagcgccagacaggtgacaccaactttcttgaagactcaagtaggggcgtaggcatgggaaatagacgcacaagcattttccacaaccaaggaactacaagggtccctgatccaccacgcctcaaagcagaatggtcgtctaattctgaggttagggatcacggtactaacacaaatgaggttgtgatcaaaattacaagtgaggagtgattggaccaccactctatgaaaaatttataaccagccctcattgaccagagccttgtctagggccgatgtaacaccctaactggcataggcgtattacgtga

SEQ ID NO: 263751 - DNA, 518 bp, Cannabis indica
tatgcaagggcatcagcgccccttgctgacaatgagctccaaaccaagcggacattccctatcaagatttgtggcacggttggtcgtgggcgggaatatagcagtccagctcgcccaggtacccattctggtcgagagtttggaggcgtgcctccaaatcttggacaaatgacttacccacctggcgcccaaggcaccctgcctcctatgaggaaccgccttcagttagctcctcactagacgtagtccacgcccttaaccaggacgtctgtgtccacatcgactggctgcccagcctcattgtactccccaaagtcagggggtccaacctcttcctctccctccacaacgggaggactgcccggacgcgcctcgtccagctcctcaacctcctggacttcagcgtccccctctctgtccttctccatcgggactgccaaatcctgttcggcgtagggcagagtggcgagccgagccacttgaggatcagaagcatcgaccagacgcgtggttttctt

SEQ ID NO: 263752 - DNA, 597 bp, Cannabis indica
tttattatacaagaagataattctaatttgtgtaaaaaaaaaaaaaaggtctaatttttgtaaaaaaaaaaataaaattttattgtaaatattataattaaatggctaactgttaaaataattttagtagggatttatataaaaaaatatttataattattaattgctaaaagatcttgttaaatattcaattaattattttaagaaaatagttaattataattaattgattctagaaaatgaagttttacctaacctgctactataggtaaaaggaaatgtaaacatgatggttacaataaaaatataaccattaagtaatcacccatatatatatatatatatattagaaattctacaataagaacacttcattgttcctataggattgtgatattttattggtcattgattatgttgatttttgaatatttaaactatttattatagaatagcatgtacattatataaattggaaaagtgtttcattaattttgtcttttttaaaaaaataggaagagatattagactccttgggaagcacatattgagcatgtgacactgatctagcatctcattaataaataaaacaaatag

SEQ ID NO: 263753 - DNA, 1203 bp, Cannabis indica
tatttttggcgataaaaatacattttgttactagtgtgaaacttgtgtaggtacctgactgttatgtgacaagtcagtgtccacgtgtcactatgtgattagttcaaatcatttaattttaattttttatttgtaaatcaatttaaaatattaaaaataaaacaaaaaatagtttaaaatcaaatttaaataataaatatttaatattcatattttaattaaattaaaatagaaaaatcattaattaaaacccaaaaactaaagctctaaccctataaaaattaaaatatacatcctcttcgtcatcctttttttcttccttctgaaattcatacctttgaaaaaaaaaatcatgaaactcatgttcatatacatttataagagtaacactatttcatcatcatcactttcctcattagtcagttgcgacaaaagaaaaaggagcaaaaagacacaaacataaagaacaatctgagacccactcactcaaaatcaactcttttaatcagatctagttcaatcagcaatcgtcaccagcaacccctaacaaaacgacgaagtttcagcaatcatgacgatgtcactagtattgcgagcatctgagaaccccaatgttggttctccctcacgttcttcactgtctccatctctttctcaacttctctcttcttagagtcgaatggagatgctccgactttctatgaccaaaacaaacttcaccacgaggttcgcaacccttagatatggatctccttcactttgtctccctcctcgaagtgtccttttctctgcttctctttgcttgatgtcgaacagagcatttcaagtgtttttgtattttttttatgggttttgttatggaactattattgttcttgtcattttaattttgctgttatagaaattgatgagtgataaagtatttcactgtgtttgatgttggtgcaatcttaaaaggataggagaaatttggggaaagaacactttaggaaggagttatggaagatgattgatgatgaatttattagagttgggggttggaaattatggtcctgtgatgaagttaaaatgattattaataattgggtgtctacacatttggtaccctgtgttttatctaaatacaagtttggtaccctgtattttaaaattatacttatttggtaccctaaatttaaattttttgataaaatttaatcaata

SEQ ID NO: 263754 - DNA, 2057 bp, Cannabis indica
taaagggaagaaggcctaaacactcaggttttatctcggtggttcttttttttttggctttcgaagattagagaaaagagtcataccttgctaagtataccaacaacaagattgatctgctccattgttaattcctctgcttcagaaatgtcttcccgaagaactttatcaaaaaatgatagatgccctttgatgaagtctatgacttcacgaacaattttgttctttatctattaggaaattgaactgtagttaggtaaaatccatcaactaataatggcaaaatgaaaggtaataaccatagttgtgggtcaacaataatgaatttaacagggaatatctactataactttgatgtaatgctaatccagagattaatatcagttattaaagagagctaactggtgaaattcaaatttttttgtcaatcaagggcatgtgatctctaattgagaatcattcacaagagaaccacaaattcataaatattcaaggacaaattgagccaggttctaaaggtaaagcattaacttgtctaatggaaaaccaatccaacgtctgatgcaaactaagattgtacttagacaggactaagatacacatgaaggctgacctcaagaaattcagatgtatcaatcaacgatgttagagaaaatgctaatctcagcacaggagttatgatcattcgttgcttatcaaaatccgaagccacatcccttctcagcttcgtgtcgacccgcctcatacttccctggaggttagtttaaagtcagaaaaagatacaatgcaagcaatatgtatcaaataaatgagctgatctttctttaccagaaaactgacagccttgcatgaagcaatatgttccagagcacccatggagaaaagaacctgggctccagacttcccatatttgtggctgattctcaagattaaagcaagttcaccctctatggtacaggctcgctgcaatgaattcaggaaattcccaccatcctaaaaaagaatgcaagagattatgcaagctgctatgtatcaaataaaaagtacagtgaaaaaaataaacaagtagaacatctcaaagccatcacttgtttccttcctaaagaggagtccacctaagcttgccgggttattttagttggattatcaattgtagagtagcttagattatttgcaagttctaatagcagaaattaatatttaatttatcataaaaaatttgtttctccacaattaattcaggatgatacagaaaccaatcttatagtaggtaggaaccatgcttctcttttaactagaaaaagaaaactgaggatgagaaaacaaatcatagctagtgaagcttggcaaataattttgttatcaaatgtcaggaaacaaaatcataataataattaataaaggccgcataatcttacgaaacaaagtaagaatccaagagttagcaaaattcacttgagaccttgacatcataagagtataaattatgcagctacgtaaaatagttttccagaagtagcagctatttaaagtcaacaggaggagcacctgaaatgaagcactgctgatgcttaataagcaagaccttagaaaacccctgctctgaagttggcttaagaaaaatctatcatgatccacacaaatgaacgcatccaaaacataaagtgcaatggtctttccaggttcaccaccctgtgttgcatcctttattacctgaagattcattatgaagttatgagtaagctactaatgcaatttctaagaaacaaataaaaagatagactcggagaactttcaatatccaaaaccagctgcttaaatttcattaagatgaaggattgaatgtacaacagaagcagagctagcacaaagttatagtggcaacaaaatatagagcatgtacttttgtgaggacaaaataaaaatataatcaggatattattgaaaaataagaagaaaattgtggaggccaaaataaagatcacttctattttgcatattaactataaataagaaaaaattagggggggccaggcccacttggctccgtctctggt

SEQ ID NO: 263755 - DNA, 749 bp, Cannabis indica
agaacctgaacaagaatcgccgaaccaagaccctagaacaagactaggacctcgacaaggactcagacccagacttagaaccgaacacagacctagcctcagagccaaactgagactacaactcgggcacggacacggtcgtctacctagaccggaactgagacctagacatcgacctaaatctgggagccgatcccaaacacagaattggacctagatagggatccggatacgaacctggacactgaccgagatccagactgtgatcaaaatgtttgacctagatctggaccgagatcttgacccaaaagcaaacttcgacccgcactcgggacccgaacttggacttggacccaaacctagacccagatcagggtcgagacctggacaccaacccggacgcagactcggacctgaactcaaacccacacctagaatcagacccaaagctagacccggactcggacccaaactcgaacccaaaccagaaacaaggactaagacatagacccagaactgaatccctactcggatcaggattggaactttggactcggacccaacctagacaaagacccaggacgcgaatccacaccctgacctgatctggacctagactgagatgcggacttgaacccaaacccaaactcgaactcagaatcgaaaatggaactagaaccgaactaggactagcaccaggaccaagacctaaacccaaacctgaacccagatcaaaacccagacagaga

SEQ ID NO: 263756 - DNA, 573 bp, Cannabis indica
aaaacaccattaaagaccaagctttgagttccaaaactcaaacttggttagaatccactaacatgcaatcaaactagatcaaacctacataatcatgcataactaagcctctgaaaatgaaaacaaccaactacagcaagtaattacagattcaacatatatttttcaaaattcatgttcttgagctaaaaacttcaaaacttgaatttaagcaactctcatgcaaacacaagctctaaactacttaaaatagcatgattaaaccacagaaaataaccacaattcacagcagcaagaacataataaaatcaagcatgcatcatcatcttttcacatatttttctaaaattacaaaaagaaaagtttagaaactttaccaaggatgaagaacacttagaatgaaagaaaatagctttgaaaatcagaatttccagccctagaatcacccttcagccgagagagaaagagagagtattttttgcaatttttctattttctaaattttgaatgaaaaatgaataaaaagaaaactttaaacattaatctatttcagccaaataacaaataaataaa

SEQ ID NO: 263757 - DNA, 518 bp, Cannabis indica
aaacagatttttcaaactctaacgtcaacgattcaggcacaaaaccattgtgatccccctcaagtttgatcctcaaatgatggagaaagttcatttctgctgtatctttctctacatctaacaatcctccacacaaagctccaatctttctaaataacttcatgttccatatattcaaaggtaagcctttgacaccaatccaagaaccacggcattcaactttgatgtccctattttgctcctctactgaccatctcttgaaggagactccggtatctcctgttcccggaatactccaattgcctttctccaaaaaatactccacttcggtctcgtctctgcaccaaatgatggttcgatcatcaaacatttggctcacttgcagtttcctacccaactcttttgagagattataaaagatgcagctccatgataacccactgttatctctaaacatgataaccgccttcttccagtctttttcttttttttgaaaaaggagaagagatccttatgtc

SEQ ID NO: 263758 - DNA, 938 bp, Cannabis indica
tttttgttttgtgattaaaaaattaaaaataaatatgttacccaaccttatttttcattttttttaagaaaaaattgattgtgctgctttctttttgataaaataatgggtgaagattatttgggtcctaagtgatattttaagaaaggttggggaccctcgtgtaaacccgaagaaaaaccctaatataaagaatagactccattgctgtgagggctctgaatctgctgccgctcctccaaggctccaacagtttgctcaggtacttgcttcctcacttcgagttctatcgacccttctacttttccgtatattatttatcattttgacatttagtagaagaacaatcggcagagcatgaatgtgaaagaatagccgagaactgaaataagattgatgactttacatgtttttcatttatgaatttatgtgcttgaaatggtttcccctgtcgtcttttgtggtgatttgtttctcatgttcttctatgatcactggagggaatattaaaagaactggaaatttttatattgacttggtatttttgaaatgcctagcttagcatgtcatgaaaactacttttttttctttctttttttttttaaaaaaaaaaaaaattcaatttgttaagcggaaatatgagaggccaatttcatgtgtaaaatcatatatatgtagatatatctgttttttctgattttcttgtcaatgatttttatatttgggatggtggatgtgccaacttcattgcttttttttagtgttaagtcgtctgttttttgctctttgtatacttcgccaaagattttcagtaccttgcctagttcgtggttgcatgctaaaatgaaacttttatgttaaatttgacctttgaattatccatttttggaaggagataagatgtattttgtctatcctggtgtagatttttgggatat

SEQ ID NO: 263759 - DNA, 602 bp, Cannabis indica
aagaagctgaaaaagaagtaaaatgcagagtgactgtctgccgggaagatcagaagtccatcatcacctgacatcaagtttatctcagacatgacagccttcccttttccagcaaagggttaagatggcagaataggtgaaatgggctcccttatgcgaattgcatgttcaacaggcctgggcgtgggcaggagtttcttctgcctcttcaatggggtcacctactaagcctcaacctcagcctcagcctcgccttcatcttcaggattcataggctcctgagcatactgcttggccctggcacctcccttcaacttagcctctcgcttcagttgaatcaactcattcttcggatgagttcgtttgggccggccagcatcagacttccccttcttccccgccgcaaacttaggagaaaagtcctctgggtaaagcccatacttcaccagattatcagcggaggtcaactggatgatattcctgtcttcctccggcaatcgggcaagtttttgagctctatccctaagagcaagagtgaggggaggacggtgatatgtcgggatctgctgaaattgagtctgggtgatgctcggatccttcac

SEQ ID NO: 263760 - DNA, 378 bp, Cannabis indica
gtaattcgccgaggagattgttccactcaggttgaccgacacacctgaatttggaatcgaggtaagattagtatagcagtatgcatttgttttagatatgtatgttggcttcgtactatcttacagtatcacatcggtacggctagagtatgacttgcataccgagtataggctggtattatggtcgatagtactgtactatttgacagtgtcacatcggtatggtcagagtatgactggcataccgagtataggctgatacagtaacacatcggtacgactagagtatgactagcgtaccgagtataggctgttactatgtcataagtaccgtcgtacgaaccttcgagactcggtattgtgtgggacacggggatt

SEQ ID NO: 263761 - DNA, 2593 bp, Cannabis indica
cggggctggagtggggttagggctggacggagttagcagtgtggttgtggttgggatcgtggtggtgctccgattgtgactggttggggttgggttgaagaagaagaatacgaagcagacgaagaagaaaagaaaaaaaagaaaaaaaaaaagaaaaagaaaaagaaaaaaagaaattatttatttatttatttatttttatttttttaaattaaaataataacacccaccaataatattttgacacgtggcatttgaaatgggtttaccggatctgttaacttggagaccaacagacaaataaaaaatatgaccttgaggactattccgctatttttggaggttagggacttatttgtatcaaactgaactttttggggacttttgccgcaaattttaaacactggggattttaaacactcgggatttttcaagaacaatatgtaagtctagtcactgtacaaccaaaaatattgggactgaaataattgtgtaaatacaagacaatatttctcctaaattaatataataataacattataataaaaggaactctaatatttttaaaaagctcttaatggtagttcatagtttacctctacaggcatagctgctgactttcgaaaaagaaaactcagctgctgcttcattaaattttaaagttattattttcttaaaaaaagaagaatattcattcaaagttttaatgtgacatcctcccaacacgtcatagtaaatcattaaataataattatttagtacatatatattttttaatacctgatgttgggattaatccatttctcaaaaccttatcttggtattaggggaaagtacaaactcattagtatggaaccaaaatatttttttttttaagtgcaaagcttataaagaattgtcttatattaatgtttgttcgacagagtatttgaatcttaactaacatatgtaacacaagtgcataaaaaaaatacacattggagagacaagtaatatttatgggtcgttttcgtgtgaatagttgtgactcacatattacaagcaattgtactaaacacgatctatttatttattaatcatatcaaaaactaaaatctaaatcctaatccaactatatgtctttaacgagttgacttgacataaaaaatcaagttaattgtaggtcaacttatcaacctataaatataattgtgtatacgcttcaaaacataagtataatttcgtatagtttaatttgtggcataagtatttaaatttaattttcggttataaataaataattaaatttaatttttagtgacaataatatctaagttatagttttaaaatttctgtaggtgcatgactgttaagtgttaagtaaattattacgtgataatttttgattgaccaaaattattaaatttttatttttcctggaatataccaataataacttgatatttaacggtcagatacctacgaagttccaaaaatataatttaagtattattatcgtcaaaaattaaaattaagtaattatttacaaccagtaatttactcttgtgtatacttataagtaagtatttgtcgtgttattttcaagttattaggcaaattgattaactcaaatatagtttgcttaataaatagtttaagcatgtgaacttaaaaatgatccaacccaatttaattaaaattgaaacacgtttataaatatattccaagtcatgttaatattatacctgacctattttgccactcctgaaaaagtattcataggataggagtttaaatctagagtagttaagttttgttgtaaattaaaaaatattttgacaaaactataattaaaagttaatgaggagacttttttttttcaataaagaatactaagatatagatttatagttttttctttattgtagaaggggcgaatacattataaaaaaaattctttcaatttgtttttttctttaaaaaaaatataaaacagtttagtataaaaaaaaaaaaagagtaggtgtcaaaagaagtggggtgtgattatttattttctcttcttctcttgaatataaaaaggagaagtttcaggaaggaacataaactatttctttgtggcctaaaactcaatacaaaattgaccgtttagattttatcctcaacaataattaacgtacaaatcaattttgatagatttgaaatataaaatgtataggaaaaagaaatttgatcatgttacttgttttttttatcatgttactttcgcaaaagaaaatattaattttttgaattcattagaagtttcattattttctatttatgcttttcattcctttatttgtaagtaaaaaaaatgggcaatttattttattttatttaatttaatttaataattgaattggttttgatttgacaaatgagaatgctaataaagtctgataaagaaggcacgtaagatccttgtaggagtaagatttcattcattttattatgataactttgaattgtttccaaaattagcaagcaacaacaataagcaaataaaggccattaattgaataataaaaaacgattcgattccaactaagcatgaaaatttggattaattttt

SEQ ID NO: 263762 - DNA, 616 bp, Cannabis indica
cacaacctgtttgtagttgtggtgctatgaggattattcaggaatatcaagatgaagacaggctgttagagtttcttgttggtctgaatgactcttacagcttggctaggtcacaaattcttatgcgagatcctttgccgagtgttaataaagcctatgccattgttgttcaagaagaaaggcaaagaggcttaactaatggtgttagttccagtactgaggcagagaaaagcaatctgaatactgagggtcaatttgctggaaatgttcaaccatttcgacctaagttttcttgtactaattgtagtatgtctggtcataccatagaaagatgttttcgaatcattggttatccaccaagccataaattacatggaaagtttcctaataggaattctaaaggccctccaatgaaatcagcttcagcaaatttctcaggaggagatgagcagaagtctgagagttctaatggagaaaaagaattggttgatggtttgtcaagttcacagtgtcagaaattgatggcaatgttggctcaaaaggttgctgacaatgctgttgttggaaaatttttacgaggacctagatttactaacaagtatgtttcattaacatc

SEQ ID NO: 263763 - DNA, 506 bp, Cannabis indica
ttctatttatatttatgcttcagtatttttagaattgatccccacaaataaatgaagtattcttatatatatgttctcttgttgtgtctcacctccccatattttgttgtatttgtcacgttgtttctttttccagcaaacttccatcctctttttaattgccttccaaattttaccatttttaatgggaggtaaaactattgatgtccatgattctttaattctggatacctcaaataaatatccagtgattggtttaatttgtataatttgaaactaatatttgttaaacatacggaacaatagtggaaaaatccaaaacaatattagaaaaaccatggcagatccaatattaatagttttgatatttttgcttcatctcactgaaattaattgtaatgaccgctttagtaatttggattagtaaaggcaattagcactaatttttattattttgttattatttgtgaatttatttaattgtggaccccaatatttagaaataa

SEQ ID NO: 263764 - DNA, 784 bp, Cannabis indica
tgtactcccgggaattactaagtgttgtaccacgaacacgacgtacccttggtactcgtgttggtaacaccgtaaccacaattataacaacactatactaacactccataaatcatatttaaactagtgttagtagtgcaacaaataaacaaacatatattcttatatatattcttacgctatcttacctcgttccgtgctcaagtgtgccggtcagcctgagtggaaacgcagctagacgctttacagggccctaaaccataacattcaaaatccgatgagagacacgctaaacactttacggggatttaaaatatagactaagcttaaccctatcgataaaaaggatgccaacaccctaaattacttgaaaacgggaaaaactagggctcgggaaaaagtcccaaccggcaggccggttcccaaccggaaccccagttcctgggtaccaaccggtcgaccggttgcaagaggcttctcagaaccggtcgaccggttctgagctggggacaaaaattcgatccctttaattcaaatcaagcccaaacttttctataacttccagaatacctgtaaacatcatactaaaccaatcccaagcaacaaaactcaacaattcacacaaattttcaaatcaccattagagagctaggtttgagttctcaaactcaaaccttgccaaaacctcaattcaacctatagattcaattcaattaagcttaaacaacttcaaatcatttccagaataccaaattaaatcttttcaaaacacacagcaacctag

SEQ ID NO: 263765 - DNA, 603 bp, Cannabis indica
tttttatattgaatttttttttttaaaaaaaaaaccatatttttagtttgattagttagataataccatatttagtgacatttactttttatgttatatttatcataactttaatagtttttctcatatatttgaaaataaccccaatcgtaatggtaaataaaagtccattaaattgtaatccaattacaaatgtaatggttattacaataatactcattaaaataaatcaatgtaatgcttactacaaacatttacacttcattacaaaagtaacataaagtaaaataataatataatacaaatataataaaagaaactcaaaagcccattctcatttgaatattttattttataggttaattaaaattttcaatttataaactttgatatatatcaaattatgatttttaaattttttcaattgttaaaaattcttcctgaaatatagagattattaaatttaaaatttttttgtctaattttactaacaaacgtcttacgtggatgaaaatttaagagacataatttagtatgtgtcaaagttcgggtagcaaaatttagtacatctcaaagttttggagggcatgattacatagacaa

SEQ ID NO: 263766 - DNA, 986 bp, Cannabis indica
ccagatggcgtgggagtggtacgaggcgaccacatgctggctcacgattaatatcgcattgagctgcagcataggaaagtcggacatcagttgatggcgatcttggcaaaagaaaatgagaagaattacgaagatcttgaccactgagttcaagatgagagaaaccgattgaaacaaatcgaggaattagaagaggttattctcgacctaggaaataccacaaagtgtgtatacattgggaagaacgtggacgagcaactcaaatagcagctaataagctttttgaaggcgaacaaggttcaattcgcctcaagccatggatatatgataggggtcgaccctaatattatctgccatcatttaaatgttgatccaagctacccagcgaagagacagaaaaggagaccctttgattccgagaggcaataggaagtggacaagttgttagtcaacgacttcatacgcgaggtgttttatccctcgtggatagccaatcctgttctagtcctgaagcctagcggaacttggagaacttgtattgacttttctgatctgaacaaggcgtgtccaaaatattgtttcccacttcctaggatcaactagttagtggataaaactgctgggcacgagcttatgtcatttatggacgcatattctggatataactagataaaaatgtatgtcctagattaagaacatacaagcttcgtaaccaacatgggactctattgttataaagtcatgccgtttgaactaaagaacgctgggcaacgtatcagcatttggtaaacaaaatgtttgcaaaccaaataggtcaaaacattgaggtttacgtcgatgatatgttggtaaaataaataaaaagtaaggatgatatgttggtgttatcccaatttttgcactctgacgtggcatcactcgaatggtgacacgtggagtccacttggaatatctgctcgggaagaatggtctgttggaaattattt

SEQ ID NO: 263767 - DNA, 885 bp, Cannabis indica
tctccagattcaacaaataagacgtgtttaatacacgatatttttggcccagtaaaagcgggaaaatcacagttacatgattctcaatattatacaccgcatttacatttttgtgatatggaatcagaccccacgatttttagggataatgactgtaatcatatttttggtcagctttgtgaatttaactaccactatgcaattaaaaatagtggcacacaatctcaaaaaaggaatgaaaaaactcttatgaaagcggccctgaaaaaaatactcagaaatctgaataatattgactcgtggactatacagaattttaactgcgaaaccacgtaaaaaccctgtgttcatatataattttctatagcttttatttttttcggtgttgaattatcatcgtgaagctcaaatttggttgacgaaaatctgtgttaacagtttagtgctttcattgagaacctctgtgaaaaaatctcaaaaaaagccctcccttcttttaaagaaaaaccttctcctttatggctgaaaatccaaagaatattaacaccccacatgaggaaactaaccatcgttctggaaaagagcccatgggctctagaagatctaccaattcgcagtccagaaggaccacccattctgggaggactcaacccgacgttggtcctagtacgcggacaacgcgctcaaggagaactcagcgtgggaatggtcagaatcccgggtcgatgaatgaagagctcaactgtggaggtgcccaatcagtgggagaaagaacttatgaaatggaaagtcaccgcctgagatgccgtctggaagaggcgcagcgtcaaaatgctgagttagaacgagaggcaacctcagtcagggcagcgcaggggacgaacg

SEQ ID NO: 263768 - DNA, 545 bp, Cannabis indica
ttctaaattaaaactaagcgatccttacatggtaacttcgcatcgacatcaataacgtcaaatatgcaaactcgtagagatttgacaacttttagacaatgaattgtatctatagaatctgtactgataatatatccctttgtaactacttcatgtgatgattctatagttaatctggaaggttgaccatgtttaataaagtaacaatcatctattagcttaatttgttttataatattatcaaaaacaaatatgtcaacgataattgatggtctaaaagataacttgtgaatttggagtatgagtattgtcaaaggagtgaatatgatcatcatcaaccaaatcaagttgatgcttatctccatactcaggttggacgtcatttgcatattgaggctgattgtcatctgcattctcagattgaggatcaactgcattctttgattgagcttgagatggttgagtgtcattttggattctcagattgaggatcaactgttggattttatgccctaaataaaaatcatttcatataatcagattta

SEQ ID NO: 263769 - DNA, 2318 bp, Cannabis indica
ttttgatattactttcactaatacaaactgaaagaacaattagggtacaatatacccgccctcgcaaaggagtgagccactacattagctgatcgtttaataaaagaaacagatacattgtttaaactagcaagcaaattcttacaatctttaataaccaacccaaataaagagatcatctctgtcgaacaatgaatggcttgcactacattaaggcagtcggtttcgacatacacatcttgccaccttctgtccttgatccagcttaaggcctctcggatgccaattgcttcagcaagcaccggttcaacttggccaaagaacaatctggtgcgaccttcaattagtagtcctgacccattccgaacaaccaaaccgataccatattgctcaccattgttgaacattgatgcatctacattaaccttgacactattaccatgaggagcgatccatcgctcaacaacgtctctagcccgaagtaaaggccatgacgattccgtatcggaactttgagcgcatctccattggtcaagataacgatttgcaaacgcaacaatatcaatcggattgaaacttttccctttccaaactaactcatttctagcaccccaaatagcccaactaaccgttgcatctttgcagcacaggtccgctgctgctacactgaagactgtcgtgcaccagtcgaaaaaattggtccctgctggtgtggccgtgcctatccccactctgtcccagcacttccttgtaacccgacatgtaaccaagatgtgcaagatagattcatcttgttcttggcacaacggacaaagagagttgacagccagatgtttggttcttagctgaaccaaagtagggagacaattcgtgcaagctcgccaaatcaggttctgaatttttgaaggaactttcatgctccaaagctggtgccaaaaacttgcatcctcttccccataccattggcccttcaagctttgcaaaagagtgtaagcactcttaacagtatagatgccggagccatcttttgaccaaaaataatggtcctcagttgtaactaagttgagagggatttttgatatcaaacgccaatctctttcctcaaagatatcatgcagcagctcagtatcccactttgcctctcccacggtcatcaagttacaaactctggtgttggtaaggctggggtgatttgtagtgacataggggtttgcatcatcagggagccatggctctccaatgaccgagatgttgcagccatttcccactaaccaccgcgtaccattacgcactaaatcttgtgcttccaagatgcttcgccaaatgaaactcgggttggatcctagttgagcattgaaaaaattaccttgaggataatactgagctttaaacacacgagaagacaaagagtttggttgtgtaatcaatctccaaccttgtttgccaagaagagcaatattaaaatcctagaaattacgaaaacccattcccccacctttcttgtgtttgcaaagtctatcccaagccatccaatgtatccctttgttgtcatctttagaagaacgccaccagaattttgtaatgagttgttcaatatctctactaataccaaaggtagtaggaatacattcattgcgtagcttggaagagcttgaactaccgacttgatgagcacttcttttcccccttttgagagaaacctcccttcccatgtcttcaaacgatttctgactttatcacggagatagccaagaaccgtagttttgtttctactaagagtacttggcagtcccaagtaaaagcttccatcttcagcaatagacatgtctaacagcgaacaaatctgattacgaaccaccaactcagtattactactgaaaaagattgatgattttgcaaaatttaccctctgccctgaagccaattcaaactttctcaacaactcttgtatacgcatcgcttcttgggttgtagctttgcagtaaagatagctatcgtctgtaaaaagcatgtgagacacacgaggcgcaccattagctactttacatccatgtatcaaaccactacgctcatatttctgaagcaaagccgaaagaccctcagcacaaattataaacaagtatggcgaaaggggatcaccttgtctaatgccccgagtaggaatgataagacctacttcatggctgccatgaatgatgttatactttgccgatgtgacacaagccataatcaagcgaatccaatgctccgaaaaacccatcctccgcaacattgattccagaaagcccattcgattctatcgtaggctttactcatat

SEQ ID NO: 263770 - DNA, 529 bp, Cannabis indica
ctctcttcttctcatcccatttcactccagccgaactccccttcactacccaccataaatttttttctcttcactcattctctactcattttcttaacttcattacactatattatactacactacaagtttatcgacctattttctttaaaatttggagggagcatcatacaagagcaacattctacaagcaatgggtaatttttttttttttgtgtaatcttgtttgttgttgttatatttagtttataatgttgttttgatacttgatctgtggattgttgctgttattttgctgtttattctgtttaaatgtttgctgcatgtgtgaaaactggatttttgttggttttctgcaattttttttcgtcgggcccgatggggtccgatgctggcccgatggggcccgttataggatgccaaaatttggtttcaggggtgaaggcccgatggcccgatggtacatctagggggtccgatggtcggaccccatcggacccgttgctatttttctttttttttttaattt

SEQ ID NO: 263771 - DNA, 1164 bp, Cannabis indica
tacctgttacaaattattgactattagacaattgaaccatgggtaaaaatcagatcatttgatctgtcaacaagttaaccatggaaatttaaatcaagcaataataggttttataaaacttgttttgacaatcaaacaatatataaaatacatacagctacaacaaattggatagttggatatagggtttatttaattttaaattaattcaatttaatttaataattttcgaaaactaaataaataataaaaaaataattttttttggaataaaataaataataaataaattaattaaaataatttaaaattaaacatataaatttaaaaaaaattaggtttcaactaacctaagaatctttttcaaaaaaaatgctaacaacttttcaaatttcatattatttttaaaaattaaatattcaataaaataaaataataatttaatatcattttttctcattttataatttaatttaaataaaaaataacaaaatttaaaaattagcaaattatcctatttctatttaaaatttcttgattaaaataatcttattttaaatttcaaataaggtcaatttattaaaaaaaaataatttaaaaaaattaaatatctgaccttaaatttaaaaataagataaaataatcaaattttaaaaaaaagataagaaattaagcaaaaagatagatatttacctattttcaaattcaaatttcactaatatcttaaattaatttaaaaaatactaattaatttaattctgataattagatttgaaaaaaagaaaaaataaaaatactaaatacaaaattacacaaaaaattagaaattaattccatgaaaaagcatgaaaaaattggaaaaaattgcatttggctcggatggtatgcaatgcataccatccacgcgcggattggggctgatttcaggcacacagatgctgccagcagcattttcgcgtgtgcagcaagccttcagacacgctcagcgccttcagaccgagaattctcagacatgtgcgtgtctgatgcgcgtgcacccgagaattctaagacacccgctcgcgcataagggtgatgtcacccctgatattttctgagtttcaaaaaatcataactaattcaaataaaattgaaatcaagttctgtaaaaaagtaaattgctta

SEQ ID NO: 263772 - DNA, 1523 bp, Cannabis indica
cctcttccatatatatatatatatatactagctgtatgagaacatgtatctttgcggatcgggcaaagcgcgaaggagatggatgtctgagcggttgaaagggtcggtcttgaaaaccgatatattgataggaatatcgggggtttgaatccctctccatccgcgaagtcataagttctcttttgcattatctataagtaagaaaaaattagatccactctactcagtggcgatctagtatttaaagtgatttttttttggtaaatgagagggggcaaaaaaataaaataaaaaaaaaaaatgcatttaatgggattagaacttttgttatctgatctatatgctataagtagcttaattactacactaaagttaatattatgcttataaatatcatcttttattacaaatatatgttgtaactaactaaattgcatacatatttttagtccaatttttttttcgggggggcgactgccccacctcggttatatgtgggtccgcccctgactcgactgaatagatggaataagtagattgtgttatgatgtagacagagagtcttgttgtgttatgatttagttaggactttgtctctctttggttttcttccgctccccttgtataggttggggaagggccgggtggattacctttgggagactttcattaaaatttgtagattaattatatcttatttttatcaattaagcttaaacaaaaatataatatattatagatattcacttcaaaaaattaagtttacataattttttctactattatgtttcataagcaaagttttttaaaaaataaaataataactaacaaaaatttatatatatataaaaaaataatagcacaaaatggatcaatatcttatgtaaactcgtttacattattatttatcaatatataacaagcaaataagaataaaacttataaatgcacactcaatttgattggatatttcattgttattggatgagtatttttatgctctcgtaaaaaattgtaaggatttgataaactttgtaggatttttttgagggagggcgaaaggcaacatcgataagatgcatctagcctcgtgggatcttatctgcaagcctaagaactaagtggaactaaaaggtttgattgctcgatacatctagactctttttacgaagcaagatgttttaagttaaatggatcaataatgtcatatacttaaaacaccaagattttgggtggctgataagaaaggaaatgtgatatggtattagtataaacttcttaatcttcatgatgttttcacatgggacacaattctagacgttaggaaagggggtagatttcgggttagtaaactcttacaattcgtttctgttaattctatttttggcatatttaattcacaaaaatattttattatttatcgtatatttcggctggtgtgtttaatttggttaccatattttgtgtttctaaacttggaaggaaagttgtctagctttcctatttatggaaattgaggtaaa

SEQ ID NO: 263773 - DNA, 1183 bp, Cannabis indica
atattcccttttcaaaaacctgctatccttttcaaaatcctactgccattaatggaaatatataagcctctttttcttttgctgaaaaccctagcaaacactttctcttcttcaaaacctagcagccgaaatgcccattcaacctctcttcttcttctctttcctttgcttagaaaaccctagcagccgcacccttcttcttcttcctttctcttcgaacagcaacacctccttcaagccttgaaacaaagcagccccccttccttccttatttactcttgctgcaatatatagcagaaaaaaccagccgagtctttctccttttaatctccttcttcttcctttccaagctctgattttagagcttcctaaccaaacttgctgctgccttttctttccttcttcagcagtttgtttgaacctgcaacacacacaacatacaacccgaaaagccaaagaaaagctaaaacaaaaaacaacagaaaaataaagaaaaagaacacaacaattgatttcggagctccccttaaaattaagggtacatctccgtcaagcttccctcaaagacgcttgattcttcattgtccatgtcaaaaccgattacaaggatgggagattcctagccacaaagcttagtaggtaatctcaagtctttctctcctttttcactttatttttttggtttgcatgacaatatctctcactaacactctctatttttctctcttgttttctgaggtgtttttacaaagaaaagaaggttgctattattttctttgttgagccgaaagtcacttttgaaagtggaaggttgtacatctatttatattgttgttgttggctgttgttgtgtttgtttctgagctgagaaatagttgtaatctattgttgatatgttccttgtaaagctgagagtttgttagagtcttgagatatttatttacttctttatattgtaaagaaataaaagatccaggcctatgaaaacagaaccgacaactctatgagttataatggtctgttgaggctttgtaaatggtcttatttattttttttgtttgtaacttattttatgtgacagatagtatgggaatttatccaatagattgctgtgttaaagaacattatttttattttatttttgtatgtggttcatgatagatgaacagctagcatgcaattg

SEQ ID NO: 263774 - DNA, 1195 bp, Cannabis indica
atttccatagtactccctatattttccttgcccttaaacttcatggaaataagtttctttaaaagagtacttgtttccgccttatcgctttttgcaaagcgcttctcaatttcagcaaggaaagttgtggcatcggtgacctcctcggacaccgcacccctaaaagcctcaggtatgccgcgcttaatgatcataagactcatgcggtttgaacggtcccacttctcataaatcctcctttgctcggaggtactggtatccgtaagagaagcaggacgatccatccttaatgcaaggtcaagatccatgcagccaagaacaataaaaatgttctccttccagtccttaaagttattaccattaaggaccggtaccgaattaaggttagcagatacactagcaacagctgaaaagaacaatacaattacataaataacatgctcatataagaatccaaataaaacaataaattcaaataatggttaatcccatctcaagataccaaacacaacattaatattaagtctttggacagtaatattaattgtaagcggtactcttgttgtagtgatcaaatattgacaataaattatgtcaaacaatatgcaatctttggactaacatattgttcacacaaaataccttataattgtcacacatttatcaccacaaacatgcatgaaattcaaccaaatattaactcacctttgggttagttaataaatttatgaatcacatacacacaattatcataatatttttattaaattaatctacacaaaagagatcactttggtgatattttgtttcaattaatttaattaaatattagatatccttaataaatttaaaaccaaaatttgaatttaattgttactgaattattattattattatttcagatataataataataataataaaaaacaaaactaaacaataaaaattccagaagcaaatcgatatgctatttgtatttaaaataaaataaaaccagaatatatatctgtataaaacatatatatgaacatatataatctaatatgttcacgtcactgccactgacttcataaaacaaagaaatatatatgtatatttatcagattagaaacttgtaatcattcgtatacattccaaaaaattgtatatggtaaatttattatcagaatcaagaaccttatatatttatatatgt

SEQ ID NO: 263775 - DNA, 1406 bp, Cannabis indica
aaactaaaaagttattgtagctaaaaattaagatatatattaaataataatctgtgagaacataattatagtatttttaaagagtgttatacattggagtgtttttagaaataagagtgacaaaaataatgtgataaataaaataaaatattatacttttaaattatgtgtaaatttttaaaatcaatactactattagtgatgctctaattgtttataattgtacattggaggatatagcacaattcttattatgaggatatctaaatgtgctaatcactccattaattatactcttacatcattaaatgtttcatgtgatacaaataatgctaactattaattaagccaacttagacatcacacatgcccatgtctaatggttattaataaatagtaccatttcttgaaaaagtgtcagccaaataaattaacacatagcctttataattagtttgtggccaatctaattcttgaccttaaagtttagttaaccaatataataaattcataaaatctaacatttatgtagaaattgttaaaaagtactaaccggtattggctttagaagttccaattatactaaactcaattttgattgagttaaattttgtgcttaatttcatatgattcctacttgtatgacttaaaatatggatagagaacttaattgagattgatactaattcatcaggggattatttggattaatttatttgtgttcatataggcgtagacattaccaagcctcttccgaaactgttgacaaattgatttgattaaggttgaaccaaaataaaaaattcctttgaaatatgaaaggcttccggagctttgttattgttgtggcattataggccatcctatttatgaatgtactcttcttcctcctaatgtggctcgtggttatcgttcgaagtatggagatttcattaaagccaccagtgtttttcgaaacttggcatatgtcaagtggtctcgatttgaaattcttcgtggtggttctggaagccaaggtgagaaacttcgactccggtgattgatcggttgaagcctcctagtttaggagccaaaaaatcaatagctaatttgaataaaaaaaaaggcaaattaattttgtagctccaatctcgggtgttgatagtttagatattttcaataaaaaaattaatgaatttgggtattaatttaaataaaggaattaatataaatgtaacgccctaatttctaaagacatcacgtgttgtttttgaaatataatttactaatagtagattaactatttaatcaaattcgtgataatagtatatactttactaaaataaaaccatagtaatgaacatgatgacatcgctaaaaatttatttcgggaatttgctattagaaaagttttacaaaaagggtta

SEQ ID NO: 263776 - DNA, 535 bp, Cannabis indica
ggggctcctacccctcctgcatcaggttttagcaagggaggtagtggttcggccatggatcagaagaggaaaacatccactgcatccggtggctcggggcagaacaaaaagttccgggggaaccagaaccgaggcagtcgtcagggtggtgctgaaacccgttattcctatccaaagtgccccaattgtaaaaggcaccatctaggtgggcgcagaggtcagggatgctttcagtgtggcatgcccggacacttcaagagggattgtccctagctcagatcataagcaccaaaggctccggcgagacccggttcagctagggtgttcgccattactcaggctgatgcaaaagccagcccttcagtggtgacaggccagctctcagttaacaactcattttactcaatattgattgattctggggctacacattcttatgtggcagccagaatcttttagaaattggatagaccgcatgatagatatgaatcagggtttggaaccctattacctggcgaagagttagttatctcca

SEQ ID NO: 263777 - DNA, 1547 bp, Cannabis indica
cggtatttctaaaatcaatttagcacaatatttctatcaatgaaaccttgtatgatatttttggcccccaatcgagtctctaaggttgccaaacctgaaaatatttttattccacatatagctcatattacattcacacatgctatataaatcttcgaaatttataaattacgcttatttactcacttatagcgaatttaaatttatgttaaactagattagtaggatcataatctcacttattacctgattaccccataatatatttataaatcctaattacttaccattagtcttactgggatattataaccatcccctccttataaaaatttcatcctcaaaatctacctgaataatttgggaatatgaatctcgcatctgcgactctaattcccaagttgcttcctcataaaataagttgtttgaagttcaatatcatcgtaactcaaaatacgtatcgaatctgacacatactttctcaacattgagatgtggaagacattatgcaccccgaaaaatgtgggtgataaagctaatcaataggccacccgacttactcgctccaatatctcaaaaggatcaatgtatctaaggcttattcttccattctttccaaatctatgcacccctttcataggtgatactcaaagaaatactgagtctccacttgaaatttaatgtccttatgctttaaatcagcatagctattctatgtactcaatgaagcgagtatatatcttgaactcactctatgattttataagttccttaaaactttttggtccatcgcgttctttaattacctgtattattctagtgaataggtgtccgatatctttctcgtaccacacttattaacgtacctaaccaatggcacatttaatcatcacttttagacgaatactttgtcgggggaagagtacattgctctttttttttttgatgaatcaaaatgtgtatttgctcaaaaacaatttgtttacaccctaatagcacccaagaagggcctaaaataatcatctatacatataaatctcaactcatgcttcctttctattcatttacattattcacaaactaaaaaaccattgtctatcttcatctgatattctctttggccaaaaaagctcaattctatgtgtgacacccaatttgagctccttaacaattttgacaggatcttgcttctcattgttccatagacacttatttctaagataatctaacctttatcaaatatgctcatagcatatttctaatattccattcatcctctcagattacctcatgaataaaacattatactatttttactttaatttctatggttctcgataaccttcattaaatcttaacattatagccaaagatatcaactttgggatttcaccagattagactattcattcgtatgaattctatatcctcatttattgtataaattgtatgcattgatagacaatatattaacttagtatgttcaaccgttactactcggttgaaaccataagatcccacaatacatagttcataattgtgtcttt

SEQ ID NO: 263778 - DNA, 757 bp, Cannabis indica
actttgcacatcatgaattaatattttttttcatagcagatatagcgtagccttttttttttgcttgggcgatttcgaatcaacgggattaatcgccaacccctttttttgtacagtagcttgtggcatgactgtatatattattattctctctttttacaaggattaacatatatatctttaataattttttttgcagaaaattttaagcactttgattcaaccgagggtaaacagctgaagcagaattgatttttggctcattgtaattttcgtgaggtaccttattcaatttaattattttttttaaacgatcctcacattgtaaaaattttaacagcataacaccatgaagatttgtattattctcttcgattatatatcacatattgacttattttctgaagtctagtgaatcgaagagaatgatagaaatcaataatgaaattgacagcataaaaatattagtcttttcctttccctttgattatatatcacatcaacttattttctgaagtttagtgaatcaaaggagattggaatgactatttgcagtaaacaaaaataaagagaaagaagaaagagaggtagatccatttatggatctttgcttacccttgtagagcttgaaaaatcacttggaataatgcagtttttttttcttttctcccttctctcagatttcttttttttatagttttcactcttgcgtatcaattgccaaagatattttttccaaaacctttttcttaaccgc

SEQ ID NO: 263779 - DNA, 661 bp, Cannabis indica
ttatttttgttattttttttattgtgcgacagaatttttttccaaaaatattatgtaaattttatactgtataatatattaaatttccacttttttacatttgttttataaaaagacagtatttttataaaaaattctgtatgacagttaaattgtaaacttttaactaaaattcagtatttttgtaaaaatcccttaaaaagttggcaaattcattttctttgtgtgtttggaggttgttgtataattattaattaaattatgtagttgctagtagtaattacaaagtttagtaattacattttaaatataaaatgtgtttagatataagataataattacatatggaattattttgtttaacaaattaattagtaataacttgatatatatttatcgagaaatgttaaaaaatatcagtggtactacctaatataattttacgtgttaatatcactattagtccagttaagtatcggatctcatatagttaatgaaataacttttagggagtatcgctagccaatcgcaagacgactgattttgatggtgttaagcactactgatgcccaataacaatgctcatatttatgagatgtgaatatttgaaatagaagttttagtaattagtaaaatgtgtgattaaacttaattattttag

SEQ ID NO: 263780 - DNA, 596 bp, Cannabis indica
gcaggacttgagttatgaagtgcctatagttcgcattatagagaaaggaacgaaggagttaaggtccaaaagtattcttctagtaagagttatgtggagcaaccgttcagaaagggaggcaacgtgggaaatggagaaagatatgaaggaacaatacctcgaactttttggtaagtctaatttcgaggatgaaatttcttttataaggaggatagaatgtaatacccagtataaatatattattagttggcatattattgtgtgttataatattttatagatttatttttttaaattgggcgggttgcacttaaattttagcaacccgaactttatagattgggttaaaaaatatataggataaaccacccaaaccaaccgatgtacagccctaacgtagataacttataagaatgttcagaattgtcatagactcttagcttaaaaataggaagaacacttaattataatattaagtcaactacttagtttataatgaggtggatttggtttattgatactcactattaccttttaactttatattattcaaaaaatataaacataaaataaaataaattcagggattctttctt

SEQ ID NO: 263781 - DNA, 1445 bp, Cannabis indica
atctactccaaaccatatcaggccaataaagcttaacttgagtctttgttatcattttctacccctagtcaatattatatttccctataagaaagttgttgaaaggtggtgtaattcttgaaatgttctttgacagtaattactctcttccaatatcagctactcatggatggagccttgtaatcccaccaacctttatctcttatataaacactatgtatccagcttgttagaacagttaatgagttgtcctagttagttgagtttaatgcaattcagttagttgttcgattgatcttgttaattctatttcttgtagctattgtatataagttctttatttcatcgataacagttgagacttctttctttgtctttctttcctttcttcttctttgtgttctttcttgtttctagttcatcaatggcgagacaattcaatatgcaatttaacatggtatcaaagccagattacaatacctttaagacttttagttgtaagtgtttccccaatatcagaccatataataaacacaaaatggagttcaagtctgcaccttgcatttccctagagtacaacctcaatcataaagggtataagtgtcttgacactagtggcaggttatacatctctagggatgttgtgtttgatgagtttacttttccatatgagttatcttctagtcacactagtcactccaactcatcctcacacactgagaacactatcagccattatacctaggtgtctacatttcaaacaaccttacactttgtctaatctaatggatcttagtcccacagacatttttgtatagcagcctgagattgatcaacatgtttctcttgaccatataaagcctaacactattgagcataatcatagcactaacagctggcttcctagtcagccttctgtttatgaaacatgtgaaacttctggagctacaacttctgatgcacatattatctctactgagccggaaccacatatgcctattatcaatgaacactcaaaagcagatacacggttacaacatccatcactatctcccacacaacctatgacctcaaacactcatcactctacagtggtttcatccccaactgcattactcttaatcactagttgtcttaatcctcctggaaagaacaacttgcacagaatgcacacaaggtccagatcgacatctacaagccaaagatctttatgatcaccaaggagccatctacacactactacaaattacactatttacgtcggtcaacgccactgttcattgtgttgaccgtcgtaaatagtacctgaaaattgctcacgtctgttcctaaacgacgctaaaaatatagcaattgcgtcatttatcaaaatgacggtaaaaatgaacacgacgaagaaagccaaagaaaaattatcaaaagtttctctctttttgcgtctgtta

SEQ ID NO: 263782 - DNA, 1585 bp, Cannabis indica
acttgaaacaaggaaaatcaagcgtaaaaccattccaaaaggcaacattaactaagaaaacacttatgaaataaacccgtaacttaggctaaaaatagcctaacaattgtattatttatgttctttaagttgttcgtgaaagctaacttttagttctggtggatacttacatcttgggaacatggtagttcaattgagtgggagctctacccatagatatggaatctatagcatccataagtatttagaagtgaaaaatttatccctattcagtgtagagcatctatagaggatccttgactattaggattgtaacaatggataatcataatgtatctatatcgtagtacatatagagcgttttatataagttagagtgctattcaattccaaatctatagtgccggaaggcgaaattataagttagggtatttacctggtgaattctacatctacttattgaaagctcagttacataagcccttggtccccccactagttgagataatacagcttgcagactcagttaattgattttaattaatcaattttaattctaaaattagactatgtcttatttaaaacatttcactaagcaagggcttaagtgtgaagaaaagaggtttggggtcaatttgttaattaagagactttgcatggtctaattaataaattacataaatgacaattttatttagttattaattataattattgaataaatagttttggtatttataggattgaattggataatatggtattattgaaaagaagaataagtggttaaaataaagtggtaaaattgtaactagagattgggttactttaagtgtacgaccatagttgaattttggccaatattttattctttttttaatccatataattcaacatgtacggaaaaattgtaactagagattgggtcactttaactgcttaggttgacttatgatttcaacctgaacgctaggtgagtggtaaaatgtcttggggatgtatttttttatgcctaagttacattttgacaccacttagtttatttttgtgttctagcaaaggtggtcaccagttcttggaaatgttgtagttctgtgtaaacgggagactcgaaactgccctttttgagtagtttaccatgttggaaatgagaaatgagaaatgtaaagttgtgaatttgaattttccgaattcatggctcttaattattgtgaaaaactagacgggcggtcgacacgaaatcagaatcagataggtaaaacacagcgcactaggccatttgtcaacttgggtgttgagtgcttattttagagcttttgggatgtcgttttgatatttccaagattctagaacttgaggacgaggtccttaccccttttttaaccattttcgagagaagtcctagatcaaaattggcattttagtgatcaaacccaaggcaccaagttgattgtcaacttgggcgctgggcctagcaccaggtcaacttgggcactgggctcagctcccaagcccttgtggttgggattttttttgggttttatgccctaaataaaactcatttcaatataataagatttactta

SEQ ID NO: 263783 - DNA, 3276 bp, Cannabis indica
tacattatgattgagcaataactttataataaaagatttaacaagagcaatagcagcatattactcatcaagttttgttcacttctacattaatctatctgtctctcttctggaaaagaagcatattaattctaccagcgacatttttgggatattgaatggttaaattgaaaatatagtattattaaagaataataaattatataaatttaaagtcataagattacaatgacgaaacttcctatcaaagtaactttgttgtgtattgtacgattagtgaatttagcccttattggaatttcataacagaaatagtctcattttttggtatcctttccaatctcgtccttctaaaaggagattgattctatctagaggttcaatcaagtaacaatcgatatttctttcttttataataagactacttatcaaaatacgtacccattatttttttacattgtattttgtatattaaaatcgttatagaatacttcttttgtattcaaattttattggtaggatcgaaatgtctttatttgttacatatttaaattttattatttaattaattatatatatatatatataactaaaagcaatttcaaattagttttttaaaaaaaaagaaacaaatggaaattgaataaaaaaaaaatcaatcaaatttaaagtatatcctgtcttttcttataaataaatttatgtatatatataattatgtagatttaaggggattaggtggtgtaaattttttctccattcttttggtagctttgataatttcagggaccacgtgctagctataagagtcatataatttattctgtcttaattggattattggtatgcacttcacgaaagttctcgttccattaagaatgacaccaccacaagaagttaacctcttcaaaagatcaagcataataacttaataaggagttctggtaggatttgaactcttgatccaaacaaagaaagatatcaataaagattttcctaccactatataacaagttggttccaagtaaatattaaattggaggaattctgattgggagtttcaagttgcttagttactacacatttattaactgaaaatatataaaaggaatccatattgtaagtcaatctataattgagagtactttattatgtaagagaaatgcttaaagactacaatggtagtacctaatagcagtactcattttgaaatcactttaaatatagtgattgatcagattagctaactttattggcagcacaaacatctatatgctttatactctttttacctacaccgttaattaagctcttctttttgcaaagatgctcttcttttctagtttacaatctcagttaaagtaacactcaatgcattttatgcccactctggtttgtttttgttattttaggattcaattggcattctaaatgaaaatcaagattttggccatagatatttgcaatgaaggtaaagaagctgcgatcaaattgtaggatttcatcgtccttattagacatatgtgcaagaaaaatttgtagaaacaaattggaattttatgcccactttagtttgttttaattattataagattcaattgccattgcaaatgaaaatcaagatttgagccctcgatatttgtaatgaatgtaatgattttacaagctgcaatcaaattgtagaatttcatcgtccttaactccttgttaaatatatgtgcaatttcaaaagaaaaattcgcaagagcacatatacattagaaggtaataataaatagattacttttagaacgaactacaacaaagccacaacttttacgagcaccaaaagcttatcaataatttttctaaagactggaatcttattctaccgcccactaattcgagatattattcaaatttcaaacataatttccacaagataacggggaaataacaagaataaactaatcattttattaaaacaaaacaaaacaaaaatgaatgatacgcatactagttaaacgctgcaacacaatttaatggaggaagagcaaacatatcatactagcatttgtgctcacagtattacgaaaaatgatataatgaaaagagatgaatacaatggcctgtttatggagccagcaagtttaaccctgttagtgcaaaacaataccataaagcacatcttaaaaccaagaacgtaacatgcagcgagaggacatacgataagacgagttgaagccagaataaaatgtaatcacccctttctcttctggctcccaaccaacaaaagcaattcaccaattttttgtagaaagtattcccttggcctagtcagtagcttttaagaatcgagactgatttagctatagctgcacataacccagaattccagcagtcaagtcataacgtcctaaccttcagaaactcctagaaaataagtcattctaatgcaaacaatccaatagaaaattaaatataataaacatgaatgtctaataagggaccttttcttcatctagttgtagactttcaatgcctttgagagctccgtcaaagttccttatgtgagaagtatgtctcccagatgatgtacgcttggtttcagaagaggcacccataggtgaaggtacacttctttgcccacttgaaattctgtaggatgcaccagggcttgcttcagctgtacgggagcgatgtggatcagactcacttccagcaaatgcatctcggctgctagaaacagcagctcgcctcgatgatccacttgagcgggccaataagtttgagtttgataactgcaatacacacaaagaaaaagattcacaaacatgattcatgaatgaaaacagatgcaaataacaaaaccaaacaaacttgaagtgtgacaagaacaaacagaacagagaaattaattttaattagaaatagtaagtgtaagatacacaccaaagcttctttactaaatgttgattcttgtgcaattggactcttctgctttgagaagggtccagaattcaagattggtcctgatattctccgtctggacgaatccatagaagacaaaccagttggtcgcccttcttcctcacctgtgaaaaagagaaagaaaggacatcaatgaaaacactaactttacagcttaaaagtaataatagcgaatttaaaagaatcaacatattgtatataacaaataaaaagataacaatactgctttatcaaaaacctcaaaatgatgtaacaaaaaaatgatcaaaaactaatcacttcaaacaaaatgcatgtttttttttt

SEQ ID NO: 263784 - DNA, 924 bp, Cannabis indica
tgtcctctcaaatgcttaagtgtggatgatatttataggcttaggatcaagatcctaaagttagtggctgcaagaataaaggttgttaagttagttaacaaataactaacttaaccaactcttctttagcgaagtctccacgtcagtgtaagtcttagtgattccaagaacatatataagctttcaagatcacgggctgaaggcactcggtgagggagcttcacgataggatagagatagttggagttgaccatccagaactacctttcaggaagaataactagttgtctggaactccttttcggaggaagactaacactatcctgaagacccttccaaaaaggacacaaaagcctttcaggtatggcttccgcgagtgaacaactttcaaggaatgacaaatgagacatttttatttggaggaactatactacattacttctcatctcatctgagtttttcactttcaaataaattaaataaattttattactattgtttaaaaatacattaattgtttatttgaagaaataataatttgtttgatttatcaaaaataaactccatatctaaaaacccgtaaactcttatcaaaaaaaatttaatatcaaaataattttaccaacaaaacaaatagatccaataaagccataagagatgtgatgttgggaaggttggtagggattgaagtttcgtcataggcatcaactacgcaacaaagagtgtgaagtgcctaatgtcgattttttcacaatattccctgggacagtttatattaaaatcatcaacaatggtagaaaattaacgaatagctagtaagacaaatcgatctacgaagactttcttcgaatctatcatttttaagttcttgagtagatttcatctgggcatttgtagggttttttttttttttgctcttaattt

SEQ ID NO: 263785 - DNA, 528 bp, Cannabis indica
ttaattaattaaaccatattcagctaaatgattttatttaatgatatgtcctaattagctttctatttgtggtaggtacttcttccaaatctaattatatattagatgttgaaaaattgagatccaaatatatcaaagttaaaaaaagccttcttttttgtagagtgttggtgaagatgtttgtactattcctcctttggtacccaaagtgaaaatcttggcacatctaattgttacattaatgtctgtgaatcttttactattctatttaggttaagtaaaatttttgtctcctgaattttatcatgtaccaaatcatgcctcttgaatttttaaggacgttaaaaatgtcccatgaaccattgagattgttggatttaaggacttttgtctaattgaattcaattttactatttaagtgattgtttatgtactaaaccatgccctccaaactttgatatctataaaattatgcccctcgaactttgaaatgtactaaattatggctcctgaactttcatccatgtt

SEQ ID NO: 263786 - DNA, 2246 bp, Cannabis indica
tatagaatgtaatttcctctatacaaaaaaataaaaaaaaaaaaattgattatattgataattatttaatatttttattgagaatgtataaaaatttattatttttattttttttattatttaaaaatgtaatatagtaaatcaacaggaccgaccctgaaacaatgtgggccatagggaaaaaaaatttggcctttatattagaaaaatgtagtatttttcaaaatcagtaaaaaaaaattatataattttaaagagaaatttacatggtatactaacttttgtcattttttttacaaaaatactgtcaagcggtattttttacttttttactttgtttttttataggtttcatactgcagtatactgtgttaagttttcactggtgttctactagtgttttactagtgttctactgttgttttgagttgttctgctttgtgttttactggtgttttataaaaacacagtatttttgaaaaaaattccgtgtgacagtatttttgtaaaagttaacccaaattccagtatttttgtaaatttcccattttaaaagaggaaaaaaaatttgggcccctaggctgggtgggccctaggtacaggcctagcccgcctatgcccaatgaccgggcctgtaaatcaatgatgtaaaaagtttaataaaagttaaaaatttataataaatgatattaaagtaaataaaaaaaaattattataaactaaatttgataaaaattttaacatgggacaaatttgacacaagtgtgtagctcatctaatgggattgctacgggatgaggaaaggtagtcattataattccaacgcccgcgtttaatgtccaaaaacttgtcaagtctttatgtctccatccaaatcgccacgttgcccagcggagtccccaatatcagcacacacacaccccatataatatcatagaaaataaatatttcttaaaaaataaaattgtatttcaatacattattttacgaaaaacacaaaacagagctaagtagtacaaatagcaattatttcatcacctgttttcttaccatttctttagtttttagaaaattttataattaaaatattaaacatacaaaaaattattaatagaatatattcacataaagaaacttaataaatatgatgattaagtattgtttatttttagtagacacgagtttgtaataggaacaataagtttatttttatgtcaatctgattcataaaagagcactctcattagtttttttactttattttttaaaatttttcacaaagacttattttttatattacacatttatactaaatcataactcaaattctttatatttatcattatattattaaaatattatatttttaaatatataatattgattgattaaagaaaaatagaaaaaagaataaagaataactaagtataaaataaataaataatgggagagagaatgtcaaaagtgacctaaaaaaactatgagtaaacaacaacacttaaagttttaaatttgtaagtgatataaacttaatatttcttttaagtagcataagtttcaaaaaaaaagtacctaatatttataaaactgaaatttttctttaattttatcagtataagctctgttatggtttttaacaaaacacatataaagtccaaattttatattattggatttagatataaacacgtagtattagttacttttaataaattcaaaacggagtttgttattaataaaattgaaagaaaattaaagttttacaaatattggatacttatgccgctaaaaataaatattaaatttataccacttacaactttaaaatttgaagtatttatgttgctatttacttaaaaactatgaaaaataaaatgaatacatttagcgatacaatttttaaaggtagtgcatatgtactttacatatacatataaaagaagttgatgaaagtaacttttatttttattattgtcttttttagataatattacagaaaaatttaaaaaatttgagataaatattcgtctaaatatactctcttatactagttacaaaaaatgtttttttttttaaggagacaaaaatttgtaaaacggaaaatgtaacgtttaattaagttataagcttttttttgcttttagcaagctacaaatggggatgctatgcgtatataggataaatagcggcataagtacccaaaattttatatttataagcggtataaacctaatgtttatttttag

SEQ ID NO: 263787 - DNA, 597 bp, Cannabis indica
aatttttgcactctgacgtggcatcacaagatggtgacacgtggaatcgactctaggtatctcctcgcaaggtacaggctgaataggatacctcatatgcatgctcaagacgaaacagttagaaacccgcacagaacgataaacacttagcgaattcagctttcgcatcgtgagtcatcaaggaaatccctataacttgggatcaaattacagagatatggcaagctgtccaaatcccacgatcagtgtattttgtatttactgtgcaatctttctgcttatatcaattgtaacaagaagggaaatacttcctctccaagctcatagccctataaatagtgatgcatattcactgaataaatggttggaaacattttggttgagagattttatctaagaattcatattcagagatactgttgtaagagctttaaagaaatctttctccttgctcttaagtcaatataaataacgaggactaggctattaccgaattgatcggggctgaaccttgttgggttttatgccctaaataaaactcatttcaatatactcagatttacttattaatatagatcagaaataacatttaatgtt

SEQ ID NO: 263788 - DNA, 525 bp, Cannabis indica
caaaacctgtaattctatttttgctattacaagatcacaaaaaaaatgcaaaaagataacatatagtgtttcacaagtatataaacctgtgatcaaaaacatcatacaacaaaacattcagctacttataccattaacaaagcataaggcaatgttttaattctatgatcaaagcacaaagcacaaggcaatgtgatcaaaaagatcatacaacataacattcactactaataccattaacaaagcacaagacaatgttttaagtctgtgatcaaagcacaactgtaataccctggaattaggaagtggattagcaaaatcctaattagataattatgaataattgagaaattatattattatatagttcaatatatgtgagttaatatgaattttaatatgttaagaccctgttggtgagccaggggaattttggtaattatgacccgagaagggtaaaagtatgaaattaatttaattacgtgcctaatagaactatattattatatagtatgcctgtgttgt

SEQ ID NO: 263789 - DNA, 1386 bp, Cannabis indica
atattaattttcctctatgaaaataagtgctaaattgtacaaaatatttaattgattaaagtattaaatatatataaataacatacagacactccaccgtaatttcaatacagtttatgttctttagtttgtgattggtctaatttattaccctatgctatgaggaaaaagctaaagcacctactatagaataacccatatatatatatatataataaaaaaaaataaggatacaattgttcaacagtagaaaaagaaaaaaaaattaacaagacttagaagtgttgatgtagtagtagtagtagatgaaagagaagaaaagtgattgtaaatgtaaagttcaaagtctagctatttcaacagatttttgaagtgcctgaagaagacttctcattattcttggctccccaggtggagcttgatctttcttgggtccatttcttatggctctaaacagtggtcctgaactctcagtagctggaaataccagacaatcaatgtacacaagtacctctgttttaccaccatcctcaattgtaatgaaccccagtctagctccaccagcaattttatcaatctttcctcccccaaaataaaaaattaaaatcaacataagctgcttaacttatccataaacaatttataattgatggatgatccttgattattaccttcaaaggtacaggaagtggcaaattagctccttggcatagactgttggcccactgtatttgtaaaatgagaaaaaatatatgaaattaaaaaattaaaaaatcgctagaagaaggggtcgaacctccgaccttgtggttaacagccacacgctctaaccatctgagctattccagcttcttatttgtgttattcattttaataataaatagtctactcaataataattatgtatttttaattttaatttaattttattttattaaatgcaagtaaataagtgacgacccacctgaaagagcagaagttcaaacctctggaaatcggtgtcggtgggcaatttcatggttcccaaagagactccatcttcagggtcgttgttttgagtcgatgaagccttggcgaccatcttcttcgttaggtggtaggttcggcgggactgttcgctgagcttcaagaacgaatttttgttttcccaattgaagaataccaatggctgaggaagaggacgagagagctgaggatgagaatccacacgtgcagagtacagcagtgacttcacggctgcaatggccatggctacactgcttcactacgtacgcagattgggatttaggcttcaaaattatttatttctcttaatggaaaatggctggctacaaaacgaagctcataatttaaacggataggatagactttctctctctctctctc

SEQ ID NO: 263790 - DNA, 724 bp, Cannabis indica
taccttttaatttattttgatttttgagaatcttttttcaaatcttaagttagttattttttatggtgttaataggaatttcaaaatttttaaaagtttttattactattaaattaattaactatagtatatactaattattggtaatttaagtttattaagattattttttatgtttatgtttgtgtatgttatgtaatagtatggtaccttttgttttgttttgtttgttttacttggtgcttatatatggagattttcaaggtcacttttggagttacttacacgagataagctttattttcctttgtttattttatcattgtttcttatagttagtttacttcatgttacaagatatttcgtaagaactcattttttgttttgttattattgtagggaaattttcagtcattcaaacagagagcagttattttgatggaacggctagattggtctctcttaatttgttggagctttctattcatttctagggtttaattgtttagttttgatctcagctttttctaagcatttcgtttgatgtaatgatttggacactttcttagctgatttggctagtttactttccagttttcctgaggcatccctagttcatgtctccgctcatgaattagttgtgcatgcacttagggtggattgtgaacgagcttggattgatagtttttatcattttcgattgatgtattaaactctgattatt

SEQ ID NO: 263791 - DNA, 877 bp, Cannabis indica
gctttttgacagttctctcgtgacaagtccccaacattgagggccttcctgtcgtaagtagagaaagtcttagcccgttggagaaatacttgagtaggcgcggtccgcatgtatggagggatcctaacccactccgtaagaagctccgggcggtccatggcctggaagctggaggaaaagaagaagcgttggcggtactccttcacatgcttctggtagttgaaagggatcgggccctcgttcaaaggatgggaccgaagtccacaaaatccatctttaaatttgtctcccttcttggtgacggatacaagttcttaaaaatataagatttcagctggactgggcgaaccccagctctaggcagtgtacaaaatgaataagcctgaaagcaggcagtatgcttggggaatcagttgatacggcgcaaggccaacaaaactaaaaatttacaaagtactcgtgaagagggagcatagccccgtacatcagataggtttggctccaggctccgaagcccccatagttgtgattgggtgtttcctcgtcccgaggcagccggtggaaggtcccgaggcggatggcttgatgcctaccaccgttacgatcttttcgagctgatgggcacaaatcaatgtggagtggagctcgtccgcctcccaaccgttggcacgggacttaaaattctcctgagccacgggacccctcatgacctcttctagggtggctagttgaacggcccccttcttggaagacttggaactagatgcagaagcagacattttggttctgaaaaaattaagaaaatccagcagttaggccccaaaccaaaccctaatgtttaaaaagggaatggaggtcccctaaacgctggaaagag

SEQ ID NO: 263792 - DNA, 573 bp, Cannabis indica
taaccccttgtatcctttctgtcgcaaagtatcatcaagatatgagcccgaaactccttcagttgtttgaattcttcacaatcttacacactataattgaggactaacgttctatgagtgggcatgcactcaatcactaaaggctgaatttgttttgtgaagaaggctatagaattcgaattagaagaatagaaaagaagaagaagaagtctcaaactcactagttgtctcacaagaagaaaactaggtcaagagttaatatttgcattagttggataatgagacctttcttttctttttatactaattcacttagggttaggattgatttatttagaataaaaaaatgataaaatagagcaaaaataggaaatagtggccggccattagggggcccaacactagttagatttttgccatttttctcaaccatttatctatttttcacaaatatcactttttgcaatttcaatactataaatgctacaactatttatttaataattaaaataattatcaaataaaaatttcatttataatatttattaattagactccacaaagtctcttaat

SEQ ID NO: 263793 - DNA, 5617 bp, Cannabis indica
aaaaaaatatacgaaatttcttttatacctttgaaaaaaataatatataattacattaaaaatgataaaatagtaattttaatatttatagtctccatccttctccatatactcctaacaccaaacaacacaaaagagaacaaatattctctccatccttcctattctccatcctttctacactctccatccatcctactctctctccttcctaccaaacatagcctagggacacgattttgtcgtacctctacagaatgtattccgtgatacattagatgagtctcagggtacattagatgagttacagaaacgttactatttttaaccgtaattacccctaaatcaatctcagccctcagatcaaataactcgctcatctaacggctgtcgtatacatcacggaatacattccgtgaaagtacaatcacggaacaaaatcatgtccctataaatttatgtgtcattttatttttttttgtttacaacaattaataaatatgtttatgaaatttcatacaaaatctggaaccacatatacaatttatatctatgttaaagataggaactctctagaaaagttaagtaacaaatttgtaagaacttttaataaataatcaaaacaataaaaattaattttcctggaaaataaagagacaaaagttagataattaagttcaacaacaagtacaagagggccaaaagtataaaaatacataaatattatttttttaacaaatttattgtagtaaaataataaataataatattaataataataacatttacctaaataaatagtatattattgtcactattcttaccaaaatatttggctctctaagagagtgtccaataaatctctattgaaaggggattaaaaattaatattgaagctgcaacgttcggaaggtgtgttggcatccggaagcaaggtatagttctcaagtggctcccaaaagtcaagcctccaagtgggcgaaaatctctcggaggcccctacgtatagttcatttttacttctcgttacatttttccgagaaaatgtattgtttctgattatttttttttgcactgacggaaaaataggtttatgtctataaaggagatatttttaagattttcccataatattctgagattacatctccccatgaacactgtaaatgatgcttagtagttaaaaagtggttaagacagttgactatataactgtcaactaagtgattgtttgttagtacttgtataaatatcaccgtgatcaataataaagttgagcttttatgaatagagatcttatctcaaattctcttcttcttcttccctgctttttattatgtgttcaattacatgttgtctctcttgattaatgtctttaatggagtccacatcaaccgatcttgtaccagatcccatagctccaatgaattcctcggtccttactcaggccactgacgctcacactaaccagctaaactccaactggattttgttttctcattctctttcttctactataactatcaagcttgatcgtactattttttttgtcttagaaatctcaagttctccctactgtaattgggcatgatcttgatgagatcttgcttacggggattcttcctcccaacactttgattacaagagcaccaaatcctgcatacaggcaatggaaacatcaagattagttgttattatcttggatacaattctccatgatcgaaggagttcttacttcggtttccaccttcacattgtcaagacagggaggattttcaaattgaatcctctcgacacgctctcaacatgcaatgatatgttcaaagtgattggcccttgcgaacattaacctagcatatctagcgtatggtttctcttaagtatcatctgaataagaggacaaactatcaacgatttcatgtgcgggatatatcactttagtagccgaccccaaacatgacccagaataaaataattcaaagaaaacgttctgccttgacacttccacctaagaggtaaactcaaaatagtgagctcactagacattatacgtgagggacatgtgccctgacagggatgcagatagtgtgattaataccacaagggtaacacacgggtcgcaacggctagcatcctagactcatgatgtaaaagtaatgaaaataaaagaattagagagaagcaaagtacctctcgaacacaaggaggatagtagagagtggacaagtcaatccgaggtaggggagacgtttgttaccaagaccaaaatgaaaatatttgaccatcaccccaatgtcaagggcaaaggatatctaagaatattataacttctacacaaaaatgaaggaaggtatctatgccaaaataataaaaataaaaagtataggaagtgacctagggaaggatcaaactcaagacctcttggacaaagtgaaagaagcttgacactatgccaaggtgatgatgtgaagtgagaactcaaacaaggggagccctttatatataaattaggcatatccttgataaatgcgatagagataataattgccttgcagtaggataaactctccaattctttcagtctacagaacacttaaaagaattctagtagactgggaggaaagtgttaacccaaaaaattagcaccgctaatctttgagattattcacttaagggcaaaaagacgagcgagagtgcactcagtcagcctactcacccgatgtatatttctcaaaggtagtatttctggataacgagatacattcacataatcccaagactaaccctataaacactaaaaggacgcatgtgtgcatgccttagtgggggacccccgtgcgagcccacgtggaggcttcaatgcaaaccgaatttggagtgtgtgtgtgtatagtgtaggcgagtggggggctcacatgcgagcccatgggggttcgcatgcgagccatgtgtgtgtgtgggagagtggtgagacgtgtggtgtgtgcgagtgtgtggaggctcacatgcaagctgtgtgtgtagtgggctagcgatgtgtgtgtgtattgttgggggcttgcatgcgagcccatgggggtctcgcatgcgatccgccatgtgtgttgtgaaagtttgttccaaggattataaatataaggtgagaggtgaatgcacatcaacaagggtgacactagaagaggaatcaagagacaggcgtgcaaggagaaagcgtacaaccacgccttctgagaactctaaaagcaaggaggtacgagtagtagtgacagcggacctacgaggtttgaggacccgaccaagggtatgctgcaaccactctcttgcaacctgtaatcgagaccacacgctacaaccactctcctacaacctgcaattggggaccactctcctgcaaccgaggaccacatgcctataacaagggaccatctgacactaaggaaaggtacgaggagtaaagccacctccaacttgtagcgcaaaagcgacgttttgtccccttgggaccactttgtattccagactattagagcctataaataccccattctcagatgtgagagagggttggaaaattatttggtgcaactcatgaatgcaatagagaaaagcaactctcagacatcttttgaacacgcctgaaattattttcgaataattaacaataccgaaaataggtttgaaatattttgaacacgcctcgtaaatttaaatatcagtaaagttgttttcggtattgtaaactatttgaaattttttttttaaaaaattataggaatgatattataacaaatagcactatgaaaaaaaaaataattctaacatataatttcaggtataggtatagagattgactaaaggttataataggaatttccaatttgcacacttaactatataaaggagtagtttagcaaactagtaggagccgtttaggaggagcagcattctgaaattttggactatttcaggagtttttgtgttggtgaccagagattagacaatcatggaggtgtttcccatccaggcagatacatacaagatagggtttatcggagcaggaaaaatggcggagagtattgccaggggagtggtccgatctggcgtcttgcccgcttctcgtatctctacatctcactccaaaactgatcgacgccaagtctttgagtcctttggagtcaaagttctccctaagaacgacgacgtatagtgtccttctcgtgctctttggtattgtatttttgtgatatatattcgtttggttgctgagaatattttaggaaaaatgaattcgaatccgaaaatgattgaataaatgtgaatttactctgcctctgctttataaagggtgtttcgaatttgaaaagttgaaaagcaaaatctttattcttttttccttctcagcaaccagatagagtttctaatggttttcccccttattttcgtctgatgtgctctctatttttgcgattgtcgtttctgtataacaggttgttgaagagagcgatgtggttattttctcagtgaagcctcaagttggtatagctccatccatatttttcagcttcctctagtttattttgtttggatatgtatgattaatatgtcttggaactgaactgaactgaagacgagaaactgtaataatcagatcaggattgtgaaacgttaataaacattgtgtccttttcaaattggtctgatgttagagctatggctactttgattatgaggatcattgttacaaaacgttttgcctctttctgtaatcgcagttaaagatgtggtcttgcaattgaagccacttctttccaagaagaagcttctagtttcagttgctgcaggagtcaaattgaaagacttgcaggtgtgtgtggcttgtcgttgtaaattttaaacttttctggtgaattgggactgtgaatgcctagtgttgatcaatatgataattgaacagttggtttttatgctttactttattattatgttacactacaaccaatttacaaattttgctctatttattttaggaatgggcgggtcaaagccgatttatcagagtaatgccaaatactcctgctgctgttggcgaggctgcgtcaggtattattttcacctatgcaaaatctttctttggatagtgaacccattttatgcattattttttttatatgcattttaatgtctcagtatttcaatgtttgtgattgaggaactaaggacctatcttttggttcattgtgttactttccaaattgtgagtttgagaatataaagactaacatctgtcctgtccctcatgaagttttttgaccggaatacattctaagatttatagtactcttacatgtaaaagttttgacggatgatctgttgtaactgtaaatcagtagttgttcttgtcttacaatggtatttgacaattctataatttgggctagaaggatgataatcattttggttttaagaatttcttacgtttacagaacatgtacaattttaaatttactgaacagtatgtgtgatgtctagttaagttttatgagttactgatgtttagcactctttttcattagtatctatataagatacaacaaatgggaaacatgctcaatatcat

SEQ ID NO: 263794 - DNA, 764 bp, Cannabis indica
atttaatacatcccacaaaaagataaaatacaacttaggaaattgaccattttgtcccttaaacactaaaatcactaaaagccactgaggggtaatttgggaaattctaaaatcccaaccaatcccgacattcccaatgtctaactatatcaccccgctatactaaaatactaagatgtgattcaactaagccatacaccgcgttccaatgttgcccgacactgaacatacaaaattatgcaatttttatatatcacttataaaatgcattctgaattaaaataaattatcataaataaataatttagaattagtagctaattttcataattaaaccctaagtatctgcaaatttccaaattcagactaagcggtctttacagaagcagccaaaatgacgtactcgtgtataagagcaatcatttcgtgggtgtaagggcccaatggaggcttgaagcggggacgttacaaacatgctttcagtgttgtatggttgggcattttaagaaagattaccctcaagcaaagaaagaatagtcagggtggcttagtggtctaaggcgctagactcaagttttggtcctcttacgagggcatgggttcaagtcccacttctgacattattgtgacagtcagtagtctcgtgatctgtaaggcaaaatacaaggtaagttgtgcagtcccacatcgcttggagaaggtcaagtgtgatgattctaagactgtgtaggtttaggatgttgagaatattttaccaggatcta

SEQ ID NO: 263795 - DNA, 981 bp, Cannabis indica
atgcatgttgattgaaaaaaaatgtgtgtgagagtattatcggtaccttacttgatatttccagcaaaactaaggacggtctaaatagtcgtttagatctcgttgaaatgtgtgtgagagtattatcgataccttaattgatttaccttacttgttttacagtgaccatatggagctgttccattcaatagttccaagaaatcataaaaataaacaaaaatgggttgcagaccagtatcgtcaaactttcattgggtggttaaggaataccattatagcaaagttgaacaaatcgaatcatggagtatctgatgtattgagtcgtattgccctttggactaacttttgtagtagctaagcatgaagcgtatattgtaaggggtaaatgtttccatacaaagtcaagagatgatactcgagaggtttaaaatagtggcatacgtattgtcgtagaaaccatgcattttgctagtgcaaaagatagaaaccatgttttagatactatgacatattatcgggttattgaagaaatatgggagctcaattattttgcgttccgaattccactttttaaatgttcttgggttgacaacaatgttggagtaaaaactgacgagcttggttttactttggttgatttaagtaagagaggaagcaagaatgatccattcatcatggctagccaagcagttcaagttttttacatttctgatccggctaatgataaatggtctattgttttatcgacaccagagaggaggttcttagagaatgaagaggatgaggagaatgctgacttatgttatgatgacttcattgttggacaaccaattcatgagcaagttatgggaattgatcgtaaccttgaggaagacgatgctgaatacattagaaacaatatcaatgagggaatatgggtcaattgtgattcaggcaaacataaacaaaaaaagaaaagaaaacgtgtctaattggtaactt

SEQ ID NO: 263796 - DNA, 703 bp, Cannabis indica
ctaacaccattaaacaaatcaataaattatttttttgtaaaaaaataattttaaatatctaaatttaatttttattacataatcacttaaataagtatttaaaactatcaaaaaaaaattagataattatgtttctttctattaatcttaatttaaatttgaattagaccaattaattaatcatactatataacaaatttattagttatattgtttaaaatatctaaacttatatatttattttattatctaataaattagttagatatatatttcttataaataaataataaaactagattaaattttatatatactaaaaaaaatataattgaattgcattagatttaattattattatcataatttaaattgttaattaggtaatagcaactctaatacaagtctaagcaaatatgcattccatgttactgatatctagtcttatattaaatgtggcgataaacagaaagtgttgttacttttttaaacattacaatttaaatttaaactcactggacatatttgtaaacatagattatattaacaataaatgtagcattgtaaataatagtttactatttataatcaataaatatatataaaatattaagaacttttacatgattttgcagtttcaaatctacatactaaagagtcaatattacttctcagtatttctttttagggtaaatactatttt

SEQ ID NO: 263797 - DNA, 967 bp, Cannabis indica
tataggtacctaactattaagttaagtaaattatcaagtgacaatcattgattggtccaaatttttatttcttttaaaaaattaacagttaagtactcacagagttctaaaaatataatttcagtattattacagctaaaaattaaacttaaatatttatttacaactaaaaattaaacttaaatatttatgcccgtaaaaaattcttatttgttttaagaaacaacaatgaaagtgtatcatcaagtaagaaaggtaaaactcatttaatataaggaggttaagaaagcaacatgtgggtttgcctaatagaaactataaactccttttttgtgaaagagagagaaagagtagtatctgggacacatatttccacgtcaacaaatcatttttcacgttcgaacaaatatgagatgaacctgacaaaataaaaaaaaaacaaaaaacaaaaaataataacaagtatgaaatgaataaaaaataatgagtgccacaaggcccctagtccccagacccagagtgttcttaatttgatcctcctcgaggcaatcccacccccacaatcttgcactctctctttctttaaattaattaatcttcttacatttaatcttggctacatcttcgatccatttccatcgttttcaacctaaaaactataacacttcacaagaaccaacaacgcctgcaccagtagttattatacatgtttccctattaattttaataaatatgtcatctttatcctatccaactcttttttattgtttgtacttgaagttcttacaatgtaccatggcttcaaatcctaattttccaagtaaaaattaaaatcattacgtccttgaaagtttgaaagcaactttgctgaacgtgaaactactagaaatactttgctgataaattttttgactttgtacggacgaataatggtctgacagtgtgatcaatgctttttcttttccta

SEQ ID NO: 263798 - DNA, 653 bp, Cannabis indica
cttgtgacttaaatgtgtcattgctcctgctgcaattaagggctggcattcgcatcaattggatgtaaataatgcatttttgcatggtgatctcaaggaagatgtctacatgactctcccttaggttacaaacctaagggggagcttcctcacaatcctgtatgcaagctaaagaaatcattatacggtttaaagcatgcttcgaggcaatggtttgccaaattctccactgccttatttgatgagggatttaatcactcaggctacagaccattcattgttcattaagcattatggtagccatttcatattcttgttggtctatgttgatgatgtaatacttgtcagtgatcttcaagaattggaagctctaaaaatcagataaaatgcctgattcaaactgaaagatttgggaaatctcaactacttcatggggcttgaaatagctagatcacaaagggcatatttgtatcacaaagaccatatgcattacaaattcttgaagacttgggacatcttggatgcaagcctatgaatacacctatggaagcaaatctcaagcttggacaaaatgacaaagacaagttggcagacccgactatacagaagaacaattggaaaactacaatatctgaccattacaatgccagata

SEQ ID NO: 263799 - DNA, 2517 bp, Cannabis indica
aattgttcttcatttattaatgtctacgttttttagcttaattatcgtaaatcaatgtacaaacggattgacaatgaatgcaatccttgtgtaaatgatcggacacttgctttgtatataaaggagtgatcaactgtgaaatgggacacctacaaactccttgcaacagtggactaagcagaccgtgatctgactgaaccactatatttcgtttgttttcttgatatttccagttttcattaagcattcatgttcccaatttgagtattcgccgttctaggttgaatactcgcacttgttcatcatattgttattattattattattattattattcattttttggtgttgcaaaatttgctagacaatagtactcttgggctgacactgtagatttgctgtcacgaatcacaatcgtttctagttcagcgacttactgaaccatcctatctatctcatctatagatagtgagccttgacgcacaaccctggcattagaaacctcctcctcagagatcgaggtgggtataaagttatagctcttctccagttcatcaggaagaggcctcgcctccagagtcgagcatttggctatctgacaggtcgctgatctaaaagatagaagatcttttcagtgtggtgaaagtccaagaaaaacacaagtgacctcacccgcataaaagaaattcataaaatatgaaggatgaactagacatctcaagaaatggttgggtctatctcaataacataatgatcatgtcgctacatgagaattaaggaactgagacacacccaccatttcgagaactcagccaatccttcgatggtataagtcacacatgtgcaactaaaaacatgtctcaaagaaatgactgggagtttcccaatgacccaaggggcatgagtttttagtatgaccatagagatactgggacaacccaaccacttcgagaaatgtggtcggttcaaacatgccacttaaaagcgagaaaagtaaaaactggtcgcatgtctcaaatggctgggtgtatacagtgacccaaggaacatgcatacactcgcatgaaagcatatgtaaatcaaaaggctaaaattaaatcctaagtcctaactgggattaaaatagctaaactttagattagctaaattatttattgtatatgtaagtagtcaaggtgttcatcctaaaattcgcgagtattcaaaatactcaacaagaaagatgcgaacactgaaggttctctttctaaaacccgtgattattcaagttccaggtccatatttcccagagaaatgcctagttttgtcagaaagcaaataaagttctacatgtacttcctattatctcatgcattttctaaagcgcagaatataaattgatttgcaaagcaaacggaaaaatggttgcaaaaaattttccactaaccttgaaagtgtcgatattcttcagtcaattctgtgaatcagaagcctccaagtacttttctagaaaagaaaagaagaaatgtgaaagaggtttctgaggtttcgaaaatgagagagaaacaaaaatgagagggaaaaaatgaaggatcatttcgtatcatgatggataaataccattatccctcattaattgggatcgacacaagtggcaagagaatgcctaaggtctcacaatccaacgattatccatataatgattacagcggtcttttcaaaacactcgattggacaaccaaaggtcaccatctcgtgacaccctttcacctgcctctcgcttatagtttccctcatgacataagctgctagtcgcgaaactaggggcatgtgttataatgagaatttctcacctagaaactagagaccaaactcctataaaaactatacgtggactcactcttcttgaggagggttgagatgtcagtgagagacctcttgagtgtaagcctcgtctgaaccagactcaaagggatgatgtgaccttgatagtgtttaatcgcattcgactagctcgcatggagcaggatcgaagatcgagttaagactcgcatatcccaagatatttgtgaggactataaaggtctttctgcgaagaggaaaagatcgcttctctactcagcgagttggtctggatgacccaacaacctcgataacccgataagcactcgcatgtcttaagttatcgacctattacaggatgtccgtataagcaacttgaataggacacagacatcccaaactccattagtgtcgtacgcatcttaagcctacgagcttatgcaagaatatgaacagacagctcgtactatagaagtcgcatacgttgctatatttagtgaattgggccgaaattattcttcatttattgtatttacatttttatttatttaattgttatattcaatgtacaaacggattgataatgaattcaatctctgtgtaatcaaaggacacttgatttgtatataaaggagtgatccaacgtgaaatagaacaagacagaaaaccctttcaacagtggactaaggagaccgt

SEQ ID NO: 263800 - DNA, 588 bp, Cannabis indica
tttggggagaaaaacagagaagatttttggaaatttacttgctggccagagatgttttggtactgatcaagggcatctttaatggcattgcacgcttgaatgtttgacctacagaataaaatattgtcatccgcaaataggagatgagagatctttggggctgaacgtgcaattttgataccaaaagcctcttcctgactctcagcacgcttaagtatggatgagaggccctcagcacacatgagaaagagatatggggagaggggatcaccttgcccgatcccccgagaaggagtaacaagccccaaagcttgaccattaatgttgaatttgaaagtggctgtggtgatacaagccatgatcagcttgataaaccgagtgggaaactgaaatttttccataattttatgtagaaatttccactccactcgatcaaaagcctttgccatgtcaagcttgacagccatccagcttactctaccttgctttttatttttgatggaatgcaagatttcctgagccataagaatgttgtcagagatgaggcggcctttaaggaaagcactttgatttggggaaatcaaaggg

SEQ ID NO: 263801 - DNA, 758 bp, Cannabis indica
tttttttgcatcctccaatgttgtcttcacttccttggtggttgttatgactttgagagtggcaaatttagctcgagagtaagtgtaagccatcttcagattaagttgcacgatgaaacaagattaaaacatgctcggcctaaagcctatattgaaaaataaaaggaaaagtacttactcggtagcctcttaattcaaccaattagcagctccacagacatatccgctaccctagccagttaatcgcgcgtttacctcattctttagctttgatcgccttggaccgcaagcctgctggtcatgttatccctattagaatattttatttatggaaattattttctaattaaggaaatgattttctatttaaggaaataaataaataattgattttctgttaaatgaatattttatattcattgaatctggacaaaatcaattatgtaatattctatatatggtcagatttctatattcattacctgatttgatttcctgaattaattgtcaaaatattctgacaattaatgtggcgcagatactgatggagtatctcacctataaatatagggtctcggtccccgagctcctcactcattctgttcataacagcaaaatccatctaaagagagttgagagagcgaggaagcccgattacccacatcaatcagtttcctttgcagatcaaagcttatgtgggtttgaagctcaagattcaatggctggaggtatttcgatccttaagttatatagtgtat

SEQ ID NO: 263802 - DNA, 479 bp, Cannabis indica
ggccttcgtcaaggcgacccattgtcaaccttcatctttctgttctgtgctgaagctctatctagtctaattcttgatgcaaaggataacagtcgtacacatggcttgaagttcaggagggtacatatcttgttgtctcatatctttttttgcagatgacaatctaatatttgtggaagaaaaccgagaggagtgtaactaaattaaaacgatccttgctagttacgaagattcatcaggccagactaacaatttttgaaaatcagaaatgtgctttgggaagacagttgacgaggcctcaaagaaggattgacgtgtttggggttaaggtagtagagcactttgacaagtatcttggaatcccaatctttgtaggaaggagaaagtgtgagcttttcgatactattaaaaagagagtgtggaattgttggaatttattttaccaggatcttagatctactcacaagtgtgttgtttaa

SEQ ID NO: 263803 - DNA, 1334 bp, Cannabis indica
ctgtacctctctctctatctctttgacaatgactatttttatagtcttgatacaaaggaaggagggtgaagttttctctttttttccccctatttttgttccaataggaaatgagataaaaaattcaaatctaaaaacaaatactcaagtgaccactcaaatacttctctcaaaagtggagcatgtggcactcattatgctattcaattgtctttcttgtggttaagtgtgctttaattaaatatatatatatttatatatataactatttaatcatcaagattatgtgatcttaatttacaagtaatgatggtattgtgggttgtaaattacaacagcaacccgatcaagatgccttgtttggcatccaaagagggtatggtatgtatagtatagtatagtgtatagtagtgtcaaaagtgtaagactttctgtgtcatattaatttttcactcaattattatttaagggacccatttaatatttcttcaaaatctgcaggactcattaaccattgtatagaagcaaagattttaaaccatttctttgtcatattaagacctttttttttcctaatatataataggaagaataaaaaaagtgagaaaagaaagggaaagcaaacaaatgtacaagagttgtacatttctaataacaacaacaaacaaatacttgacattatcttcaacaccatatttctgtgctcagtaagttcagagattaattattgtatggttcatagatgaaaatactgtcaaatttcagactatctacactgcatgttgagaaaatttcctgtgcaggctcaattattttcactttgacattaatttttcagtcaaaactgatgaaaaaattaaataaaaaccttggactttttgctcttgtattattttcttttctcaatttagacctggtcaagtttttgggccacatgtaggctgagtagtagcagtagtaaccattttctctagggtaggttattatataaaagaattggttatatgtggtttattaaattgtaattgaaaaatgaaggataaccctcaaagtcacaatcactttggtgaagctttcttatttatttatttcttgagcagtgcaaagaagtgttgaagaaaacttgatttgagatatggtagggcacttgttggacatgtgattgaaatagggaacaatagttatatttatcatcactctagctacaatatatagatcaatgtgtggagatcatgaaaagctattttggattgaaatttaagatagggtccacatacccttaaggctcataaggcccccctcctctactaatatatttatatatatatatatat

SEQ ID NO: 263804 - DNA, 371 bp, Cannabis indica
atttaattggaaaaagaagccatttattagcatagatatttatttaactgatttttttttaaatcaaataaaaacttatttattcacaaattaaaaaaaaatatttttttcttttattaattcatcccgtacaaaaatatcatattaattagaagtattaccagtgcgggtagtgttaattataaccaaactacatatgcaagttttataatttctcaaactataactcacaccacaaaattttaaaattataaaaatattgtgagatgcaattgataaattaaattaaattttaggaaactttttttattgggatcacttttgcccttcatgagttttttttttttttaattatttggtatctaaaaaaa

SEQ ID NO: 263805 - DNA, 756 bp, Cannabis indica
ctctgacaacagatctcctaatatatattatcatcataataagaaggagaagaattctctagtcaagtcgttcactaagtgatatgaattaatctaaacaatacactattttatgttatgagagttagatacaaaacaattaacattcttgtcggaaaatcatttaccaaataatcatagcgaaagagaaaaaatataggactatttcaatataggtgagaatgcatatgtaagaaaatatcacaacatagttcactacttaagtctgatgcttcacttcatgccctactactacactaataattaagctcatatatatctcctagtcctgcccatctcatattctctgatgttcccccaacttttttcagtttaatttttttagggaaaaaaacaagtaaagagagaaaagaaaattacaatttttgggcattgtacaactttattgggctagctatgttaaatttgagatttcttaattcacaagagagagagagatttagaaagttagaagaataccatatcttttagtttgttaatgattctatagattcttatttctcaccatatttttccttttattgcaatacatatattattatctctccactataagaaaataataacaagcatatagataaatattggattttttttaagtgagagcaccacttttgctctcatctatgagagcattttcttttagttttgattaatttagtaatgaaggtgcatgagattaaaatgaattgtgga

SEQ ID NO: 263806 - DNA, 515 bp, Cannabis indica
agaatattctgttaactttaacgaagaagaaccaaaattcatttttaaaattaacactgttaattagtatatttaatactaatcacgaagacccacaacaacaaggtctaacttacaattgcacaaatgcacaaattctgtaatcgaatcattgttaaccatttttctctatcattcttctctaaatttgtcatcaattccaatcccaaaagccctatcaaaaggtgcgattccagctgctgcaacaatatgtgcgactgaacgagcggaggtctatgaaatcagaaacccaaaggtgcgatcgactccagctacgacaatgggtgcgactaaataaatttattatactctttataaaaagcagtgttgaaagagggtgaagtagaacaataatagaagagaaaggtcgcgaaagatggaacagatctcaccgagttgtcctccaatttgatctggtcatgatgttcatattaattttattgtttacgttgggagtattgatttcaccgagtatt

SEQ ID NO: 263807 - DNA, 616 bp, Cannabis indica
ctcaacaacataaatcatgtaatctcttaccataaatcatcaagattaaacaccaaacttaaaaacatgcatgagcaagaacatatcaactaattcatgcattttcacaatatttttcagcaaagaaaattcaattagaaactcaattaaaactgaagaatctacctcaaaaccaagcaagaacaatcccttcaatcaagctccaaaatttggttccaattcactctaattttcttcaaaatcaacttgaatacaaagagggttttgagtaagagcgagaggtcggttaagagggagagaataaacaagaaattcttttgcatttactcccaaaaatcaatattagcaaggtaaattcaataaggtcaaaagaccaaaatacccctagggccaaaacacacatagtcttccttacaagggtgttttaatcatttcaagcatatttcatttcaaataaaatttcagattattcaccaacattaaaatgccaattaatcaatttaatttacatttcaggcccgaactcggttcggcccgaaattcccgggtgtgactataccgcgccaacctgtcagaacacacctgaaaagacaacacaggcatactatataataat

SEQ ID NO: 263808 - DNA, 817 bp, Cannabis indica
attaccacgtgacaatttacttaacgatttttaagtatttataccacaaattactcgaataataacaaaattattgttagaatttgttaagaggtgaaaaattattgttggaataaaaagtaacagattaacaaaaaaaaaaaatcattttattattaaattttattttttattttttaaaaaagaaaaggtaactaaacaacaatgcgtacgaaactgttcaaaagaaaaaacaatgtgtacgaaacagtaacgcatggtgaagtgaaggtcaaaaagtcagcaacggtacagtgccacgaaccctaaatctactttgcccgttctcacaagtcacaacactaatcacttaatcccactttttccacacatcggtcagtacgacaccgtttaccatacacgtggcattacctcatttctcctaataaaaaaacgagaactgatattagaggaaaaaaatgtaggtattgccagtactggacaacatttatgtcaacatcaacacccataaaaccatctaattttagccaaaattaattattacaaactgttatttttttggcaaaatatttacaattttacatttaatttttttttttcaatatttttacactttactataaaaatataaaaaaacaaatgaaagtaatataaaaataataaaaaataacaaaaaaaaaaatataaaaacaacataaaaaataatatataaaatacaaaaaataaaatataacataaaatacataaaaaaattagtatgtattttttaaaaataaaaatacttagaaagccataaaaatatttaaaattctataaa

SEQ ID NO: 263809 - DNA, 6951 bp, Cannabis indica
tttattatatttggcttattttttttaattttttttaaaaatgggatatttactaacttagttttcaaatttaagaccattttgcatctcaaaactatattttaggggtcatgacctctatatatgatattttaaaaaaaattacactctatatctactttttatttcttattttaatttttaccttccatttattttatttttaatttatacccagttttataggttatatccccataattttgataaattatgtgaggttatatttggtactttgattatagaataggatatttatcaattaaaattattttggagttatatttaattaatgtgtaataaaaagggatagtttttaacttatccttataatgtacgtctacttggatacttaattgtactaatagtcatattaatacgtacccaactccggaccccggcttcagacccggactccgacctcgaccccgactccgatccctgacctcggaccctgaccctgacctcgaacttgggtcgaacccagctgtttgtagattgtattgtattgtattaaataatactaatacaatccaagacaacactgtataatttaatactatacaatttaatacaacacaatgtaccaaccaaactccaatatttttaattatttgttttctctattccttcataaacaaatcatttttattctggaaggattattgaacaaataatgacttttttagacggatagtaatttttctttgcagcggtagattcaattgatctcttttacttgcagggaaacctgaatctaaacccactctcgttccattcaattcttacaaaatatttctagacttgattaagagttttgattatcattatcatttaatcatttataattgtttcacgtataatgctaataaaaaaaataatgacaataatatctttcgttattgttttattacagcgatgtcgattttttactattaagtggcagctaagtttaggggtgtgcataaatcatccaatctaatgacaaccgaccgatttaattacaaccaactgctaaacattatatatatcccaattggattggatcggatatttgatggggtgtccaaaaatccaatacatccaacatctaattgaacacattaatattttcgtttggtttgaatgagtaattaaattttatattattatacgtaaaatatgtatgtatacataaaaattattaaaattttacttttttttttctttatttggaaggatctaatcagatccaatacatattagacctaaaatatcggatggattcgatccgatctaaaaaatactagatctaaaatattgaataaacctaaattaaaccaataaatataaatatgaaatacatccaacgaatagaaccaattcaatccaacatccaatggatgttggatcaattggatgactgaaattaattgaatcggatcggatgggatggtaaaatctaacatccaacatataattagatcgaatctggatagacttaaaaaatattgaatgtggtctaataaatacccctagctaaatccgttaaattggcaacatattaaattactaattatgtgtaacagctcattgaacgaaaagttgttgagaacttgcttgcctgtagaaagtggtagactggtagctgggctgtaatgaatgaagtccattcccaaaccaatgataccagatcttacaagaggttaaaatatatctaaccataatatacttcatttgtggtcataaaaaaaagtgtcgacaacaaactactttaaggaaatttaaaatttccaggtagattgccatataataataacaaaaaagagtaggtaactacagcaaaatgcaaaattgagtttgtaattgtaacaagtatttatctggctaattaaagatataaacaaaggtcaagaacatcacaaaaatagactaagaattcatttagtatgcaaaattggattggattgtgtggacacgattggaaatgattgaattaagcttagcttattagttgtgattggtaaactctcagattaagagactagataaataataatgtgtttggtgctggactggactaatcagcgagataagttttttatgaatggaatattatcccgctccattttgtctccgaacatgggatcgggactacttattccaatccaggttacaatatcatgctccaaacaaggcctactataaatcagaaaattagactaaaaaattaccacaaaggtaaatttttttgtccccttaactatttttcttgtagaattgtggcaaaaattttagttcatattattttttgaacagcttgttgatgtagtcacaggcaacatagttaaaagccaaggaattttgttctctgcagcatttgacatttaattaagggcctatacagatgcagattgggcagcatgtatagatacaaggaggtccacaacagggttttgcgtatttcttaaagactatcattttctaaaagagtaaaaagcacatacaatctctagatcttcagcagaggttgaatatcgagcaatgacaaacactactagtaagttaatttggttattgtcactgcttaaggaattgaaaagtgagcataaaggatgccttgatgtattgtgacaacaaagttacttaacatattgcaataaaccctgtgtttcatgaaggaacgaaacacataaagattgattgtcatcttactaaggcactctttcctaaccaattcaaagctcttaaagacaagattggattagttgatatatatcatccatcttgaggaagagtatcaagactgagttagttttcagttagttgttagggtgtcttttcaattagtttttgtaactaattttgtactgggctatataagctccattcttgtacctttccaaattaatcaatatactgaatattgtttcactctgttttctctcctttctttctcacttccgcaactaataagtctatcaaatcaataaatgacaatgtagtttactatagattataatttaaaatagttgaataatatccacatgttaaacattgaagaaggaaagtataaacattaaaaccgtggcccttctattgcatattgttaaggtaacatttatgtagaactcatgtgctacaattttatagtccaaatggaaaattcatgtatagatgatggtgataactttgatagagaaatactaaatacactttatattacactctcttatacactttttctcaaatcaaatcaattgaatgacattttctgattacaaaacttctcttaaatcaattttgtaagtgagataaggtttcagaattaacaaaagatatacataagcaaacatcaaaaagagattacctgatatcagtatacacaccaaaatggcacatctatacttaataagctatttctgcttcgtctgcaccaaaattcaactacggcgagtattgtcagactctgcactctctgtggctggttctctgactctaacaaatggtttcctgcgtttgcctcgaatcggtcttcccattaacatctgaggacaaaagaacaaatctccattgtaacaatgtctcatgaaatttggatgcagaacaaagctccattgtcaaggtccatatttataattacaaattagagattttaataagcaacatgaacaaagctgaattacctttccttgaacagaagttagagctgcgtcggcatcattcttggatttgaaggacacaaatccatatgccaaagatcttcttggattttcactgaatacaacttctgtagaaactacactatgaccctcagaggtaaagaagtctctgagatctttatctgtagcttcaaatgacaaatttgcaacaaacaaatcgtatgtcacttctagcgtaggctgcttagaagtgccagctttatacttacttcgtctgcaataatcaacttttaagaatccaccctccacttcctatatcatttgatttgcttttagcatagagaacatgacacatataagagtgcaaaatgaaagtgatacagaactattgctttcactttcgcatatattgaaatgcagtacaagtaaccatttttcattaaagaacgaaaaaagttcccaaagttttatgtttgtaactagcatagaaccaataattttttatagcactcaaaatacccaaaggcagtaaaagagtaatttcgttaatctccgtatgttagactctattaaccatgctatacagagaagtatgcaatacatattagactttttatttggacttatattaacttctattggttttaataaaataaaggttgattggatagctctttggtgtgggctagctgtgtgagtttagttgaagtagaagtgtggactattctaattaactgaaacctttgatcaatctaactatgattatgtagctaagttctctccctaattctataaatacatattgtttcatcacaattatataccttttgaaaactgcttctgatttagagacattaacaagaagacttagttgatagtattatgaatcaatcatgtatgtatacctaactcttattattattgtgttctagattatatacaaatttgtatttgggttatttaactttctaacaatgcacacattaagtttgttagttatttagttcttccaataattatattaaatcaaagaaagcaaaaacgtacattagtaacaagagcagaaccatttacataataaataatattattcactagcaaaaaacgtgattactcatagtgccaaatatatgctatgttttgcaaaatgaccaaaataaaaaaagaatggaagctacaatttatagttgtttagtttcctatgacacatagtaatcaagaggattaaaccagaaatatgcttacatacgattgcagattattgagagccacaagagcttcttctggtgaacccattgtaacaagtgcccggccactgttttgtgtcttgttaggcctagaaacctaaacaaacccagatcagaaacacataaaacttaccaaaacccttcaaagaaaacacaacaattcatacccaataaagaaaaaggaacagactaatatgagtattaaaaatctaacctcaacatctacaacagtcccatacttcttgaatagagcaagaacatcttcaggagtgtaatcccaaggcacgttatcaacacgcaatctgtctttataaacatcctcctcagtgtctgactcaagttcttggctttttttcgaaccactcaccggggaagactcaagagcttggtgttgggcagtggaagagaaatggagatcgaaattgttaatgaatcttttggtcttaagagagtttggagtttgggtgagtggaaatgtacaaggcctacgaaagcaagaaacggagatatgggaatggtgggaatgagtgttgttggggaatgaaagtggggtcaaagggagttgtcgttctatgggagaacatgccgtagctgcggagaaaataggacggagtgatgaagccattgatgacaagtctgagcttcgagaacttcagtccagttatgattgatatgtgtgtactgtaggttttcggataagcaaattgcactttgggccctatgaaacgccgaagaattgccttcatttcgcaaagtaggacgtaactaaaaacaacaagacaaaattaaaatataagaaataaaaaagaaaaaagaaatgtaagcgacaccctcgagaatacccttatggcgcgtttactacaatgtaattggaatcaaaataatcaatgagagaattgtatcggtttaaaataaaaaataatcggaaacaatattttattataatgtttactgaattaaccggaaagaaaatcagaatcatattattttgtttacataactagaaaaggtaatcgtaatgctttaatttaacaaaattgtcattattagaacatgtaattatttttagtttatagatttttaaggggtatatttgtctttttcatttttaattaataaaattaaaattaaaataaattaagtaaggaaaggaaaggcattccctatcaaaatgggggagaacttttccctttgttttctccctaatttgtgtgggtcccactagttttaacctttccaaaatttagtaaacaattgtatgagaatcaataccataccatttattcccattccctttaagtaaacatgccattagtctttaacaagcatactttcatcaaagatctcttcgtctacctcttccaacttcaagcgtatcatgattacctttctttctgttttcccatatcttttctccacccgcttctgtattgtggtagtttagcatttatgtcgaatgacattcaaccgtctccaccccacgagttgagatcggaattgtcttgcttacaaaggacatttaaacaggtgtagagcaacattaatgagatctttataggtttgattttgtttcagaacacatctcttaatgaaccctattggcatttaattacgaacgtcctttcagatcttaatagggtttctaggtttaattgttgtgtctacttacctaatcatgagctagatttggataatcccccgcctgatttggtcattaattacactcttttttttttcatctttggtactcgagtatacttcgagatgtcagagcctttacttctcctctttttactattgttcatatttttcatatttaagtattgtcctgcatatatttttgttcatcccgtgttcttttaaacgtattgccttctttttaaattctattttgttaaatatggaagacttagctcgttctttttctgcgaccctccacctcactgaaattgaaaacactatccactctctcgctgatcatgctgaccaaatgagggacttccaccagccccaccccagtttca

SEQ ID NO: 263810 - DNA, 820 bp, Cannabis indica
tattaacgtaattgtgcattgtaatttatctttatttttctatttattaataaaagctttatttagagtttttctttagagaggaaaaattacaatgcactattattatttcttgttttttttttagagttatccgggatgtatcatatatttaattagtaactttttttagaacaagtaactttccttatattaatatcacgaaattattaaaaaaataatataaaaggaattaatcaaatattagtattaattaattattggtataaaatgatagagtgacacatttggagattgaacataataaacacattggacatataaaactaatgtttaaatatatttgactatatataattagttaatcaaataatactaatttttttttaccacagttcatagtatgacattcgataaatattattcacttgaagattacttatgttgtatcagcatacatatgatttgttcaccaatcaagatgcaattaaaaaatcctaataatctatgacttatcatttttatcatctacatataaaagaaagaaagtgacatacatacatatcacattgatcaaacgaaaaataattacaaaagtgtttctttgaaaaaaaaaaaattctcgtgtaagataccttatttgaagatcttttagtaaatgaagcttaagggtccacaaatgttaaatattagtaactttctttattagatcacaaaattatttaaaatagaaataaaaataatataaaagaaataaattaattattagtataaaataatagagtgacacataatatctgtatgtacagacgttttttat

SEQ ID NO: 263811 - DNA, 753 bp, Cannabis indica
taaaagtcatatttattcacaaaaatattatgttataactaaaaagttattactaaaggtagcaattttttgtagtagaacactactaccaaaagggatattcgtaacggttataaaaatgctttttttggacaatagtcgcaaaaaaaaaaaaaaaaaaaaaaaaaaaattaaacgagtgtttaaaaccgtcatgacaattaagttattcccgaaaattttaaactgttgagaactgtcgagagatatagacaacgatttttaaacgtgccgaaacaaatcgcatgtatttttcaatgagaattgacgacggtgattacatgtgtttgtttaaccatactatgcatggtttatgatttcaataaaaatttaaaaagtgagtatttaaaatgctctaattaaataaacataggttttgacgtatttgtgtggcttgtatagcttttgaattatcgtttaatgctgattatacgtgtgttatgtcttagaaatataagctagtaccttataattcaaaatctatacgttctcattagaatatagattatttataatgggaaatttcactttttggccttgataatacaagccatatcaaaatttataccctcccttaatttgtacaaatttagtccattgattacatgaacttcccattttaccctttttttttaaaaaaaaataaattggtaaaaactgaaattggtctttctctctctcttccctctctctcgtgcaccactctctctctct

SEQ ID NO: 263812 - DNA, 843 bp, Cannabis indica
ttcactggggcactctatttttaaattttctggatgataaacttttgaacaagattgggacattgttacaaaaagaaagcaatctgaattcttggatgatatttatcaaacaagaagcttgtaaatttgagaaacccaaaagtctacgctcggccttaaccctaaaatttacccaaaaaacttcaacctaaaattgctaacaccaaataagatgacaaaggtgcaaatgataaaagtagtggtcaaacacagaaatgtaaaagaacagatcagattaaaaaaaatccgatgaaactcggaagaagtatgtcaaagacaaagatggcatagcaaagcttcgaaaaatcagggtgtggttttttgtagagaacctcaggaaatttttgaaatggcaaaggtgatgaaaaggtggtccttttttttcgttttataccattgggtttatctccgtcagattaagagataaatgatccaacatattgaaataagaaaggtggaaaagaatggttattgaatgctcatgatgtgtctcaaaatcacaaaactgccaaaatcaaaggcatgcatttttttcaaaatggattacaacaaaataccctctgttatcatttgaaaagtacttttcaatgaaaaggacttttaaagaggcaattgttatacccgaaattcggctagtacttcagaggatgacacgtgtaaaccttggggaatacgaatcaaaaaatataatggcaattatattaaaagatattaaatggaataactcattaatatagagtcaatagagtatatttataactcgcaaactgcacagtctttagcgagacaaggatgtacaaacta

SEQ ID NO: 263813 - DNA, 1550 bp, Cannabis indica
aattttattatttcagtaattgtttatgtactaaaacatgctcctcagactttgatatctaccaaatcatatccctcgaactttcacatgtagtaaattatgccccatgaacttttattcatgttagacttttttactaaaattaaaaaaaaaatccttaaatccaacaatctcaatagttcaggggtatttttaacgaccttaaaagttcagagagcataatttggtatatgtcaaagttcaggggcaaaaatcctaattagcattttttatttttatttttatgttttcatttctcataatcagattttattttagtattagtatagaatcaacgctaaaagtattaatttggtttatgtcaaagttcagggggcaaaaatcttaattagcattttttattttttttttatgttttcatttctcataatcaaattttattttagtattagtatagaatcaacgctaaaagtattaatagcgcatgacatagcgttagtttgcgctaaatagaccaaaaaaaaaaaaaaaaaaagaaaaattaagaatcaaatgaataccaacgccaaaagtcatagaaatacgacattagatattctaaaactcaaatcaaactcagatttcaatccctccgtttacatattagaagtaaattttagagaaaaatgggaaaattaaaaccaaaccataagcgagctctagttacataaacgtgatactttagttttatagtacttttaatttcttcaaaaaaaatatcatctctatatatacatatatatattttttttaaaaaaataacagaatgatatttttttggtaattgcagtaagtaacatcacaatagtaattttttaataaacataaacacttgttttattttattattttaaaaaacaataataaaaagatttttttttaaaaaaaatatgcagattggatagaataaatgatgatataaatatatttttttaaatatgcgtaatgagtaaatttgaattgcaatgtagctacattttttttttgaactttaaatgttgacttcagatttggtcaactgacagcggagccttatttatatcgacaatcaccatgtgtaatcaatgtaggaaaataataatggacacaacgatttatagaggttcgacccccttgactagcgggtaatgacctattctcattttagttgtattgattcgagagataataccacacagattataggcttttaccttgtgatttctagtgtggctctttatgaatgttacaatagtgagaacaatgtaagacagatctcgaatgaatgagatgagaaacagatagtgtcttgtttatgtaagtggcgtgtgagagtgaaacctagggtttcaagataagaacttaggacttaggtttttgatctggcctaatgctctttatataggatagagcttacaaaagatctaattcaaaataagctaatatcccttaaaatggggagatattacccctttttcacatatttaaatatacaaaaaaacaaccaattaattgctcccaaggaataggta

SEQ ID NO: 263814 - DNA, 557 bp, Cannabis indica
tataaatcaacagaaaaatagcaaaacatcaatcttagtaaaaaaacacataaaaataacagaaaaatacacctaaactaaaaaacaaccgtacaaaaaaaaatacataaaaaaatcaaaaaacaactatataacacttaaacaaccaacacaaaagcaactataaagtaacgaaaaataacaagatatcaatctcgcttaaatatgcaaattattcataaatttactccgaataaactataaaacatctaaaagaaatacataaaaataactataaaataattatagaatgcctaaataataacttgaaaataattataaaacaacaacaaaaaaacagctacaaagcaatagaaaaataacatgacatcgacctcgtagtaatatacaaactattcatagattaactcctaataaactacacaatatcaaaaaaaaaaatactacttttattaatcatgtaagagagaaaaaaatataagaggagtgctctaaatctttttgtgagaaagagagagatagaaagtattaaactaaatatatatagggacacgatt

SEQ ID NO: 263815 - DNA, 1552 bp, Cannabis indica
ctaaaaaatttcaatataaatcagcagccttttagttacaacgtaagaatgatgttttataataagtcataatttgtgactaaaagtaaaaaaatttgtagtgaattagtaaaataaaagtgtccatggtatatatatgtagtgtgtagtgtggttgatcagataaaaattgtagtctttgttaattttacttttgctaaactaaagtgattatgttttcacataggttataataatcgtgccaacttaatttgttaatatgggcttcattatgctttcatattacattgataaatattattacactaattattaagaacagatcgagatagcttatgatcacatatattaatatacataataatatgaatataataaataaataaataaagattaactaatttattccttattgaattttagtatgtgaagtagtagcattggattccttaggtggtagaaaaatatctggagaggttaggcgagtggcattaacataatcttgaggacaatgagctggtactcctggaatgaccaaaccaattaccctaaacaatctcaaaaaaccaccttctctatattcaggacccatactccttggaatagtgaagcttctcactaattctccaatagcatttcccatcattggtattgccttcagtggtgagaaatagtttttgtttggctcctcttctactatctgcacgtgccaagtaaatatcattaataggccattaatttttttacgtgcatgcatgcatgcatgtgtaaatatatataaataaatataacacataccttagcttggtagtgtctgttactatatacgcacgtgccaaaatgcttaaacataagggcattgtcatcgtaaggtagcctagggaccaaatcattaccataaacaaatctaaagtaacgaatatcatgttcaaccatttcatttttcatgtaatctccaaaggtgtgatttccaaccctaggttgaccaaaagtgtagactccttcaagtttccgaagtaaccatttatcatcgtgaattgaaagaaccgcagggaagagaatggcgagggccccacccaaactgtgtccggttaggatgaacttagttttgtcgttttccttcaaaagagtgtatagcttttctcttatgtcgtaataagctaagggttttggtcttgctaggttgagttcgctgtttgtgtctaggtctttaggaaaacctacgctcttttgtaagcctaaggctttcatgaagccaccgtggatttttccaactccttcaatctcgtaccatgagatgtccacgtcagagctccacgcgtcagagtcaaatggttctgttcctctaaacgccactacaatggtgtcgtgatcttcacctttgtctcgcattataaacgcttgtgttgtggcttttccttgataatctgtaatatgtaattcattatttgcttaatattaataatcaatagtaataattaacgtatgatatatgaatcatgtctttatatattaatccataaaaaatgtagaattaattaattaattaatt

SEQ ID NO: 263816 - DNA, 799 bp, Cannabis indica
ttttttttaaatttctcaaaacttttaagatgttttaaatatataatatacacaattatataaaaaagtagactagaaaaatttgttgggtgccaaaataaataggagtaaattcgtacattacttttaaaaatgtgtattgtaaaattttttaaaaataaattcttaattttataaatacaataatataaatatatataaatattaattaaatatataaataaaaaatatatggcgtgactacagtgcacggcatatataccgtgcactgtagacaaaatttcaaaatagtgtaacttttagtgcatcgttggagagaaatcacaccatatataaatatatggagtgtcgttggacttgctctaaggagagttcaaaaggattaggctcactattttgagctaaacttgtataatttcttggtgtgatttttctaacttttcttacttagggagctcaattaatccctaacatgtatatatattgttattttttgcaattatcttgttataaatttttaatgaaacaacataattaatttagtaatgtttattattaatttaatcaaattattaaagttgcactacacataagtcatgacattgacaatgatacgtacgtgttctctttatgttagtccttttatatatatagtgtcatgtcgttaaatagtgatgaatgatctatgtacaacttgataaaattaattactctacaaaaaattttaactttaaaaaatatatactcaaaattctaatggtgagagtgtactatccaaaaataaagaattttttaaaaa

SEQ ID NO: 263817 - DNA, 695 bp, Cannabis indica
tcagcttggatatttaagcctccagtaggactttgttgttgcagtttttgttggttttgttggggctgatttctctgctggtagaacccctgttggttgtacacataataattgttttaagaatagttcccaatggctttcgcttaatccattggtaaactgttcacatccaccaggcattcctcataggggtgagggcccccacgaagctcacaaataacttgagcctgttttgcctgcacagctattagttatgtcagggcctctacctgggctgtcagtttggtgatggcgtgtacctcatgcataccagccatcatcttcgtttgacttctttcagttggccattgctgcttattcagggccatttcttcttgcaaatcataggcctcgttcgcactttttctcataaatgccccaccagctgcggcatctataatcattcttgtattaccaatctgcccgttgtagaatttgtggaccagcatccacttctcaataccatgatgaggacacttcctgctgagatccttaaacctctcccaagcctcacggagagattcattgtctagctgacagaaattattaatttctcctcgaagcttagcagactttgttggaaactattttaccacgatcttagatttactaacaagtatgttattaacatcctacatatgaacttctaaaacgat

SEQ ID NO: 263818 - DNA, 1174 bp, Cannabis indica
tcactggttggaggatttgtatcgactataggaaactcaacaaagcaacccgaaaagatcactttcccttgcccttcattgatcaaatgctagacagattggcggggcaagaatattactgttttcttgatggctactctggataccaccaaatagccatagcacctgaagatcaggaaaagactactttcacatgtccctacggtacctttgctttcagaagaatgccattcggattgtgcaacgcccctgctacttttcaaaggtgtatgatggctatcttttcagacttaattgaatcctgtattgagatctttatggatgatttctcggtctttggctcctccttcgatcattgcttagaaaatttagaaaaggtgctaattagatgcgagaagtctaacttggtgctaaactgggagaagtgccactttatggtaacagaaggaattgttctgggacacaaaatttcaaaagcaggaattgaggtggacaaggctaaagtttcaacaatagagaatttgccacctccagtttctgtaaaaggagtaaggagtttcttaggacatgctggtttctaccgacgatttattaaggacttctcaaagatctccaaaccattgtccagtttacttgttaatggcgttccatttgagtttggagaagattgcttaaaggcattcaaggttctaaaggaaaaattgatttcagcaccaatagtcacttcaccaaattgggagttgcctttcgagttgatgtgcgatgcaagtgattatgcaattggagcggtcttgggtcaaagagttgacagggtgtttcacacaatctactatgctagcagaaccctgaatgatgctcaattaaattatgccactacagagaaagagatgctggcaattgtgtttgcttgtgataagttccgaccctacctaattgggaataaggttattgtctatacagatcactcagcaatcgaataccttatgacacagaaggatgcaaagccaagattgattcggtgggtacttctacttcaagagtttgacttagagataaaagacaaaaagggcactcaaaatctggtagcagatcacctatcaagactagagctggaagagagtcaaaatacgaaagaggtacagataaatgagcaatttcccgatgaacaactctt

SEQ ID NO: 263819 - DNA, 1437 bp, Cannabis indica
atttcatttcattccactatctccaactaaacgctacctaaaatttttatggggtaatggcgaaaatttaaaaataatttttttatttaaaatataatgtaaaacttaaataagtctataaacaattagctttaacaagtcctaacgtatgccaaactatttaggattaggtattattgtccttaagaaaataaaaaaaggtgtggaaggctgttgagccataagaattagtaatagaagtagcaattgtgcctatcatctttggataggatgttagggattttggctttggcattctaagttaatataatatggttcttttgaactcttccaaagtttagttgtatatattctttatattatgcatgagtcaagctacttggagcttagttagagcataatctcatcttataaaattaggacggttgaccaaaatttttcagtaaccattaaataagtataagtaaagatgattacgaaaaatagagaataaattttttacgtgattccagtattaatgaactgtagtgcacgagtcatttttatttatgaagagaatgttcttttgatcaaagaatatttaagttaaagcccacctttacgtgtaagtccaaaagtctttttttctattacagttctaagtatttataggaaaaagaaagagtcaatggaggaaaaaaggttcatctcccttctttaggtgcaactccaacttcatagtaagtttaacgagacaaaagttatcccatgtgcggttgatgtgacagtgtatagtcgtcacttttctttgcctaagtgagtaggtcgttagaacagtatagcttcataatgatgctaattctacgctgcaatagtcatgttcagtgatttgttttaataatggagttcctgaggacttgtgatcctggcgcttagtgcctcctggatagttaaagatttacttaatcatttatcttgatatggggggcctactcccgggtgcacccttgctcagagagttcgggtgcaaaataataataatctctccacgagtagactcccctcttgacacgtggaattctatatgtttgtcttgccatatattttagtaaaaaatgagtctaacagggataggtccgaaacttcataaaaaaaaataaaataaaaataatttatgtctaaataaaaaaattaggtctttatataacttatttctggttttcaaaataagagaaaactaaaatatgatttttccatttgaacctgtcaacaattatgttttgattatgaatgcacaaggagtgatgaattgggaggtgattatagtaaatagtaattctatatgaattcaccactaatgctaatgcattatactaattagtaattatcataaaaggatgaataaagtaatagttaggggtggtgtacatctatttttacaaactttaaaattctttt

SEQ ID NO: 263820 - DNA, 759 bp, Cannabis indica
taaaagaaaagagatcgataataatgatgaaacatatctatggaatttacgattaggtcatataggctatgatagacttcacaggttaaccaaaatcagtccattaaaaaatgtcgtcttgggtgagttaccaatttgtgaatcttgcctagaaagaaaaatgaccaagcgttctttctctgcaaagggagagcgtgccaaagaacctcttgggttagtgcattcagatgtttgtggacctcataatgtcaaggccagaggaggttatgagtattttgtcactttcattgacgatttctgtaataccctaggtttaagagaatggactagcgaaaccctaactagttaattgtgtattaatatggaattatatgataatataattaatatatgagaatttatatgatttatgatatgataagaccccattaataagccagggggaattttagtaattttgacccgagaagggtaagactgtgaaattaatttatttacgtgcttatggactatattgttatatagtatatctgttgtgtccttttttaggtgtgttctgacaggttgacacggtatagtcacaatcgggtatttcgggccgaactgggttcaggaccgaaatacaattctgggattaattattggcattataattttaagtgaataatctgattttatttgggtgtattggtgttatgtggaatgaccattttacccttacaagtttatgagtgtgcttaatggccataaaggcatttt

SEQ ID NO: 263821 - DNA, 938 bp, Cannabis indica
aaacatatgataaatcccgctaaattaggatttactagagctaagagcagtaattaactttaaaacgaatacagaataaaaataatagcttgtaattattaaactttacaaacattcaaaagattacatttttgttttaggatcccgtaaaaaactttttcaaaatattacaagttatcaatacacgccgatctaagcggcgaaagtggagattacaatattttcccttggtagacccaaccctcgtggtctagcttggcctgaacatgtgcaatacaccgcaaaagccctcgacctcatggctgatcaacaacagatttaccctttcctgcacaatagagcactcgtgagccaagaccgagcaagacagtataaacaacaatacgaatatcaattttaaaatcacttagcattgatgccactgcatctattgtctatttgacatagacctacgtgttacataacacataaatcacattttctcattttctcattttctcatttatcatataaatgccataaataaatcccaaaaatgtattttgggacccgaacctagttcggcctaaaaaacccggttgtaactataccgcgctgacttgtcagaaaatacctgcagtaagatagaataaacatactatataataatatagtccataagcacagtataccataaaattacgattttacccttcttgggttaaaattatgaaaatgcctttaacacaccaacggggtcttaaaatataataaatcataatactttcacatattaaatcatataataatataatttctcattaattcataaataacctagttagggttgctaatccggttatcaaaccttaaggtattacaattatcccctccttatagaaatttcgtcctgaaatttacctaaacaactctggatatttttgctgcatattcgtctc

SEQ ID NO: 263822 - DNA, 621 bp, Cannabis indica
acgatgaagaagacgagcagagaagaatgaatggtcgagttgaagaagagagagaaagaatgttgtttgaaccgttttttttttaattttattatataaaaaatatataataataaaggaaaaaaaatcggtcaagaaaaaaaaactaaaaaaaaaaatgtacattattaattaataatatatcctcacttttctctccactaactcataactacccaccactcacctctccactatcatcagataacatacattgtaaaattgagtttaaaaagagagaaagaaatgagacggggaaagaaaggaaagagaagaaaattctgccaaaatttacagtgaaacaatactcatctaaaattcttaagggtaagtattagggttctcacttatcttcttttcttctctcatagattttcttattttttttcttttggtccactttgatctaagctttctaagccataaaagatcttcaaaagtgagatatagctaaaggaaaaataagagaaattttttttttttttttattttaagcgtttatatattacaatcatgttttatagatttttatgtttctctttgattccctagacttcagaaaataagtcaatatgtgagtgc

SEQ ID NO: 263823 - DNA, 556 bp, Cannabis indica
aaaatattaaagggtaatattggtttgtaaatggttctttaaattgttatgggtttacacaaagttttgataaatacattgtttgactcagtcagtgtttcgagagagaggcatatacatactgatcatagttgttattgttagttcatatataatttttgtcatcatatatgtatgaatcaataaatgttcataataatatattgttttcttaaagttaatatggtaaagtttgtttttcagtctaaacatgcaattcttggaaacaagtttagtttgtgatttgggggtgttaaattaaaaaattggaaaggaaactgttggggaagcaacactagactaaagtctagcgatccatgttcgtggaaatctaatttcttttaagttggacttatttcacacaatccattcaattgaattgtctactgccagtctgccacattagtttgaaatatatatatttgaagtgaaatttagatggtatactaatttttgtattttttttacaaaaatactgctaagcggtattttttacgtttttaatgtgttttttttt

SEQ ID NO: 263824 - DNA, 1930 bp, Cannabis indica
attatgagtttagggggaaaattgtaagcacatgtaagcatagaaaatcaaattttcctaacatacttttttcttttgaatttaacattatctattttgccaaatttaactgatatcctttttttaatagatttttttttttactaacaaaccgtatgtacctctacaacgaatcaacttagtaaaatgaatattcaatgtcgcataatatatttagttatgttacttaattaaattagaataattcatatttttgtgttctagactttttacactactaaattgtactccttgttattaatacccctcaaaatataacttttacaataaagttttatagtgaaatgagtaaagtggtagatgataattaataaatggatacaaactaaataccttttactcttttttacgttggtaaataataaaataaaatacttgttttttacaataatttatattattatttttagttttttttatttattttgtatctatttattaattattatccgccacgtcaatcaatttacgataaaattgaatagaatatgatggaatgattatattactgtaaaaattatattttaaaaagtataattaacgagctgtataataaacataatttataatgtaaagaatttatggacaaaaatattaattattaattaaattatatcgttgaacacaaaaatgtgatacattattttgaataatttatactataagtggtatcaattgtatcatagaaaaacatttagattaccatttacatggacaaattactccatatctaagatgttctgaacaaacatcaactcaaaattggcttgagccatagtactcgaaaagataagatagggtgatattacacactattattccataacctaagtataagaaaaactaaaatctcataacaaaatcaagtgatataattgaaacatatatatacctgtgatatcattatccatgtcaaatatatatgctggctacagatgtaatcatcttgcataaacatacaatagccaataaaataaagttaaaaccacatttgttaaattttatcttacctgaacaaaaattataatttcatacaagactacatcttatttttttctttcattcataattgtttggtagagaagaaagggaactgggaagaaaatagcagagtgaagtgtagacaaaaaaaaatattaggagcgagtacaaaattgagtaaaaaaatattgatgacccgaacaattaattttttggaagagaagaaaattgtatactagagattaaaattaaaattattcattcatttacttctacacaagaaatatatataaataatctagaattaataatttcttttttaattttttgtgtcaagtagcactaaaggtatattaacgatgtattttaatattaaattttatatattttgatttactaaataacattactattaggcacactactacttagcaccacaacaaagtaacctcttgcataataatttgtgatatatttcataaaaattattattatattaaattatgtaagacttaatatttaattacactaaaaataatatgacataagtaatattagacaatgttggatttggcataaaactcaaattatcttgaagttacaattatatagttcatctattaagagatttcgaacttgttaattatttgccacatttatcaataaagctatgcaatagtttttgatttatgttctctcatttagtatatatagttggaattacctctcatttattacatatggttagaattacttctcatttattacatatggttgggagatgatctagctctcatcattacatagttggaattgagttttctcttttataaatatggagctcttgaagagcatttaaaactgaatacatagcaattcaatgtgtatg

SEQ ID NO: 263825 - DNA, 572 bp, Cannabis indica
ttgcgagttgataaatgtaaaacgtaccattttggtacacaacatctagcacttcggtttcatcattggtgggaatgcctagaagaggaaatagataactaagaagggcaccaaagggtaaggcctttttttgtctaggcttaaacacttcattgatggttcgaattataagatagcctaagtttatactcttactttggacaatgatattgaaaaggagaatttggtcaagagcactaacgccatatttatggcccttcctaggtactatatgttgcaaataaaaggagtggatgagtttttcttgaaaagtaaggttatggcattttggtttgtcaaggagtggatgagtttttcttgaaaaacaaatgagtatgtccctctttgagaaatcctcttgaaatttttttgcccattttccatgggagaagagttcatgcctagtcttgctccttagctcttcttgttgcatggaagtccgtggcgtctttccttgtcttgatgatgaagcaattgaagataattgaattttgagagagataggattttgaaaagagaaaagagggattagg

SEQ ID NO: 263826 - DNA, 623 bp, Cannabis indica
ttgaattaaaaattataataagatattataattagcactaatcttaatactttttgattttgatcatttaaataactatagaatttaatggtattcctcctgatttttttattatacatatattggccataaaattaacgaattattttataaatattcaaaaataattaaaaatatatatttttacaaaatacaattttttttttaaaaaaatttaacttattttttcttacggaccgttatttttaaggttgttttaaaaaagacgttgtttacacattttcatatttcacaaatatagtataatattgcagtaatatgaaaaacaatgttattttctctttaaaaaacaccattccgtaaatatatataataattcgtaaaattaaaaaaaaaaaaaaattgtgattttaaatattttgtgtaaatctccctaaaattaatatttgaatactatgagaaaatactaattattatggcaaaaatgaaactctatctcaaaataagaatattatacacaccattagatattatataatacaaattaggaataattacataaagcactattttttataaaataattacatttttacgttcaaaaaatattttttttacatttt

SEQ ID NO: 263827 - DNA, 504 bp, Cannabis indica
tattttctagatagctaatttctatactaattattatttctaatataggaaaatatcattgattgtgaaattaattgtttaataattaattttggtacaattcaattaaggatatttttccttgtattaaattggaaattaataattaagccttctctacacttaattatttatttcctgaatttaatacatttaattaaattgaaaattaaatatctaagttgattttcataatgatacttagatattgttattttcatgatatttaattaaataagaaaattattttaagttgggtatttccataacaacttaaatttgaataattttcaaaatatattttatttattttattaatcatttgaaattgcatttgattatgcaagatgattcttgaaagatagattaaagttgtaaattaattattttaattaattttgaatcaacttaaatcaatgatttttttcatttaatgattaatttaaagtaaaggaactaaaatat

SEQ ID NO: 263828 - DNA, 1076 bp, Cannabis indica
tttcacatggttcacatgtttgagggttttgtaatgatgttcaatttacttgctttacataactggtttttattgttatatttttgattggttgtttgctataattggtttcttgtttcagaagtttaattatataagtcatttcttaagaatttttatatggtatcttatttttttttatacaatatatttttttctgtaggtttatcatattttatttattttttatattaaggaaactggttttataagttttgttaggattttgtatgagttcacaagttttttttatggttttacaggttttgttatgatttttcatagagtcaaaactggtttcacagggttaacaagttcgaaactggtggtttcacatgttttgagagttttgtaatgagttactctattttatgatgttattgtatttaagtttctttttattattttatttctaggtttgaaacttattttcacacctatatattttgtttttagattattgttgtgtattgtgtgttgctttgattatatttgtgatcaatattttttattttttgtatttgcgtgtgtatattttttttctcatttggtttctgatgaaactggttttacatgattcacaaattcgaaactggtttcacatggtttacaaattcgaaattggtttcacagattttaagggttatgcaatggggttgttctattttttttttatgttaatgtatatttttattttaagtttcttttattattttatttctaggctcgaaactggttctcacacttcattgttgttgtgtgacgaaactcatttttgtttggtttttataatgttcattgttgttattttacgtaattggggtttaagtttcatttttttcttttgttattttaggaaactggttttactgtgtcagatttacgtaatttacttgctttatgtaactagtttttctgtgtcaatttttaattatttgtttaacataactagtttcagtaatttaaatttatttatatgttaagaattctcttgtggtatgttttattttttttaattaactagctatttcatgttt

SEQ ID NO: 263829 - DNA, 613 bp, Cannabis indica
aggagaggacacgtcgtttggtttttttttttttttaaagctttttctttcacgacaaaacaaattaagagaacaaagaaataaatagaacaagttttttttttttttttgcttttttatgtttatatataattttacgaaagaaatgaagaagaaagaaaacgttttgaaatcagatcttagaaagaaaaatgagagtagaagaaatgagagtgagaatgagaattgagctgagagtgagagagagaatgagagttgaaaatgagaaatgagagagtgacaaatataaacgtaagaaaaatgacccactcattaataacaaataaattcccaactaactacctaactattttttattattggaacgttttttaacacgtgtcagctaaagaaagtttaaattgggtgctcttttcctttttgttctcgtcttgctttatgggttattatggtagttcatctttccctttttaagttcatagtccacaccacatcgcacaaaaaatgcagtttgaaattttttgcagtgcagtcgcaatttgagtttttcttaaaccgcgcggtgtgatgcggtttgcggttttgagtttttaatatgcagtttaaaccgcac

SEQ ID NO: 263830 - DNA, 771 bp, Cannabis indica
atgaagaagatgaatatgattatgatatatgcatatatttttttgtttgatgaataagatgaatttcattactccaacaatcaatttgtacaactctacaagcattctcaactaaaaaggagaggaccttaaaatactatactatttacaatgaatagtgatggacaatggtcttgctacgatcctatcaaattttacgattttttgagatgtgtaaaattttacgattttttgagatgtgtagggtgagattttaggaaaataataaccagtgtaacagtaaggaaaattttgttaaaatttaccccgaaaactataacgttttcaaattttaattagggaggttattttaaccaaatttaacgaaaaaaaacaatctgcatatccacgtcttagtagtataaaataattgtgacttgtgggaaaaaatattttgagatgggtccgagccacatttcacaaaagggtatcactatcagaaatgtgagatttttaatatttcgataaaaataattgttagtacttgaaaattaatttttctctcaacatgaccaatagaaaagtgatgaacaatggtcatggctacgaccctatcaaatttcatgattttttgagatgtgtagggtgagattttaagataataataaccattgtaacagtaaggaaaaacttgttaaaaatttacgctgaaaaatagaatgtttttaaatttttaattagggggtcattttaaccaaatttaacgacgaaaataatcttcatattcacatc

SEQ ID NO: 263831 - DNA, 523 bp, Cannabis indica
tatcctaatttttgcactctgacgcggcatcacacgatggtgacacatggaatcaactttgagtatctcctcggagggtatagcccgaacacgatgcctcgctggcatacccgaagcaaagcgaccagcgatccgcacagagtaatcaacacttagcgaattcagctttcgcattgtgagtcatcaacaaaatccctataacttggggatcagattacagagatatggcatacccacgatcccacgattagtgtattctgcatttatccaacgatcagtgtattccgcatttatcccacgatcttttctgtttatatccatgggaacgagaagggaaacacttcctctccaagttcacagccctataaatagtgatgcatgttcactgggcaaaaggtggcaaacagtttagtcgggactttaccctagagatgttatctaagaattcatattcagagatactgttgtaagagctataaaaaaaggaacctttctccttgttcttgtgtctttatattgcttt

SEQ ID NO: 263832 - DNA, 512 bp, Cannabis indica
gataagtctatagagagttatggtcacgaagctaaaattcataggcaaccccagattgataggcaatccgagagaattatgcagatattagaagacttattgcgagtctgtgtcatgaactttgagggttcatggagtaagtacttgtttttaacagaattctcctacaacaaaacctaccagagaacgatgggaatggatccttctgggatgctatatagtaggaggtgtagttccccaatccattgggacaaaactggaagaaagtatttgaatctaaatctagttcaaagaaccaataaagctttaaataagatcagtgctcggatgcttgctttgcaagcaggcagaaaggttatggtgacccaaagcacagagatattatatttaaagcaggggagcatgttttcctgcaggtttctccaatgaagggtattagacgctttggaaagaggggcaagttaaaccctaggttcattgggctattttagatactcgagaaggtcgggcag

SEQ ID NO: 263833 - DNA, 703 bp, Cannabis indica
cggtgccaacctcacctctcaatacaatggttatttttttttaaaatacaaagcaaactctctctaataagataaaatacaatatgaaatcctagagagatttgcaagcacacgagaaaataagaacaagtttggctcaagtgcatgaggttggtgtgtttatgaaaagatgataattctttagcttagaacacttagaatgatgttatatgatgaataaaagctcaaccaaccttaatttttgagtggaaaacgagtttatatagtgggaacaaaaactagctgtttatagccgttagcacatttttcaaaaagaatcctgggaaaaacaaactacttattttaaaacggactacctattctgtgaaaaacggactacctatcgaaaaagggtaggccgaaaatcaagcaggttcaaaacatgcattttttggcactaaaacgcgcataactcttcactcgataatccgttttcaaaaattccaattttgttctcttagttaaacaaaatgtgatttagaaattcaatcaaaattttttttgaatcatttggtgagaaaacttgtcgcacaagttagtaattgggccaaaatttatacttataaatcctagtgtattatggaaatcactttaacaagactaaagtaaatttataccatttgattgtgtgtagtcttaacgtagatgagattcttagcttgat

SEQ ID NO: 263834 - DNA, 652 bp, Cannabis indica
atagatttatatgtttcaaagacatttaaatcttaagtagaaaaataatgcattttacatattaagatagtgagatcaaatataaaataaagaatactacattgaaattcgtaagtatggataaactcccagtccatttgcaaagtttctttaaaagtatgggtttatcacccaatatatatgcctggtacacccaaattatggtgcgtgacaggtctaagaaactaataattgttggacatggggtgtagtctgcatagcatcctccaaattttcttaaatttttgccggttgatattcttcaacgggagtgtacatatcgaatcgcgtctaaccaaagttgtttctcaaacatattttgagttgtgataaggttggaaattcactttatgacatgtacacgatttagaaatacctgtatacagttagagtacaattgtcaaagaaaagatttaggcccaaataccataaatgagcatttcatcagaaaggtctaaaggttacatattttattatccatctcacaatactagaaatgtggagttaagaattgacttgatcagtgggagcaatcgatctaggactctagtttctagaaaagatcatttattttctcaaacttacaccttaagtattagattaattatgattc

SEQ ID NO: 263835 - DNA, 1899 bp, Cannabis indica
attctgcctgttctgctttgtcgctacaaaactggtttctgcagtaacagaattacattctgcttctgcagatggatacagtttatattttcatatatattattggcatttgtaaaaactcgatttttcataataaatattatcatttagtaaaaaaatatttaaaataaattttatctattaataataactaaaataaataattttttttttcataaaataaactctcaaaatttcataatagtttataaaaaatatttaaaagaatttctatatctattaagatatctaatttctcttacatttcagatataggactatttcatttgatatatatatatagtttttcgatcttagaaatttgagtatttgacattcttacgttgattaaaaattaataatacaataaatttaagtattttatcaattaaaatatatgctaagtcatgaataaatattttagatatctaatttaaaagagaactcaaaaaataatgttaatagaaaaaattagctatcatatatttctatgttaatttttcttttatttatttacaaataatacaagaaattaaaaacacactataaaaaaactattataaaataacatcatacacaggataaaaattaaatcatatatatgaaaaaagaaaataaaaatatatgacaaaattatattaaataattaaaaagttatgtaattacacagtataattccacacaatttttatggggtatgtgttgtcgaaggaatttagacaacaccaaaatttgtgcgagtattaaatactattaaataacctagattaaaatgtgtgaatactcacatagagtagcgagtattcaacaattagctactaacaaaccgaataaaaactagaaataataagaacacaaagaaagtatagtggtccagtcaaatctcagtctgcttagtctactattacaataatttcagcttagtttatttgatttggatcactcctttatatagaaagcacgtgtccttttagttttacataactgaccgattttagaataattttacaataaatgataaattaaatcaaaataaacgtaaaagaataaatgaagaacaatttcatttattcttttgttaagtgcagcaatgtatgcgacttgacgagcacgagtttcctgttcatattctcgcacaagcttgtaggctttaggtgcatcctgtattcactaaatggctagtggacctatcgcttggatgtctgtgttcaccttagattgcatagacggatatctcatgtgttgacaacgtggaatgtttgagttcctaatgagagaatcaaaatttaggacaaaacaaggcaaagtatataattttctctggaaaattattgcctgaaacttgaatattcgcatttttatagtagaaccctcttgcattctcgcatatttaggttcatttgtctccaagtcaaaatttggtagtagttgggtatttcatagagatttaatgcttatttctcttggtaacccttagctcactgtgaaacacccaaccacttcgttctaccttggagtcggttctctttcatgcatatgcattttaatatcaagtcgtgattagaactaactaagttttgaagtgacgggatgtttcccagtgacttaatgctcatgtagtcgcatgacccttaagatactaggatacacccaaccactttttgaggctcaaatgttagttttatcgcactcattaaattaaaatttgttactcgggtgaggacacttcttgtaacgccctaaataattaggcatgctaccctaaatgcttatgaaaccctaatcccctaatcgggattactaattaaaatagcgcataatttaaacttttatattaaacagactgaaaataaacttgta

SEQ ID NO: 263836 - DNA, 1739 bp, Cannabis indica
cattacttccaggccacttaagttttaagagttttgtttatcaaaaacttccaagagttctatcatagaagcatagatgacgagtgcctttatatctagattctagagctgaggccgtgcatgcaaataataataaaaccaaaacctttagaaagaatagattaacttccgtaatggcttatatgtcgttgctgctaaagcaagctttcctcattcatagctttctatactttctaggcgtgagaaattttttattcagcataagatttgttctaaattatgatgacagcaacatgagcttctaaacaaggacaatgacacaaacaaaatgaagatagcagtagagttgtgagaaatgccattgttttgtgtttctgattgggaaaaaaagttccaaccattatataatttggtaaagtagtactttttagtatcatcaatattaataatggtgcaaaattatttatatccttcaaaaggactattatttaggcatacttctatcatttatcaagttactaatcccagcccaatcactctaaccagtaaacagagtcttagaacatcaaaccctcggccaacctagtcaattcgatattatgtctttgttgctcaggcttgttttggaacagggattatgccccattttctccttacctcacccaaatcctcatgaaagtgctgctcataatacacacacataagatcggtggactgagcaccagctcgaatggcccaaggaaagtagtgctggaagaatagttttctttgcttctcattgaatctagctgtacccccaatgacagacattaaacacattggaaggtacatttgctcaaactcgatcaccttgagagctgactcaccaatcaaattggttggaagatcaaaaagggtgtgccagaaatcatgcacctctcgagctcgcatggcaacatatgccagctcatctgtctccatgaaccgcaccggtggtctgtcatctggggagaagtttcttgatcccataaattttgcataggctgcaccaaatgtgttttctgggaggtcccatgcatgctccacttttgaagatatgactcgcggttgctcaagaagtattgcctgtaaatgaaacagacaagcatgatcgaaagtctgtagtaaaacagataatagacagcagaaaaaagaacacaaaacctgtaagctaaatacttcactgtatccactttacaattgcaaaattttctcagcaatggagagatttatattgtaaaagtctcattgtcaaaagaagatcaaattatgcacaaattgtgaaccgtagattagttttactgtgaaaacaaattattgtcaagtctatgtaaccactcaaataaatttcttcagcattgctcttaagtttaacttcaattaatcaccaagtaataagaattaaaatcttaggacttccagtcttcagagcatgacaaatataacatgtttgtgtttgtttatacaaatcaaaatcttttggaagtccatacctccaactaatttgtattgtataaacacaaaccaaatgaaatagaagccagggtaaaccccaatgacaatacaaattatggactatacaagaaactgaagtgaatcacagcagaaatatctggtaagttaaattcaaaaagacaaacgaaaatagatgtagataaaagagttaccctgccttctgagcttcgcttcattctttcaagaactctttcaaaagcaggttt

SEQ ID NO: 263837 - DNA, 852 bp, Cannabis indica
atgccacacagagaaagagatgctggcaattgtttttgcttgtgataagttccgaccctacctaattgggaataaggttattgtctatacagatcactcagcgatcaaataccttatgaccaagaaggatgcaaagccaagattgattcggtgggtacttctacttcaagagtttgacttagagataaaagaaaaaaagggcactgaaaatctggtagcagatcacctgtcaagactagagctggaagagagccagaatacgaaagaggtacagataaatgagcaatttcctgatgaacaactctttagtgtgagggaaaacctgatggtaccgtggtatgctgattatgtccacttcttggctgcaaaaataactcctcctgagctttcacgtcaacaattgaagaagttctttctgaggtgaaacattattattgggaagagccaatcctctacaagcactgcgctgatcagataattagaagatgtgtgcctgaagacgagatgtattctatcctaaatcattgtcatgctttaccatgtggaggacatttcaatgggaccataactgctgctaaggtgttgcagagtggattattttggccaacactatttaaagatgctagtacctttgtgaaggcatgtgatcattgtcaacgaacaagtaatatcttaatgaggaacgaaatgcctttaacatgaatcttggaagtggaattgtttgatatgtgggggatagacttcatgggtccttttccttcatcttttagcaatcaatacatcttattggctgtggactatgtgtctaattgggttgaagctacagctacaccacagaatgatggtaaaata

SEQ ID NO: 263838 - DNA, 641 bp, Cannabis indica
atagcctatgcctctcgtcaactgaaagattatgagcagcgctatccaattcatgacttaaagcttgttgctggggtttttgctttaaagatatggggacattatctttacggtgaaaagtgtgagatttatactgatcataaaagtctcaaatactttttcacccagaaagatttgaatatgaggcagagaaggtggttggaactggttaaggactacgattgtgaaattttgtgtcaccccgggaaagccaatgttgtagccgatgctctaagcagaaaaggtcccggcaaatttgtaccacagttatgatagcccctcaactagcctctgaaatggttaatgcaggaattgagttcgtggtcaggaaattacataatttaacacttcaatctgatctgctggagagaattagaaaggcacaactggaagatcccgagctagttaaggttcgagacgaggtaatggctggtcagcctagaggcttttcagtctcgaacagtggaatgttgttatgcaaagctcgagtttgtgttcctaatgttgatgagcttaagagagagatactagataaagctcataccacgccttattcattgcattcgggaaccaccaaaatgtatcaggatttgaaaccctac

SEQ ID NO: 263839 - DNA, 644 bp, Cannabis indica
attgcattctcttgaacttcaaaaacgtcttaaagttctttgtgagtagggttatatcctccatatcactatcaccatcctcactagcttcactatcatcatgtgaagtggatttgaatgcaatggtgttcttctctttttgcaacttccccttcttcttaagcattcatgaaaatctcgtgatttatgagagaaccaatgagctcttccaatggtagagttgagaggtcattgacttcttggatggcaactactttgccttggtaggctttggtgagacttctcaaaatcttggtcaccatatccttttgtgtaagtaccttgccaagagagttcaaaccattagtaatagttgtgaaacgagtatacatgttagcaatggtatcatgttgtaacatcttgaaattttcatattgagtaactaaaagttaaattttagtttctttaatggcactacttccttgataagttacttctaacattttccacatgtcctgagctgaggaggcatgctcaatatttttaaatatatctctatctaatccacatattaagccatacttagccttagcattcttagacatcatctttttatcattttcatcatatgcatcatatttctttatagtttctacaccatctac

SEQ ID NO: 263840 - DNA, 472 bp, Cannabis indica
ttttttaatgataaataagcccccacaaagtaaaaattctgggtccgtcactgccttaattattatggttttcttgatgattctatacaaagtccaccaataacgatatttatttaataaagttataacaaaacttaatttgggtccaaaatattaaacatgggaaggtccaaactgttcaatgcaaggcagtcttggaagattgatcaactacataatattatatatataacgcattgctattaggcaccaatggtgcctaacaccttctcgacatgtcatgttgcgattggctagcgatactccctaaaagctattatattaaattatataggacccgacacttaattagactaatagcgatattaacatacaggagagtgctaggcaccactggtgccctttagcaatatatattgctattaggcaccagtagagcttaacaccttctaaacatatcaccttgcgattg

SEQ ID NO: 263841 - DNA, 767 bp, Cannabis indica
tccatccaatccaatccttaaaaagtaaaacctaatttttcgcctaaacgactaatataaacttgtccactcaacaaatcctgaacagtcaaatatgattaaactataaacaatttcagccaatcaaacattttctcttctctcaaaattgctcaaaattaaataatcttaaacaaaaaccacatcaaatttatagaatcaaaatttcatcatgttttgacatacaatctcatattaccaaattattatcccaaatatataaatatatatatacgattgaacatgaaaaagattcttaccgtatgcaattaaagaaaacgaaaagaaattacatgaaatgggtatgcaataatgaccaaaaaaatgaagaaaaaagtaaactttatacctctgatgataggatttgaagaaagcgagagaagggtttgatttgcagcgagtgatgaattgctccaattaattctgccaaattctcagtgtcgtttgcgaaggagaggagggaggagctgtgtcgtcgttggggagggagttggtgaagatgccgtcggcgacttaggaaggagatggccgtcgtcgacagcgagtagaggagaagatggtgtcgtctccgtcgtcgtccactttgtgggcagtgggcaggcggcttcaaagaggggttaggtgagagagagagagagagagagagagagagagaggagggagtcgtgtagtttaagttttttgtttttttttaagttttgttttttattattttgttgtttcttttc

SEQ ID NO: 263842 - DNA, 1027 bp, Cannabis indica
tgatattccagtgaactaatatattcaaaaaaatgagtactcaacaatttatctctattgagctaagctcgaagaaaatcatcatttgacttctatatccgggtagaagctatagattttgtatctatgattagcgctcccactcaattgaactaccatgtccttaacctatatgtcacgagaagaactagttggttgactttaatgaacatatttaagaacacaaataatacaactaaataagaacctaaccatctcaggattaagatcacttgatataggatcaactaggtgatattgaattgaatagatattacggtaagtttatcatatctagttcaagttcaatattggtccctttcgatgcataatccatacatccaacccaagcttactttaaccaatgccctagaaaggacatagcacttatcctccaaggtgcaagtaaactacattgtagattatcctatcagttacactatgtgtactgataaatcataggaatacatttaataacacaatcttgattattttttactgtgccaacgacacaataaacaagaatatcaatgtgataaggacttggatgaatttataaatcaaataaataaataaatgatcacaagaaccaaataatgcattaaataagtaatgaaaaatattattgataattgaatagaaaaaattacattgaaatagggttttatttagggcacaaagcccaacaaactcccacttgcactaacataaaactatcagtacatttcatttaatcctaaattcagtctgtgcttttcaaatgtagctacagtcaaaactttggtgaatggatcagctaagttgtcttcagtatccactttctccaccagtagatcccctcttgccacatattctctaatgatgtgatatttcctcgctatgtgtttgcttcccttgtggcttcgaggctctttactatttgctatagctccagtgttatcacagagtaaaaccattggttttttaattccaggaacaacaccaagtc

SEQ ID NO: 263843 - DNA, 701 bp, Cannabis indica
tttttttcgagatctctattcttggtgagatttttttcaatttctaatatttgttaatctctattttggttttggtttagtcttttattatcctatatcgtttgacaatatctcttatgattctttcttttttagaccacaaattatattaattatgagtttttttttcacaaatttgttaatttttttttcgaaatctttattcttgatgatattttttaatttttaatcttttttatttctattttagtattgatttagtcttttattatcgcatatttttaataatattctttttctttcttttttaagtcacaaattatatgatgaggcaagtaaagaatttatcacaaaattattcactcatgtataaaaaagttagtagttaattaactcaagtatatgatttattttatgtcaaaagcaaacttattttgatcaatagtgataactacaaataatatacgataataatagcgaatgtagtggtgactacaaatgagatatggtgataacatcggttttgaatgacaacaattttgaaatcatatgatgagttttctatagataatttatcagttggtttttttttttagatctctattttgtgtgaggattttccaacctctatttttttttattttactataacgtattgaatttttttttttttggctattttttagataagaaattgtatg

SEQ ID NO: 263844 - DNA, 810 bp, Cannabis indica
ggttaataattttatttttctttaaagaaaaattaatttaatgttttgaaaattgtcaaaaatatgatttttttttttattgttgttgtttatatatttgtgagtgtgtatatgtatgtatatgtatttgtgtttttttaataataggatatatgttctacctgaactaagtttcgaccatagtcctatcttggtgactatttatgaaaatatgatctgtgggaggaagtcatttaggtatttcaacatgtggaaacaagctcttgagtatgatgacttggtaagcaaggcctggcaagaagatattagagggacgaaaatgtattgtcttgtgcagaaactaagaagattgaagatggtgctgaaacatataaaccaaactggttttacagacatacagaagacaatacttactacaagagaagcgttggctgatctgcaagctaaactgaacaaggaaccactcaatgtgggatttatgaatcaagaacaggaactaagaggaaaatttgcagaagttagtaaggcatttgctagcttcatggcacaaaaaagctaaggtgagttgagctaaatatggtgatgagaactcacacattttccatgcctctctaaaattgagaaggattcataacagatgtttctcgattgacactacaacattaaggagcaatagcggcgggctcctcggccgctattgctccttaatgtggccgctaaagggcaatagcggcggacctcggccgctattggtccgccgctattgcttggccgctattaatagtattagcggccaaaaacagggtccgc

SEQ ID NO: 263845 - DNA, 1170 bp, Cannabis indica
atgtcaactgaaatgtgtgcactaaagaaaaacaaaacatggacttatgtggttttaccacctggaagagaggctattgggtgcaaatgggtctataggatcaaagagaatccagatggtagtgtatccacacttaaagcaaggcttgttgccaaaggatttcatcaacaacctgggtttgacttcactgaaactttcagcccggttgtcaaaccagttacaattcgtgttgttctttctatggctctctcaaatggttgggatatcaaacaacttgatgtaaataatgcgtttctcaatggtgacttacaagaggaggtgtatatgacacaaccccctggttttgtcttgcccgatgctccacatcttgtgtgcaaactcaacaaagctttgtatggcctcaaacaagctcctcgggcttggtttgagaaattgaataacactctcactgatcttggtttttcatcatccaaatcagatcgatccttattcattcagcacacaacttcctcaacaaccataatattggtttatgttgatgacattgtcatcacaggcagcaactctcaagtcattgccaacatcatccaattactaaattccaagttttctctaaaggatcttggaaatctaagctactttcttggcattgaggttcaaagtacaccagcagggctccacttatcccaagcaaagtacattaaagacctcctgacaagagccaaaatgacagaggcaaaacctctccctacacctatggtgactggcttaaaactctcagcttatggccatgaaccgtttgatgatccacaactctacaggtctatcgttggggcattgcaataccttctcatcactcgacctgagctagcctttagcatcaacaaagtctgtcaatttatgaagaatcctcttcaatcacattggcaagctgtaaaacgaattcttcgatatttgagtggcacagttgaccatggtctgcatcttcatagaacccaatcaacagatctcattgccttttgtgacgctgactgggcttccgatcccgatgacaggcgctccacatctggctttcttatttttcttggtggaaatctaattacatggcagtgcaaaaagcaacaaaccatctccagatcgagcacagaagcagaatatcgcagcttggct

SEQ ID NO: 263846 - DNA, 664 bp, Cannabis indica
ttaatttttcatctactttccaaaaaaaaaaaatacttccagtatgaaaataaaattattttttatcaaaaatttgtaattaacagacaatcattaattaagcacataaatcaatatgaacgcatcaaaatgatcattttaaatctatattttatgaaaataaattattaccatgactctaagaccagtttttgaaaggtattttatcaagatctatatttactaacatgtatatttgattatattctataatctaacatcctaaacatgaatttcctaaaataatgaattaaacacatataaagttctagaaaaccatacattggtggcagcagaatattatggttccttctgttcagatctctaacccttgttctccttcgtttagatctctaacgcttgttcctgtttgtcgcatagtaataacaagatttgaacttagatctccttcaggtattggaattcttcataatcttccacactagtactgactagatatgagtggacaaagtgttctatcactatagggcttcgaaattgaagagagagagagaggggcggcaaaggcttttctctgaaggaaacaatgtgcaagtcatgagtttcctgaagccaacactttctatttatagaatgccatctaggtttaggttagaattgtatg

SEQ ID NO: 263847 - DNA, 517 bp, Cannabis indica
ataagtaagaaacctatccgcggtttcaagagtaattactcgtaacggtaatgaccgttacttttactcaatcataatcgagtcacaacgataataatcgtttcatatcattatcctcgattataatcgagtcacaacgatgataatcatttcccattatctttccctcggtcataatcgagtcaccacgataataatcgtttcatatcattatcctcgattatgatcgagtcacaacgatgataatcatttcccattatctttccctcgatcataatcgagtcacaacgataataatcgctttctatcattttccttgatcataatcgagtcacaaccattacatatcgttaaccttgattaggattaagtcacaatatacacataccatgatttcaatcataactgagactgtaacagttatattgttaaccatatacagtatttaatatttttcttacctcagtccagccactttgcgtacatgctgaccttaaatggaatcaaagcttgacga

SEQ ID NO: 263848 - DNA, 614 bp, Cannabis indica
gcaacccaatattctgccaaaaataggaaaaaaaaagcaattagttaaacgagagcaataataaaaatgaaattttcaataaataattttaatttgacttaccacactgcaattgtactatagtttgacagaataaatcagtgtagtcgtgaaaatggaactgcattcccaccagagattcaaaataacttgcaaaacttaaaggagtgacaactcctaagctcttagtaaatccaagtgcgttcaagatttggaactccatatcataacacttactttgtgttatgctatggagttcccaatattttgcctgtttgataagattattttagtaataataaagttattcaaagcactagaaagacaaaggagaaaaaacacataaataaagagaggatagaaagaaaggaaaaaagaaaaactcttaagagagcagacttgttattatagttggttaacctttaagggttcgtttggaacgccgtattaggtcgtattgtattgtattgtattatattgaattgtattttatacaatatttttatgtaaaactatatgtggtattaacttttattgacacctaaatatataatattttagtataaattaaagtt

SEQ ID NO: 263849 - DNA, 704 bp, Cannabis indica
agtatgatgaatcaaaaggagtaagagattttattctaaaaattgtgaatgttcagtcgaagttgacagatcataatatttctcttcctcactcttgcattatttattgtgctcttcatgcacttcttgtcttttcttttatccttatcaaaacaacctacaatatttataataaaacatggaatgtcagtaacttaatttctcagtgtgtagctgagaaaaaaaaattgtaaatggagaagcacaaatcttctcactatgtttctcaattcaagcccaacataagatagagaaaattatgaaaagaagcaagcacaatcaggggctaagggatctcatgaaaccaagtgacagagagtcaaagcttaaagtggacacttatgttgtagttgacgtaatctaagttgacaaatttattcttgaattacagtttagagtgaagattctcttgaacaatagcttctatgttcctacttttaagagaaatttaatttctcttccgcttttagttaaacaaggatattcttttattttttctaatgataatgttgatattatgtttgactcaaaattattagaaacttttattttgatggtctttaaaaattggcattggctctcttagcttcccctcttatattaaggaaacatccttattgttatgacacaattgattgtctcatattttcaaaaaaaaaaaacgt

SEQ ID NO: 263850 - DNA, 906 bp, Cannabis indica
aatcccaattttataccggcgggacccgccggtattaatccgccggcattaatgttttcaaatgtatgggcggtaaaattcccgccctcatttttggaggcgggattccgccggtagtaagtcctatccgccggtattaatgaatttataataaattaatatttagttttttaaaactttttttattaaataactattaccggtggattactaaatccgccggtaatacccctactattagaggcggatctgttccgccgggaataatacagccaatattaatataatttcttgtagtgtaaaattaattttttttccaaactatttgttttacacttttactgtatatacatgtatatatttatgtttatttatatgaatatatatttgtgcgtatacatatatttatacattttatgtatatttatatatatttttgtgtatctatatatatggatatgtgtatatgttgtgtgtttatgtatatatatatatatataataaaaaaagatatagatatatgaatatgtatgtagtatgtgagtatatatatatttgtatttactatatggaaatatgtatttttatatatgaatataaatttgtgcgtgcatatatatatatttaaataatataagtatgtatatatatatatttctgtatataaattcatgtttatttatttatttattttttgtgaaattagttcttgttttaccgcattggatcacatctgttacaatcatcacatatatcatagctatagccactgcatacatcacaaccgctacaaccacatcaagcgccagccaccaaaccatccagagttcaatgagaacgagagatgaaatgattttttacctgagttatagaactaaaaattactattatatttttttaaaaaaa

SEQ ID NO: 263851 - DNA, 645 bp, Cannabis indica
gttttttatagaaacaacacgaagacaacaagaaaattatataaaaataatagaaaaataacattcaaacaacaacaaaaaataacatacagataagaaaaaatcaacaacaaattaacaatattacaacataaaaagatcgtattttctgtaaataaaatttaaaaaattgtaaaaatgtttaaaattacgtacaactatatttttgtaaatttttttgttgtttttgtgtatttgtaaataatctctaaaaaaatatacaatggataaaactgattcaatccaatatccaatgaatgttggattgattgaatgactgaaattaattggatcaaatcggatgttaaaatttaacatctaattaataattaaattgaatctggataagcttaaaaatattagatgtggtccaataaacactcttaattctactttaaaatatttataatcttcacattaattacttcatatattttcttttaaaaaatataacataaatctataccgaaaggagagcaaaagtaattaaatgtgaagtactttatttgctataaaagaatattatgtttcaaagcaatttaatgatcaagtagatcatatgggatagatactaatgaaaaggcaagaggaattcgaatccaaatc

SEQ ID NO: 263852 - DNA, 695 bp, Cannabis indica
actttcccaacaagaatcttttttagaagaaaacagtagaaggaaaatccagctaagatgatacatgaacaaaaagtgtttaatttacaagaaaaaaaataaatacttgtgatcttcaataaagtccctaactccccacaaatcgaacaagttgtatcattataaacatcaaaggaagcaaaattaaatgttccattattttaagccttcttaaaattgtaggtcagctaaaaactacgcttgggtacattatctctgtctcaaatttcatatgatgagaagaatacataatatgggaattaaactttattttttttatgtacattatctgagggtcctactagctctcacaatccttgttgtagtacctagtcgaggttccatatgaatgcaggtacttattttcctttgcacatgtggttcatatcaatcgcgaatttcttttggagtttgtccctaccaaataaatctaaatgaccatagaatcattaccactttctttatcttttaccacttgagaaattggcctatcacatcccctcatgagttaaacttcctttgcaacctaaaggaagtccaactcaaaaagaagaaggcttctatcactttcgccagttcagctcatacataaaaaatattatcaaaagtaattgttgtcattagggtttttcaacaaatttacaaaccgtccaacc

SEQ ID NO: 263853 - DNA, 527 bp, Cannabis indica
tggcttttgctttcttaataaaatcatcttaattattcaaaaaaaaaaaatcaataaggttgctcttatttctttcacaggaacagaatctgtatgagaatacatgtttataaccccaggtgctttaaaagaaatgatcagccactgtaagaaagaagccaccagcatacctctaagctaatttctttaaacagattacataaaattcaaacaataaactacagtttcactgtccaacatgcaggacatgctggctgttgcatctatgtccttacaaaaccgagggagaagatagagtcagaaagatttcctcaatttcaattcatgagggaacatcatatttcagatcatggaatctcttcaacaagctagatttgtactgctcgatttcaatattctgcgaggaatttggggtagaattgattatagcagttgtgccagcttgatgtaatgcttcaacagctttatctggaatgcgaaaaaagattacaaaactgaaaattgttaaggacttgctttgaaatata

SEQ ID NO: 263854 - DNA, 872 bp, Cannabis indica
cccaaacccaccactctgggttctgttatattctctaggaattacactaactcaggaaatagggaaacacccaactacgacactgaaatggacgagaattgagaaaatggagcattcggggaccctgccaaaactggctagccggttttacaccagttcaccccaaaatttctatttcttgcttaatcctccaccaaatgcaaccaaaccttccagagtacctaattagggtatacacaataatttctaaccagtaattcacaaaaaaactcactaaaattcaacatgccattagagatcaaagctttgagttcaaagctcaaacttgcacaaaaccaatcccaaacatcaaaatcagctgctagaagctaaatataactcaaatcaaacttaaaatttaaaattgtatcacaacctaaccctaacagcccctaataccaaaaatcactactcaaaccaagtaaaaacataaagaattcaataacaaagtttctagggtttaccttggttaagagatcctctaatccctactgaaaacacccaaaaaccagcagcaattctctggttccaagctagttcgagtagggaaagagaagggaaagagagaaattctatttttggcttttctttgacttttattctaatttctctaagtgaaataaatgttaataccttaaccttggctgaagtaatcttatgctaggtgtcaacacctaagacagccaccaaacacccatgtggcaaattactaaaatgcccgtattctcataacttaggcattttcaagacataggggtaaaatggtcaaattacataaccccgcttaacctcggtattttattttctccaatatatatcccactaagaactaa

SEQ ID NO: 263855 - DNA, 514 bp, Cannabis indica
aaattcacactgttacatcattaatattttgaaatttattttacgtgcacatacctttactcatattattattcatactataattaatatcatttacccactacataaaatctacaagagatccaaaatccaataacaataactacaaatgggacattatgggatcatcattcataaatataatgtggagttacttttttttggtgtgtttattcatatattatatgcatatataaggatagaaaatattataggcatgttatggctttatatatatgaataactttggtcctttggagacttcgaaaggatcaagccaatcaataaattaaattaattaatcatatatatttatacatatatatatgagtgctgcactctattaaaataggtatattggtgtaattttttacattttataataaaaaaaatttagtcaacaagtgttttacacttataatttttttggaattttttaaaatttcataaatattttaaataactacaacgtata

SEQ ID NO: 263856 - DNA, 1914 bp, Cannabis indica
atgtaattgaaggcatcctttttagttcttccaaaagtttgaggaaggctcaaatatttgtccatgatatctctaacaggtatgccaagtatagtagcaacggtgttttggatctcaacaatggtattcggcgaaaagaacaaagctaacttggtaaaatttaccaactgtccagaggcgaggatataatcatgaagaatttacttgatgacagttgcagcttcaggagaagcagagttaaagagaaggctatcatcaacaaagaagatatgagaaatagttggggctctcctggaaattttaattccaagtgaatgtctgcggggttggcgttgttgagttttgaggtgaatgagagaggaaagaccttcagaacataaaagaaataagtatagggaaagcgcatccccttgacgaattccccgagaaggcttaaggtgcccaagaacctgctggttaatggagaaggaaaaagttgcagtagagacacaggccatgacaaggttaatgaagcgctgaggaaaagaaaatttctccattactctacggacaaaaacccattcgacgcgatcaaaggccttagccatatcaagcttcagggccatccatcccagtcgtctcgatttacggtgagaaagggaatgcatgacctcttgaccaatgataatgttatcagagattaaatggtttggaaggaaagcactttgggagggggagattatgcgactaagaattggtttgagacggttgaccagaatcctagatatgattttgtagaacgtggaccagaggctaataggacgatagtccgttatcttctcaggatttgtccttttagggataagagcaatgagcgtcttcttgatagccgctaagtccgcatctccattcagaaagctttggggagcagtaatgatatctttacccaacaaatgccaattcttttgaaagaaacaatcgctgaaaccatctagacccggcgctttatcatgagcaagttggaatgtagctttcttgatttcattagcagaaaatgtggcctggagaagctcaatttcttcctcggtaagacattctgtaatacctgagagtacaaaatcaatgatatcatctccaggtgattgactttgaaacatgtgggcaaaataatgctcaatggtggtcaaaatagaagttgtatcatttgccgtggaaccatttgagcattgaagagaaagaattttgttggtttgacacctcatggaagctacacgatggaggtatcgagtatttttatcacctagctgaagccatgtgacatgggaccgttgttgccagtattcttcctccttctgtaacaaattgtttaattccttttcaagattccttccctaatctaattgataattagcgggccgagggagagaatgaacaaatttgagttgagattgaacttcacaaatttgagtagtaagaggaggtcccaaagattgcttccgttgcttaaggcgggacgagcaattatacaatttttcattgaatccagtcaacggattagaatgatgagtatggttgttcagcgtccaagcgtcacgaaggcaatcctcaaaaccaggctcagacatccaaagcctatcaaagatgaatctcgggacatgcttggattgatctgcagggtgatgcaaggtgagaattaatggccgatgatcagagccaaaaaagtctccatgacaaagacgaggattaggaaagttggcatcccaatcagtattggagaggcaccagtctctctcttgggtgtgagacgactgtttttgtcggttagtccaagtaaaaggactacccaaaggataaagaggctgaagctcatgagtatcaacaaaggattgaaagtgagtagacggactacgagacatgtgttggaaattattttac

SEQ ID NO: 263857 - DNA, 1828 bp, Cannabis indica
tatacacatattcataaaataatttgagtttttaatttaactcattactatattagtagtacaaataattggagcaaatttaaaaaagtttattttacattatttatttaattaagaaaatttttgttcttaaattatatgatatttgatacaatactctaatttttaattttcaaataattatagcaaatttaaagatttatttctttaaaaaatgaagctcggtttggtcggtttaaggtcggtttaaattgaccaaaccgtggattaaaacgatccgatttttttacatttatataatgatcggtcggttttcggattataaccatgaaaactgaaaactaaattttggattttttagtgtaaaagaccgaccaaaccgaccgttgctcacccctagctagcacatgcttttagggctcctttgactcaattggagtcttataggcgcttgattggttgactgatctacttatatgtcacttgccccgattcgacataatatgttcatatcttattccagttcttacatgaacctagacaagaacattgggaggcagctttgcgtgtggtccgctatttgaagggctctacttgatagagaattttactacgagctcacaactctctttctttgacaagatggtactattttgattgggccacttgttctcttactcgctgctctcttactagttggcttgtctttcttggtcattctccaatttattagaaaaccaagaaacaacacataatggctcgttcttctgcagaggccgaatgcggctctatggccttctattacatgtgagttgaagccaagggtcttcacctgagcttgagcattcaatatcatactgctattggtctttattgtgatagtcaatcggctttacacattgtttagaatctaatttttcatgaacgaacaaaatatattgaagcaaattgtcactttgtatatgatgctattcaggatggtactattattccttcttatgttcctagtgtagttcaattgactcacattttttcaaaatccttgggtacacggactatttgagttctttctctctaagttgtgcattcttaatccacatgctccaacttgagaaggtattggaatattattatctattaacatatgttctgataatcgtgtattttaggcatttatgttcttgtataatatcctagacttgagtttagacttatatctattgagatgagtgagtttagccatgattttaggtttttattctttagatttcttcctcaccttatatgtataaattagggtaaatactattttggatcatgtgttttgtaaaagttagcaattgtaccctctgttttgttaaataacaaaatagaccctatattttctaaaatggtaaaaataggaccctaagctcaatttttaacaattttacttttttaatataaccacttttaagataatttctaacacgaacagatactgaaaatataaccaattttatcgttacatctctagattggattattattaagttctattttgataaaaaaaaaaatcagttcagagtcctatttgtacaattttggaaaatacagggtttattttgtcatttaacaaaatagatggtccaattaataacttttgcaaaacacagggtctaaaatagtatttaccctataaattatagagcaatatcaatacaaggtaggggtgtacgtcagttagtttggtcggtttacgttatattttatttaacccaatgtaaagatcaggttacaaaaatttaagtgcaacctgcccaataaagaaaaaaaaagtttcaacccg

SEQ ID NO: 263858 - DNA, 1383 bp, Cannabis indica
acaagttacattttttcatcatacttacccaacttgtatgctcctgattcgagaacttcgaccacctgatatggtccttcccagttaggtctgagtacacctgaggtgctgtctttggtgtttcgaaatactcttcttaggaccatatcacccacaaagaatttctaagccttcacttgtttattgaaatatcgagctactttttgttgatgggctatcaactttaaatttgctatggttcgcttctcttcaatttcatcaagtgattcggccaagagtacgtgcttttattcttgattttacgtcaatcttttgcgggatggttgttcgagctctacaggtagcatagcttcatatccatatgccatggcaaatgaagtctgtccggttgtcattttttcagttgtttggtacgaccatagaacctcagggagctcctccggccaatttcctttagcatcctcgagtcttttctttagtgtatccttcaggctcttgttgactgcttcaacttgaccatttgcttggggatctgccactacggagaaacttttgatgataccatggtttgcacaaaatttagcaaaggactagctgtcaaactgttttccgttgtccgaaactattttgtaaggtaatccaaaccagcagattatattcttcacaacaaagtcttgaactttcttagatgtaatggttgcgagtggttcgactttcgtccacttagtgaagtaatcaaccgcaaccactgcgtactgcactcctccgttgcctttgggtaattgtccgattaggtcaattccccagatggcaaaaggccacgaactttgcaactgagttaactcattgggcggagctcgaggtatcttccaaaatctctggcatttgtcacatttcttaacataggccttcgaatctttaatcattgtcggccagaaataaccttcccttagaattttcttagataagctctgcccgacggtatgatttccacaaaatccatcatgcaccttagataaaagtcgtgcagcttcttcttgagtaacacatctaagcaatggcatagagaatcctcttctatacatagttccctctactatgatataccgtgtttcctttcttctcgtctttcgagcttcattttgattatctgggagttccccactgtggaggtaggctgctatcagtgtcatccagtttggggaagtatcaattatttcgacctcttccatgccagtaatgctaggctcttcgaggaactggataggaaccaagtttgctttatcatttacattattgcttgcaaatcgagctaacgcgtccgtagccatgttttcttcccttggaatttgtctgagaccgtagcttttgaattgtgcgagc

SEQ ID NO: 263859 - DNA, 697 bp, Cannabis indica
atcaacaatagcaaggctctagtggagggtctaatcttcagacagatatgctacttcaattcatgacagagattaaatcttctattaaggtcttggaaactcatatggggcagttagctactcaaaatactaacaggaatcaaggtaacttgtctagcactactaaagccaatctaaaagagaactgtaaggcaattaccttaagaagtggtaagcactatgacgggccaagccatgacaaatcagaggatgaagatcaggatcaataagaaccagcaccaacataagagaaataaaagactactgaaggtctccaacaaaaagaaacttaacctcctattagcattgatcataacataaaaattccctatcctctaaggttgcataatgaataacatgataagcagttcaacaaattccttaaagtatttaaaaagcttcatatcaacattccctttgtggaggccttggaacaaatgccaagctaggtccaattcatgaggatattctatccaagaagaggaagatggaagaatttgagatagtagctctgatagaggagtgtagtgcaattcttcagaagaagctccctcctatactgaatgatcctgggagtttataccataccttgcactattgggaggcttgagaatatccatgcattgtatgattagggggctagcatcaaccttatgcc

SEQ ID NO: 263860 - DNA, 1968 bp, Cannabis indica
ccacttgatattactatagttatattgtgtggcagatattgagatataccaacaagatctcactattagttttttgaattatatcaaatcataatgtttatacaattggaagtttttttttacattaaaaacattaaacatttacatttttcacatgttccatttatagccacaagagccagtttttccttaatatatctttctatcatattaaaaaatacaccttacttaattaccaattacatacaattacatacttctttcttgtccaatctataattaatttgctaattattaaaattccttaaaagggttgtcttgaccactactgaatttcggggtagaagctggcgattctaccaatgccattttagtgtaacgcttctcaaagttagccacacaacaatctccatcaactttgggaagaaaacttggcttaatttctctgcactccaatttcttccaattgattgtcttgaaccacttgtgcctttttatgtcattacccccatttggtccacttccaagacgcattcttggatcttttttaaggagctgatataaaaaaaaatacccacaaaacaaaataaatataagtaacatcaattattgtcatatcaaaagtcacatgtataaatgtatataattgtatatagtttgagtttacttgatataatttacttactcctttcaataatgaatgtgcttcacttgacaaaaatgcaggcagcttgatcttctctttcactattttttggtggattttatatttgtttccaccagtaaatggaggctgcaacaacaaattaattaatttagattagataagtgagtagaataacatgttttaaacttattggtaaaattaacaaaacagtattagatttggacgtaattaattacacagtaatttccaaacacgaaatatgaagaaagttaggtacctgtccagtgagcatttcaaaaaggagaattccgacactccaccaatctgcagccttgtcatgatctcgtccctgaacaatctccggcgccatgtattcgtcggttccacaaaaagtatttgatcttcctgtgttctcatcaaattgttttgccatgccaaaatcagtcaccattacctaaaaacagaacacatatataaatgtaaagtaattagtaattagaatatataaccaaaaggagtaacagaggatcacacaatattaatattaattacatggccttcagaatcaagaagaatgttatgaggctttaaatctctatgcattatcccattttcgtggagataggaaatagcagaaacgatctcagcagtataaacacgcgccaaatcctctctgcaaggaagaaaattataatgtataatgttagaattaaacacataagtagtacttacagctaatttattatgttgaaaatcacaatatatagaagtaattaagggaatattgtttgtttagtgcaattaatattattaattgtttgtccttcaatcaacttaatatcctatcttttttcttttaagttagtgcaattttaataatatcattttatttttaagtaaaaaaaaaaaaaataatatagaaaacttagaggaatacacacatgatttatatcatttcttttttcttttctaaaacactaaagatagtaaaataatatattgtttagaaatataaaaatagctgcggtacctaaataagccttcgcgatgaagctgatagtcaagatcgcctccattaatgaaatcgagcacaaagtacaatctatacttgttctgacatatataagattaagatattagttttgatgctacaatatccatatatagtaactacagtctaattaaatcaactctttcacctatctatatatacaatttactataattaatattactttataataaatataataaaattagtcttaagaataattaaccatattctattcttaaaatgtatc

SEQ ID NO: 263861 - DNA, 1851 bp, Cannabis indica
aaaaaaactaaaaattaaaataaaattaacatatacgtgacttgtcacgtaacatctatctagtatatatataataactggttatagtaacatgcattttctcacgtcacgatacatgtataatgttaattagctagttagttgtcttatatatagtataattttttctttaataaaagaaaattatcattaatttcactcgtaaataaaaaaagagttttgtctggcaaattataatttaattttacaaaatatttatttaatttgtgataaatttgatgtttttaagttttttgtttggtaattgttttgcgaactctataactcataatcttaccaaatttactttttttcttgataggacaagagtttagtggccgtattgcacgaattcatttaagttttcaaatatatattaaaattagtttgttgaatttaaaataatttttttagttattatatccaataatagtatactctgctcataattagttctaaataaacaactttaatgacaattccgtggttctaattttattgcaaagatattatatgcccttttaataaaaagtcaataatatatgtatatgtttaccatctaccattaagaataagataattatgcatgacttcaaaaccataaaataaacacatggtcctaaggagagaaatgttaagggacaccttaaagtgtcaagcaccataaaatatgatatgtattattattgatgcaattcaatattgagtctcacatattttactttaataaataatatagaataccgcaattgaatcaaggttgacaagaagaacatgttgttctggcttgatactatcaagaattcctaatttgaaccataaatccaataattatgactgggttcttcaaccttgaataaggatcttgaactaatcttcttacctgctaggatgccacataggacatatcaccaggtgtatttgtctccttggaatgatgttgtgtcgttctatattttcttgtaggacattgccttatctttcaagtgaacaccccatgcagagaaagctctgcgaggctagtatttgtgggttatttattcctcaagcttgggtggtatatcacccacactctcgtaggggtattctcgatgttcgtgaaccatttgacataataaccatggtcaattttctcccaaggttttggtcaatttttctatggaggaaaagtcttgtaaaaattgattcgcacacatacatgagcaatatgcatatcgttcaggcattgtgcttgggttgcatatgtcatgaatgactcactcatttctctttatgatgacatatcctcacttaaatacataccaagttaatttgccaaaatattggatagtaatcattaatataacgaacgttgtcataaaaaaaatgtaataagaggttgtaatagttagtatttctctaatttataatttatatttttatataatatattatacttatttaaaatcttacataaatttttagaaatttgaataatttactatgtgttaatgcaaaaacttactctggtgacgtggacatcaatgtttgacacatagcaagaaagaaaatatcccaaagttgagtagtctcgagtcatagtagtcgacctagaatgagtccctagccttgtgcctaggttaacttcgagacctccaaatgggtgtttggatcccactaagtttttttcaactcactatctttcagtattcataaaggcatgaagcatccaattgtctaaagcttgggagcagaaaatacatgaaacagtaccacagaaatcaacacgggcacctagggtttcacctagtgcccaagttggtaacccaacta

SEQ ID NO: 263862 - DNA, 1197 bp, Cannabis indica
cccagtggccccctcgctcaaaaattcttatgcataactcaaccgcaaattacatagcccatccatcatatctcagtgttgaaacatttgatagggtcagagacatgaaaacagataaaaccagctccaaaaattcttaaaaagattagaacaaactatgtgatcttatcaactaaagcaagtattttaccccctcttttttcaatttgtaataatcacacaaagtttttgttgcatctcttatcccctttctctataaccattacacattagtacattacaatattgttgaatcatattttatcaaatcagcaaatcggcaaattttagtatttttgtgagaaccctttcaaagcaatattgctctctattgctttctgcaaacattccaaaattcgtttacactttcaaatacttaatcccttcaacccacaaataatcattcatttacacaagtatgcattgcgaattaaacatccataaagccatctagcttaaaagcaccaaagctcaaaataaataaaaatattcctctgtatcatcatcaatggtgcaatattaagtgtaaactcaatttccaaataaacccaattcatcgttattgcaaaaactcgtaatcagattctgagttgcaattacattagttgaccttggtgggtgaaacacaagagaatctgagattcatcttcgatactttcgatttgaattatctcttaattaaacaaaaaaaccgaagcaaaacatgaatcttaataggtaaaaattaaaccctaattcaaaaccaaaaaaacacataataaaaacaagatcgattcatcaatcgattgagcatgcatgcatgcagaagaatgccaaattcaaatggatctaagagaaaagaaagtcaaaggtacatggatctgagcaaaagaattgaaatttagaaaaaataacatacagagatccttggttgtagatgtcgatggagacggagactcgctcggcccccgacttgagtctgttaagagtagccttcttatgggcaacgatgaagggtgaatcggaggaacccagcgtcaaggagaccatgaaaaggcctagcaaagtccagatcagaggctgagagttgagagtagccatttttggtgtcgtttggagcttggggagtgtcgttctctcagttcaggtcgccttgtttgggtttgcctttcctttatt

SEQ ID NO: 263863 - DNA, 637 bp, Cannabis indica
tcattaattaggcagccacctactctccttttaaaaaaagactaaaatgccctccaagttataacttaggcattttaccaaaagtaggggtaaaatggtcgaattccataacctcgctcaaccccgatattttattttccctagaatgtttcccactaagaaataaggttctaaacttacccatgtgatcaaactagtcatccatcgcatttttcgttgccgccgagcaagaattacaaaaaaagcatatttcatataaattcataaaatacccctaaagttcaataaaatctcttgaattgagaaattataactccagtgctcatttcaaataatggggcccacaaataattaaacttataaataattataaaaatgtcagaaattagtgctaattgcctttactaatccaaattactacagcggtcattacaattatccccctgttaaaaggatttcgtcctcgaaatctaacctgaatagctctggatgttgagtcctcatgtcagactacaattcccaggtggcttcctccaccttactgttcctccaaagcactttaaccaaaacaattgtcttaatccgaagaactttctcctttctatcaaggatctgaacaggttgctcttcataggat

SEQ ID NO: 263864 - DNA, 829 bp, Cannabis indica
acaattcaagaactgagagttttatagtaaaaaaattctaaagataatgcatgtattcaatagaaattgtataggaaaggtaacttgaaacattgaaacattatttgtacattttataggaaaggtaacttaattacaccaattgtaaggtctctattgaaacattctctgtacattccaaatattattttctcctttgcattgaaaattttttaacacataaaattaataaatccaggaaataaaattacacaactcacaatccagaacttgatttttatcattgtcttgtaattatcaaatatgcatctacagtactaagatgtaagatttcaatcaagacgtcagaaacccattacaaaactggtacttacagttattgtgaagttgtacagtagtgaagtttgagatgttagagaacagaacaagaggagtaacaagagaaaaaaaaaaaagagagagcaactattgctatgcaggtgggcttcactgacaatctcaccactattttaggctaatactcagattggacaaagaaaatttactactataatttggacatttagtgactcgcacaaaaagtgagcgtcactaaatattatggaggatttttagtgacacgcacaataaaactctaaaaattacatttttaatctaaaatgcgggtcactaaaaacttgatgggacactaaataggtttttaattttatatttataattttttatgaaaaaagggtataactagtcacttaatgcgcgagtgggaaaacatacccattcccactaaaagggacgttggagcccttatttaaaaaaaaaaaaaaaggtt

SEQ ID NO: 263865 - DNA, 575 bp, Cannabis indica
ctggacggaccgtcactatgagctttgcttctttttcagcttcttcgcttccatactttgtattttttgttggtttttgctaaccatgctgtttttgctttgtgcagacacgtctcggcagatgatggatgccttacagaagaggatgagcggaggctctagtgcttcccctccgaccaagaagtccaaggtcggaagaggggtcttcagagaagagtccttctggagaagtcattgacctttctgaggatctagctgttgcaaatccttctactccccaatctgccaagtttaaggattctgggccaccaacatctgggtccaaactggtcaggaggattcctgaacagatgcaggcaacatctctacccgtgcccgtgctgcctgaggtcaagaagggcagggaggtgatggctcatcacgtgaaccaactggttcctgaggtcggtcagcagctggctggtgcggaccactcatttctggatgtgttggtgggcggagtcttgtaggagcttaccagggttagtcttttctttttgacacttcccttttagcttttcatacttagcttcata

SEQ ID NO: 263866 - DNA, 4785 bp, Cannabis indica
attttaaatttataatatttttaattttctaaaatattttatttttaattttaaaataaattttgaataatttttaaataataatattagttgcaagagtatacacataaacagcccagagtaatagttaatcgaatgacactttaaatttattactagtttagtagttaggagagttttaccgtcaaaatttaaatttagagggttaaatgcaacaaaacgatagttaaaaaaatttaaccaaaaaaacaatttatattatacttaaaagagcaatacgtacccacttagtatatctaagttatcatggtaaacggtgtggttaatttatttttgttgattttgttctatgttcatgtaataaacggatatcctccatatatatagattattataattataattataactcttttatatgccaatatattttgtaaatataatatatttcacctatttttgaaatatctcaaataattaatcatattacaattagagttcaaatatttcgtataaactcaaactcacgtattaaaaataaataggcatttaataatttgtttgaatcctatctactccattttgagagaaaattagtgaacacattcactatatgtaatgagaattgttaaaatatattattggtactttagtattttttttttagtatcgtattgttattgatgtaattaagtatcggataagaaaaaaaaattaaaaatattacaaattaattatataggacaccacttataaaaaatatcagcaccccacttccttatatataataaggtaaatagtggcataagtacccaaagttttaggtttgtaagcggcataaacttaatgattttttttagtggcataagtacctaatgtttgtaaaactgtaattttcttccagtttcatcagtaaaggctctgttattgtcttaaacaggacacatataagacgcaaattttagattatttggtctggacgaaaaatatgtagcatcagttacttccaaatgtttctttaataaatttaaaacggagcctgtactgacaaaaatagagaaaatttacagttttataaacattgggtacttatgccacttaaaaaaatcattgaatttataccgtttacaaactcaaaactttgagtacttataccgctatttaccctatataatataagatatatattgcccacttccttatatggcaataatttatttatttttacttttatttataatttaaggtattaattaaatttgattgttaatcacaactgaaattatgattgtgtacacgtgttatatttttattatttgtataatattatggttaaatttgtgtagtggactagtggtggttcttattagcatttaacaattaattataactaatgttgtgaaatgaagttaaggagtattgttacgaaaactaaatatcaaaaaagtaagttttttagtttctaaatttatagctacctgaggttgtttattatctccgaccaggcccgacggccttccttaggcataggtgtgatgggattgtgttttgttattgcgactcaatttttgcttttgtaattagtcttgtctttatgatatggttttaagtattttagtcttgtctgtgtgacataattttgttttgtttcttattggttattttttgttcttcgatagctcaccatcaaattgatgttactggttatgaatgaaaagttctttgagattgaaggagttgttagtaatgcagttacggactttgcataatagttgagtgcttaagctacaatgtcaaatgaatctgttgtaacaatttttactattgtgtcttctaagcgataaataaaaatgaatatgtgttcttaagtttaactgtaatacttcaatcttttaatctaatctttttattaaacaatttaaaaattaggcgactaattatttcttatttttataattctaatctccgtcttgtatcttaagtgggagagactattaatttagttttgttattaataaaattgcacaatttattaaaaaaaatatatgagaaagttaagtttataaagattaaaagatgaaatatgttggtgacatttggttagatcattccataccagaactctaatcaaagaatatactatgaaaattatctgtgatatattcaaccatttcaatcaacattttatgactcttagtttgtgataagtgatcaactctaagaaagaatttaaagaaaaatgaacgacaggtcgttttgctataaaagtaaagatgatcttttcctcgtccggcttatctgattgttactcgagaaccacccagatcactgaccaactgttgctctttgaccttattcgactttgaccccaacaaaatcactaccttaaattattattattattattattattattattattattattattattattattattattattattattattattatttataagtatattaatattattattgtgttttataattatttattttatttttggggtagtgattgataataaccaactgcccgccaaagagacccaatgtagccataactgataaccctttggaatcactctctctctctctctctttctctctcctattttttttaagagaaaatatatacaaaaatatgaagaaagtagttagccatggaatataaaaaaagaaaaagcaaataaacaaataaaaaaaaccaagaagaagaagaagaagacgatgacagcagcagcagcttgagaaagacaattctccctccaccaaatgccttaaccatttcttcaagactaacccatttcaccaaacgctcctttaattaaacaaaccccaaaaacccaactctaattcggtaactctctctctctctcttcactttcttctatttctttgttcttatattttcccattagtttctcactctcaccatctcttctcattcattcgttcattccttgattcaatttcgtattctttctttctttctttctctcttgtccatgcagccacctcgccggaaaacccctctgttcccatcggagacgggggcaatgaagggtcgcaagaacaacaatctttccattttcgttgttgttttctccattttcttatttggggtgttcatgtacaatgaggacgttaagtccatagccgagtttcctttttcaaggcccaaagctcaagaaatccaagaaacgatgcccgaacagagcaaaaagccggcgaaggttgtggcgatggttgaagaaggaaaaccacagaacgacgatgagaacaaagcagtgaagaattctcaaacttcgcttgaggaaaacccagctgaggattctgatgaaaccccagaaaaaataaagttggaaccaattaaagaagaggagcagaagattgaattgccagttctcaccggaagaggagaagaggaagaaaacgacgacggtgaagatgtcgttttgccaccggaagattgcgatttgtatacaggggaatgggtttatgataattctacccacccgttatataaggaagatgaatgcgagtttctcacagcccaagtgacttgtatgagaaatggaagaaaggattccatgtaccaaggttggaaatggcagcccagagattgctctttgcccaagtaagctttttcttttattattattcctttaatgcttttatgattaccaattttgtttttttatactaattttaattatataatttaatatattcatcaaaggttcaaagcaagattattactagagaaactgaggaacaagaggctcatgtttgttggggactcactgaatagaaatcagtgggaatcaatggtttgcttagctcaatctgttatacctccgggaaggaagagcttacacaagtctggctctcgaaatattttcagaattgaggtactttatttattttttctgttttttgggttcagcaaattaaatgggaaaaaacttttagaatattgttaatgtgaataatcaattcatcactatcatgatgattaatcataatgtcaagacaaattgcactattacgtggctttagagtaaataaacatataatcgcgctcagcctttaatgcaaaataaaatatgtaccaataaagtcaacaaaaacatttttcgtattgttaatttaagaccaaatattgtagttagtgatatttataattgataatttcaagttccaacctcatgattctcgttaaacaccaattatattcaatgcctcgtttattaaacttctactaaaatatataagcaacccattttgtcttttctgagattctaataagaaactcatagccaaatggccaatattctctaatatttttattcaataataaatttttgtggttacattttatcgaaattattatagtgaattagtggtggaatggaagcatgaattactagttggatttaattgcctctaaagatgtgtgttgttgtgacctttggtttgaaagttttggcttctaaatcttgtttttgagtatcttatttgatctttgtggacctcttgttattattattaggactataatgccacagtggagttttattgggccccatttttggttgagtcaaattcagacgatccaaatatgcacagcatattgaaccgtataataatgcctgaatcgattgataaacatggtgtcaactggaaaagtgtcgactatcttgtcttcaacacatacatctggtggatgaacactttttcaatgaaagttttgtaagtatatacatccatatct

SEQ ID NO: 263867 - DNA, 729 bp, Cannabis indica
gagactggaatttaagtagtccgcctgtgactctccacgtctttcctgggaactcacttataagggtgattctgtctaggagactgtccgggcctatcctttgttgataggactacgataaatatacacagtctttcctgggaatcccctagccagtacagaggttggtgagactcaagaaacatgacaggccaaaaactagaaattgagaagttcagcggtagcggtaatttttccctctggcaaaggaggatgaaggatctccttattcagcaaaaggtccacaaagcgttattaggcatagagaaaaagcctagtacgatgaaggaagaagactgggaggagatagacgagatcgcagccagtacaattcgtctaaatctttcagatagcgtcttgcaaaatatagaatcgaaagagtgcaagacgactaaagaaatctgggagactttagagaatttgtacatgtccaagaatctttctaacaagttctacttatggaaggagttgtatcagatgcggaagcaagacagtgtggatatgcttcagcatttgagtaattttaatggcatgatttctcaattgataagatttgaagtaaagtttagtgatgaggaaaaggctgtgttgataatggcaacacttcctccatcatatgatcaccttatcacaactcttacttatgggaaggacaagttggagtatgaagtcattgcagaggccttggtt

SEQ ID NO: 263868 - DNA, 552 bp, Cannabis indica
aaactttaaattgctcaaaacttctatagttccaacatgtcaaaatgatataaatataaggtaacattttagtttcttttatactttattaagagataagtaaccaaactttaaatttcacaaaaattcatatgaaacaagttgataactttaaaatttataataaaaataattttaagtaacccatgaaattgattgctaatttaagatatatttatgttactttatttagcaattttttcatgttaattaatatttaagaaattaataaattataatcaaatataaaaagttattaataatatgtatatatatgaaatcttaccaataactttattatcaaaactaaataataattatttattattttaaaatataatttattttatgatgtttaaggtactatttaatacttttataaataattttaaaaatctattaaaattgctctataatacaagtttagcaaagatacaagattaacttttaaatataaattaataaaacattattagtaactcatgaaattggttagtttattaaaattaattt

SEQ ID NO: 263869 - DNA, 713 bp, Cannabis indica
aattcacccaccttctcaactttccctctttttcctgccctcaacacaaggctgtttctgttgtaagagaaaatccctttggacaatcgaatgatatctccagcctcaaaggcttgacattcctctccccacaactggaagtgaactgctgccgtttcatccgccacaagcgacaagcatgtcttgttttgaccttctgttgttgtttttcctttctccaacagtatgaactctgtgtttatgttgttctgagctgcaggtactatgtctttcaccttcacacctgtcatctttgctgcttgctctcttctgcatcaacccaacaaacataccaaattacatcactttccctcaatagtgttttcctaatctcaatgatagcatgagaatgaattgtgatatagtgctgaaaaagccacacccatttaacttataaacaaaattatagttctaaagcaggcaatcatgaaccaagctaggttcatagcttgtcctaaagtgtagcttctttggttctacagttctctcttctcaaccgtgagtattcattttggatttactaggaaaatatctcaaaggatttcaatcagtgatggtcaagatggtaaagccagggaagccattgatataaaaaagtcaataataaaaatgatgtgttattgtatttgtatgtggtagaatgtatgaatgtatctatcataagagcttatttt

SEQ ID NO: 263870 - DNA, 657 bp, Cannabis indica
cacagtcataatccttaaccaattctaaccaacagctctgtctcatattcaaatctttctaagtaaagaagtacttgaggttcttatggtcagtgtaaatctcacacttctctccgtagagataattttgccaaatcttcaaagcaaaaaccactgcggtaagttttaaatcatgagtcgggtatcgctgttcatattctttcaactaaagagaggcataggcgataacccgatcggcctgtatcaatacacacaccagaccctgtctggatgcatcacaagtgactacaaacttttctttatttgatggtagggctaatactagagcggtaatcaatctccgtttcagctcctgaaagcttgcttcacacttgtttgtccgtacaaatcgttgattctttttaatgggctcggttaagggcgtagaaatcttagagaacccctttacaaactgacagtaataaccagccagaccagggaaacttctagcttctgtaactgtctttggtcttggccaatccctaacggattcaatctttcctaaatcaaccatgattccatctttactgacaatgtgtctaaggaaacacacctgagatagccaaaactcacacttcttgaatttggcatatattttatgttcccgtagccgctgta

SEQ ID NO: 263871 - DNA, 984 bp, Cannabis indica
tattattagacctcttcccactcggatttgagctgctaggatattgtggaatttgagcgggtgcccttacagaggagatatgttgctggcctttgttatgtccgactgtgtccactcgccgaatagcctcctcgagcttaataaatccatctgctcgttttaaaaattctgccatggaccccacggggccaaatcttttaatgtctttccacagttccccgagcggctatatgcccccagtatggcggccagccttccctcctcagttaaccccttcaccttcgtagcttttgtcatgaacctacttatataggctcttaggggttctcttgacacttgttttacgtcgaccaggtcttctaggtgcgaggggagttgacgggaggaggagagctgtgcgtggtggaattttgaggaggagaaaagctttccacaaattaaatcttcctggtgatagcttgatgtaccattattgggcaagtgtagcagggaatattctacactgcacgccaccacgtacccttgcagacccatctgcatctcataatatttaagatgtgataaaggtcttctttccttgcatacatcttccatgtcgacatcttgaatttaaggggtagttcaaggacttcgatctttggggagaagggtgatccgcgtgctcggtccagctcgagatcagtgacttttgggtcggtcagggtgtaccatgtttttcagttgatccaattgtgcttgcacaaatggatgaactgtttcagcctgttgactgacctgtgtcacatcaggatctcttagagctgggtcctggatgcggatacctggtaggacagttgcttggacgtactgttcgtccagaccccttcttctgttcaggtcagccctgaggtcatgcgctgcacccaatttgttaaatatcgaggtaccaggtggtctcggtgtctgacttgtttggccggtgggttggccagaattttcagtctg

SEQ ID NO: 263872 - DNA, 998 bp, Cannabis indica
atcgaagtctaaaatattgattagaaaaaaaaaaactgtttaaaaaaatattaaaagtgattttttttttttgtttttaaaagtttaatttgattctcaattaaaaaattgaaaagtaaaaacaatcctatagaacatgtttttgaaaaatattttcacttttttaattttaaaaataaaaaactgattaaaaagtgttatcaaacgacacatatttttttttttagtgataatataatatagtaaaggcatatgtgtatacaaatatgttaatatcaatgttattaagaaataaattttatttcatcaacatagtgattatcaccaaaaaaataaaataatgttaaaataatattaatttcaatcttataaggatgtaatatgtatatggttaataaagtttttctggacgtttcaccaaaacaaaaagcatagtgattatctaagttttcctagatacttttacacaattaaatgaataaaatatgtggtgccggcttcctactttataaactaataataatattctcactttgtattaattctcaaactaaatgtattgactaacaaaggtatatattattgtcttatttggaaaactaaatgtattgagttacaaggtatatattatttgaattttaaaaagatatattattggtatctagtcgtcttttaagtgtcaagtgtccgttggtgtaattaattaatatgagatttcaattattttaagaacattgtcattggacattagtagtgcctaacatccttaagatgtgtcacattttgagtagctaactagtgatactcccttaaagttattatactaaactaaatagagcctgacgcttaattaaactaatagcgatattaatacgtaggaacgaatttgacactactaatatcttttagcatttctcttattttaagtaaaattactatttaattattgggatccacttgtagaagatgctgagcacaccactaatatttaataacaa

SEQ ID NO: 263873 - DNA, 504 bp, Cannabis indica
gaatgtacgtgaacaattcttttagactgcatccatctcgattcttttgaatggccatgtgtgtcttaattctctgtacagtatctgttggaattttaccaattgtccaatacaactttaaaataacaaatttaatacaatatgcaagaaaaaaaatagtatttttctaattttacactatattatgcagtcataataaagtgatattattataactcacaaatttttgcaatcttctttgaggcccaatatcttgagcccaagtcaacctttacttactcaaagaaccattagaggttcggtcagccaaagagagtcaatcaaaaactcggtcaactacaaaatagccacagaattctttactctctttaattggatcgacccaaagaacttttagcccagcaagagtcaattactcttttctcacaagatcagcccaagtagccacaaaaagcataattccttaacccgagatatataaaaggtaatattctaaccctaaca

SEQ ID NO: 263874 - DNA, 607 bp, Cannabis indica
attaacttttgtctgctaggcgaacatgagataacaaattcagtctttcactaagatttcaaatagctatgtcgaactcaagttgattatgtttcgcctcttcctcggagaaagacgatcaaacaattcccaatcatggtcctcgcggatcagatcatccatataatatacaaaaagaaactccagatatttggtatccttctctttgaatgagatctcaattccagcgacagtttcattagatatcgcccataagcatctaaatttcattttatcatttattaactaagagatgaacctaatccagaatatgaaccataaaagaaaataccaagtaaaccgatcaccagaacaccagttacagtacctattatccaaagaggaatccttccagtagtatcagccatttgtcctactttcctccacatttcatcaggtggtgttacattgctatactgatgaagtctaaatctgcaatgctgatagatttgtgtaattgtgttcaatgattgtttcttctattatactaaccttctgggtatcacatcactttcatatttataataccatatatttttctaaccatatttatgtcttacatattgta

SEQ ID NO: 263875 - DNA, 551 bp, Cannabis indica
cctcgccaaccgatcaaacttggtagtgtactctgtcccactcatattttccctctgggtgatgtgtgcgaactcttttttcttggcaattctaacggcctcattatagtatttcccgttaaagagttcctggaacctttcccaggtcatagttgtgacatcatgaatctgggacaccatggcccaccagactaaggcgtcttcttgaaactggaaggtggcacacaccaccctgtcatgcccggtgacacccataaagttcaatatctttgtaatcaccgttagccactgctcgactttcatgacatccggacctcccagaaaaactggaggtgcctgcttccagaacctttcatacaagggttcaattctatttcccgctaccactatctcggcctgagaaacaggggcaggtgccacaggaacttctggcaccggcactgcaggagcaccctgctgcctcaaactctgaatcgaataatgttgctcctctattctggcttgcatttcagcaaacctagtttcccaattctgggcttcctgattggctt

SEQ ID NO: 263876 - DNA, 752 bp, Cannabis indica
gacattgggaatgtcgggattggtcgggaatttagaatttcccaaaatacccttagaattctttaaattagttttgtgagggcaagggcattttggtctttttgccttctagcattttgtctttttgtggattgattaattgaattatattgatttattaaatcttggttttggctaaaatgaggagttgaatttatttttatcacttttacaaattggaaaaaaaatcaagaagaacaaaactctttttctctcaactccctctctctctcggcccctcttggagcagcaagaaccttggtgattctttggtatttcaaacagattttgagtgcaattcaagctctaggtatagctcttacctttcccctctttagtttcttgaaaattaagaaaaggtgatagttcatgttagtttttgtgatgttgttgctgctgtagttatatgttgttttctgtgattttatatgtttgaattgattggatttgagtaggtttgatgcatgtttggttggttttaaactagtttagaattttggctctaaaactatgattttcaagtgaaatgatgaaatctgttgctgcacttgttgttgatgcttgctgttgttttcagaggttattatatgcatatttgagtagtttaaaccaggtttggatgcatgttagtggtgtttaaccaagtttgagttttgaactcaaagcttgggctttaatggtgtttttgattttatgcatgaagcttggtgttg

SEQ ID NO: 263877 - DNA, 716 bp, Cannabis indica
tgggttctgaggatcctggggggacaaggttggcgtgtgttgtttcgagtttccaccattgttgttctgattctttgactgttgtcttctcaacaacgcttccgacagctctcaatgaaagtaccaaaatgttgaccgaatttttcggcaactaattaaatgagataatgatgagagctttggaataattaatgcaggtagtttttacgtggttcaggcattaatgagccgtaatccacgagtcttttgtattaatgagagttcttatacaaagaatgttcttggtgagttctctcttgcttgttttttcgatcgctcccccttctcattttgttcaggggtatttatagagtttggtaaggatagctaaaaagggattacttgtctttgagtgtcagccatgtatgtgcaccagctcccaagagatataaaataggacatacatgacctataccgtaggtatcatagggataggtgagagtaatctttatccttccttgattgatgtgattcttcataatggagccgtcactagcccttttgattatcgtttaatcgccgtaaacgaggcttacattgtctgacatgtcctcttatgggtgttccaagacgttttctccatgttgcattaaatgcgaggtgactgttcgaacatgttctccttctcccgaagatgctttgtatttttagcttccggagaggaaggacatgcttta

SEQ ID NO: 263878 - DNA, 533 bp, Cannabis indica
tggaaaatctgcatcaaagaaggagaaaagaagattcagattcagatcttgattgtgctctacttagtctgctacagaaaggaatcaatggctagagatctgaatggaaggagttataatattccgctgcacccactgtaaggttttctaaactttatatgtgtttattttcattgttttagaatttatattaggatgttaatcaaacatacttagtagtaaatcaagatcttggtaaaataatcccaacattagtaaacctgctattgcatagaaattggtaataggaagataatcatattaaaccataataaatagatgcaattggaattgaaagccctaacttttattcattgctaattcctttgttaatttacatgcttcttactttcactgttttaattgtttcctagttttaattttctctcaaattttatttagcaaagtagaagttaaaatttaattttaacgtacttaacaacaatccttgtgggatcaacctcactaatatttttcatctgaatcggtgttgt

SEQ ID NO: 263879 - DNA, 731 bp, Cannabis indica
gtgagattctctatcaccctgggaaggctagtgatttctcagtggatgaaacgggaatgttgagatttggaagtctagtttgtgtgcctatggatgagaacatcaagaaagagataatggatgagtctcacatgactccttattcggttcatccagggtcaacgaagatgtaccaagacctgaaagccatgttctggtggccaggcatgaagaatgacatcaagatgagttatatgttgagttatatgtcagagaaattgttcgtcttcatggtgtcccaaagtccattgtttcggatagagattcgaagtttacatcaagattccgggagagtctgcatcgagctatgggtactcagttaaagttcagcacagcttttcatcctcagacggatgggcaatccgagaggaccattcagattttagaagacattctacgggcatgtgtgcttgactttcagggatcatgggtaaagtaccttcccttgatcgagttttcttatgataacagctatcaggaaacaatcaggatggctacttacgaacttttatatggaagaaaatgtagatcacctattcactgggatgaagtgggtgcaagaaagttcttgggtcccgaagctgttttcaaaaaacaagcgaggcagttaataagattagagcgcgaatgctcgcggctcagagtaggcagaagagttatgccgatccaaagcgtcgagatattgattttca

SEQ ID NO: 263880 - DNA, 791 bp, Cannabis indica
taaagaaggattgtgaaattgaaaatacaaaagctgaaatgggagaagtaagagaagaaaacaagagactaaaaactgtgttaaatcacatggagaaggattacaagtctcttcaattgagattttttgacatagtcaaagaagttgaccatgatcatgatcaagatttgaagaaaccaattacaattattacaaattgtgatgatgaaattgaagaagctgatcaacttgtgtctcttaggcttggaaggagtactccaaaaaatattactaaaaccaatttactgatcagaaaaagtagagatgatgaagatcaagatcaagatcatcaagaggagttgataaaggctaatctcacacttggattaggctctaataatgataatgatcaattaaagcaattgagttcggagattgtgattaatgaggccaccccagatgatagttcagagttattattagaagcaaataataataacaaaattccaaatagtattaataataataataataataaagatgattaagagtagtacttgtactagtagtagtaataatgatcaagatgaagtagtttcacaagctcaagttaaaagagctagagtttctgtcagagcaagatgtgatactccaacggtacgtatatatatatatttatttatttaattattaattagttttaatatatgtatgattaagagataattaatatgatgatgatgatgatgatatttttgaacagatgaacgatggatgtcaatggaggaaatatgggcagaaaattgctaaag

SEQ ID NO: 263881 - DNA, 895 bp, Cannabis indica
ttacttaaagttattcaagcttttcttgtttagtaggtactttctcttgtaatttaatcttcttcttcttcttcttcttcttttcttaattattgtgtttgtatttttaatttgcctacttatacatttgaataatattatttttccttctattttgtattatatacatcacataacttcaatatatataaatattaattatataattaaatgcacacaataaataaacgtatatatatgaattctactagaattcgttatgtgtcgtagtcgtactaggctttatcatattgactcgagtgatcatcaaaatttatatgtatacggaaatacgtacggactttattttgaataaaaatataagcacatatatatatgtattatattaatatatatttatatatatatatagattcagtatttactaggcagaggctctaacaaagattcttacttgtggtgtgtgtgttcatgctaattaagtgtcatatgctatgtaactaatttgatatccaatcttgtttattttatttaaataataatttaaaaaactgctaatttggtattacgtacttatggtgcatggtactcggcaccatagcatactacaggataaaaattaaagttgggtgcctacaagagattttatctattttttattctctttctttattattttttacaaaaaaataatattaaaaaaaagagggaggtagatttagatattataggaagaagggataaaaatatagagctgaattggagtctagccaactcatacatgcaaagctatatattgtggagccataacgcaaccccaaataaatgaaaatgaaaaatgagagagagagaggacttgagcaataagggagtcatgaaaaggacacaaatgagt

SEQ ID NO: 263882 - DNA, 684 bp, Cannabis indica
atatttgttgtctttcatccgtacttccaaaaatttaaatgactaatttagattacaccaggggagcgcatacatggcaacattattaatttaatttttgtggagtttcaaataaaaaaaaaatcaatttatgtgtaatatgtttgtcaatgagtgacattacaatgattagtctctatatttataatataatatatgatctgaaagatcaatgtgaaatcaaaatttcaatctatcattcagaaaaataaataaataaataaaaagtcaaatccacaattataaagtataaaccgtaccagctatctaatcattcgttctttggttggtgatcgatatttgatgctgtcacataattttgtataaattaacggccaaactagggatatagctctacctaaaacaatttaaaattgaaagattagtgtactaaaataatgacaagttcttttcaaattacgcatatataaaatatcaatcccttgaacctaggtttttaaattatttctgctgcataattttgaagacttttgatcgaataaaatatgcatttttattaacaatatccataactcaaaattttttcaattaaaatttacgttgcccacaaaaatctctctcgaacatatcatatgtgttagttcatctctgtttagttatttagaccactccactccaatagtt

SEQ ID NO: 263883 - DNA, 956 bp, Cannabis indica
tgttataaaagagatgaacttgaatgtttacaactactgttcaggttattacacgacaagaacatggcttgaaacatacagcggctcaacatatccggtacacaatcacacaacatgggatgtaccacaaaacataaaagatatcattgttctgccaccagaccagaaaataagatctggaagaccaaggaaacgaagatttttatctgattgggatacaaaaaaacataacaggtgcagcaaatgtagtcaacacgagcacaaccgaaagacatgcaacaagcaagcaataaaatattgtttaattctctgggacaattcacacaggatgaaatgttatattcgatacacttgggatattattttgaaaatttttaaatagtttgctaatagttgcaaaatcgttttatgacagttttgacacttgttaaatgtttactacgaaaaacaacttctttattaaagtttttaaaaagtcaaataggaatttataaaacataattaataaagataatgaaaaaagggaaaaacagtgaataaataggttgataagcaattaaaattacaagtacgctgaacagtggacattgtttgtatatagttgtataatagtttctatatagttgtgcgactgtatataaaaacttcaaaaattagaaaaacataaaactgatgctaatacaaacatacagtattaacatattataatgattaatgtcaaatatcctaaaagtttaaaaccagatccagagtataaaaccaaatataatacctagaaacataaaataactaacaattgtctgataatagagtcaaccaataacaccaaattgtcactaaattaaaagaccctactttttcaatttagaagccttagaagacttgctttgcttctcatcctcactatcaatactttcatcaattttcttttgcccatatgagaagaaaagggtagc

SEQ ID NO: 263884 - DNA, 1977 bp, Cannabis indica
aagaaatgatccacccattgtctcgtattaaagaaaagcctttttaccgcaacaaccttgccatctggtagaacaccctgaaaaaaaaagaaagaaagcaagataacataacatgatggtgtcattccatgaagtgaaatgcaaaataaagaatggtattttgaaaaatcatatattgccttataaactgaaccagatcctccttgtccaagcttgtttgaagcatgaaagtaattagtagccttttcaagaacctcatacgaaatattcagtttggacttgttcacagtgtccaaaagagcacctagttgcttcttctctgatgaaataatcatagtttattttaatgtacaattgaagcagctcagttcatattgtcataactgaaaaatatgaaaccaattcaattacctcgcctctttctcagtactctttttctcaagaagaaaataactgcagctatagtcaacagaaaagccaaaccagcagatgttgcagccaagataacagccaatggtcggctccctatgaaagaaacattaggatttttttaaaaaaaaaggcaaaaaagagaagttaaatcaactcattggtgaatttttatgatatatatatgagcctggaccaatggaattgatttcaataaagcatcaagatttcacattaacaaacaaaaacatcaaattttcacttttgaatacaaaattgattgtcgttgtcccaattacattgtcaccaaaatccatatataagcagaaaattctcaccaccatttccttgtcctgaagcactactagttgaattgtcatagaacttttttgttgaatatcttaagtaacagccagcatttaagatcctcccttcttcttttggagcacaagaagtaacgttttcgacagaagcagccaaacatttcccacaagcagttccagtcacaaactcccaacactgagccaaaccaaaaacacttatattcccctgattcactaaccccacaaaaaacccatcattgtttggtgcttcaatgctcaaattcctcaccaacttcaaaacattttctctaaaaacggtccggttcccactaaaatcaccattagaacaaagggttctgtcttgcctacctaaactttcattgaagaaattgtaggaatcgtaccttagataacacccatcaaagaaaagtcgacccccacgaactgccctttgaaaaggtaagcatcttaagatttgggtcttacactgagcaaagcagagattacaatcgtcctgagaaaggtctttcatgcactccccaaaagtataaaccgtggtattaccagtcccattaatcacagttgcgtatttttgtcgagcaattaatggactcacagcttccaaagtggctaagaagtttgtgataaagggtcttctttgggccattgaggcagtgtcattgttggaacatattagagctgcttcggtagctcgaggatcagaaagaacagagtatgataataacaataataaacacagaaaaagaaggaaaaatggctctgaagacattgaaactaacaataaaaagagttcctttttctttacgaaagagatgattttggttcaatggaacatgaaattttgaccctaaaagaataagatgatgaaacttgattacagagttgaaatgatgggtaagcgtgtgatattgtgaaagtagggtcttgccagcaaattctttaatgggtggcaaagtcaaagttcatttttttattgaacactagatttttctctttccattatataaatcttttaatccaattccaagccaactctcccaaacaaatgtgttattaaaaagtgaaaattacatgaaatatgagattttataacaaagttagaaaaatatggcatttttaggtttgccactcttctatggcaattttttcacatttaagattttttatggtatttgatatgccatatttttataaacttattatc

SEQ ID NO: 263885 - DNA, 1767 bp, Cannabis indica
actgcactttttatgatcatataattttgactatatttgaacttttaaaattttaaaataatagtttctatcttactacaaaaacagaacttgtacgacttgggggcaagaaagattggagtgacatcactccctccattgggttgtattccattagaaaggaccttagctggaactcatgaaagtgggtgtgtgtctcagctgaacacagacgcccaaggatttaataagatgttgaacaatgctgctaccagtctcaaaaagaaatgccctgatcttagacttgttatctttgacatttacaagcctgtttatgatcttgttaattccccttctatgtatggtaataaattcataccctctcttttctttcttctttccattttccccacactgcatacaattatgatttagtaatatagttaaatttaatgtatgttttgaatttcttgttataggctttgcagaagcaggaagaggctgctgtggaacagggactgtagaactaaccacagctttgtgcaattctcactcattaggaacatgttcaaatgctactcagtacgtatttttcgacagtgcccatacatctgaagctgccaacaaagttattgctgacgagatgataaaccaaggcctatccatcatctgatgaggatgtctaactcgttactactgaaatctatataaaagaagaactgatagtacttagccaactgtcttaataatactattatgttatgtgtgacagacgaatttattgagaagatctagtggttgaaagtatctatgtcctttaattttatttttattatgctatgatgaaactggtatgaatggttgcttattgcttgtgaatgggaaacgagaatgagagcactttaagaaaaaaaatgttcaacagaaagaaagaagagatttattggcaatcaaacatgagatgttcaaagaactagttacaaaaacaaagaaatgtttaaaaatcaatttcagaaaacatgagtacttaatattcctatacaatgagatgtaaaagatccatgaagattctatactatatgatccttaacgttctcgcatccatgtatgttcggctacctttcttatccccttgactcccatagctcagatgtcggtgagaacacaagactgctacaataaaaatggaatattgaatgtgagcaaacaatcaactcaatttgaacactaatagaaaaaaaaaaaaaaaaaaaacaaattgagttgtgaagcaatcatatctgtgctagctcttatatcccttttactttacttggaaaggaaagaaaaatcaacatacactgggtcggaaattctggtggcgcggctgctgcatttgccttgttggaacctgtcattacaaaattgttttttaagcatatagcctgctgacaactacagaaataatcaatggttttttaataaatataaggttcctaaataaagcaagtccttacacatgtggagaattgttgcaggtagttctgtaacagatagggatactgtacatgaccaacatcattgccaatgttgagatactcatatggctggtatgggagtggagaatgtaaagacggggaaggattgaagttgtatgggacaaaagggattgaacaagaagcattatcccagtttggaatatccaaagattgttgagggtagtggagttgcgactccttgcggtgataatctttctgccaagcgaaggtcacacgcaaagatttttgttctaaaacagttcctgagtac

SEQ ID NO: 263886 - DNA, 816 bp, Cannabis indica
atattaatataaaataatactaacaatagcttcatgaaagatttcagagttgaaattacaagagaaagtatagagttgctatgctttgctgggcgttgtggtttgtgcacaatgataagctttggaatgatataagaataagactgtaaagaagtagtttttttggttaagggaaattttgattgatggatatgtgctcaagataaaacttttggttcctctttgttctctttacaacacgttgattgccctagttggtaatacgatcaaaatcaatattgatacaactatatttaacaatcaaaacaagcatgggtatggttgggtggcgtgaaactcttctgatcagcttattctggctcagacaacaagtcaaatgggtgtgattgaccttgttcttgtcgaggctatcaaggttaaagaggttttgaggtggttgaaagagacaggtcgtgaagatatggtggtggaatcggacagtttgatcatgatctaagctatttgaagttcgatggatatgccttttgtttttgggttctatatctctgagtagagatgaattctttatagtttgaataatgtcttgtaatttttgtcaagcaatccgctaattgtgttgcttactattttactagaacttcgtggttaaatgttggttgtacctattcaactactatgattctaagtacgtaatattctattgaattatttgagttaataaaatttagatcttattaaaatatagaggagtgctaattacaacttcctattacaacctcttagtcaacctccacgcttgaaattacatgttggaat

SEQ ID NO: 263887 - DNA, 1022 bp, Cannabis indica
gagcatattttatatttataaattggattgtgttaataaataattgatttcaatcatttcagtaataataataaattaaaatattttttaaaattgtatataaataattgatttcaatcaattttaaattccttacaaaaaaaatcatttttaaattaataccaaataattattatctagtccaattctaaaatacaattcaatctaattacaccagtctattacaccaaacacagtatggtactaatcacaattcaatctaattaattcaatacattaatctaatttcatccaatcctaaaataataatcagtccagtcttacataccaaacgaaccataagagaactataatttagtttcattaaaaaaaatttaccatggaccccttaaaagagtacaccgatgtacccctatctattttggcatctggaacaaaaattagtttaattttttttttttagtagtagtgtacattatatttatttaagatttcatgtaaaattttgaaaaattaaaaaaaacacacacaaaaaataagattcaaagagtttgttgcaggcgttgattcttttatttaatacgtatgtgaaatgggatattttttgaacactacttttatattgtaaagtattttaaatttctcaaaaaattgtaaccatatcttaaataacatacacgattataaaaaaattggactatttttttccagatatctacaaaacaatccaaaaaactcctgctcatttaaattcaaaatttattagcagcggccccctctgccactaatacccttatatattgtagtgattaggggtagcaaaacatatcaatgaaactactcgaacacgataatgtaagttaaggacaaaaaaggttaggtgcagatcgaaagtaagttcttatgcaaaataaaaaacagattaattgcgatacaagattcttattaataggatgatactaatttaccaagtgacaacaaatgaaagagctacataatattttgaaaagagcattgttatt

SEQ ID NO: 263888 - DNA, 588 bp, Cannabis indica
gggtacaggagtagagtagagagaagaagagaggagttaagatcaatttttgagtgtggggtcgctagggtttgtgtgtgcaatatgcagtgacggattcaaagagaaattttgctaaatgtatttttatggagtgagtatggaatggaatatagattggagatggcgacaatttgactcgttaaagtctatgacttgcataaaattcaaacgatttagaccgcgcaacggttattttatatttatatttttaattattaaatttcaaatttgtgatgatatttcttcgaggaagaaaaacggtatagttttagaagtttatcatataaacgccatgtcgttttgagtttgaactcaaaatactgtcgtttattttctcatacgtcatcactcatcaattattactcaattcagaacgacatttcgtctcaaattccggaaatacgaaatattttgttgatgatcaacggtactccgaatgaaaatggttaatactatccgatagtgtttgcgggtggtgcgatttttgactattttttcaaactaatccgtccatgcggttttttaatttcccaaaccgcacccgca

SEQ ID NO: 263889 - DNA, 686 bp, Cannabis indica
gttagagagataggtagctaagataattttttttaatttaaaaaaagattgtttaatttttttgggtttaattattgggtttaaacgtaagattgtttaattttttgggtttaattatttatatatttttgaaagttaacgggaggtcaaacctactaacattgttaaatttaatagaatattcttttatttttaaaatatattcggttaaaccaagaaatgtggttagatagacacttttaatatataaagatatctagatttaaaatattttctctttcttctcttttttttatatttaaaaatgttttgtttgctacactaataattatttgatctcaaattctgtactattatgatctactctttaaaataattattttaatatgtgagaagcatatatttttttgctagtcggaatcaaaggtaacattttagtttctttcaaatttttttttcttgttatttttttttaaatttcttttatttttagtttaccaacatttaagcaatatctaaaatattaagtatactaaataaaattattttattttataattacttgttatattatagaaaaataattagtatataaaaatagtagcttattatattacatgacaactcattagtttcaataaactttaaagttaccaaaaagtattttaaataataagatactataa

SEQ ID NO: 263890 - DNA, 791 bp, Cannabis indica
ataattaatcataattaactgataatttccaaattaactaagcgggctttacacaatgtaaatcatctatagaggatctttgattaataagattagaacgatggttaaaattttcatagcgtatacatatcgtggagcatatagagcgttctatataattgagagtgcaattctaaatctatagtggtttaaggaggaataaataagttagggaatttacttggtaaattctagatctgcttattgaaagctcggttatataggcccattgtccccatactagttaagacattactgcttgtaagacttagttaattgattttaattctaaaattagactatgtcccatttatgaattttcactaagctatgacttaattgtgaagaaaaaagattttagggtttatttatttattaagagactttattaagtctagttaatacatatattaaatggcaattttatttgataattaattttaattattaaataaatagttttgacatttaagtggttgaattagaaaatatgatatttgtgaaagaataggataaatagttgaaaaatagcaaaattccaattggtgggcccacatcctatggccgaccacttatgcttgattttaccatttatttatcaatttttaaatgccaaatatttcaaacctaaacctaaaagttttcttataaatagatagtgatggacttaaaactgtcagcctaagttacactagcctttcagtcaaaaattgagccttcttcttctctctatttcgaatccttctctctct

SEQ ID NO: 263891 - DNA, 682 bp, Cannabis indica
aaaaatctcaagtgaggttctctcatctcaatatgctaaatgaggtcattcacttcaaaatggcaaagtgaattaactttcacaaagattgttggaactacgtttgacttgattcttataaaaagatacgtaggcaacttagttgctaagactaagtgcagtcgtcaataccacaaaaatggtataaaaatacaaatcctaaaattccattaaaggtcatccacctaggaattttcctaaatttttaaatagcaaaggattcctgaaagtggtcatctaccggaatccttatatccaaattctaaaataccgtattctgaactacaagtggcttgatccttcacaaagaaggtatgtaggcagctcggttaattaaatggactgagttcagctgcaattccaaatttaccccaaatttccctaatttatttcaaatcatttaatatcatcgtaattggaatcaaagggtatttcctttaaataaaaggattgtaattaagaggttattcttataatcttggatgggtcgaacttaaattaataaactcttatgctataaatttggcataagtgaaattgtgttttgcatttatttttaatattctaaatgtgaaatttttgcttaacacagtttaaaaactgttttctgttttttaaaactgaaaacagtttttaaaaacta

SEQ ID NO: 263892 - DNA, 712 bp, Cannabis indica
ggtggatactcccatattagcgggcgtattcccggatcacgctccaataaattaatatcaaatccttctttaatgtcaagtcttaaagactttgttgggcgattttttgaattttcatgatctacatccactgatagatttgatgagacatcagatgttgaaacttcaacattctttcttttaaagaatgcatcaattgtagttgattttttcatctacaattaagaagaactatacatattaatattattaacaaaatattatctataataattaataaacaaaactataacaatataaagagcttataacatgtgtatatgtatgtatatatttttatattaatctatcaagtatcacttcagaccaaaaaaaattaattagtagaattatttcttttcactgtaaggcacctactcaatttatatatataattataataaaaaataaatgacaattaaagttatatcaactatttatatacataatatttgagagaaagaacaagattgaaatttgaattgaatatttaaaatgcatatatcattttctataagatacctttacttgttatttgatatctgccactgttctttgatgtagactgctctttaatttattcttgtaaaattgttataaaatggtagctcatgtaatagatatgaataagagaagaagaagagattagtaatacctaaatatctatgagaga

SEQ ID NO: 263893 - DNA, 1133 bp, Cannabis indica
ccaagatctcatatttatttctgttatgtttttttcttctacagtcgaagttcaggtttgttatttatagtacaattataacaatgatgctttctcatgcattctaggttgctgtgatgagggaacactttttaccttatggcgacatatccaatgtggagctagaagctgtggaagcttgtaatggcagtagtgaatcagagttatccaaagagtgctctgctcgtgtgagtttcatagcacgtcgctcagccgagaaggcatttactaatgggaaatcctggcaagggcatgatttgaaatttgtgtggctgccaccaagtagctcttgtaccgactcaagtggtgtaagagaaaattcaccatctgctacttctaaggagggcggtgaaaatgcagcagcgggtattgacccccaagaaggtgtttcatcaggaacaggaagtgaggaacgtgtaaatcaggagaaaagaataactgagaacgacacggaacaacgcgaagaagaatgtgaggaaagccggatgtctgataaggaagtcacctaggggatatattttgaggatggactaataatcaagagttgtacagtcaggtaaagtgttataatgttagaagaaactctaatttttctgaatccttctctccctcttttcttattggttaaatttgatttttcaatatttgtattttatggacatgtctaaagggaaatctccttatttttgactgcccacctaaggatacttggtcagtggtgaaatttggatatgtctagggccagaagaacttaaagttgaatttctgttcaaatttaatcagatgtttacgtaaaaaaaaaattatataatatggggtctcattcccccctcagttttttcccatatcaatatcaagtctattgagtgtatttttttatatatataaataggttaatattaggtgtaattattttggttatgtaagattaattttttttttaattaatattatttaataaataaaattatattttatttaaaaaatatttaatttaagtgatatgtatataaaaaaaattaataatatttaaattttattgtcaattataattttaatatttatttctttataaatattatactctttttatt

SEQ ID NO: 263894 - DNA, 881 bp, Cannabis indica
caaggggacctgacaagaaactgaaacaaaaatcgctcaactcaatacattaatactttagtttatcctaaccacacatatgtaagtaacttgaatcttttaacccaacctcaaaagtatgaagagaacaagagactaagctaattataatccaaaagcataaacatgttttgtcaaccaagaacgaaagaaggatagatgcaagataagaactactcaaaattttgtacaaaatggagaaccaaatgaaaagaattaaataatgaaaaccctcaaagattttttgagggagtcaaactaacttgaatctagagctttagtaaaagtatcagccaattgcttttcagtatcaacatattccaactacaatatttggttgtcaacaatttccctaataaaatgatgtcttatatcaatgtgttttgtacgagaatgttgaacaagatttttggaaatatttataacactagtattttacatgcagaatgacaagtaagaatagatgtgagagtatagcaattatcaacaaaatctaaacccttgtaaaatgcattgtttatcactgttaagaacaaagcaatgatcattatcaaaattgacggtatacccttgatcacaaatctgactaatgctaagtaaattagcttttagtccctcaataagcataacatttttcaaccttgttaatccttcaaaattgagtgttcccataccaatgacatttcctgttaaaccattgccaaacgtgacctcaccacattgcattggtctgatattcactaaaaaatccttgtcacctgtcatatgtctagaacaaccaccgtcaaaataccacatttgaaaaacagcaactttatctgaaaaaccagctacacattttt

SEQ ID NO: 263895 - DNA, 2011 bp, Cannabis indica
tttcatataacggctccatacggttgccagcaacaggttgttctgctggcaccgctggaactgcaatggcctgagcagcttgttgtggaggcacggcaagaataccgtgctatcttaaccttagaatttcttcatcttgttggcggattcgatcttgcctttctgcaaacctctgctcccaatccggaggagcttgtggtggatttaccttacgaccacccttaactctgccacagccacaaccgcgaccactgggattctggggaatttgatttccctgaccgcctccagtctcaaccatattaccctgacttgttgtattttgctgggcatccatttataggacttagcctgcgaacccataagccaggcaggttagacatcgatcataaaacttaataccactcttatagcaacacacttaaaataaataatcataatcgaatatgattcctaacatactttaatattcacatataatactaaacaggtacgggcttactgaactgtgaaccgagctttctctgatgaagattgtacatgtcttagcaagcttcggtagacaaacctggcggctctgatactaaaactgtaacgccctaatgctaagacatgctacagtgcttttccaattatagtgctatctttgctaatcaaagatttttctcgaaaaatgtgtcaaattaaaactttttataataaatattaaactttataatttacataattatttacaaacatcgagatcccgtttctaaacttttataaaaaatgtaccaaaagacaaattttcaagtcgcacagcgactacaaaatataaccccagatgtcccgagaccgaactctccaagtcacgctgccacaacatgtacaatcccatccaagccaggctcactcctgttcagctttcgcctttcctatacctactcatggaagcagaactgtgagtcgacagactcagtaagaaaagcatataacatatcatataataccgacttgtatctaggcgcccatacacctatttacaaggctcaaaagatgagtaagaacgttccatactagggtacaaccactataccacatacactacgtaccttgctgtacgagtgttggtagggtttgtttcgtaccctgagtccactgtgtgatataccacaaacaccctgtactttcctctacttgtgcagctatcactgtaatgtactcttatacaatattcactataccaatgcactctgtaccataattgtacaagtgttggaagtgcaactaacacatatacacttaacatatatatacactcatatattcatattacatattatacacagttcttaccttctttccagattcaagtgtgttggccgacctgaatggaaagtctcgtgctagatggatgccctaatcacataatgaaaccaagtaaatcacatgattaaaaaccctaatctgggaaactcaaacccacaaccctaggttctattatattctctagggattacactaactcaggaaatagggaaacacctaactacggcactgaaatggatgagaattgagaaaatggagcattcggtggaccttgccaaaactggctagccggttcggtttacaccagttcgccctaaaatttccatttcttgatcaatccttcaccaaatgcaaccaaaccttccagagtacctaattagggtatacacaatattttccaactagtatttcacagaaaaacccacaaaatcaaattatgccattagagatcaaagctttgagctcaaagctcaaacttgcacaaaatctatcaaatacatcaaaatcaactgctagaaactaaaaccaactcaaatgaaccctagaattcaaactacacaaaaactaaaccctaacagcacctaattttaaaaatcacatattcaaccaaccttaaaattcaagaactaaggaaaagtgttactagggcttaccttggcttgatctttctctgaatttcttgctaaaatcaccaagaatt

SEQ ID NO: 263896 - DNA, 529 bp, Cannabis indica
tctacttcaacggttttctgacttttaacagattagtatttcaagtctttttaagtctttttatttagtatggattgatttaccatcgttttttcactttatattttttcattatattgtgtggtaatggagtttttatttattgtttttttttgtagattgttttgtggagggcctacaattacataaaattataccgataagttgaagtttaaatttgatctgtttgtttttatttttcagcagtttcaaatagggtcctagtaggttgttactagccaaaggggaataacattggctagtcatactttgaaatatttgttggttttttagtattttagtaattttgagttaactttatgggttgtgtctaattcaaagtatgtattttaattgttatttaaaaattataattctaatataattgtgtttttagtttggtgttgtgatgcttttccagtttggctagctctgatgataactattaataatgggaaagtgtgttcaatgtgatggggtgctatttgaa

SEQ ID NO: 263897 - DNA, 1055 bp, Cannabis indica
taaagaaacctgtcaaccaagaaccccaacaaccaagaaacccgacaaccaagaaaccggacaatcaagaaattgcctgactatcacaaaacgaccttaacacctaaccattaacagagaaacatgtaaccagaaaaacaaagaaaccatgtcatacgacaagacctgacctgtattgtaatgctttccaactgctgaaaaatctaaatcaaccccctatgtttgctgatgtgcagggacgacatgggaagctttcagacgttcagaataccaaatacataccgatcgacgacaatcaaacatgcagctgtggaaggaaccagtcgaacggacggctgctggaggaaatgctcttgcagacgactgctggaggaacgactacgcctactgggaggaactatgcccctgcaactatgcctgaggaggacaatcggacatactctggggaacctagaagagtcgggggcattgatgcagcggcgctactgttagggtttaccacggctaacttatatttttcttcttgttagtttatgctttcaaaaattaaattaatatatgttgaattaatgaaagaaaatctagtatgtatgtgaaattaattggtaaacactatcatagtgtcatatatcgaagataaattttactatatttgcaaattcgtaagcccgatatgtgctcatctccgcataattacttaacaagcttattattgtgcctatttgtgaaattggcgcgcccgatgtgtgctcattctcgcataatttcttagcaaatttattattgcgcttatctataattgcaaatgggtgagcctaatatagtgctcatttttgcgttattatttagcaaacccgttattatatttctacttgcaaattagcgagccttacgtgtgctcattttttgcaaaattatttgataagttcgtaactatgcttatgtactctcaaagaggcaagctcaaacacttattttcttatactaaaataccaagtatatgagaagctcgcaatagtgctcaattatttttacccattagtacatcgcagata

SEQ ID NO: 263898 - DNA, 1054 bp, Cannabis indica
agatttagaattactttaaactcgcaaaatatataaatatataaactagttaactaagttaagtaatcaagaaaaatggtctttttctccctttgaaagaaaataatggtgttggtgtataatttctgtattttgtcaaatttcaaatcaatgtgtactttactgcagcaaaatatctttctaaaacaagacatactttcaatagagaagatttgcattcataaagtcaaactccataaagaattttcaaccaaaagttaataacttgaacttggatataaatgtctaatgtttccctatcccccggccaggtatggctgtccaagaaatggtcgtcaatggtgaaagaaccctccacatctgtacatgtaacaaaaataaaggctgtttcaggccaaaactcagactccattactgttttacatcgagacttcagattaatttcattcctgtgatgatataaatagttatattagaagagtgttaatggttgtaaaatagatagttattctttgaatctcttagaaatacaaaataagcttagtatttaaataaaaagacattcacttgtataaatcaactcctaaaatattacattttcacagaaattaccccaacaacacacaaacaacaattctaataaagtatagtaacaacaactattggcttagataaaagctatataagcactgaagaattgctttgaaaacaaactatatattttttcatttaaaaataaagggtatcatcttagttgaaaacaaagcaaatatgaattgttaagaataaaatatacttatcatggatggtagtgttgttattctttggattcaagtctagaaagagatgcctctgctactataaataaataaaaaaaaagttatataaaagggtcgaatttggttttggagagtaatcaagtcggacctaaatcacgagttactgttatatactcctttcacttaagtgcctgaagcaattttcagatttcacatgcaaagtatcttcatcagctaagacctcataataaagggaaaaatttaagaatgttcaa

SEQ ID NO: 263899 - DNA, 696 bp, Cannabis indica
tattaatactcaaaaaatatatacaatactaaataaaatttatatatattactattaaaatatatatatcatgccaaaaaaaaattatataatcattatatataataaaatagaaactaaatattattttaagtaaataatatactatatacaacaaaaaatatatactatataataaaaatatatatgcccacaataattaaaaatataataatattatcaaataaatatatatattatactaataaaattaaataccatcattaaaataattatactaaagccataaaattatataccacagaatataataatatttttgaggttgataatgtaaatctcgtcatttttgcgtttggacacataacgctctatctgacaattgcagttcttggtgacaagatgaacttcagcaatcaacattatttgaatgtcagcttctatctgagagacctgacttgacggagcagtgaatctcattaaaagatgtctgaggctgattagtgaaagtaccaagagtatgccttcttatagcgagatggatgccttgctatccgttgtccaagttcattcaactgttatgctttagtttgtataacgtacattatacgctaaatcttttaacagtcaacatgtctcatctacttctcttcatacgtagcgagattggcgcctcgctttgtacttctagcgtag

SEQ ID NO: 263900 - DNA, 741 bp, Cannabis indica
atacggtcctaaagtaggtggttagccctaacatgtaaagttcatcgccatgacacgagctggactcactgtactgtaagttattattacttataattaaggtgcctggaattcttgcacgcgggagtgtaatattcttttcatgtaaaattgatgatcaaaatgatcttgatctgttttggtttgtgtggttcaagagtttagaaatgcctcctagaaggtcagttagagtgggtcgaggtcgaggtcgaggccaaggccaaggccgagatagaggccgagatgatggagcgatcaatgaactacctcaagcaccacagggatgggaagagcgccttgccgcacttgaaggaatcattcataggcaggatgaagaacttcgtcagctgagacgtcaaccggagccgccagtccaaataaggcatgatgcaggaaatagagacccacgagctacagtggtatatcctactacagaggctatacatgagttgttagcagagagatttcgaaaacaacacccacctgagtttgagggaggcatagacccggtagtggctgaggagtggataagtcgcataaaaagcattttgcagatgctaagggtcgatgggaatgaccgagtaaagtatgcattttacatgctgaggaaagatgctcgaatctggtgggaggtggtggagcagacaaaggatgtaaataccatgaactgggatgatttcaaaagggtctttaatgagaagt

SEQ ID NO: 263901 - DNA, 2562 bp, Cannabis indica
tttatcataaaaaatatttatagttacattataatcactcttactaaatttatctaattttgtggggttattctaccattttgatctataattattaaattaaaaaatttatatttaattttttaaaaaacactatttttagcctccacatcaatgttaatgggtctgtccctcaccacaatcatcttcatttctataaaatcacttctaataaaaataaataaacaataataaatgtactatataagtcaaatgtgtctgtttcaagggatgtttcttcttaatctgtacaaaatattattgtttttatttgtgattgcgttgtgtgacttgtgtcaatatatacattgtatattgcttaaatttgaatcccatgcaaattaattaattttaatatagtattctctctttgcgaaatttaatacaggcttgtttttaatcaccaattattagtcaattaatctttagtttctatttatctaaacaaaactttaaatttttgtaacgaattaaggaaataaaaaacttaagaataataagaacaaaaaattagcaagagaattgaaaatgaaaaaaacaataaaatttaaaaattttaataagaagaaaattaggacagttgaattcctcttctacccttttaattcccaatgcaattccataattcatcttcttcctatttcaattaacaaaatcaatttataataatatatattatgaattataaactcaattctaaatgaaatttttctatatttctatggcaaaattaattacaactaagcattaagtatttcaactcagaaaaatatacaattaattaaaatacttttgttctaaattatacaattgtgtcctaacaatcaaagtattatcaaattacacttttcaatttttgattcgaaaacatatagatattgatcaataaagatggccaatcaataatcaagaaataataaacttagattgataggaagtgaaacaagagtgaagaagaacatgaaattgcattagatcataaacaagaattcaagagattcatttaacaactctaaagaaagatttagcctataattgtcattctaaacataaaatattctgaaattaacacaaaaatagataaagaaaagataaaaactcttggaaagtagtgtgtttgacctcagcctccaaaaatcgcatctcctctcctcttccttctaagaaagaaataaatttaaagaagaagagaaaataatttttacgtgatttgagtattaataaactctagttcacgagtcaatattatatagagctagaaaagcttaaagatatttttacacaagtgtttttgaggaaccttaattcttagttcttgatcttagaaatcactctcccaaaaatctaaccctcaatcccttagcatgaagggatcctattttatttgcagggtaaatcgggtatggatatactcggacctagtaggcttctaagttatcaactaggtccactgatggggtaaaatataatatatactgactttttgccaattgagtgaagtccaattcacgaggtaacgatcgttcgcatgagtggggaccatttgaggatgtcatgtgtcgtgcgcaaccatatctgtatcaagaatgttagagaatgtgttgttaaataaaaaggtgatctccttttggtagtgtgcgcactccacgagtctggcgtaggagataaacccttgatgtagtgaggccttgtgtttggtagacatcacgggaggtgacatccaggaaccatccagatgtatcttcaactgcccacgtccggattagcccatgagggtatctgggttactcctggagtactttttgtcttttgatccagacaacctccctcggactagagtggttcgaccttgttatgtgtgtaattgggcttgcatccagatctagagccatagccttgactctgcttatgagctgagttattaacctgactgggcccatgaatgggtttgccttcgctgatagtgggctttggaagtgattacgtaacgactctgaaaacacaaataataggatttaaaaccttttttttttgttggagggaggcgggcctcaacttaacccatgtcgcgacccattatatatttttatagaaaattttaccccaatgtcgctgatctccttagccatgctgcgacctatgtctggacttcaaaacaacgtttttgtatagggcctagcattagctctccttaccccacgtcgcaacccttagtggcttattcaatttttgcatttttaatcccaaaattttaccaaggcctccaaatcgtatagggatctatcttatgttgagaataacaccaaaacttgaattttcttctctttttgattcaatttcttccaaaagatcaatcattcctctttattcactacaattgcaaaatgaacaaatacaagcgtaaaattgtactaaataaaataaaaacaacataaaaagactaattaaaacaccacttaatcatgacataaactaactcaacaacaaattaatacatatatttttgtaggagtatgatttgtt

SEQ ID NO: 263902 - DNA, 578 bp, Cannabis indica
acttgtttcggcaatccagaaaatttttttagtcttaatttttttttttcatattcacgtacgttataactatttaagataacctacaaaattttaagaaattctgaataatttacaatatagaaaataatgctcaaacagtctattttacatgcgtataaaataaaatagtcacgcgtgcaatacactgtttgaacgtagttttcggcgtgtttaacttttccaaatttctaaaaattttgcaggatgtcttaaataactataatgtacatgaccataagaaaaaatttgactaaaaagttatttcgggcgctaaaacagataaaggtatatcaatatatccatttaaaggggtgcattgtagaatttctcatatatatatatatatctattctatataaagtgtgcttatataactaaaattcttggtttttgagaaatttatgggtgacttttaatttttatttaataaaataattaaatattatttatatataataaaataataataaaacaaatcccattaatatttgaactgatatttgggtgacttttaattttatttaataaaataataa

SEQ ID NO: 263903 - DNA, 2967 bp, Cannabis indica
catgcccttcgggctgaaaaatgtagaggccacctattagaggcttgtgaacaaaattttcaaagatctaattggccgcaatatggaggtgtatgtggaaaacatgttggtcaagtccgaaaaggctgggggcatgtggaggatctagatgaatgtcttaagatcctccataagtataacatgaagctcaacccctcaaatgttcttttggagtaggctcaggcaaattccttggcttcatactcaatgctagtggaatagaagaaaatccagacaagatttaagcccttttggacatgaagccggttacaataataaagaaagtacaaatcttgacgggacgtgttgctacactaagtagattttcgtaataattccacggacaaacgcgtagcctttttcaatactcttagagcaaaaaaaaataagtggacaggggagtgtgaacaagcactcaaagagctaaaaaataattggctcaacctcctgtcctatcaaaacctcttgataatgaagagctaggtgtatacctggatgtcacacaaacatgctgtgagtgcaatcttaataagagaagaagacggtatacaatacccattatactacattaacaagagactgatcgatgtgaaaactcaatacccactcatggagaagctgacctagaacttactcctagcatccacaaagctaaggctatactaccaagctcacccaataaaggtgtacatcgaccagccattatggcaggttttgcaaaaacctgaagcattcagccgactactcaagtgggccatcaaactcgaccaatttaatatcacatatgaatcgagaatagccattaaaggccaagctctagcaaacttcatgactgaatgtacaagcatacctcttcaaatctctcaagattcaagagaaaagcaacaactagagaagaagcgagagtaagagcagcaacgaaaacttaaagaatcaacattgaaaatacatggttatggaagctgtgctgaccaattgtctgatgcaggcattgcccttataacacctgggggcaacaactgcacagagcaatcaaatttaacatcaaagcctctaacaatggggctaaatatgaacctttgattgctggcctcatgctggcgcatgaagtacgggctggccaccaggacatatatagcagctcttaactagtcgtaaatgaaatcctaggtgaatatacaactcgaggtgaaagaatgatggcctatctgatcaagatttaagactttttaagttagctcaaaggctatacaataaggcagatccctagagaataaaatgccatagcagatgcacttgcccgtttggcaagcaacaccatttccgataaggcaaaccttgtgccaatacagttcctaaaagaatgtagcattaccatcccttaagaagttgacctgttggatgacaatccaacatgggtgacccttgttgcaacttacctccaaactggagccttgcttggaaacaaaaatgagacaaaaaagatgagaggaaatgctactaggtatctaatcctagatggagcttctcaatgttgctcttaaggtgtgtcactaagacaaaagtcaagcgtctgacgatataagtgcatgaaggcttttacaacaatcatgctaggggaaaatcctatccaaaaagatactttaacaagggtactattagccaacaatgatcgacgattcgatggactatgtaacaaaatgtgacaagtgcttacgattctcgaagatccctagagatccacccaacgagctcatgatgatgcatcctccttggcctgtcgttgtatgggggatagatcagattggtcaactccctcaactcccaaatggaaaaggagaggtgtagtatgacatagtcactgtagactactttactaagtcggaagaagctgaatccctggcaacaataacttccaagaaagacctcaactttttttttttctaagtaacatcatatgtcagtttggactcccatagattattgtgtcagacaactgaaagcagattgacagtgacatgttaactaatttctacaacagacatggcatcatcaaaagcttctctgccgtggcccgtcctcaagtaaatgggtaggtagaagctgtaaacaagacactcaaggatgctttgaagaagcaccttgatgaggcaaaaggaaattggttaaaattctccaaggggtcgtttggtcacacaggactattgagaagatagccatcgagaaaactctatttacttatggctatgaagcgatgttgcccgtagagctggtgccaccgtctcataggaggacaacttatgaccaatatacaaataacatcttgttggtagaatcccttgatgaagtagaagaagggagagatcatgcaaacctaaagctacaggcctaccagcaaaaggttgcaagataattcaacaaacaagtcaaggaaaggaaattcttcataggagacctggtgctacgaagagtgttccttaacaccaaagatccaactgcaagagtgtttggacccaactgagaaggcccttaccaagttaccgagataacaagtaagggagcctagaagctgggaagctataatgagaacatggagctggttctccttccaagtaattggaatggggagtacctctgaaagttctactaatgctactttttagtagtagttctattaactcattagtagagttagtttaaaagagctagtacacatggccttttggcatggcctcccatttttctttaaagatggcctctgcttggcatgtcgggcaggggtagccacttaatttctagaagaaaactttttattttgtaagcttgttaaaacaatttatttaagttgcacaataataaagaccaattaatgaataaaaatgacgtttcagttcaaatatgttgagtctaaaccacttgctaacaaga

SEQ ID NO: 263904 - DNA, 513 bp, Cannabis indica
accatttccaaattaaacatatgggttattggggcatgaataagataagggtattggggtattggggttcttgcaaatgaagaattcagcaataataataagaaattggggattaaataaaataaaaattgaaactttgtaataaaaagagtgacctggttccaaggttgagagcttggtggagacgatgataaagggtgcgagtgtggtcgctgagggtgcgtgtagtgtctgcgccgcgtttggaagatcccattttcttgtatgtttttggttgaatcaattatcaaactccaattttagcggcaaggaaaacacaaccgccattgacagtttctcagctaaatctctcttctccctttctctcgctcgctcctaatgaatctcaatcacgtgagcttagttcctgtcacgtgcaagttaattttttttttttttaaaaaaaaaaataagtccattattatttattattattattatttttttaatttttgagattatttcaaaaataca

SEQ ID NO: 263905 - DNA, 744 bp, Cannabis indica
tctcttggacctcggcgtccccttcatgatcctcctcctcctggacggacggatcttgttcggcattgggtaaggtggcatgccgggccacttgagggtcagataaattgattctacgcattgtcttttttgtacgagccatcatcctatggcttgacgtaagacttaagctaaaatgtccgtcactcgaggaggttggactagaacgaagatgaggatgatcctcgtgcaagagtttaagcagatcctggtcgatatggcgttcgcttccccaaaactcacctaggttcatctacaaaagacagcacacaagatgagtgtttggtcgggatatcgaacattaaaacaagcaaatatgccgaccaggagtactcaacggattaaagaataagaatattcgacaaaagttgaaactcagaagtttgaaatttttgtgagttagggcaaaaaatttcatgaagcttagaataagaaagatgaaagataggcattatgcggttcaaaaagcaagcattatgaacgatgaaatagcacggatcgttacaaaggataaacacagatttctaaacttagggtttcctacatatcttctacagcgaagtgaaaggtgcattcagaaaataaatgtgcaaagtaaacgtatgagaaatcgagaacttactcaaggattgaactgttggaaattatttaaccaggatctagatttactaacaagaatgttggattaacaacgtaatatgaatt

SEQ ID NO: 263906 - DNA, 1210 bp, Cannabis indica
atgggatgcgactgagccagggccggcccaagcattgagcagcttcggccattgcacaaggtccccatttttttaaggcccaatttttatttttttttaaaaaaaggcctattttttttcttttttttctattatttatacataaataaaaaaaattaattgaaaatttatgaagtaattttttttttttaaaaaaaaaaagtactactaacaaaattgtagttttaatgtacatggtttttttttttttttttcctttaaagggtcccaattttaaaatttacgtcacaaggcccccaaaaatgcttgggccggccctggactgagccgactggtatgggatgcgactgagccgactgacgatgtgactgctctgggatgggactccgccggcgaagagaaccagtcgtcgactcgccgtcgccggtcttggagaagaagctttggtctgatgcgtggtaatggtttaagggtagggtaccgacaactcaagtcgactggtgtgggtgagtcgaacgagtcgagtcagtggactggtgtgggagggacgctgggtgtgggtgagtcgtgtgggtgggaggccggtgggtgtgggtgagtctgtcacttaaatgaaagtgaagtgaagtgaatatagtgagtgatactgtgatagtgaaggaatacgaatagacatgcagtgagatgagggtttttgtatttgtttgaaattaatcgattcattcaatgaacatgattaaaaatttcaaatagtaattagtaaagtaattagtaaagtaaagtaaagtaaagtaaagtaattaattattaattagtaattaattattttaagtattaattttttaataaaaaattacttttatattttcggattacgggttataacccgaccagaaaataaacacataggccgacccgaaaccgaaacccggttacagtccttttcgggttgaacccgacccgactatacgggtttttaggcagtcggtttttttggcagcgggtcgaggcgggtgtttggatttttcgggtttgcaggtctaaatgtgcacctctagtgaccgtagaccaagcatataattacaaaaggctacttaattaacttaagttagtaaaaactaagtataatgtacttaattattcaaatattaattctaaaattataaatatacagtttcatatttatcattaaaatattatttatgtaatt

SEQ ID NO: 263907 - DNA, 788 bp, Cannabis indica
aatgtaagactagccattttgtgttaataaggatataaggctcttttgtgttatatataggggataggattggttcaaaggttttttttttttttttagtaaatagcggtttaaggattcaaaattttatatttgtaagcgacataaagtcaataatttttttaaggacataaaaattcaatatttataaaactgtaattttcttctcttttcgttagtacaaactcctttgtgaatttattaaaagaagatttgaagtaactgatattgcatatttctatccactgaaaaatttataaatttataccacttacaaatttaaattttttaatatttatgcaactatatatatatattatacactgtaaataagtataaattttctcacatattttatataaatttaaacagtctatttatatataaaatacaaatgtataattaaatgtttgaatcgtgatttcaatagtataaattattctttacttcttaaagattagtaaataatatatatatatacaattaaaattaaaatatatatccgtagataatagatgaagaactaattaaagtgacatctaattaacacaaaaaattccaaaatatatattttaatattgttattggttttattttcaaatttatatttatattttttttttgagaagggtcttcttaaattacatttttgagttaatttgattttatgagagtatttttgatggaaaacatttagaggatgtttgataatgtggatatattaaatgacaaaatattaagatgttata

SEQ ID NO: 263908 - DNA, 920 bp, Cannabis indica
caagaaaatgaaaaagttgcagatatcattcgaactgttgatacacaccaacttagaaaattatcaaaagatgagtgttgggtactatttgtgaagcatgcttctagtgacaactctagaaagtttactgagaacccaaatttagaaaggatcggcagagaaatttccaacaaatgtaatggtttacctttagctgctaaagttctaggaggcatcttgagatcaacattggatgtatggagatgggaacaaatagcaaggaataatatttgggagttgacacatgaaaggagtgagggccttcctgctgctttagaagtgagctactactatcttcctctacacttgaaaaggtgtttcgctttttgttcaatattcccaaaaggctatcaatttcaaagagaagagttggtcttattatggatggcagaaaatcttgtcatgcgctccaaggggaatagaagaatggaagaagttggcggtgagtactttgatgatttagtatctatgtcattttttgtaaaatccagggattggagaggtacatcttattttgtgatgcatgatcttcttgtggatttggctaaaattgtttctggaaagtatagttctttattagagcacaatgaagacattgttaaatttgagaagaagacacgtcacctcggatgtgtaatggaacattctactgataacaaggtatttagctatgattttgaatctacaaacttacgaacctttttaacactattaggttcaagatattttgaaatcattatttctaaggaagtagtgcaaaatctactatctatgttgaaatatttgagagttctatcttttcgtggtcttcatatggctgaattatctgattcaattggtgacctaaaacatcttcactatttagatctttctgagactga

SEQ ID NO: 263909 - DNA, 529 bp, Cannabis indica
aatttgcgacaaaaatcttcaaaaagtttagtttgatacaaataagttcccaaccttgaaaaataacggtacgtaatagtctcaaggttatgtttttatttgtccattagttctaattttaactgagtcgtttacttttttaaaattgtcacgtgtcgaaatattgttggtccaaattattattttaattttaaaaaataaataaataaataaaatatttaaaaatattttcttttttttttacttctttttctttcttttcttcttcgtcttcgtcttcttcttcttacggccaaaaacaccaccaacccccaactttttcttcctccccctttctccttttgcctttgttctttttcgtcgatggcaaccaccaacaccagtaaacggtggcaagctccaactgcagccgacgagtacattagaatcccaaaactctgaccgacgagacccctagattcctgaaaccccgaacgacgagacactagaacctctccctctccctatctcagtcaccaaaatacccaga

SEQ ID NO: 263910 - DNA, 613 bp, Cannabis indica
aaaaaaaaaaaaaaaaacatttggaactacgtttgacttgattcctataaaaggatacataggcaacttagttgctaagactaagtgcaatctctgataccgtaaaatggtataaaatacaaatctcaaaattctataaaaggccatccacctaagaatttttctagattttcaaacagcaaagaattcctgagagtgatcatctacgggaattcttatattcaaattcaaaaataccatattctaaactacaagaggcttgatccttcacaaagaaagtatgtacgcagctcggttaattaaattgactgagttcagctgcaattccaaattcacctcaaatttttcccaaattaccccaattatttaatatcatcgtaattgaaatcgaatggtgtttcctttaaataaaaggattgtaattaagagattactcttataatcttggatgggttgaactaaaattaataaattcttatgctataaatttagcgtaggtaaaattatattttgcattcatttttaataatctaaatgtaaaatttttgcttaacaacgtgtttataaataaaataaagtttaataatattttttaggaataatttaatttttt

SEQ ID NO: 263911 - DNA, 1601 bp, Cannabis indica
ttctatattactaccccaaaactaaaatttccaccatctccaccaacgctacctatcgttggaaacctccaccagctcggattgtacagccatcgaaagctgcaggcttggagccggcgctatggccctgtcatgctgctcaggctcggcagctcaccggtcctcgtcgtctcctctgcctcggctgctcgtgagatattgaaaactcacgacgcagccttttccaaccgagtcaagtccattgccttcggaagctactctacaactacaaagacgttgcttcggcaccctatggcgagtactggaggcagattaagagcatttgtgtgcttcatctgctaagcaacaaaagggttcagtcttatagagccgtaagggaagaggagaccaagctcatggttgagaagattcgaaagtcttgtggggctgtggtgaatttgagcgagctgtttgtaaggctaaccaacgatgtcgtttgtagggtggcgttggggaggaagtatgatgaagaaagtggtgggaagaggtttaaggagctactaaaggagcttggggagctattggggtgtttcaatataggagactatattcctaagcttagttggttgagccgtgtgagtggttatgatggtagaatggagaaggtggctaaggagtttgatgagttcttggaaagtgttcttcatgaccatatgagtacaaataatagagttactactggagagaacagtgaagagtaccagaaagatttcgtggacattttgcttatgattcaaagggaaaacttgcttggctttcctattgataaaacttccataaaggctataattttggtaagtattcaactctctagatgtcatttcattttcatgattactatatatcaaaatacaccttattatagccctaagaaaaaaatataccttgctaatttatcatatatatgacttattatttaattaatactatttgagtgagaattgttacaagatattattgttgtttagcatattttttggtgtgatattgtaataatcgagccccatataattttaagaaatagttttttagagaattttactaaccaatcgtatgatactgtctatagaaatatataaagtcctagacaccattcatgtccaataaaaatgatctatttgaatataccttcatttatcacatccctcaaagccataattagttaacaaaaataggtaatcattaaatggtatatttctacctattccaaaattggttcacaatttttcatataatttattaaattaaatatatggtaccccatattgaaatgtaaaatgctacatcttgtggtacttacaactttattataccccttaacataaacaaatagtatatccctaaacataatatatatatagagtatttaatatattaactatttcttgtagataaattacataattatgtattgcgtgcttatatattatggtttaaaaagaaattaaaaaaattaaacaaagtttggatcgaaaggctattcaggcaaattttttaattaattaataagtatatttatgttatatttttagatatagttcaggaaattaaagacattaaat

SEQ ID NO: 263912 - DNA, 965 bp, Cannabis indica
cattaatgctaatgatgtgcttcaaaaaaattaaccgccaaattataaagcatgaattttttcaaattggattatgataaatataccctcggtaatcatttaaaaagcacttttcattgaaaagaactttttaaggggcaattgttatacctgaaatttggctgtacttgagaaagtgacacatgtcaatctcgtgaaatgtgaatcaacagatataataacgattatatcagtaaatgaaaaatggaataactcattaaatatagagtaaatagagtatattcgtaactcgctgactgtatagtcttaagcgacacaacgatacactaactatcaattcttgtattgacgagaaaccatcttgcttctaaaggcataatcttgagggagctacagaaaacgcatagtgaaacatctacctcactacacataagaaagtatcgacgaggcaaattggttgttggaacacttagcgtataattcacgttataatgactaagtgaaatagcttgataacatggaggacatgattgtccagtctgcaaggccttataatcaaagtgcagttcttaattttgctctgtacactggtgctcatgccattgctagaatacgtataaacctagtcattcatctatgtacaaagtgacatgcctctaacgagatgcttctatcccacatccgtatccactacttcaaattaagaataacaaatcgttatgcgtttttttaggtatacaggtgttaaaatgggacgtggtcaaagcccacatttcgtggaaacagttatgtatttctatttcaaatgtaaataactgccaacctatattcctataaataggggctgattatacagaaaaagggacacaaaaatccttgagagaaaagaaatcactaattgttaaaccataattctatatccaaaaatatcttaataagatagactcatggactatgaagagtta

SEQ ID NO: 263913 - DNA, 746 bp, Cannabis indica
agagttggttaaggattatgattgtgaaatcctttaccatacagggaaggtcaatgtagtggttgatgccctgagtaggaaggatcccgggcaggtaactagtatgattaagattatttcacctcagttagtagaagacatgatcagattgttattggcaaacttcataacttgatgttgcaatatgatctattggaatgaattaaagtcgcttagttagttgatccagaattagtgaagatccgagatcaggtttcatctggtcaagccaaagatttgacggtatcagatagtgggatgctattgtttaagaccaaggtttgtgttccaagtagtgtaaaacttagaaatgagattcttgaggaggctcataccactccctattcattgcatcctcgcactaccaagatgtaccaagctcttaaaccctacttctggttgagcgagatgaagaagaatgtggtaatctcagtgcctaacttgtcaacagatcaaggctgaacaacagagaccggcaggtttattgcagccattgacacttcctgagtggaagtgggaggatatcaccatggactttgtggtttgattgtatgattaaatttgggttgtggtggatcgattcacgaagtgtgcacactttctacccgtaaaaacaacctttacactggatcagtatgaagagttgtacgtaaaagagatagtaagattacatggtgttccaaaatccattatatcggatagagatc

SEQ ID NO: 263914 - DNA, 1164 bp, Cannabis indica
aatcacgtaatacgcctatgttagttagggtgttacattgatgatcttttcaacacaccctgaaatatacatacctcaagtatattctccattatatttataacccattggtacaaattatcataccaacttatagtgagtctcccgctgatgatgtttgattcatcaaaatttgagactctcgtgttcttttttttttccatcattaccactaaggtttcactccctggttcatatgataccattgcttccttgcaattatcacaatcttcatacttggttaaccactttaaagcttattctacactcaattatatagctcattgtttaataaacaacctactttgtgatccaacatccaccaatcacttaattacgtgtctattaatttgcatctcaattcataagctttttccccattcagggtgagtatgcttttccataattgcatagtaaagtaatctttcccaagaatgtcaatggtctccttatataccatattgactatctagtcaattataaagtactctacatcattaccgtatcaccttaagtaattcagctaatcttctttacttaagtggtaccactactcttcatgacgttcttttatacgttagcccggtaacgtccccgcttcaagcctccattggggccttactgttgggttttgtgccctaaataaaacccatttcaatataatcagatttactaattaataaagatcagaaatcacattttatgttgcatggttcacatgatttatttcatgattataaattctattaagtccagaacatatgtatttgttcatgattatagtgttgtcagcacagtggaatataatcatgattatatgttcaaaagtttaattccctgatttgtcagttcactggatttagactggcatgataatcagcgataggtatacttacaccttggataagtgttatgtcctttccagggcattggcaaagtttaccagtatcggatgtatggagtatacattggaagggaccgatattgaactttgattagatatgataaatttaccgtaatatctattcaattcaatatcacctagttgatcctagatcaaatgatcttaatcctgacatgattaggttcgatctcaagagtgttattcatgttctttgatttgtt

SEQ ID NO: 263915 - DNA, 552 bp, Cannabis indica
tgcttttcttatgtaagttaggctattaattattagagtgtttattatattatatgatttttactgcattcttccggtggtattttatcgatttaaattatataatatgatagtatttttagaagtagtattaatttaattagagaacatatttttctagtgagcttaattatacacattttccaactataattaatggtgtagaattatagttgagtttaaagaatcaattttattaggaaaatataattgcatgtacgaagcttgtgtcttccataatcattttctgatcacttctcattttaattacttgtttaattttcaaaaatcattttctcaatattctcatcacattcaaggttcttattttattcttgtaaaattactaactgtccttttgagtgtatttttcctccctgtggatacgacatatagcccgtttactaccgcgaccgcagtgtaactaattgggcgacatcaatttttggcgccgttgccggggaggtttctgcgctacaagaggttagtatagtagtttatttatttattatt

SEQ ID NO: 263916 - DNA, 380 bp, Cannabis indica
tggtgatagaatgcacagtggactgtttcgggaaaaacgagttcaacagcatgatcaatgctttgatgcctatctgacacaaacactaagttctcaaccacgccaattgctaccctcaacttctgtaagaaatacgtccaagagtcgttattctcactgtcaacgataccataagcaaccaaaaacaattggttgttcgcaccgtatgccacaacaactaacatcatactgccatactttatcttcaataaggtgccatcgatactcaaaataggacgacacaaagtaaatccccttctacatgcaccgagtgatataaaacaatacttaaaccgctcttcctctaaatacaggtcagtaatggtacctggattcttctg

SEQ ID NO: 263917 - DNA, 730 bp, Cannabis indica
  modified_base (718)..(718): a, c, t, g, unknown or other
atatgttatatatgccaataaagtgacgtgagtatgtatggtttggtggctagacatggcagtataacttttgcctaaaatacactcaaatgtgagaaagggagttagaagtaatcacaaaaaatttggcttgaaaatcatgttgttttaaaacttaaaaacatggtttagtatataataatcaacttgctcttactacataaattaaattaggcataagtcaatatataattcgtttttaagttagttttgattgttccccatttaaacttttctttgatatatgttcacaactatatttttttagtgtgtgtttcataatgaataaaataatagattaaaaggaacacaaggagactaacaggttgatttgcttctttctattgattctccattttttcacatggttcacatgctttcataattttgtaatggagttttaatttacttgctttacataactggtttttattgttatatttttaattggttgtttgatataactagttttttgtttttagtagtttaatttttataagttatttctttaagaatttttatatggtatcttagtattttttttatataatatacatgttttccaagtttgtcatattttatttattttttataagaggaaaattggttttataatttttgttaggattttgtatgagttcacaaggtttttttttttttttttttttttttatttttntttttatggttt

SEQ ID NO: 263918 - DNA, 594 bp, Cannabis indica
aacattaaatgttatttctgatctatgttaataagtaaatctgattatattgaaattagttttatttagggcataaaacccaacaatattaagcttgatggatgtttattcgggctgcaatcaaatcaagatgcatccaccagaccaagaacatgcaagtttccaaacagatatgggtctctactgctacaaagtcatgccgtttggtcttaaaaacgccggagttacataccacagattggtcaacaagatgtttaaagatcagatcggcagaaatatggaagtgtacgtggatgatatgctcgtcaaatccagaaaggctggggtgcacatagacgacctggatgaatgtttcaaaatcctcaaaaaatatacaataaaactaaatcccctaaaattctcctttggagtcagctcgggaaagtttctaggcttcatcgtcaatgctcgaggaattgaagccaattctgaaaaaaatccaagccctcctggatatgaactcgccaacaaaaaccaaacaggtacaaagcctaactggtcgaattgccgcacttaacagattcgtgtcaaaatcaacggataatgtgtcccatt

SEQ ID NO: 263919 - DNA, 779 bp, Cannabis indica
attccctaaaagctattatattaaactatatgggacccgatacttaattggatcaataacgatattaacataagatggtactaggcaccactggtacactttagcatttctcataacaatattatactacatctcacaagaattttaagcaccagcatagatatcttttaagacttctcatttattatataggtcaagttttctattacatgcatgaataagtagcgcgtgtgcaagtcacgtgtttactatcaatattgtatcatttaaatgtgcgtttcgaaaatcatagatgcaattgaaagtatgtgtaattcatagtcataaataatgagattttatgtgatgtaaaaattaatgtaattattggaaaaaaaataaataaaaaaaaaaaattcatttgaatatcgaaatagatacttaaaataatatacaaatatacttataaaatattgagaaatgctaaaactatttataggtgatgttttaatatatattttatgttagtcatggactcatgtgtaatataacctttaaaaaaacttttgaattgagaaaattaaacttttctctttctcacttacctaagcttaagtttagatatttcagattatatagatgaacgcaaataaaatagttaaactgagaggaaattaagtacttttctatttgaataaactcttagcttagcataatgagatgaaattttgacattactcatttgatcaaatagttatttatagtggatatgcatcaaaagcaccagtggtctagtggta

SEQ ID NO: 263920 - DNA, 562 bp, Cannabis indica
attttaagtatttctaatttaacccctcaataaattagaaatatcgcgtagggtatctacacatttagctcatgacactttaatacataatgacccacaattactaaaatgatcactttattttgggctaaacttcaaatagcaatacactaatatacatatgagtccatattgaggattttaatccaacattattggtttaaaacattgtttttttacacataaagagaggtggttttggtcattttggtgatgttggtgaggtttaactttgtctttttgtagtaattgcacatgtatttggtatggatgtgtgtgtatgagccgagccttagctttcttacttgatactttgtattgaataagttaaaacttatagggaccactgattgtttagttcatgacaaatgctcatattatattctattattttctttgcagagccctttagtaccttatttactctaaaagtgcatcacaaagggagaattgattacacacttaatattcctactagttacaatggtggggtagttgagtatgttcatgttgggttttatgc

SEQ ID NO: 263921 - DNA, 2352 bp, Cannabis indica
ttgaagtaccaggcaaccttctattggaaggcatgcaatttgagattggcttgatctcaaggtgttgtttacttcttggtcataagttatgagacggtggctccatctctacaagcatcattgcttcatagccacacgcaaatgcaaatggtgtttgacgattggctgtcttctcagtggtcctgcgtgaccagagtacttctgggagtaattcaagccatttaccttgagggtcttgtttatagcttccactttcccattagtttgacgatgagcaatgacggagaagcttttgatgataccgtgtcggttgtagaggtcagtgaacatgtcactgtcaaactgtttcccattgtctgacataatcttatgtggtaatccaaactgacatatgatgttcttgacaacaaagtcgaggaatttcttggaagttattatcgttaggggttcagcttatgtccacttagtgaattatttgactgcgactacgatattgtacacctcctttacccttggggagttgaccgatgaggtctattcctcacacagtaaagggccaaagaaattgtattagtgtgagctcgttcggtggagctctcaagatctttgagaatctttggcacttgtctcattttttgacacagtccattgtatccttgatcatggtaggccaaaaatacccttgttgtagtatctatcaatagtcactcgaattttgtctcagtgacacaccttaggagtggcattgagaagcctcatctgtacattattccatctaggattaggtaactagtagcttttcacctcatttttcttgcctcatttttgttttcaataaagactccaagttggaggtatgctaatatgggcatcatccaggttggactgtcatccaacattttaacctcttttggaatggtaattctttgttcttttcagaactttattggcatgaagtttgccttatcggttatggtgctgcttgctagacgggggagtgcatcgactgttgcattctcttctttggggactttccttattgtatagccttttagatgacttaataagtcttagattttgctcaaatcagctatcattttttcacctcaggttgtacactcacctaggacttgactagttaagagtcactgtatatgtttaggtggtcagcctgtacttcatgtgctagccataggctagcaatcagagtctcatattcagcctcattattggaggccttgaaatcaaatttgatttctccatgcagttagggcccctaggtttaatgagggcaatgcctgcaccacacaatttgtcggtgcatcttccatcaacgtgtaatttacatgtcgattttcatgctcttgctcctactcttgctctcacttcttctctagctcttacttttcccttgaatcttttgcagtttaaggagatatgtatatacattgagcaacaaagtttgcaagagcttggccttttatggccattcttggttgatatgttatttcaaattggcgacctcgatagccctcttgagtaatcggcctaatgcttcatgtttctataacacctgtcgcaatggctagtcagtatgtcaacttctccatgagtgggtatcgactttcaacgtcaataagttttttgttgacgtaatacacaggatgctagatgccatcttcttctctaatcaagactgcactcacaacatactctatgacgaccaagtatattcctagttcttcattgtctagagcttttgataggatatgaggttgagataattgtttctttagctcttggaattctctttcacactcctttgtccattcaatttttttggtttcctctttgtgtgttgaagaaaaggacacacttgtctagggattttgacacgaatatgtgtaatgctgcaatgcgtcccgttagactttgtacttcttttatttttatgggcaacttcatgtctaaaagggcttgagttttatttgggtttgcttctattccactggcattgactatgaagccaaggaatttacctgagcctactctgaatgaacacttgagggggttgagcttcatgttgtacttttggaggatcttgaagcattcatttagatcatccacttgcccccaacctttttggacttgaccaacatgtcctacacatacacctccatattacgatcaatgaaatctttgaacatttatttaaaagtctctgataggtggcccgtgcatttttcagcctgaaaggcatgactttatagtagtacaggcataggtctgtcatgaaacctgtatgttcttggtttggtgggtgcatcttgatttggttgtaaccttaataag

SEQ ID NO: 263922 - DNA, 1012 bp, Cannabis indica
aaaaatgtattttaggccccgaagccggttcgaaccaaaatacccgattgtgactaaaccgcgccgacttatcaaaaaataccctcagatagatagaataaacatactatataataacatagtctataagcacgatatatcataaaattatgagtttacccttatcgggttaaaattacgaaaatacatctgacacaccaacggagtcttaaaatgacatttatcaatatagtttcacatattaaattatataataatataaattctcactaatacataattaatctaattagggttgctaatctaatttaataaacccgagagtattacagtaaagataaatgttgatggagctattttttaggctaccaagtcttttggtttaggtttcattgcttgaaaaagctctggtgacattattgaaattgtttcttctagtaagaatggccatatttcccctgagattgtagagttgattagaattaaataagcacttagttggattaagggcaaagcatgggatagtgttgtgcttgaaactgactgcctagttgcagtccaagctattcacagtcaagtatcactgccttctacatttggtatgctggtgcaagactgtcaacaattgttatctgaggtgattcatgttaagttgtgttttgtaaagtattctgctaataaggtagcatattttcttacgcgtaattcttggtatttgtgaggtcacacttttgttgctaacaattctccttttgaattgttaaaacactattttggctgatataaatttctaataaaagtatcttttccaattaaaaaaaaaggtattaggtgaaagtgatagcgagttatagatctgttgagggtttttctttatccaataaagttcatgtttattttaagaaatttttaagttaaaaatacaaattggtattttatttacaaaaatactttcataagacataggtaataattttgcttttaaagagtttttatttagtagaaattatat

SEQ ID NO: 263923 - DNA, 537 bp, Cannabis indica
gactgatctatccaatccaaaaaaaagagtaaatttttaatgttaattttcacacctacatatagatttgacgtataacaatataaaatctaataactcatccaaactaaatgaaaatacaaataagttcaattggatgttagatgtattgggtttttagataccccatctaccatccaatctgatccaattggatattttaaaataacattcagtctgatccgatcataattagatatctaatgtttagtggtcggttataattagatcggtcagttctcattggattggatcgatttacacacaccactaattaagacaacaaaattgtctatatataaaactaaaactcggttatttaggacattaagagtaagttttgatgtttacttaaataaataaataaaaacacagttctgacatacaaacaaaatggaataaagctcattcaataattgaaatgaataattaaacaattggtatacgtgtcaataaaactttcaaaaaataagcggtataaagtataggaaaattcta

SEQ ID NO: 263924 - DNA, 597 bp, Cannabis indica
aaacccctagcttcaactaccttatcaacacatgtaaccaagatgtttgtccacgatgtgtacagtccatcttgagggggggatattaagtatattgagtctcctgcttgtactgttatatactgttattctcattcttgacttagctggtttattgttaagtcaagtttcccttttcagttattttgtgttagaaggtagttaattagttagagttagctcttgttatttaggtgttagttttattgcttttgcttctgtatatatacgctgttctcgattgtattgtgttaagtcaatttcagattaataaaatgtttttctttctttctttctttccgcattaaattgttatgtaaaggtatgcatcttcttaaattctttacctacaatttgctcacgtttagctcgctataagatatttcaatacttaaaactaactactcaactgataccagactcattagtttttcctttgaataataccattaccaatttgaaaacttacaatgtaacgtccccgcttcaagcctccattgggcccttatacccacggactaatggctcttatacacgagtacgccactctggctgctt

SEQ ID NO: 263925 - DNA, 1490 bp, Cannabis indica
cctactccatctaaaaagaatatcaatccttgaaaatatatgagagtctctataaacatttatgcatatgagtcaatatatatatattttttttttttcaaaactaagattaaaggaaatttatctcttaggtgccgtttactttaaaagaataaaatataaaaataaaaatgcgaacgaaattaattaggaatatgaataagagtgagattgaatcaaatttaaaatatataaaaacaattgataaaaaaaattattaaagttaattagagataataaaatgaaacaaattttatttcattcatttatttgattgtattttgaagtattgaaatgacattttaatggaataattttttctattattttagtaaatgattattttaatttgaaataaaagggattactattccatttcaattttctttatgctactaaattttttctttcttatattggaatgatatttctttttattttagtattggtggaatagctattttattgaaataacattttaatttaaaatgaataaaataaaaattattttattttatttctattctattttattttattagctctaaccaaacacaaccttaaatatatataaaatggaggtgaattgaagcgttctcccgtacgccaccaacgtacattttattaaatattttgtaatttgcataagattatattatcaagtatacgaagttgtttcccaaaataatatacattatatggagtattttttttttattattattatttttgaaatcaatggagtattaaccttcaacattacctttattcgttaaattaatgtaccacctctgactttcaattaaacaatactgcaagtaatatataaaaatatagttaagaataaaactaattgtaattaaatttgttgcagtcaatgttcctctttattattattgttgttctctatactctcttttattaaatttaaaaaatttacatcctataccattttttcttattttatttcatttttattattacacaataattattattttactacgtatataatatttttttaacttttatttttaattttaggcaacaactcacgtgaattacattattttaataaaatatatatatatatgtttatatatatactaggtgaatattacgagctacgcaaatgttaattttatttgaggtttgaatttttatttttagattttgataaattaagtggtataattatttaaacgatttatattataaaattaaactatatgtcaatgtatttgataattaaactataattgtgtctataaacttatgacaagtacattttttttttataactggtgggtgcaaaaccagcacccaaccaaaacttcattaccaacacctcaaaaacaacagtacaaaagatcgagatccaactaaaaaaaccagatgttacaatagtcacattgaaccttcgaataagttcgaaaatctcgaaatgatct

SEQ ID NO: 263926 - DNA, 737 bp, Cannabis indica
gcataaaacccaacagttattccctatcaactctctaatagacggaaaaagaaaactaaatataaatctcaaactattataaatatccattgaatgctcggattaagggttgaattttcttgcaacacttgctcaggaaaacttgagaacatatattctttgtactcctaaaggctttttcaagctaagaactactgaataatactgactcatggactaaggctaattaacgccccaaccacgtaaaatttgtttgtctctttttattccttctttttttaaattatgtgtttctttagttcttatcgtttataatcagttttcgaaaatcacgataaacaagagggattgtgtgagtcttactataagagacattgagaccgccaatgaaattttcacttgtaaaaagatccgcaaaagatgaaaaagtttgaaaaaaacatgaagggaaaggagatggaaaatcaggtaataacttccttctgcttagaagtagaattgtcttgtaaagaagattcaacattagttgggggcagagggtgtggtatagaactagtggtcaggcttcgattaaggttatttccagggatagaagaaacaatagtcttgcaagccaatcatgtgagaagtgggtaggaattcgccttggacaaactattgttgtatctatcataaccagagttgggcagcttgtatcccatcatatatggtctatacggtaggtcgagatcaattcc

SEQ ID NO: 263927 - DNA, 779 bp, Cannabis indica
agtttctacctgttacatatatcaatttaaataagaacaaagacaacaatgtataaggaatttcaagaaataatatacaaaggcatacaaaattgtcaaatatgcaattcaatggaaggagtggatgaataatgttcataaccacaaagaaaaagatcacggtttgtagcaaaagttttacccttcaatttaaaaaaaaataagttaatactttatagttgttagaataccaaaaattatatgagaagaaagctcagagtgtcttcaaatatatctttggtttgaaactgaaatgccagatattcatattttcttgcataagcattaatagtttctaattttaccttgtttgtacaatctatttaatgacaaacagggaaacataaaaattaaattaaatgaattaagacatcttctccaaccacaagagaaatacagcataaaattcaaactctccccccaaacataaacccaaacataaaatccacgaattcattgagttaaactagaatgtcagtatttcattcccatgctgctctagtaatcttacagaacaagaatgaactcttaccaaatccatggattaaacaaaaacatggttaaatttttcatcaatcaaagcattttttctcttcttcaaatacacattcgaagccaacataatcaaataataaatcctattaaaaattgacacaatcgaaaatacattcagaaaatcaataattccaaattcaacctaatcaacaaaaatatcaccacaattgttcctttcttatcaa

SEQ ID NO: 263928 - DNA, 816 bp, Cannabis indica
ttgtacatgactcatgctcttcaggacatacttttattgttttgaaaaactattcatctactctagccaactactagtcattgaatgaacagtaaaaagtaaagtgtataaactaaaaattaataaaaaaaatattttttttgctgtattttcgggtcacgggttagaacccgactaaaaaaaaaccactttttaatatctaaacccgaaacccgtgtggggtgatttcgggttgaacccgacccgaccacacgggttttaatgtttttcagtttttttggcagcgggtcggggtgagtggccgggtttttcgggttcgcgggtctaaatgttcaaccctacttccgatcctcaggcccatgccatgaacaatgctgctcctacagctcaggcccctgccccacaaccccctgcaactagatctgggaatccattctcgaactctttgtcctcttccctcaccattaaactcgaccgtgccaatttcctgtcctggaaatctcaagttactcccaccgtcatcggacatgatctcgatgagatcttgtttacaggggttccaccgcctcaaaatcttatcgacaatactccgaatcctgaatatatttagtggagaaagaaagatcaacttctgttatcatggttgcgttcatcatgtctgaatcgattcttgcatctgttgccaactatgccacatctcactctgtttggcgtgctcttgaacagaaatttgcttcataaacgaaagctcgtcgtctccaactcaaaggtcagttctcccatgtccaaaaaggaggtttatgttgggttttatgc

SEQ ID NO: 263929 - DNA, 504 bp, Cannabis indica
agcttgtatatttgactcatgttgactggactgctagtcacgtagaccgcattgtgactccaattgacttttggatcacaaaacagtgcaaatcagtgtacaagtggattcgagaccacggtggtcacacaagtggaaaggtacatttactacttcaattttctgatgcgttagaatttgatttgggagatatgctaactaatttttttggtgtactaagcaggtgaaattgactaacacctatgtgttagtaccaagttttgaatccggtgcagttgggcaaccaacaaatgacgcaatatacaaagctgtctgtgagttgaaagatgaggtcttccgccttgatttgaaggtgaacaacacaaaagagctgttactgaaggtagtctcaagttaccttggcaagggtaatataaatgaagtgtttgagataccttagacgagcaaagttcagcgctcgctttctttcaagggggagaccaagaagaaggatgatgtgggtgt

SEQ ID NO: 263930 - DNA, 537 bp, Cannabis indica
gcttgaattttttaagattcgcctctatttccctttggctgacgatgaatccgaaaaatttctctgatttgaccccaaagtgcacttcttcgggttaagtttcattcagtaccttcggaccacttcgaagcattctaggaggtcgtccgcatgacttccacacactttttatttgaccaacatgtcgtccacgtaaacttccatatttcatcccagaaggcctttgaacatttggttaaccattctctgatatgttgcaccagcattttttagcccgaaaggcatgaccaagtagcagtatacccccttatcgatcctaaacctagtgcattcttgatctgtaatgtgcatcttaatctgtatatagccagagtaggcatccatgatggataatagcttgaaccaagaggttgcgtccaccatctggtcaatctggggtacagggaagcagtcttttgggcaggcctcgtttaggtcgatgaagtctatgcactacccgccatgtcccatttgtcttgggcaccagtaccggattgg

SEQ ID NO: 263931 - DNA, 546 bp, Cannabis indica
ctataacatacttgtgagtagatctaagatacctggtaaaataatttccaacaaaaattgcatcactataatcattttataattctttagttgtattcacaaatatttttgacgataaaaaatattacttcatgaatatttgctaaattatatcgatattagattactatttattgtcctcaaataatacaagaacatatatttgaatatgtattcatctcttttattatatttcagtcagttgtatgatgaatattatatttgcataattttcaagatatatgcaaaattttattgaggacgcataatctttatgatatatgcaatattttttttgttatagatacataatcttctggatatatgtataattcatatacattttctctatcatatcatagataaacaataagagataaaatatatatatatatgaattcaataataaatatatacaaatatatacatgcatatataatatatagatatatagataaaaaagaaaagaaaaaaggagttatttaaattgtttcagttagataagta

SEQ ID NO: 263932 - DNA, 581 bp, Cannabis indica
tgtggcctctgtaaatttttgattgcaactccgctttattaggtacacacacccttgccttgtatagtagaatgccctcttcattaactaagaagtccctggttttctcattttgtagttcgacccgcttcttgattaaaaactcatgttgggcttgttcttctttgatcttctctgataaatttgattcaattgtgaggttagctagctttcctattagtaactctcccagatctctcgatttcctgttgcaacgacacttttaatgcctttaacattcacaagcttacatagttgcgtctactaagtgcatccgccactatgttagcctttccaagatggtacagtatctcacaatcgtaatcttttacgagttccaaccaccgcctatatctcatgttgagctctttaaaagaatactgtagagaaggaaagactatagataggtctccccttactctatttcctaccggaaatagcggggagttctcttcatcgttacgaaagaagtattttaggcttttgtgatctgtgtatatttcacacttttctccatagaggtagtgcctccaaattttcaa

SEQ ID NO: 263933 - DNA, 1485 bp, Cannabis indica
ctgtctcattgctcctttgatttgtagtttcacaaggaagttctttttatgttactttttcttcattctatgtaattgatccttttcgcacctcttcattcaaccgtgaacttaaggtacttagatcagcttggaatggcagccgtgtataatactaaagtgtattgcagacaatcactaattggtggaaactatggtctccttgacaaagacacatttcttcccaaccccgattactacaggttagactgagcgtgaactgtccataatctgatattctaacatttttacttgcttctattatctgaaagacagcatctggtattgtattttggttttgaaagtgcacttctatggagccaactaatgggagagaacgttctttcggttaagactgatgcatcgccatttctacgcatttatgcccattgtgccaaagaaagagtaagtcctaatctttgttatagttttgtttgtcatacaaatatcacaaattcacaaagaagtccatctggctcaattcttctatggtatattcacaaattactcgtatcattatctgattttacaagagtaactagccgactaactaaccagcaactgtcatcggtgtcattacaggccgggataactctacttctgatcaacttaagcaaccagactgaattcattctgaaagttgaaaatgctttgagtgagttggttactccaaaaactaccattcacacacaaagttctttcacccgtggcatcaagcgaatggtttcttgggttggaagagaaacatcagatgagccattgtacagagaagaataccttttgacaccagcaaatggaaaactgagaagcaaaacaatgcatctgaatggtactccactggggattacaatagatggtaacatcccaaaactagaaccaacgcttgttgatgtaaactcaccactctccatcatttctaggtccattaaatttgttctattgcctaattttgatgcctcagcttgtgcctaattctctcatggtatatacctaaacttcattctcactatattgtttatttttattgcataattgtaagcttataaattcaaagtgttgtgatgaataaaataaaatgatacaaaaattagtaccctacatatacattgtatatgaaaaattaaaaaatttaatacattggatctgcttgtacgtttcagtgtctgattattaaatattgaggttattgttaattgttataaagaaaaaaaaaaactaataatcattgatagattaacttgtgctgtttggtaacatttttgttttataatttcttaatcacaaaatgaaagtaaaatttttatttttaaaaattttatttttgaaaaacaaaaatacattctgcaaccacttttgtgtttcaattttaaaaatagaaaataaaagtgtgttctttatttttatttttatttttattttttggattttatttaagttgagcctagg

SEQ ID NO: 263934 - DNA, 509 bp, Cannabis indica
tgggttgtcaaaaacaaatgcttggtaggttctacttgttttaaaactattgcttctaacatgtggtactttgatagtggttgttctagacacatgacaggtgaaaaagaatatcttgtgaacattagaccaatgcaatgtggagaagttacatttggtaacggtcttactggaaaagtcatagggatgggaactctcaagtttgaagggcttcctaaactaaagaatgtcatgttggttgatggactaaaagctaatcttcttagcattagtcagatttgtgatcagggttatactgtgagctttgatagtaatcattgctatgtctataatattcttgatgaaattgtcttacaagggctgagatctagtgataatttttatactctcactacgtatgctacttgtcattctgtcactgaaaatgttactgatctatggcatgaaaaacttggtcatattcattttaaaaatctgaggaaattatctgtttcagggattgttcgagg

SEQ ID NO: 263935 - DNA, 2051 bp, Cannabis indica
aaaaaaaaaaaatctttttaagaatacaaatatttttttactcatattgaaaataccatatttttatcctaaataaaggtctaattttcttttttctttatagtccactaaagttcagcattggctttctagatcataatatgtgtttttattgtttgtgttattattatgtataaatataatattttatatttgtattttataaaagttactgatcaaatcttttattttgttagatgataatcatatttctgttcgtactaaaaattgacttcaggtttattttattaatgataaaatgacaaaaattaaactgatgacattattttgcattattttttaaaaatatagaatttaaattgtcatttaacaaaacacataacctaactgataacttttataaaatacagagtttataatggtatttacaatattattacaatgaagcttataaaatttagattccaatgtgattattgaatcaacacaagtagagtgagaatattttcaaaaaaaaaaaagtagagtgagaatatgttatcaagtgatgacacatacctcaagagcttatggtgttggaagaatctcctaggctagaaggagtgtaacgtccccgcttcaagcctccattcattgaggcttgaagcggtgatgttacaaggagccaaaggctaaagggctttaaatgagactagttctcaattggagtctttctactaagtaatggtgaagaaattgttagagaaattcctatggtattgcctctccaagtctcttaagattttttgtttttagatttaaaacatgccaaactacagtggacaatcttacaaagatgtcttaattaacaattctatcattaaacaacaaatgaaacttcattgcaggaaacttctaacccattgcaccatggccacatattatttgttcaaaaaaagaagaaatgtaatgaataatgttttagtttctgccctttacagcaaaataagaagacaaaattggtgtccacttttgaatagtttacaagtgcagaagttgatttaatagcattgacaatataagcacatgcattctaatctcaaaaaccttacaataagataatgaattcaaatccatgggcatattactttccatataccaatctatgggctataggtggtatttgaaatatctataattagaatggagttaaaaaagagaacaacattatcattattcaattgaataccaggctctaatttcatgtctcaatgcctagctcactctctcttgttggtctctttgtaaaattgattataattgagaccccacaactttgaaccaatatatttgtggctcacaattggatgcaccacctagatcatctgcacaccacaaacccaaatagattcaaatttttttcctttaggttatgtcaaatgtcaccttaatttggttacccaaattctttttggtactacatgataccttactatatacaaaatccatcaaataagggacaccaaccccacaatggatagtgatttttatcaaaatggttactattcttaaagtgcacaaaagatatggaaaataattgagtttttgatgtgaatagttgaaatttaaaatcgataatttatatgaacaagttgaaaaatggagaaagaaagatagttgaatcatttttttttatgtttctttgtgattttatttgacatatttggtatgttagaaataaaacagttcttatttttgaaacaaatgattcttaattagagcaattcttaattagagcttttttatatatttaattcttttttgtgtactttgtttttgattctttttctttctctcatatattcttttatttagttaaataaataataattaaataacgaaaagacacatgtagggtaaatttgagataaaataaaagataaattgagtttgatataaagatattaatggaagtgcacttagttaggtgaagtttctattcctaactaaagtgattatatatataaaaaatatcaattaggatttttactctgaactttgacatgtatcaa

SEQ ID NO: 263936 - DNA, 1747 bp, Cannabis indica
aaaaattactaattaaccataaataaatatacatttcatcgtagctgatcttggacacgactactaactaacaaccaacccaaagaaaagtgtactaaaattataatcatgaaagaataggacactcaactcctagccatctactaaaccccataaatgtacgttgtatcacgttatatattcattcattacatagagatataatgaattattaagattgaccttatatactattacttggaggagtccaaatcaattttggcatgaaatatacataattccaaagaataatggggagagagagaatcatggtcatgtaaatatttgatagctctaatgaccgatatccactagatgataacttaatttgtaatatcatccatacacttgtcaggtatgacgtctatgcacctgtcccatgcattaatttgcagtgagagagccagggacagttagaaatggagttaatggttgaatttatgggtacaaaattaacattcatctaccaccccaagcgacacactataaattactatgagctcgtatacaattttcttacgatatacattaaaatttagttccattctacatctctcaacacacacacacacatacctctctcaatatactgctggattacaatcatggagttccattatttcccatacatcctagcttttgtcacagtaagctgttattccaaaactaataatcttgttttgtcatcagctactcattatatgctcttctcgttccgttttttttttttaacttaaatatatgtagcacatgttgattagttgatatacgaactaattatgtgaatcacatatctatatatatatagttgacgtttgcagtaagccatgcggtgcagtctcctgagctttattggaagtctgtcctgccaaacacacaaatgcccaaagctgtcactgatattctacaaatgggttggtgctagaaaaccgacaactcctctttaaaaatttactgacaatatttcttagataagttcataagattattatcatgtctagaggcgtgacccaaacatgtagccgggccaaaaatttcaacatttgcttttttggaagagaacaattttttttttaagatctaaaatttttttcccatggtgggaaacctaaatccctgtttctccacccttgagttcgggctacgtgcttattcattatgattaattattgcagtcatctctaagatttgttcaaacttataatataaatatgtatataattatttaaaatgaaataatcatgcagggttggtcaaagtgttagaacatggtagtttattagatagtaaaatgaaattaatatttgtaaagaatattcttttttggaaatatattaatagccaatgaattgtcaaaatcaatttttcacaatttagtgattattttttctcatcaaaattaacaatataatagaaatttagagagtaaattgtttgtatacactttctatctgaaatatgttaacaaatcaacacgtacaaacaaaagctgtcatagataaattataattttctgatgattttgtagatataaccgaagataagagtacctctgtcagtgttgggaaaggaacaggtgttggggtgagcacaggaaaccatggcaaaggaaccaacgttggcgttggcaaaggaggagtttctgtaaacacaggaaagcctggcaaaggaactaatgtcggcgttggtaaaggaggagtttctgtaa

SEQ ID NO: 263937 - DNA, 651 bp, Cannabis indica
actctattcaatgaatgattactttgactcgcctaccgggacacatgtctttgttatttgctaaatgctaaataatttctgaattgtgtgtgaatttatattgaaccatgttgttttctgttattaattatagttgtaaatttcgtgtaaaataagaataactttgactctcgcctaccgggacattgttggattcttattttaattgaaattatcctaatttttcctcttagcttattcatttcgaatttgtttacatagtatatcattggatgaatggtttataaatcatctgcttatgatgtcattctattttcttttatgaaattgagtggtgcatataattatattttcgatattctatcctgaaatgatataaatgttgggattttatgccctaaataaaacccattacaatgtattctgatttgttatcaataaaagattagaagtcatttatgtttacatgtagttttcatgtttgtggtttaatatatgtacaaaatctgttaagtccagaacatatagtcatttacaattacagtgatgtaaacacagtgaaatgtgattgtgattatatgcttcgaaagacaaagtccctgtttcattagtgtattggatttacactgatgtgataatcagcgatgaagt

SEQ ID NO: 263938 - DNA, 747 bp, Cannabis indica
tttctggcgactgtgtcttttccgtcaacattgatttttccagtgaattttccggtaaaacttattgctgttttacaaatatgggattttcacctttttttacaaaaatatgacataagaaaaacccatacaaatgtaaaaaaaataaaaaaaaaatccataaccctatagtgttatttatttataccataaaaaagtaaactatatcctcaatttccatatttatgaaaattcccctaaattatatgaaatatgggttttaaaaagtttgttacttaaatgtggcagttttaagtttgggtaatttttattgtattttttctattttgggcttttatatgagtttggatatgccatatttaggtaaaagattatttcaaatcccatattcaagataaaaggaatgagaatccgaaccctaaacgctattttctctctctccaatcggctctactcttttacaaatcatacccatcgagagagagggacaagaatactcagagtagtgaaaatgaatatagtgaagaatgatattttgtattttgagcttaatactggagctaaaataccttcagcaggcttggggactcgacagttggtagccgatgcttactgccaccattagggttcttttaattttttttgtacttaatcttatttaaattgattgacgaatgtaataagaataatattttataagctaatggtaattttgtataattttagttctctctctctatatactct

SEQ ID NO: 263939 - DNA, 5472 bp, Cannabis indica
gcctctaaagagagatctgaagttcaaggcatttgagcattgaagataaccagaacatggactagcacatttgagtctaattaacacatagaaacagtatatcttactgaagggctaatctaaaagcatgacagattgatatatttgctacaaaattgaagatgaattttgattatacctcaagtttgcttccatctggaaatgtctgccaagaaggtatcaactccacaatgtgatcactcacacaaagaagccattccatctctcttcgccacatcattttcttctcggacggtagaggttctaacctccaaagttgcccaaatagggtagctacacgaaggaaaaagggaacagcataagattatcatacaaactaataaactttagttaagaacaaattagtcctaaaaagctaagcttttaaagaaccaaagttcattatatagaccacattaccacaaagattagtaatggcattggatatagccaatgccgtagaaaccccatttccacaacccgacatatcctctccaagcagcaattttgagaacctttccttcatcatttcaatctctacatgtacataagttaatcagatcaaattaaacattgtaatccttacataaacgtgtttctaaaatatagaaattgtgaaaaagaagaagaagcaaacacaagctatgccatacctgacactgatgatccttgtttctcaagttttctatcatccaaacaagctttctctttggtttccttaccactactgtgactggtgcaatctggtgcctcagatttctcggcagaccaacccaatgtggccggagaagatgactcttcagagctactatgactatgttcttcatgccctgtcgtctcagaagtcaaaaaatcagaacttgaactgctctcacgacccttttccgaaattattaaatccccaaatgtctccattccaccaacatttttatcaaacacttgacattctttatcttcaaccctttctttcttcacatccaaactctccataccagctctcccttgaaaaaaaccaggcgaagccaagaaaacagagttgttcaccaccgtaccattaaaccgaaaccttctcgaacaacagccacaaccagtgccaccattatccaaaaaccgaactttacagtacaagttgcgaatattcctcgagacccaaaaccccaaaacagcaaatgggattggactaacacagcttctgagcttcgaccttggatttcccagatgggttttctctattcttccctcctggcgggtgaaagctctttccatatggattcaaccatgtttgaaactgaagggtttttcacagagaaatactcagagaatgcggtagaggagcgttccttattaatgtgaatagttgtaatgatggccaaagcttgcttaaacacatgaagaggagcttccttctcttactacgagtctagtaccaacatttccattttcattgatttaaagctcactcttttatttatatatttattatttgttattattatttttcttatttattgctttagctttagttaaactatggtcctaaaatgataagtacatatttataaatcgaactttggtttgaaaaatatactaaacaaagttcatgggagtcgtgtaaacgacggatccctcaatgatgtctcttacccatttttttttctttttaatttcattagtcatttacatattttctgtagtttaatagtcaaagccaacacaaatagggtttgtgcaactttacaaatttacccttcatgggaaattaccaacacatcccatggttgaaactcgactagatatggttgataatgtgcatattatagtatttttttgaaagataaaaaatatatgatgaaattgtgatgattgtttttccaaaaagttaatgcatttttattaggaatgaaaccattgagataagcatattttttaaaatttggaatactattaacattaaacatagttaatagttaagagagcttttacttgagtgaataacacacctaagtcttaagtgaagtttgattatttgagtttgagaagaaacacctttatcacttgcgctccacattgtctcttacactaatgatgttctaagtcatttttgttggtaatgtaaagtgaaacaaagaagattcttttaaccctacagaagagtagaagaaggtacaaaatgtcagagatgctaaataatggggtctaagtgtaagttgagggaaaaaatcataaggttaaaacaatttttttttttaacaaaagacgatatattaaaaattaaaagttttaaacctgatggttattacaaaaaaaaattgtaagaatagcatcaacattgaaccaaccatacatgttgtgggtgaaagcccattttaccacgttaagggtcaaaaagttataagaccgaacaatattagagaacaaatatcccacaaaaaaagaaaattatagtgcttttgtagtgacacgtataattattaattttcatctcgagtcaactccattaagagaattgatcactacccgaaaaaagagaaagagggaagaacgttttactgccacacaagttaataacaatgtatgctcatgaggatatgtgtgtaaattcacaaattaccattggaaaaaacattattttgtactaggtattattcttatttgagagataggtcccagatctaatatcacccggatgatgataagcaaagaaacaatgcagaagaatggaaaaggcatactaggcatattggttggttctcagaagccagagattgataatgctaagatgaagagaaagtgatatttttgtcttgagaagaatccaagggacaagggtattttggtaaatccaagtatgcatttaatcatctcatatgtaggttaatttactaattttgtagatctaaagaagtaaagagaatttaaagattgctcattgctgtattattatgcatacggctcagtagtgttcataagttatactagggtgtatactataggccattttttattttatttgaaaactctttagaccattttggaagctacatcaatcaattatttttatgacacttaacaaataatgctttaacaatcaatgatgccaagagcttcaccacccatatgtaattgagtacaattttaagttgctataatcacatgataatgttaactatattggaatgtgtcccatggatctttaacccactttgaaagcttagatatacatatatcacttttgaggtataaatgagatcctaactacaaacccatccccaaaagatagagatagatatgtagatagatgtgtatacatacatatgtatgtccatatatatttatatgtatatatatatagagagagagagatgtggggtaatgtgcatatgattaaagatgacaagaaaattgtagaaatgccaagagagtttggtgccttcgtgttcaatttccccaatcaaataagcatatttgttggtttcttcagacaagttcaattcaaatgccacattggccatttctttatctctatctctttctataagaataatatatattatgatgctcccattgtaagttttgtttgtataaagtctacttttcaatcaaaacccaatacacacattaattgaaaaaaaaaaaaaaacaaaaaccctttttagaacgaatttattatgtacaaacttaaattgttgtagcaacaacggttggtcccttaaaataaacttgagctagctagtagttttagagagagctttgcttatatcccaaaatattaaaaaggtggggatgagttgtagttgtagctgtagttgtggttctcattattaaaaattgaatcataaataactactactagtagtggtacaatagtaccatagatagactagtttctaacctctaccactttttctaacttaccttgtaaggctttatatgtattccaatccaaatctctattacaatattccataattttcatatatataatatctatggtccccggttgttatactaactgaaacaaaaaatgagaaaaaaagaaaggttcttctcaacggctatagcaatttgattgtgatgttgactaaccatttgaaaaaatggtagagggagatccatgagaattaatgtctttattttcaagtttgttaattgttgtgattctactttaaagctattgaagctccacttttcgatttatcatgtagtgtgtgtacacaaattttcttttggaaaggtaaaataaaatactaataccaacccacaaaagttagataaaaacaaatcaacaaatggtgggattgaattaatgacaataaacttcatcattagattacaactttgtaagtaaatactaccctataatcacactattcttcttgtacaaaaaattcataaaccgcccgaatcaatcgaaaaaattaatgaaaaattcaaaccgaaaaaatccaaccaaattataaagtgcccaatctgttaattgggttagttaaaaataggtataacctacacaataaacctgatgtaacccgaataaatttattcttttttactttttaattttataattttctctttaattttattataacataaataataatacataatataattataaataaaaagaaaaaacactccaaatggtcagacttctctcactctctatttctctctccactgtatctaacttatctatctaattctaaatctcaaagactcaaaacaaaccatcttcttcttctctttttattatcgttggtgtcgtcaacactaaacactcagcacctctgatgtagtagcaggcagcgggaggagaaggctttccatcaatccacccacccaagaccatgtccgtcgccacttccagcagtgtccctgtcactccaaccacgaactgtccgaaaaaaatacaatggaaacactactaaaatactcaaaatacagtttacatcgtcgggtaaagaattctcgacggcttgtaaaaccatcgcctgtacgagtgtcgtgaatactggatagaataggcgacgatagcaaaatttcagtataaaagaattctcgatggtttaaaaccgttgcctatactataggtgacagttttaaatcgtaacatatagtatagtcaacgattttaaatcgtcgccatagtggatttcccaaaaaaaaaatcatcgcattcatcctcctcaaaaccaagatgggagttttgtttggccttaagagctccgaagagtcgagatatgggccatggttttgctgaaaccacaacccagagatctcggatgatctataaaatacaaaaatctcaaaaatacataaatctcaaaataaaaaataataaagaagttatgagagagagagagagaggattgataggtggtcatggtcgctcgtggtcgcgcgtctatcttcggatgagagagagagagagag

SEQ ID NO: 263940 - DNA, 1632 bp, Cannabis indica
agactttttagtccttaatcttttccttttccctcaccgtattcccttttatttcacattatcctctagtatcaattgggtttgtaataaattcttgaatggaaaaaatcaatgtcaaaatcaagcaagtgactccacttttccaagtggccttggcaatattagaattattatgtagcattaacctagtttgcatcttatttcaatactttctctacaccatcatgtctttagtccatcattttacaaaattctagatttatcacacaagttctttattttgtgagaattgatgagtagtattttataatttataagctactacatcagttaatactttaaattagatattgaatatgaaaagctacctaaataggacaaagttttgtgaattagtagataaatacgaactttctttttacctagaaaagtattacatattataatattatttcaaagagtattagaatctttaactacttgcactactatctcctctgaagaggtgacaaaacacaaagtagtgcttttcccattgaaaaaattatatggatatttatatatacatatatatatatatatatttattagtgtggatgtatctagctaagccattttagagcacttgttagatatatcagagtcagacatatttgccctcaatcaacaaagtaaataaatataaatacaccattacatttctttttataagaaaatagaaaaaaatactctatagatattttgctgttaggagcaaatacaggccacattttatgtgagatgagttgggtatgggaccccaaaatgcacataatgccataaatctctttggctctctccttgccttttgctttctttactttttgctcttttcttttaatgggaaagcaattggtcatttcttttcatccatatatatatatacctcaatttttcattctttagaggatttaaccaactactatatgagtgatggttttcttaccaagtttaggaatgtcaagcgggttgggccagacttgatctgacttagacctgactcaacatagacccgacctagcatagacccgacccagcttgataacactactgtcgattcggcccaaccctctacgactcattagcttggtgggtcaggcccgacctgagctattcctaccatctgtttttaaatttatttatttattattattattattattattattattattattattatttatttttaaaagaaaattcattagtatattgaaatagaaaggaaattcttatattaatttatgccactatgtctatgccaacaattaacaaaacttttgaccttttattttaacattctaatctcatacggttttcaaaggattattattagttagatacattcctacattaatataaaaaactaaattgaaagaaaaataatgcgaaattgagaatattctcaagtcccaactctaattcatcaacttcaaaaaaagtttcatttatacttttgaattgaagttcaaatatcaattacactcatacgctaaaaataaaaactaataatcaaataatatatattttaattatcaagatcaactacgtaagactcctaaaaaaaatagtattaataatataaactaataa

SEQ ID NO: 263941 - DNA, 528 bp, Cannabis indica
acatacttttccacataataattctagtaataaatagttgcagtactaattactattaattatgttattttgaacacatcattatataaaaatgtgcatgtgtaatttattaaatgttttacgatcaataattaaattgttatattcacatataggaggttttaataattttatttataattttattctagaaatacaatcaattaatatatgattcaaatttaataagtgaaagttacctcaaaagcttaaagatgtgggtagctttttaattccttgtgagattggtggtttgaaatttgaaaagtctctatgtaatcttgaggctagtatataatgtcactttcggtattcaaaaaatgaatatattggtgaggtaaagtgcacaacaattttattacaattggcggatcaatcattcacttatccaaggggaataatagaaaatgtgctaattaaagtaggtaagttagtatttctagctgattttacggtactagacaaagaagaagacaaggatatgtcatt

SEQ ID NO: 263942 - DNA, 1080 bp, Cannabis indica
atgttttttaacatgtgggtttttggtggtgggattatccatcaaaaatcaaccatatagtattataaagataaaaatgggaaaaaaaattgagaatatacaggttagtacaatgatcaagaacatgggccaaaaataccatcgtctataaatcaatcaattacctccccctatagccaagctttgcaaacgttaaagaacataattctcattcgaagagctccaccatgacccacaaaccgatacccaagccatgttcttttatgggctttttcttttttggaaccatgccaagtcaaaactattctgcattttaatccaatctgaaattagctaaagagcaaagatcaattctgtaaaatttaaaatggtaactattatgcacttaaatattgttgaattctctacaagttccaacaaattccaccatatacataaatatgctgcttaaattcctatgagaggcttacaaaataaattatattaaaattttccaattggaaattgaaaagaagaaaaattatacattgaagtctagagttaataagagctctcaaccatctctacaaggaccggcttcctgctctgctttttgcagaaaagcaggatagaaatccatatgtacaactccgacaagaaagagtcggtcttcttcgccatgccctcttagtcaattaaattactgaacatccgtgccccgttgcataaaaagacaatggctcggattatataaaataaaataaccaactactcttaacaagcagcagaagccagatcaaaaatgcattcgtgacacctagtaattatcggaaaatatataattattaatctgaaaacaaaagaaaacaatatatttaaacctgtagaagttttgatcataacataccagaaactcaatggtaacttggtacacaagttcatctaggtcgccagaagttcggacctgaaacacatacaatgttcttaagcctgtaagatctcgtagagattagctattacaataaaaatacaacatcagattccagatccaatctcaatcaaaaaaaagtaatcccctaaaaccaacaatataaagaatat

SEQ ID NO: 263943 - DNA, 862 bp, Cannabis indica
tactttggaaatgctcagggatgaatggacaagccccgtcacactccgctccgtccaaaagtttagccggtccttctcaaggctctcggagcaaaaggtcctcaaaaggcagcaaccggacgaaggataagcgacagaaaagggggtatactcgccaatatacccaatacacagagctaacggactgccaagagcgtgtgtattttgctaccaggcaaaacacgcactactggagaccgcctcctctatacaaagacagctcctggagggaccccaataaaagatgcgagtaccacaacgacattgggcacaacaccaatgaatgcaaaaatctcaaggacgagatcgaaaacttgatccgattgggacatctctatgagtggatcaagaaccggttgccccatctcaatccggttcaggcagcaggagctttgcctcaaggagcaccagggggtgtagcaggagcgttggccccagttgctccccccggagatgcccagcatattcctggcctaccaccaagacccaacgggagagtggccatgatctcgggaggaccgcacatcaggggaactacctgtaaggagctcaaacgatacgcaggggccgtaaagcacgatgaggtttgggaggttactcaactcccagctcaaaggccccggctaatggaccagcccattacattcacagaagaagacgctaacacagtgcgttttcctcaccatgaccccttggtcatagagactcctattgccaataagatcgtggccagagtcctgatcgacaacgggagttctgtgaatttattattcaaagaggccttcactataataggcctaacggaccgagatctttcatcaag

SEQ ID NO: 263944 - DNA, 561 bp, Cannabis indica
agagatatctgacatatgtatatatatagattataagatatattaagtagtccgactagtgttgatttgggatcctgggctaagaaatatattctgatcattatatatataaaggcgataaacatgttaattatataaaatataccacaatgaaaaacacaaaaaatatatatcaataatagaatataaaaaacacagcaactattattcttatctcttcactatttatacataagaacactacacgtattttgcatattatatatataatatattagctatctagaatagtactgtgctgttctcctcgtttgctattagattctatacttggtgtcaaagaagaaatagtactatttcaatagtgtactccaaaaattacatatttataatcataagaatattcttcataacttcaccaataagctaattgagttatttgttaacggtttaacgccctatagctacacaaatactcagtattgtactacatgagtgttgcttatatttatagatctagatatataatatagtttgaatatactgatttggtctcaatat

SEQ ID NO: 263945 - DNA, 1094 bp, Cannabis indica
acatagatgaaagatgcatcggtacatctattttaaaatagtctattataaagttttcttataatatacataatatttattaattgtttagttgaattatattatttaaataatataagaagaaaaataatacaaaagttagtattgaaaaaatatagaaaaaagtataattttaatttagtattttaaagaaaagaataaaaaggctgatgtgaatgctttaaggagacatcttgtcttggcaattaaattagtgtagctattggccgtttctatttagaccaaggctttaactttaatatcactcattacattaatatacttttgtgatttagttggttgagtggaatacccaaccccgccgctcccttaaactaaggctactttaactttaaaataccaacttttgtttaacaacaaaattctaaaacaaaggcattgagtgggagtgggagtgggagtggcaaacatggtactaaaacttatattctaactgcaccagtaaaataacgaaaaataactaatatttagtttcttttttacatagtgatgatgatcactattggaatatacgatactgatatctgttatcgaattcattgtttaactgaagggcatgctatgaataactatgaactcaaaagaaaaaaaataacatgaggcaaaactgttctcaaaaatttagacaataaaaaatacgcggcacaagaagaaagctaccgcttcaaatagtcattaattaaatccccccaattaaatcaagttacagggaagcttcgcagattcgagaacaggtcaagaccgagagatatgcggggatctatactgccttatttcagcttccaagacatggaagacttacaaccactccgagattcagagtggcccagacccaaagcttgcccaagcgatacccacaagggtgctcgtaggcctatcgcagatgctgacctcctaaaagaaatgcggacgtctacctcggggataaacccaaatcgtccagcgacgattatgctttctctaacacaagatcagatcttgttccctgtgtcaagtcatggtagtgtgcatacccctacacttttttgccagac

SEQ ID NO: 263946 - DNA, 1072 bp, Cannabis indica
attgaagcacaattacacatattaacttaaagaaaagagatgaaaatagagaagagaagaaaagaagaatgaagaaaaccctgagcagtatgtctccaatattgcagttgatctctccactctttatctaaattctctctgaaattgcttgatgaaatcaactctcttctgctctttatataggcattcagggcctaaaaagatggaaaaactgcacatttttaaattccattcggatttgaattttgggaaacctcacgccagatatttttcttctgctgacaaagaggcgagccgcggcatgctaaacccatgccgcggcccgtgtggccaaaatgaggtttccttcgatttcttccatgtaggcgggtcgtggcttgctaataccatgccgcggcccgtgtgatcctctgctccaaattccacatgtttttatcttttccgaatatgaatttgatattttccaccgcgatatttttatgcgatattttatcctttttctgttgatattttccaactcttcatctattttaaattagcaaaattaaaagataaaagcgtaaaaatgctccaaacatgatttaaactaaatagaaaaatgtgctaaattaacctaattttaatactaaaagtaacctaacacaggccttatcttgctagatcctccaggtcttgtcctgcgagatcctgcaggccttgtcctgccagatcttgcaggctttgtcctaccagatcctggcaggaccatgactggccaggattgacatggaaaatttttttgtactactctacacgtggacaacacaattgggttgcaaattgggccctataaccccaagagaatggctatataatatctagattcaagagcactttagtcttttgtaattatctaacagcttatgcaagtatctaggaatttaaactgtaatctagggtttaggccccctaaataaaggccttaaccctagcctataaacctaagttagtattcctccaaattgttctaagttaaaccctagtcttctttcgctttctctactacacgcccccaaacgggcactccctctct

SEQ ID NO: 263947 - DNA, 954 bp, Cannabis indica
ttctccagtgttgaggtaggccgctattggtgtcatccagtttggggaagtatcaatcattttgatctctttcgtgccaataatcctaagctctttgaggaattggataggaaccaagttcgctctatcatttgcattactacttgccaatcgagctaacgcgtctacagttgtgttttcttcccttggaatttgtctgagaccgtagcttttgaattgtgcaagtaggtcatgtattttgctcagatatgctatcatcttatctccccgagcctcgtattctccaaatacgtgatttaccaccagttgtgaatcactacagatgttgatgtgttcggctctcatctcccaagctagttttaggccagcaatcaaagcttcatattcgacttcgttattggatgccttgaatgtgaacttgactgcagcgtataggtgccgccccccaggtgtgacaagggcgattcctgcaccagacaattgatctgtggccgacccgtccacatgtagtttccaagttagcctttcttcactgttactcgactgaggtatttgtactggctcggggttgctttccggtgtgctttcttctttgcatgttcattcaaccacaaaatctgctaaggccaggcctttgattgttgttcagggttggaaagtaatcacgtactacccaactccactgcccacttgagtaaccgtccaaaagtgtctggtttttgcaatatttggcgtaatggttgatcagtgtacacctaaatagggtgagcttgaacataaggccttaactttcttgttgctagaatcaggcagtaagcgagtttctctatcaatgggtactggcctttggcttcaatgagtcttttactaactgtaatagactgggtgttgtatgctgctttcttcactgatcagcacggctctcacagcatgctctgtaacagctaagtatat

SEQ ID NO: 263948 - DNA, 6489 bp, Cannabis indica
tccaaatatgaagaaaattacaagaaattacaaaagttaaaaaagaacatagaaagattgattaaattctatgttcattacaacaaaccaaacaaagcaatgagctacaaacaaatatacatcaatttgaaaagaaaaaaaaatgaaactttgcaaacaagagaaaaagcttactgatccgagcttcgctcaatcttttcaatggctgctgcgccctgagaacgaaaacttgttcgaggaattatatcatctcttcttgaacaaatctctgcacctcctcctcctattgaacggtttcgtctcaaaggaaagacatcatttttatcagtacaagtttgagatagatttttcactctgatgccatatctttcactaccaccgaatttagtactcgaaattcgatttctagatcttaatttaggcacaacaactccatcagcttcacctctgtattcagtctcctcatcggtaccaccagccataagctccatcaaattgctactaaatcccaaatcagagtaaactctcctagaattcctcataatttgcctagcatacttagaatccacaccatccaaattcccatctccattattatcgaaccaattcgaatgaggattaaatacctcaaccggacgccccacattctcgatcatcatacaaggattgttaaaactattccatgaatgcaaaggaacaagtttactcaaccccgaaagccaaacaaccacatctttcatagccggtcttctctccctacaagacctaacacacttagctgcaacaacagccaattgcttcctcacaataagatctctaggaggcgaaattcgaggatcataaacactaaaaagcttcccttttttaataagtggaatagcccaatcaacaattgaaggtggtgaataaccaacatcaatagcttttctcccacttataatctctaacaacaaaatcccaaaactaaaacatcaagtttagtactcaaattatctggtgtcacataaccaggatcaagataacccatagtaccagcaggtggggttgatctaagtctataatcatcaacatgacaacgtaatgccaaaccaaaatcacctaatctggcattaaaattacgatcaattaacacatttgcagacttaatatctctatgaattacaggtgggtttgaacaatgaagggtatcaatagctttagcagtttgtaaagccaatctaatccttctaccccaattgggtggtctaggattagtatgtagaacatcatacagagtaccattactcataaactcaacaaccaaaagtctattattatgtcttgaatcattattattattattaatattagtataccctactagattaacaagtctagggttttgaattttcgataagatctcgatctcattatctacctcattggtgatctccggcgtcgaattgggtcgtgacccagtaaaattatgaggccgagaaggtcttttgactgccacgtgtcgtccacggaccactgctttgtagacatatccatggcttcctttacccaaaagcttctgttcagaaaacccatttgtggcagcttcaagatcactatactcgaaatgttggatcttaatgggcttgtcttgaccagagccgacaccggcggttgttttggcagatgggttttgagaattggcggtggaaacggcggattcagctctacaagaaaggtatcccattaaatcaagatcgtacctttatgtctatataattatatttttctggatttttttataagaagaagaagaagaaagaaaaagaaatgttttttttttttgatatattttatccaaaattaaatccaaggaagagaaagagagacagaggattttggaatttggagcattggtgaagtaaaagttttgggtttttaatgcaattttttaaagatatgttttttatttttattttggattttttttgggattttgggattgggaatggtccaatttttaatgctatgtctctctagagagagagttgaagtatgttgtagggtgtttttgtcttttatgggtccaccatataagaatcccaatggaaaattttatataatttattatggtaagaatatgctaatttttttttgttaatgtgacataaagattggtcatttatttaattatttattgtaatagtatttttgcatgacaattggcaaatgtatacgtatataagttatctatatctaacctaacaaaagatatgattcatatgaaagcaattgatttgatttgatgaactctctctacttgtttattagtttttgttggtgtattagtaatggtgtagaaagtagtacaagtatttttttttttgatgggtaagtagtacaagtaatttaaatagtaaaaatatgttagaagtttcaaatttgtgagattattatcttagtaaaaatatagaaatagttgaaattattaaaagcatatatatattttttaattcataagaacttatatatttttgaaaaatgagtaaaatatgaattcacatgattcaaaaatattgatagtactaaattttattatcacgaccgacctaaaatttaatggactaaaaaagaaaaaaccaataaagatatataattttaaagtataattttttttttagccttaggttaagtagatactaaatacagacctaatccgcttatattcagaatcaaatctatttattatataaaaattattgacaccacgactcatacttttataaagtttttcaaactacggactaaacttctccccacactcagttagataataatagaatgtatacaattttggatcaatttgttttctgtaataatagtttggaccataaatttcaaacacttacaattagtaccttctcttttgtacattggtaaaaaaaataaataaataaaaaaattgcaccataagtttaacaattctttgaactcttcattttgactttttctctttatgctcccacgaactaattctgccacaaaaaccaataaagaaaatcaaagacaacttttgaatttcattcttttaattctttccaattaggtagaacaagttttaaagccttatgtatatatctatagtaattattcaagtaatttttcaagataaaaaacaaattagtaaagctaagtgcaacaatattatccaattaattcccacaccacaatattattgtacatttattataccttagttaataaaagaatgttgataaatgaataaattgatgttcaattgtacaaatcgaaaacataaaatacacaacaaaaaagattataaaggaattttaaaagtaagaattaaagaaaaaaaaatatatatagaacaacaaaagcaatagaagaagaattggcctaatcgaactttgatcaaccctctaccatatccattatccaatagccaaagataaatacctctttaaggttcgggtgaacataaaacccgacccgaaccacattatatttgacccttttacttgtatacgagattctcagccgagggacttcgaattcgagcactattacttgatttttttgagactgacccgccacccgacccgcaaacaatggaacattccactccacaaatattgctaaagcaagaaaatagaccattgtcgccgccaccatcagtgtggcggcgagcatggcgggactccgataagcttgagaaatcgccgcgatcatagaccggtggcaattcagtccgccaccgctctagcttagatcggagtccttccatgctctcatccacactccatcccccaagaactgagctttctgtctcctccactgcttgaggttgtttcgcaatcgcttccgccacctccgacggagaagggccgagctctgattccgttaaaaacgccccaccgctagtcatgagcgtcgatttcctcggtgttgcatactcatacgtcatcggagtaggatgaaatttcgcattatgaaacggagatttcacataattgttgttcccattccttggggcattctgttgaaccaagttaaacctcggcgatggtttagtaaccctcggcgaggcattaaccatccccatcgctatcgcagcttcgcgaccaaacgatggggatggtttcaaaataggcttaataacatcctttttctttgctaaaacattatgattattattattattattatattctatttccacgtcagcatctgaattaccgttaatcaacgaactctttttcgtacctttactctttttaggtggttccaccgcaacaacatctgaaacaccattaatcaaagaactcacttttcccgttttacccttatacgacgtcgtatcacctttatcacctgaaccaccaccaccaccaccattgttaacaaccgaactcggtttccccaaattactcttccccgtccggcgactaattgcgctactaatcaacgagcttcctcctttcttcctactcttccttctccttcttctcaaaattgaactcgcctctgattcattaaccatagaacttgattttttccccttattttttcccttattaacttctttaaattccttagctctgttttcagacccaatcaaagaactcacatcactcttagtcctcctcaattccgacaacaaacccacatgaacagtatgattattattattttgattttgattattatgatgatgatgaattgggtcttcttcacccattaattccttatacccaacagcagaggtacttaactgagaatacaaaggcatacttctcatcgagctatgaagcaaagcaaccccaatattcaaaatcccttgaggacgacccgaagcccgacgaacctgtaaagcaacgaatctcatccccaattgaggattatgaaaatggccaccgccaccgccgcggccgtgaccgtgaccgtgaccgtaagaagaagttggtcgagaaagagggttcggaatcaaatttccaacaagaatccgtacagtaccaacgtggatatctttaaaccaatgaagagcgtagatttcaatcatgactgctgacgtgtcattttgtaagaaatcttcatcgacacgaaacacaaatttatcattccacgtgggattattgtgtccacgtgtatcgacacgtgtcgagagttttcgatctgggtggacccacgctacggcgtaagtcctcattgaacgtgagactggagaaaggtcttgagctgaaattacatttaattctaataattgaaatgggtttagtatagacatgtatttttttggtgaattgggttttttattatttttctttgattatttttttttgggtttgttcagatgagagccgtcgtctcctccgtcgtcgccgccgaggacgacgagggaaagggtggcatgaaaggaagaaagatccaggaggataaaagagaaaagggtattaagtgtttttctatttggttaataataataatgaaaataattaattaattaattaattaataatttttgtgttttgagaaaaaatataattgagaaataaatggtgggaattggtcaggtgctgagtttttgagtttgaccattgtgggaaatatgaggttgtaagttgaattttagtaatgataaataatatactaatttgggattaatattaattaatgtaattttttttagtccaaatatttatagataataataggtgatattagtctaaaaatatagattagatagataataatagtatgtttataattttgaattatttttttttatctgtaaagactgtaatatttgtttgaaccatcaatttcaaacatttacaattacgatccttctgtcatgttaaaaaaaacatcactttaacagtttgaatatatattaggagaatttttaaaatataaatatttttcaacatatttttaattatttatagatgagatattttttataattttttttttctagaaaaagtcacattaatttagtcatagaaacaaaaagtaaaaaggcaaggaaggtagtataaagtcacaaaggtaaaaagtaataggttgaaaagaacaaatggagagtgatacaaggtgaatgtatcctaatagtaataaatatgtcattataagtttagtttttttttttttaaaaaaaaaatttaatttgtaatctattataatgtaatagctattacattaactatttaatttttattacaatcacactctattaaataaaatattttaataaaaatataataagaaagtcaaagtctataatacatgtttttttttgaatattttataattataaaataaaaataatagaatcattttagtcaatacaaattttatttcattacattcttatatcaaatcaaacacaataattttgaaaaattctaactacaaactaaacattgtagttaatattcttactttattacactaaatataaatcaaacaccacctaataatattagtcaaaaa

SEQ ID NO: 263949 - DNA, 1638 bp, Cannabis indica
cttgcatcccacgtgtaaagccaaggataagaccaaaggcaatatgaagctcaagtcaaacgacgtcgtttccaatcacaggttgctgacttggcgagtcgtcgatggccgaactgggttgaataatgtttctgggttctctgccactcagatcttggatcaactctccaatttccatgaagatgatgatgatgatgaagaagaagaagaaagtggttatgattatgatattgattataataatggttatgattatggtccaaataatgctaatgagcctattaggattgatttagagaatgatgatgaaacaggggttgagaatatcatcaagaataatgatgatgatgatgatgatgatgaaaaagaagaaagaatgagcttttgtgatgtgggatttgtgttggaacaagaagaagatgatggttggtgcttggtgggagaaatgtgatataattatattaatatatcattattaattgttgtttatatttttcattgatataatatgtatattccaattgtgtgtgtgtgttaataataaggaaatcattatatctttctcttcttcttttttacgtttttttgggggtaattttttccttatagtaatgtgtatataattatccatatatacattccagtacaaaaatcatatccctataattataaatacaattgaaattgtttggtatggactataatagcgtgtggggtatgtggtttcctagttagctagctaggtagagttgataatttgatatgtaattaaattaaaagtagtatgtattacgtgtaaggaaatgtataaataaatggtatataattgaatggagtgtagtggaaatccaagtcattgaactaatcatatgtatatcatcactagtttcaactatcttctattctattatatatccatttagctgcaaatatatatagtcggtgcaaacaaaattctcaactcaacaacattattaattgttaatttgttatcatcctttcattccatccattcatccaataataataataataatattcgataaaaaaatatattatattaaatgatgtaggactccatacttattaattattgatataacacattatcattaggttaccatttcccttataaaaattatatatagagttcttcctttttgataaaagaaaaaatatagaaaaacttataaaaatattagaattttattaatttttataaaaatactgtgacacgaattttttttccaaaaatattatatttttataaaacaacagtagaacaaaacaaaacaactaaaaacaacaatggaacaactaaaaaataaccgtaaaacaatagtgaaaacttaacacagtacacagtataaaatttacacaatatttttgaaaaaaaaattctaccctacagtataaaaggaaaaaaattaaaaatttcagtatgttgtataattatctctaaatatatatactcttgcattataatttatatctcagaaattttgtatatcctctgcatagaaaaaaaaatagactattttactttaaaaatttattattaatgtatataatttttatattatggaaaggtgcgaaattattatgctatatctatggttactattattaatatttttt

SEQ ID NO: 263950 - DNA, 791 bp, Cannabis indica
tattgcttctctaatatgaccttaaagtatccgaaatctatgaacctatgtcaatacaaaatattagactttagggaaaagaaaaagaaaggtagaaggtgttaaaatgaaatgtaaaaatgaaaaaattccattttctaaatgtgtattataaatcctattctcatccaatatatcaaatacacctatcttatcaaataatgtatattttaaattattttggcttgaaattcaaatgaaagttagtgcaaaagattttaagactgaaaaatacttaactcatataatgcatatacaacctttatgccaaagatgaagtcaaatccattcgattctgcttatgttatagatgatggcttttgctgtttataatccttttgtcattaagttaaaaattatacaaagataacaaaaaagcactccgcccattatctcatcttaatgttaatggtcatcatacattatcaatacacaaaattaattatgctcatcttacattccaaaaccttaatcattacaaggtaaaaagaagagaagatgatcgatgaaatattcatattcattttcaatgataaaatagttattaacatgtttactaaagagagactacatcattcaaaataaactttaatttttctcttttctcaaattccttttcctatgctacttgtagcctaaccaatacaaggcaagaagattagctatgtaatctagcacaaataaaattcaagcaactacacaaatatagtttttaattatttttggtttgtactcaaaaaaccaaaaaaaaa

SEQ ID NO: 263951 - DNA, 669 bp, Cannabis indica
cgtccactatgtcccttactgaatcatacattcccgtagttctaggtattccagttacaaaatccattgcaatgtcctcccacttccacttaggaaggactaaagattgcagtaaccctgccggcctctggtgttcagctttaatttgctggcaggtttaacacttgaaccataatccaccacttctcttttcatcccatatcaccaaaaatagggttttaagtcctgatacattttggtggttcctggatgcaataaataagtgtggtatgagcttcatcaagtacctccttcttgatctcttcaacattagaagcacaaactcgagctttaaataacaacattccactgttcgagactaaaaagtctttaggtcaaccgaccattacatggtctcgaacttcaactagctcagggtattccaattgcgcttttctgatcctttctaatcgatcagattgaagtattaaactgtgtaactttccaactacgaattcaatccctgcgttaaccatttcagaggctagttaagggctatcaaaacagtagtacaaacttgcctgcaattctttctactcaacgcatcggccccatcgttggccttcccggggtaatataaaatctcactatcgtagtccttaaccaaatccagccatcttctccgtctca

SEQ ID NO: 263952 - DNA, 140 bp, Cannabis indica
atataaaaaaaaatcttaattattatttatttattataaactatatatttctatataaaaaaattattaattttatatctctttttattatataatctaaaccacttataatcctaaatctaaacatttatcaacattgt

SEQ ID NO: 263953 - DNA, 940 bp, Cannabis indica
tataaaatttcgaccgggctaggcgaagcccaacctctggcaacgtaaaaaataaacaagcctgagagcaggcggtaagcttgtggaattaattgataaggcacaaggccgacaaaaaacaaggaagttaataaagtaatcttgaagagggagcatggccccagacataagatgggtttggctcaaggctccgaaccccccatagttgtgattgggcgtctcttcgtctcgaggcaagcggtgaaagaccccggacgcatatggcttgatacctgccacggtcacgatcttctcgagctgatgagcacaaaccaaggtggaacggagctcatccgcttcccagccgttggcacgagaagtatagttctcctgggcaacagggcccttcataacttcctccagagtggccaaggtggacgcccctttcttagaagattttgttccggaggtatgagcagacattttttctgaaaaaataagaaatccagcagttgggccccaaaccaaaccctaatgttaaaaaagggaatgggggtcccctaaccgctggaaagaggccccctccggatgcttgccaaaaatggaaactccaaaggactttccttaacaagcattgggtgcaaaaatcccaaaggtagtgacagtaaaaaaaagggggagaaaaggccgagggtggaaacgagaatcgccctatgccctaaaagcgttatctcgacgaaagggacaactctaaaagaaaaaagcaataaaggaaaacagcaaggacacaaataagagagattctacgcattacacagcaaattcagttaaagttattccccagaaatccagcactcaacccagacatcctaatcatgctataccaacaaacagtagacaagcataaagtatcctaaaaacatacatgaagtttgagagctgggggtcggtgttgatcgtc

SEQ ID NO: 263954 - DNA, 733 bp, Cannabis indica
attctgtttaaatgttgacgtgcctttgtaaattattattttgccccctaaactttgacaactatcaaattgtaccccctaaaaataaaaatgaaaaatattcaacatttttttagtaaatcttaaaaaataaatttagatcttaaaaaaagtcatttttgaatgattaagaaaattaaacaataaattaaaattttaaaactaattaagtgacttaaaaaatgatttattttttattaaaaaattcattgagatattaaaatttaatttttgtaaaaattaaattttacgggaacaaacttgagtatatttttttttttcaaaaaatgttgagttgtttaagtaaacataacattttttttagtttaatttataatatttttttaaaaataattttatatttttattgaatttttaattatttgttaagatctgagtttataaatataaataagtttattttttttcaaaaaaaaaattagattatctaaattatttattagattttcaataatatttgtttgactttttatgaaaggtgtttataaataaaataaagtttaaaaatatattttcttaggaataatttacgtttttttagtaaaattaacttttttattaaatttaatatttttagtaacttttttaaaaaaatttatattcttttcaaaattaatagaatattataattgctttaaaaaaatagaatgttataatttttaaaattaatttt

SEQ ID NO: 263955 - DNA, 875 bp, Cannabis indica
gccactgcgcatactctacgtgccaatcactgtcttacctgttgtccagcaatagatagagattccgaatccccgggtgctcctgaggtgccggtaatcctagtcacacaaatctaggatatttcacacttagggttaacccttgattccatactcatataattcaatcatggcatttaaattcagataatcatatagagctcggaacgagctttccaatgatataaagaactcccaaatcgttcagaatcaaaagttatgaattttcaaaaatcaactcgaaactgcccaaaaacacgagggcgagccgcggcatgcccaaaccatgtcgcggcacttgggaccaattcccaggttccactcagaggagcgggcagcggcatgctccagagcatgccacggcacctgggttccaaacccacaaaccagcatgcaaaacttgaaaattcagcaatccaactcaaccaaatcatcccaaaactcaaccaaatcttcaaaacaagattaccatttatcaagctcaaacatagggcaataaaatacatacaacaagcattaaaactcacactttaccttgagaattcaaattacataattgactcaaaaatcatgctcaaacccacaacattcaagctctcaacttgaacttacttccaacacatccaactattttccagcaataatcatcatcatttaatcttaatctcaagacaatgaagaaaccctagaatcctatcaagacctcaaacaactaatacaccaagaattcaagcaaaacacaatcatatcaactaaagcgcactatattaaacaacataaacctatcatcatcatcaccaccataatcatacattttcaactaaaattcagcaagc

SEQ ID NO: 263956 - DNA, 716 bp, Cannabis indica
ccacatggtccgatggggtccgattggttggatgattcataaaattaaaggtatattttattttataaaattaatattgttttaccacacctaataattttctttagacaaaaaaaaagttcacttactatttttattaaataaaactattgtttaattttaggattaatttatgatattctatatatttttctataattttaatgattttttataagttaaattacatttttatcaacttttttaatattatttggatagtgaaggtccaacattttcctactttgagtatttttactgaaaaaagaaagaaaaaaagaaggaaaaagtttagatatttaaattttatgatcaaccaactctgactctgagtatgtttgcctcctaaaaaaaattagacattttaattaacaattgaaaacataatcaataaagagtaaaataataagggcaattatctcaaaataaaaaggcaaaaagaaaagaataggcaatttatgcacaaacaaaactaaacaaagaatgttagaccaactcaaatagatgttgtaaattttatgttaaattaattaaaaaaagttaatattatacttgactcaaattttacaaataaactctaggtaaaataaattttatttttaataaaagtgtaaaaaagaacaaaaatattaaatttttattaaaagtataaagaaattatattaaatatataaata

SEQ ID NO: 263957 - DNA, 944 bp, Cannabis indica
agttgcataaatagtgttgctttgatgccaaattattaatacttgcttaaacaattccggaggaagacgataaaactactttctaaagattgtgtacacttatcataagaaaattgacaacaatatcctaaaaatttgtaaatattaaaaaatatatcgataaaaaatattgatatttaattccttgctatcatcaactactttatatattaaagaattcttcaataatttgaagaaataagtataaaaaaagtattcaattaaaaaaaaaaaaacaatagaagtcgccctttagactacttcattttacatcactatttttcttccactttgtaagttcacacatccttttctagataaataatgttaaaaaatgagggaaaaaaacataaccccaaaaattattttaaaaaactcccttagaaaaatcattaaagaaaattaactaacttaagttttgttaatattgattagaaattagcatcatgaatgacctcaatatggaataacattatacaaaagttttacctaatcgatgatgaatatcacaactcattataattaaataataataattgtaatgagacatttcattgtcactcttggtcaaaaatgtatattatataaaaacataaaagatcaaaaaaaaaaaaaattcaataagaaagaatgtaacaaattactagaattaatgttcttataccataagtacgagaaatgctaaaaagtatcagtggtatttaacattattaatataagattgatattaatacaatttaatatcaaatcgagagcattgctattggacaccagtggtgcttagcacctttagacatgtcattttgcgattagctagcgatactcagaggcagatccacatgtaggcgaggcgaggcagtcgcctcctaaaaaaattgaaaaaaaatatatgtaatttaattaat

SEQ ID NO: 263958 - DNA, 989 bp, Cannabis indica
gtgggggtctggtgtgtatcgtgtgggtggtgggtggtggaggaattgggtttgaaaaccgtaagaaatttgaacaaaatattaaaaaaaaaaatacatgtgtaaaatgacgtggactgcctaatggcacccacgtcatcacttcgttattaaaatgaatggaacaagacagaatatcataaattaagcattgtcaatagttcgagggaaattttttacgtcaaaaatagttcagggagcacgatttagcaagtgtcatagttcggggggaaaaattacaaattagtcatttatttatgtgtacgtaccttcagcttgtgctaatgaaacatatgatttattacgcactcaaatcattactagacaaacaaagtataatgaaaaatagtattaggattgtaaaatttgagaatactaatctaaagaatataatttaatctaaaagctttgcataccctttaaataagacgttttttctctcccttttaaatagtaaatgacaagcaaggacttgaaaacatgtccaatcacaggtgttactctatattatgctctgaatctaagaaaattcccatcaaattaatgaacatctatactacccctccttgtactcatccgtacaatgcaaattcgttgtatcataaatcttataataatataaaaaagaatatttaaataacatggagaaaactaagatacataactaagatgaagctttcacaagtaggaagaagaaactaatccccaactacttaatatgcaaatcatatacgaagaaaaacatatgtcaattgtgttttttagcgagacttgaatatttgagaggaggttacacatgtacatgtgacctttacctctttttcttaatagtaaatcttatagaacacaatactttcaattcatcattgtccttgttatcaattttcaacattgaaagacatatgaataaatggtaagcatttgagatatgcatgctcaagaaatataat

SEQ ID NO: 263959 - DNA, 500 bp, Cannabis indica
tataaaaaaagtatagagtgtaatttcctcttttacttcctgtccagtttaacaacatattttaagaaagagcattgttatggtgcctagcaccttctcgacatgtcgcgttgcgattggctagcaatactctctaaaagctattatattaaattatataggacccgatacttagttggaccaatagcgatattgatatataagagagtgctaagtaccactggtgccctttagcatttctctttaagaaatgtgtaatccagtttcttcacaaagattttgagaaatatagagatagaagaaaacagaagatgagagaacaaaaatccattgtttttttgcaaatgtaaaaaaacaatgaaagagacaattatatataaaaatgacttatccaatttaattatagataggctaattaggattttttttcccccgaatttgacatatactaaatcatgccccctaaacttttttggtcgttaaaaattcctcttgaacta

SEQ ID NO: 263960 - DNA, 507 bp, Cannabis indica
tcgggtcataattaccaaaatgcccctggctcaccaacggggtctttaacatgttaaatttcatataatttcacatatattgaactatataataatataattcctcaattaactcataattatctaattagggttttgctaatccttttcttaattccgggtattacaattaccccctccttatagaaatttcgtcccgaaatttacctgaacaactccggatatttctgctgcatatccgtctcgagctcccaggttgcctcttctactttactgttcttccacagtactttcaccagtgccacagtcttgcttctcaagactttctctcttctatcaagtatctgcactggttgttcctcgtatgataagtccggttgaagttccaacgcttcataactcagaacatgggacgagtctgagacatacttccgaagcattgaaacatgaaacacattatgtacagctgccagcgctgggggcatagccaacctgtacgctacttgc

SEQ ID NO: 263961 - DNA, 821 bp, Cannabis indica
agactttcacccttctaaaataaatttttgaataattaattaatttactaaaaaaaagtaaaaatattacggttaaactaaaattatagttaacaacaaatttttgagtattatttatatttttttccttataaatagaacttaaattaaattagtttcataattttaaataattttaaaaaataatttaaatagaaaattaattcataataattaaaaataataaataaacttaataattaaagtaattaaataaataaataatgaattcataataataaaagatcattcatcataataagtgagtataagttattttaaattaatcataataatcatcttcatttaaaattttccttagatgacgatcgataaaaattgaatgacgaaaaattattgtgatgacgcttattgggaaggtgttcaagcctttatcaaatttgcatcgaaacatatactctagtagaaaatttttatgcagcaaacaccacatatgcaacagatgccatagatgtcatcgatgcaacatatgccaccagtgtcttagatgcagcaatcatcactgatgacatcaatgcagcaaatgccacacatacaataaccgtactacctgtaaatgctagaagtgtcgtagtagccttattatccaataagatcgcatattccacaacaacagtttggagagaatggtgatgatgatgaggaggaggaggaggatgagtccacataattgggattatagtattgttatttgtgacaatataagtattatttatttaaacacttatttagttgttctatgaatgtgacaatataagtat

SEQ ID NO: 263962 - DNA, 476 bp, Cannabis indica
catgccccacagattcccaagcatcgagcataaacaacaagcagctgaagtaattatttttcgttgaaatagtgctgcagcaacaggtaaagattgttggaaaaccctccaaccaaagattttcactttcgaaggaatgttaagtccccaaaaagctttccaccaagagctggaagtatctgaagtggaagattgctgctgattttcaatcgaacaagtgaagtggtaaccagattgaactgtatattcactagaaatatgatggttccacacccaaaagtcttctgttgcagaagcggcaagtggaatggtgagaatcctggccacatctacagctgagaaatctctttgaagagacaccagatcctaatcaaggtcattagtgatatagttggagacattattctgttgtaaaccagtataacatgtgttggaatttattttaccaggatcttagatctactcacaagtatgtt

SEQ ID NO: 263963 - DNA, 1408 bp, Cannabis indica
aacgaccttaaaatcagagacatgattcggtacatgtcaaagttctaaaaggaaaaatcttaattagcctttaaataattaaaatatggaggaagcttgaacaccctacccctctcacatggctctgtacggttgtgtacttcattttgttttaaaaattttgatgtttcacttccattataattgagctaataaaaagttatcttttttaagaacctagttaatttgagacaactaggtctcttatatgattataagaggagtacgaaattgttaagtttaattcataatgagcaaaaataaaaataaaaggataaggataaatctagcttttcgtatcttcaaacttttggacatcaattaatgttatttgtttacaagaaagtgactgacttcattggcatgacttgttttgatgggtattcaattcattcattatatattataatttaatatctatatttaaccccaaaaaattatatttttggctggaaatcaataattgtttaaaaaatgtcattctctttgttatgtttttgtcgatttggccaaaattaacatcaaactagttgtggtttaattctacatcgcatatttgtggtctaaattcatctttgaattcagcatattgtccatacttattgttgttacttttattacatcatatttaagtgactactataaatgctaaaggacccatattttaatccgctaaatatgaatttcgatttatatagaattatgttttatttttttttccttattcacaatgttttactaatagaaacaaaaatacaatacaatactagtgaattccaattatttagcaaaatattagtaagtgcatgcagcgtcccaatcaaacaagtaacaatatatatatatctatatatatctataaaagagaagtataagcgacatgacgctctaaaatcactccaaatatatctatttgttctctcctcaattctctcattattctaattttttatattttaaaaaaagctaaaatatttatccataataatttatatatataaagatgttaacatattattcatattaatttttcgtatcaaatcatactatattctttaattcatatacatttataattattataatcctaaaccgtattatatactctaattgagttgtattattcatattattattgttgctaaaagagatcaaaactattaagctgtttctaactaatgtagaggtatacgtaggtatgtaaatttactctatatgactatggagctgattcctaatttatattgggaaacttacaaaaatactgaattttgacttactctttacaaaaatactgccacacggcaaaaataacttttatattgccttgagacttttttttttctttttatactgtaaacatcaaaaa

SEQ ID NO: 263964 - DNA, 1076 bp, Cannabis indica
ctatgtctgataaatctaggaaactttattcacatagtcatgtttactttccaaagtgttgacaacacaataaacaggatcaagtatgtgaaaagggtttcagatgaattcatacattatgtacatataatcatgaaataaatcacgtgaactatacaacattaaatgttatttctgatctatattaataagtaaatttggttatattgaaatgagttttatttagggcataaaacccaacagtaatatcattattggtgtaactaaatattgagtcctacttgcttttactttaataagttttatagaaaatgactaaccaattataaatcgtgactttatcataagcaccatataagagcatttctaatggagatgctatgaaggatgctagatgccataaatgcattttttagcattttttaattgatatttgccattagaatgaaaaagaataccaaaaaaatataccataccataccatcctttatatcttctctttctatatttttttgtataaagaaaatttattatttaatatattttaaataataatatagtattattttaataatttttaaagatgtttactattagattatttcataacaaaaagtgtcaaaaataatgtgaaagatgagtaaatatcattttggaccatgtgttttgcaaaagttacagattggactctctgttttgttaaatgacaaaatggaccttatattttttaaaatggtaaaaataagatcctgagcttaatttttgacaacttttttttaatataaccaacttatagacaatttttaacacgaacagatacaaaaaagttttgtcataacacatttagatcggattattattaaattttattttgataaaaaataagttcagggtcatatttgtattattttggaaaatataggatctattttgtcatttaacaaaatagagggtccaattaataagttttgcaaaatataaagtccaaaataatatttacccaaaataaaagaaaataagtaaagtgaaattttttgacaatgataaaaatgttactattgaagatgctctaattg

SEQ ID NO: 263965 - DNA, 612 bp, Cannabis indica
atacgcctaagttagttagggtgttacagagcagatcatgtattttgctaagatatgctaccattttttctccctgagcctcgtaatctccagatacatgatttaccaccagctgtgaatcactgcagatttcaatgtgtttggccttcatttcctgggctaactttagcccgacaattagagcttcgtactcagctttgttgttagatgcttttattccgaacttgactgcagcgtgcaagtgttgccccccaggcgtgacaagggcaattcctgcaccagatagttgatctgtagctgacccatctacatgtagtttccaggtcagcttatcttcattgttactttgctgaggtgtttgcaccggctcagggtttctttccgatgtgctttctttcttgcctctgcattctacctcaaagtctgccaaggcttggcctttgattattgttcgaggttagaaagtgatttcatgcttacccaactctatcgctcacttgagtagtcgtccataagtatttggcttttgcagtatttggcgtagtggctggtcagtgtatatccgaataggatgagcttggaaataggtcctcaacttccttgtttctagaa

SEQ ID NO: 263966 - DNA, 508 bp, Cannabis indica
gttgaaggactaaaagctaatcttcttagcattagtcagatttgtgatcagggttatactgtgagctttcatagtaaatattgctatgtatataatattcttgatgaaattgtcttacaagggctgagatctagtgataattgttatactctcactacgtatgctacttgtcattctgtcattgaaaatgttactgatctatggcatgaaaaacttggtcatattcattttaaaaatctgaagaaattgtctgctgcagggattgttcgaggattacctaaattaggtaaggagtctttgggaaaatgtggaccatgtcagcttggtaagcaactgaaaatttctcacaagagtgtccctgatgtgaatacttctagagttctcgaactcctgcacatggatttaatgggtccaatccaggtagaaagcttgaatggtaagaggtatatttttgtgtgtgttgatgatttttctcgattttcatgggtggattttttgagagaaaaat

SEQ ID NO: 263967 - DNA, 601 bp, Cannabis indica
tatatggcaattaatctatatacgtatatattaatcatcaggagaacatgatgatggtaaaggacgaaatatttgggcctgttgtgggcctcatgaagttcaagtaagcaagcacatgaatgatttgattaattatatttttgtaatttctgtatgattaatattgtcatttttgtatgtatatataaaggagtgtagaggaggccatagagagagcaaacgagtctaagtatgggttagcagcaggaataatgacaaaagatctgaacgttgcgaacactgtttcgagatcagtccgagctggttcagtatggatcaattgttactttggaatcgacaatgattgcccattcggtggatacaaaatgagtggatttgggaaagattttggtctggatgccctccacaagtatatgcagattaagtctgtcgttactcctctttacaactctccttggctttaactctttaatttcttttatcaataagagtaagttcactgcaagacaaacaaaaacaacttgtttttgtctttttcttttttttttttaaaaaaaaaatgatatttgtaattttttatattattattatgtggtattta

SEQ ID NO: 263968 - DNA, 542 bp, Cannabis indica
ttggaaggagaaggtactgtcacaagtgtaattttttttaatggagttactgagattttctgtcttacttactgtcttccatgttcactgtaggttgtcagacttaatttgcttctaacagtcaaggaatctgccataaatgtgcctcaaaacttggatgctcgtcgacgtattaccttcttcgcaaactctctctttatgaatatgccaagggctcctgaagttcgtgacatgttatcctttaggttagttgtaatagcataactgatttggtttaaacaaagatcttttatgataaattttcttgataatgaatagaatcttataaggcaaaaaaacttctgaagattgtataatctattatcaagaaaatttatcataaagctatattactatgctcttgtatgacttgtctcactctttttattagcttatctacttactgtacaagattagagagaggggagagaagaaaaagtcggaatagtagtcaagttaaacagtattttattctctttattttccttaaattaaacatttgt

SEQ ID NO: 263969 - DNA, 1382 bp, Cannabis indica
gatagaataatacacattatgccaagcaattacagtcttaaaatacccaaaccagacaacaaataagctacaattccacacaacaaatagctcaacatagttttaactttacaacttattttatgaagaaaagtccacaacaagtgctactctctccaaatgaaggatgtatctcctgccaaagaacactcttcaatagaaaaatattgcttcatacaaataattcaacagaaaaaaatatatcttagttcaaaaaaaaaaaaaacagaaaaaatatatcaataaaagaatagtatgttttacctgacaattttttatcaattgtagtattttcgccttattacttgtgcatttacgtacgtccaatcttctacatcattcaagagcttgaaaaatgcatatctccaagatttcttgaagattaaagtgcaacagattccccaaaatccaaccataaatccaactgctaagctgatgaaaaatcctttacttataaatgcatcttcattttctaggtgtccaccaagcttagaagtagtaggttcttcttcttcacctggacattttttctgaagtggggatccacagagttccggattccccatatatgcagcttcatctcgagtttggagttgagggcctgttggaatttttccagacaaattattgttggacaagtctaatgtattgagacgatccacttctgataatgttgaaggaatttttcctgaaaagtggtttcttgacaaatcaagaacatctagagataccaacttcccaatctgagtaggaattttcccacttaaattgtttcttgacaagttcaaagaaaccaaaccattcagttcaacaatttctcttggaagttctcctgtcaacttgttgctcgaaagatcaatcatctttacaagtcgaagagtacttttgtactcagatagagttcctttccaagtcaatgaaatttcatcttcataggggaagcttgcatttgcaaaatgggtaatagttgtatagtcaataaaactatcatcttcattatttttcattgaagtaaagttaccaatacaaattggtatgtttccagagatgtcatttaaagacaggtccaacacttgaagatgtaccaaatgatctagatttgtgggcattttgttattaaaatgattggatcttaaactaagaataataagttgttgaagactttttccgatccacattggtattggcccttctaatctgttatttcccaagtcaagaacttccaattcgcgacaatttttcatggatgaaggcagtttcccaacaaaattgttgttgctcaaatgtaatgtgctaatccaagataaatttccaatagaattaggaatttttcctgatagctt

SEQ ID NO: 263970 - DNA, 1956 bp, Cannabis indica
gttcatattcatattatatgaatgaataaaattggcaagtgaaacagataaataggctatgtaataagatttcataaagggaatgtgcaaacctttgtgaagaatacaaacaacttgaggaattcgggaagccagcgaaaacattcgagtaagacttggtcaaatacgaaaagtttgcagttggaggaagagcatgcactttttcgccttttttcaaaagctcttgcaaattaagcctttgcagggttaagacagccttggtctctttccaaatgaaggcaagatgaccattttcgaatacaaagagagaaccgggtttggatcctggatacctaaaaccatatccattcgcaatgccctcccccgaaaaagcatgtttcacaaccagaggaagtgaatcagcatcaacatcccatggaaaaggatctggcgaaacatcatcaacattcaccataaacattgctgagccatttgggtgcagaacataatgagttccttccaatattttggttgcaatgagaagcctttgtccttgggactcctcgtacgaaagcaaaagaaagaacaaagctttcccaggtttgtcctcggtaggttttccgggtggccagccaaaagttcctccccaaagacctgcatactcttcgtcagcagttggaatgcgcaatggcaatttgtaaagagcataccggctgtcatgcatattcggccacgctctatacgatgacaacttcattgcagaggcagctaatgtcagcccaattgtatctcctgatctcaaaaattcagaaagctgagcatgcttactatcactactcgaagaaccattctttgaagctgcaagaccgccattagacttcccaagaatctgattaatgctatcccgaaaatacctgccaagagttttcttcttattgctttgtgaatggccatcatcttcacttgtagaataatgaagaccactcgatcgttcaagagtcttcttgatatcactcaattccaactgggttggatcaggcggcaattgggcacttaacttccaatcaacatgagttcccccgagtttatgcatttgaaccagtaccgatcttcgttcacttaacagcgccatatctttagaaacactatcctcatcagttctcatcgaaggaaacatcggcccaattgctgaatcaggcaccttaagacgaacttgacctgtaataacctcaagcaaacttcttcttcactaaaacccaaacggctaaaggccacagaagcttcaaactgactatacaccctttgtgatcttgacaatccactacttgttctaccaacatgtcttttcgaaacatccttgtccgaataatgaacaaaactcctactttgcaacaatctaacctcgtttctacgcggtctagtctcaacctcaagcaacaacacattgcaatgcaaatcgatagacttaaccgaacctggatacaaataatcactccctttctccctaccatgtaagtaaaaagcagtagaaccatcaaaatcacaaaaaatctcaaacacaggagcccataagataggaccatcttcaatacctaaaggcccaagttcctgaggtataattctacacccaacaacagaaacaaaaccaggcatgacataaaccacatttccaagctcaggattctgatgaacccaaattcccatcaagggtttaacagtaaagagaaaactacaaagtgctttataagatgacacagcatttctccattgaatgagctcatgatgtggcacaattccaaccatatcacactgtgtaagccagattttctcagaggccacaagatcatgtagactacggcaacaaagagcaagattacatatatctctaggtgaaagtgaccgagtaacaattgttaatacatcatcaggcaaagccacaagcaaagtcgatccaaagggttctaaagacataattaa

SEQ ID NO: 263971 - DNA, 505 bp, Cannabis indica
tttttcatgcttttcatggaatttgttagaactattatttatagtagtgacaaattatgtccagtagcattccagttgcgtctgggactcgtagtgttttgtctggggttcgtactgttagtgtagtccacgtcagcaaagatattttaggtttaattgttcaaatggtaacagctgtctatttctgttttcttggtttagctgggtattaatacgatttctgggtattttgttgaaaaactttttgaccgaagatttgggattacgtttctttcgtcttgtttgttctgtatgttccatggcaggtgagatcttggagctcgaggatgttcatcaatggcggaatgatctgaatgtggaattgctgagttcaaactgaagggagttcagtgtcatcttcttcatcaaatctgaagggatttcaggtctaagacatgttgaagaagagctcagttgcagcataagggattgtgcattaacaatcagtgttcttgattgttgttgg

SEQ ID NO: 263972 - DNA, 538 bp, Cannabis indica
taaaatgatgattttgatgattttgatgatttggatgtgttcatgttggtttatgtgcttaattgatgaatatttgtgaattataaatttttgacaaaaaatatttttattgtcgtattgagcgtattttttctaaaaagtagatgaaaaattcatgaatttagaattttacaaaactcaatttagatttttattgaattagttatgattttttatagtttgaaaataaaaatctaagctgaggaacacctacgagcgcggacgagtggagctatctcggtcaagaccaaggttcagacaaaccttgtaactgaggtttctcaaacaagccttgtcctaagcagccctacgccgaggtttctcgatcaaacaaggctgcatgcattcatttttcttgcccagcatctcccttgcgctcgcaagggagtatgcaatgcatactcctatatgttgcaccaattttgtgatttttcaagttttaaaaatcggttttcaatgaaataaaatttaaattttggtaaaattttgtgtagaatct

SEQ ID NO: 263973 - DNA, 730 bp, Cannabis indica
tgctttcgaaaagtactggaaaattatttaaactgaagaaagttcttaaatattttatctttattctattttggatagaattagagatatgtcttctgtttactcagatgcacttaataagcattatagaattcagtatccctagaggagtatatagaaaatgatgttgcataatgttttatgaacacaaaggaagtaatggtggataaagcagttgcttaccacagacttacagtttctgtaatttgagtttagtcaaatacactacatttgatctagatatcaagacaatagattgattgaaattcactacttgttttatgttagtgcaagtggaagtttgttgggattttatgccctaaataaaatccattccagtacaatcttatttgttatcaatagaaaattagaaatcgtttatatttatgtttacatatagttttcatgtttatgggtttaatatataatttatgttaagtccagaacatatagttattcacaattacagtgatatcaacacagtggaaggtaattgttattatatgcttcaaaagataatgtcccatgattcatcagtgcgctagatttacactgatgtgatagttagcgataaagcttacttacaccttggataagtgttatgttctttccaggatattaacaaagtatgctagtatcaaatatatggagtatacattgaactgggatcgatattgatcttggtaaagat

SEQ ID NO: 263974 - DNA, 883 bp, Cannabis indica
tttggggaagtatcaatcattccaatctcttccgtgccagtaatgctaggttctttgaggaactggataggaaccaaattctctctataacttacattactactcgcaagccgagctaatgcgttagcagtcgtgttttcttccctttgaatttgtctgagagcgtagcttttgaactgtgcgagcaaatcgtgtattttgctcaaatatgctacatcttttctccccgagcctcgtattctccaaatacgtgatttactaccacctgtgaatcactacagatttcaatatgttcagccttcatctcccgggctagttttagtccagcgatgaaagcttcatattcggcctcgttattggatgctgtaaatccaaacttgactgtagcgtgcaggtgttgccccccaggtgtgacaagggcgattcctatgtcgggcagttcatctatagccaacccgtccacatgtagtttccaagtcggcttgtcttcaccataacttggctgtggtatttgtactggctcgaggttgccttcggatatgctttcttccttgcctgtgcattctaccacaaagtctgctaaggcctggcctttgattgctgttcggggatggaaagtaatttcatacttacccaattctactgcccacttgagtaaccgtccagaggcgtccgacttttgcaatttttggcgtaacggttggtcagtgtacacccaaataggatgagattgaaaatagggccttaactttcttattgctagaatcaagcagtaggtgagtttctctatcaatgggtattggccttcagcctcagagtcttttactaatgtaatagaccagatgttgtatgttgttttcctctctgatcagtataacactca

SEQ ID NO: 263975 - DNA, 556 bp, Cannabis indica
ctcaaacactattaatccattcctcaattttcataatcttataattaatcttttgctaaaaaatttagtcaattgtcacaaatatagagtcatatactaaaatataggtactaaaataatataattcttacaatagctaagagtaatttaattatatttaaaaatatttgaccttatggtcctaattttaatctttcaaaaaatataaagtttaaaataatttttttaaaaatataaggtctaaaccattaaaatgcaaaatctaaaataatataaattctatttaattattcatttaaaaaaaagtgagatgcttccaatctaacctaaaaatctctttatatatttgaaataatatcatcatccttttcttattagtaatatgattgagagtgttcaaaaacatgcttacatacatttcatattacgagtaaaatcataatttataaatcaatttgatataaaagatataaaagagtgtgctaaaatattttaggggcttttttattttaacacttcaaaacaattttgtatgtatttttacgaaattttacat

SEQ ID NO: 263976 - DNA, 708 bp, Cannabis indica
gatcagaccttgttgaattttctcacgaacacaatcaatctcaatgtgattagttcgctggtgaaacacgggttttgagataatatgaagagtaacttgattatcacactacaattttgctagaatagaagtctaaaactcgaattcaatcaagagctgataaatccatattacctcacacagactgtgccataactctatattttgattcaacacaggatttatacacaacatttatttcttactcttccaagagatcagattttcttaataaatacacaatatcttgaagtggatcgtctatttaccttggagtctgctcaatctgcatcatagaaacaatcaatctatgtatgtccatgatccttgtaaactatacctagtcctagtgctcctttcaagtaacataaaatttgctctaatgctgcccaatgatgaattgttcgagaagacataaactgactaaagacactaactgggaatgcaatatctaaacgagttatagttagataattcaactttccaagcaagctgtaatttttcttaggatctgcaaatggttctcccatcatgtgtatgatgcacaactggattcattggagcgttataaggttttgctcccaattttcctacctcagttaacaaatcaaatacatattgcctttgagatagaaagaaaaattacctgtttactccgagtaacttcaa

SEQ ID NO: 263977 - DNA, 441 bp, Cannabis indica
taactgcttggacctccttcttcatatacagaaaccatgacaaagtgttcacatcggaaggaggttgactcagaggaggagatgacaaaaacacaaagggctcctcaactggtcctaactgacagttcgtaggaaatagacaagcatgttgactcattcaggaagtacaagaacttgaggaaatacgaatcccaacgggggctctaatgttgggttttatgccctaaataaaactccttttcaatgtaatccgatttattcaatatcaataaagaaacagaagtatttttcattcatttgtatgttttggttcatgttatcaatttcttgtctatttgatttataaattcatctaaaactcttttcacatacttgattttactgatatgataatctacaacagagtttacttgcatttggtataatgctatgttctttcca

SEQ ID NO: 263978 - DNA, 762 bp, Cannabis indica
tgcaacataaaatgttatttctgatctttattaataagtaaatctgattatattaaaatggattttatttagggcacaaaacccaacaactagtccaccgtccccctggagatagtcaccttgctcaagctaagggaaagatgaccgtcagactactcttctaacggtcatgattttacacattctttatcaattcagtctcggtatcctcgtgccacatgtcatcatttttactatgtcattattgtcaaaatttgggtaaacatcgtgtatactaaatccagttgcacttgtggttgataagttctcaccaacattacgccaagcaggggtttgagaagtcctagaagcttcacggatgctagcgagttcattggcgatacgagcttgaccattcatcaacgtctttagttgttatgtgatcacgaccaagttgtgatcatgggatttcaaatgttctttcatgcctgaaatctcggcatcaacaatctccattctcgtcaacacaattcacctgaatcggtgctttgataccaattaatatgatttgaactgttggtgtctggttaataacaaatacaacatctatatatataactagggaactaagccgcgcttcgcgcggtattgtccaacttttataaattatacatatatattatacttattaagtaaaataatctaaaatataatattttgatatatgtattataaacaaagtaataatattaaattaaaaatataattttaaattacttaaaa

SEQ ID NO: 263979 - DNA, 824 bp, Cannabis indica
aaaaggtcaataatcaaagtttccttaaaaaaccaactttccataaaagaattgcttctcttataagaagtttccaaacaaaggaaagtctagttgaaaagtgcatctttcctaacatagaaaagagcaactaaaaaccgaatatacaaggtaaaaaatcaggtatgaatgcaaaataatcttaccataaagaaaaaatattttgtcaactaacttgccaaaaaaagactttacaataataattagtaatttaccaaaaaatatattataaaatataaaaagaaaagaaataccaataaaaaattgaggtactgatgttatctattgatgctattgatattaatattgttcattattagttgaggtactctaaacaaaaagaaaagaaaaaagattaataaatatatataggatatagaaggattgtgacactaaaaaataaaagaaaataaaataaaaaaaggaagaaagaacgaacgaaaaaaaagcatgagagtgatataaaaacatgtatatttttagggttatatgtacatgttttaaatataattaatctaattatggcatgtgtctcttcggtcagttatactattattcatggaagccatactattggtccaatcattccttcgagaggtattcggcagggtgaccctctttcgacatatcttttaatcatctgtgccgaaggtctttcttcacttattaagaagtttgaatctcaacgactttttacaaggatgcaaggtggctcatgaggcacccctatcactcatatgttatttgcagacgatagctatttattttgtcaatcaactactagt

SEQ ID NO: 263980 - DNA, 1253 bp, Cannabis indica
acttgattgaaaaaatgaaaacctaaaacctctttaaattgtgataagcaactaaaagctttttcacaaacacttgtggtactataactatactaccctagaatcacagataaaaatcacatcttttcacatgggaaaacatagcaaaatgtaatagagagtataaaatacttcaatacaaagaaatgagtattcggtaatcagtgtctttttcaatccaagaaaccaaaccaactccaaattcaaatggagtttatacaaataaaaaaaaaaaggacttttgatttctttcaaaaatgatacatggaattgaaaagtcatgaacacaatcgtaagaatggtgggtctgcaaaaaaggaaacaaaacgaaaatggggatttggttacctttgtttggagttgacaatccatttggatttggatgcttttcgtctttctgatcattttttttattgaagaactgaaagagtgtagagtgttacttaagtaactccttccataagccttttcttaatctaaataaaataaagagaagttaaccatatactattatttatttttattttaatttatgttttgagttatttaaagtttttatgtagattgttatttaaattttatttgtgaaatatactattctattaattactatgtgagttttgaattttcgtaaaaatgtaaaaaaaaatcattttaaaatataaaagtgaagaaaaaagtcctaaaataaaaattatttttgagtgtttattatattattattattttaatttacttatttcataataaaaacaattcaaaataaaataaaatatttaaaaataaacgatcattatataaacaaaatactctaattataaagtgagtagtttaattagcatatcgtttgacaaaacgtaaagaaatatcactaaaagaagataaaaattgtttacaatgctcaatgtagcgtgcatgccaagatggcatgttacaagctaggtgatgcccacaaattggcaagtagtggtcaagtggtggcgcatgttgttgtgtatgctggtggcatgttgatgcttaatttgtacagtcgtggcattttcgtaaatatcttcatcattgttcggatagggacgggacttggtattcaccatttatttgagtctacaaatacaatggcacaattggatttgagaaactctgtgatttggtatatggtttggccatatgtctacatagtcaaaatcatgtatgatcctggtagaaggctaaaa

SEQ ID NO: 263981 - DNA, 553 bp, Cannabis indica
aacattaaatgttatttctgatctatattaatatgtaaatctgattatattgaaatgagttttatttagggcataaaacccaacagtttgtactgtttaatgtttttgtttttcataatccttgatatttgagttgtcttagagttcataatgtcttgtctttgtcctagaagaaaatttcaaccttataagaatttcagtcattattttattgctaatgttgtaatattatgatgtcatacaggtttgtcaggaaaattgttcactcctcacaggaatattcaggttcatcaaacagtgttatgtaagctaccattttcgaataatgttgttcaaaaactgtgtgttcaagctccattggatgaatagagctacctatctcaatgtgtgaaagccatctctgagtaagttggaactatgtaattaggagttatgtagaagatacgctaccattgaaaagggctaccattgaggtagtgtgacagcgtctcctatgggtacaatttatcagaaaaagtctttttgacaaattgggcaatgttccctgcttaca

SEQ ID NO: 263982 - DNA, 711 bp, Cannabis indica
tgacttaaacaagtttagactccctctaaattattgtcgcaatcctttgtaatgcactttacgaatctgacttcagaaacaccttcaaataacgaactccctttgtctttgaagtgtgcgtgcttacttcctcccgaagtaaggcttgaacaggttttctcccgaagacctttctcttgttcaatcaaattgttctaacaaaccctaagatagagtaagaacagacactagaacctagatgagcaactaggttttcacaaaaagaattctctcttcacaaatgagaaaaatttgatatgtgtgggcgggatttttcccccttaaaaatctgattgaaacattttatttattaggggcgacaattaaagttttctttataaaaaaccctcacatcggaatcccatttcctctttctttttttttctatgttttccttcatttttctttctctataaatatcaacaaatatttattttttaaaaaaatagtccgacttgtcaccggcttgatcgacctccggcccacgttgttccctctctctttctttcttaccctggccagcggacccatcaccgccccgattgcacgtcttcttcgccctcctcttctttgccagtccatgctataccagctgatttccataaagatatatatatattttcttggtcatttagttttattagagaagctgatacaatggttgttacaaag

SEQ ID NO: 263983 - DNA, 1076 bp, Cannabis indica
atataaaaacttgagtcgaagtaaagggagatttaaataatacacttaaaagcaaattttttatatataattttttccttttttttttatatttttatgaattttttatatatatttttacacattttttcttcacagattttcacttatttttgtttaaccaaaaatattactttcaaaatgtcaaaatcaaaacaatattattatgaaataataatgaaaaaaacaacataaagatagcattccatatatttatataaaaataaatctaaaaatataaaataaaataaatttgtaaaaaagtaaattttttttttttcatttttatgaaataatcccaaaagtaaatatttttatactaattttatttagaaataaaatgttactttgctcctgattctctcactttaattactacaacaggtctaccaagttttaactctataataaaattttggtaattagataaatcctataaattacatcgacaagcataaagtcaaattggacactaaaaattcaaatttaatattatttttcactcaaattaattcaaccgaatactaacacatgaaattgtctacattaccctactattatattaggagggattgcattgtattgtacttactttactttatttattttaatttttacatttatttttaaattctttaagatatcattacttttataaatgatattcctattataacatttaagttgatgtaaattatgtgttaaacttaagtagagattaaaaatgtattgggaaatttattcacaaaagtgggtactttttaataaaatataatataagagcatttcttattaatgaatacaaaaaaaaaatcaactaatcgcctattattacactatttttttttagggtttaataattaaataatgaatttttcttaatatatatgtataatttatacataaaaataataaagaatatattttttttggtgtaatttttagctttgtagttgtaataaaacaaaaatttagtgttaaaattgtacaatatattggtttactattaaatttagtgattatttcacaaaaacata

SEQ ID NO: 263984 - DNA, 511 bp, Cannabis indica
catcaagaaatcaagcaattgattcaatctaagcaagttggcttggttagtctccttgaaacaaaggtacagaataaaatatggggaaagtatatgctagtcttttttcgggttgatgtttttcgaataacaattcatggttggataaggggagaataataatggcttggcaaccaaatgtttacactgtcgacattaggttctgttcaagccaaatcatgcactactttgtgcagttcaaacaacacccgggatatttccaacttactttgatttatggatttaatgatgagaataaaagagagcagatgtggatagatttggaggaattgggcaaaaacattaaggaggcatggctagtaatgggagattttaatgaaatccttaatgctagtgagagggttggcaaaagagcagagaataatctatcacaacgatttagagattgcactgaacaatgtggtttgagtgatatgaagttttcaggtaatttttttacctgtaataacaa

SEQ ID NO: 263985 - DNA, 2175 bp, Cannabis indica
aatgttgcgactctactgctgtttaactcaaatagatatatgtatgcaagatgagtttaactatttttattgtttctcatgattgtaattgcattttctatatcttagttgttcccataattgttaatttggtgttctaggaagggtcactccagaaagtaatatctacagttttggcaccgtcattttggatcttctaagtggcaaacatattcctccaagtcatgtaagtggtttctttggttatatgtggcattcatatttgtattagctgtctttgttaatttgtaagaccatagcactggtggagagagcagagttaaagttgttacttactacgtaacttgaagaggtctatgaattagtttatttagttttactgacaagactgattaatttgatttatgatcatgtttttaggctcttgatatgataagagagaagaatatcaatcttttgaccgattcacatttggaaggcaagttttccacagaggaggcgacagtggttgttaatcttgtttcaaagtgtttgcaatatgaacccagggaccggccaaacacaaaggacctcattgcaacacttgctccattgcattctaaaactgatgtaagaattctctgattccgatattagaaatgccaattattagtttgagtctagagttgtgttctgctttcaggcattatctatgcatatctggaatgagttttctgttttcttcacgttagtgcaggaagttatcattggatgttctaatattaaagttcataattaagcaccattggtctatttacaatatgctcagtatgtgaagttataggatgttagtattagtgcatgaagtatgtatgaacaatatttctgtagcagttatcatactcctttgctctaacagaacttgatttttcaatcaactgtttacatttacattttccaagtcttttaatagtcaacactgttaaaaaatgtgtcctccactgttatggtgagcaatgatccctgaaattatgtttcttcacatgcacaatgtttcttattgtggaaggttcattacttcctcttctcatacaatataagaaaaaatatcttggggtagcaggttccgtcttatttaatgcttggaattcctaagcacgatgaagctccatcaaccccacaacgaccactttcgccaatgggtgaggcctgttcccgaatggacctgacagccattcatcaaatcttagttgcaacacactacaaggatgatgaagggacaaatgaggtaagcagtaaatgatgcttggcatatgctgtggtgcaatcagaattggaatactcatgtgaatttcttttgtattagttatcgttccaagagtggactcagcaaatgagagacatgctggaggcaaggaagcggggggactttgcctttcgggacaaagatttcaaaactgccattgactgttattcccaggtacattaataaagaaaattcatatgcttgtgttagaaagacccagccttgaactaagaatagaaattggatcatgatgtggtctttgtgatgttgttgcagttcataaatgttggaacaatggtgtctccaactgtttttgctagacgaagtctttgctatctgctatgcgatcagccagaccctgctctccgagatgcaatgcaagcccaatgtgtctttccagattggccaacagctttctatatgcaatcagtagctctggcgaagctggacatgcacaaagatgcggctgacatgttgaatgaagcgactacgttagaagaaaagaagcaacgaggaactaggggatcctgagaatgacaagcaaacctgttcgttcaacacaaatagcacaatgttgtttacttgaggctgacccaaatttgtataaaatctgagctgcaaatcataatttgattgttttctcaattgaaatgtttatatatcttatttatagaaaaatatcttgtttatcagcatcatcttttcaccataaagtttgctattttcatattattgtttatcagcatcattctctttccttctatattattgttttgctttggagcaatatagctcttattattggacttagctaaatgtagatttttacaaaatataacgaaatgactcgagttaagcctatataagttttttctttttcattcattact

SEQ ID NO: 263986 - DNA, 898 bp, Cannabis indica
gttcaactttctaaagaaaacttttaggactttaagttttgatactacctaggtacatacttgtgcctgttattttttagatgccatatcttactttacttccacattataactcggataagagtccacatgcgaaagtatttgaatggttttttgccacttgggaaatccatgtaagtgttcaatactgcaggagtatgatcaaatgccccgtcggtaataaacactgcttcagccctctcaaacatatccatccaagattgattagccatgactctatcaatcttagaatagattctatctttagattgttgtttgttgttccaagtaaagaagcaaccactactctttatatctgtcagttggcaagcactcacacagtcaatgaaagtcgtggagttccctattttagctctatccccaattctttcttctttaaaaagaatatcgttgaaatcaccaaatactatccatggatccggactagcaatactacgcaaatcattccaaagaatcttcctcccattttcatcattgaaaccataaacaaaggtggtaaaaaacttataccttttatttaccgtttcaatatgaagatgtatcaattgactagtacatttgatgatactagtattgaagagaagtggattccaagcaatgattattctccctcctttgtgccaagctgaatttgttgtaaaacaccaccctaaaaacattctttggtataagtctctaatttttggaggcttaaccctcgtctcgaagagaccaactaaaccaaccttttggattgcaataaattgcttcacactcatttgcttttgctagttgttaatcccccggacgttccaacaaatgattctatccattggcaagagagggttctcccccgtct

SEQ ID NO: 263987 - DNA, 1124 bp, Cannabis indica
ggttagtttcggccactttggtctcagtagcaaggagcttcttattgacctctcgcaactctatccgcacagccccaagttgaacctgggcttcctcggtgtccttcttggccaagtccacttccgttcgtattgtgttggaaatggcaaggttcgttagcagcagctgacttagctcaggaataggcataagccatcttcaaactagtttgtgtagacagaagatattaaataccgaacgagttaaagcagaacaaagggaaaatgtcagaaaaggcttaccctcgaaagctctttcaggactcctcccataaccagctccagagacaggtcgttgtccgccccagtcagctgttcgttcacctcagggaccgaccaactcacacagtgggtgagcatatctctgcctcttttagtctcctggtacagtactagaggtggggcaggggccttaacctgttcagacccgcttctaatcagctcggatgcacccatcgcctgttcaggcctatctgaactacctcctcgggaatcttttgacttggtcacttttgaggcaggaaggtccacaataggttgttcttcagaaaggtcaatgaccacttcagctggtgccttctctttggacagggtctcactgcctttggacttcttggctggaggggacaagcttgagcttccccccactctcttcttcaaagcctcaatcattttctgagacatttctgcatggaataaaaataattcagttagaagaaagtatacaataaatgaaggcatgaaaaatcaagaaaaataaatgcaagatgaagtactctgcacgctggcaggagcattagcccaaacaagcacggatgggacatcgtcatccgacgaatcttcctgttcctccaagacggctttcccctttccttccacaggggtggatggccgagcaggtagatcaggctctttaatctcgatagtatgttcgatgggtctttacccagtcgggagggttttcttctttttgagaggcctctcctactctaaatattcctgagcctccttctcctagtaagaatattcttgagcatattgtttggctctagctccacccttcaacttagcctcacgcttaagtt

SEQ ID NO: 263988 - DNA, 945 bp, Cannabis indica
attacaaaacttgaagaatataagttgattatttttatcctgatctgtataacagatgagctctacgttaagtaagtatatatatatatatatatatagtattaaagagagatacatgatataaacatgtagtgtatacactcagttatcaatttggcataatatgacgtggattgagagcccatcaaaaatatgtgtacatgtgaatgctttatataataggtccatcgtcagtgatgacatatattttaatttttttaagagaatatataaacacattacttatgtacttacgtgatacatacacaccaaccaataatattaatatacgtttagttcaggtgaaaccattaattaaataattgacattgtaggatttataatatgatcttctctaatgaaaactttttgactgattaaacaagaagggttgacccttgaatttggtgaacattagagttgttcgtggagtggacgatgtgacttttaactattactacaaaatcacaaaactgcaaaaattatcattactacaaccaagcctttaaaggcacttttttttcagcaaatattaaagaatcgacggcagtagggttggaagtttttttagaaggatttttgacaccacttatggcgtcgggtttttcggaaagtaaccgacggcgatagggtgtcccccctatgccgtcggttatttctaaaaaaccaacgccaaaagggtttataaccctagcccagcacatcatcttcctcattcaaccagccaacccagaaatcccccaaatcagagaaccccaaaccctctccgccaactaggcatggcaaaaagatccattcatttggatcggatcagtgatccgattcgatggatcattactgattcgaagcattcggatagttattaaatcttggatcaaatccgacccgacccgcttatttttttta

SEQ ID NO: 263989 - DNA, 841 bp, Cannabis indica
aaaacctttacttccttctctcatatgtccaactcaagatgcatttgaacctggtaggaatatccatgataataatgtcattgtccaggaaattatccactcattcaacagaaagagaggcaaggagggttttttcgcaataaaaattgacctggtcaaagcttatgataagttgagctggagatttattgatcatgctttggattgctatggaatccccctaaaattccgcctttggatctcgcagtgtatatccactaccacgctaaatatctgcctcaatggggggcaagttgggagagttaatccttcttgtgggcttcggcaaggcgactccctctccccttatcttgttatttgggcagctgaagtgcttttaagattatttcatgatgcccttgatcagggggtcattcagggaattaaacttagtagaggaggtccggttctctcccatattttctttgcagacgatctaattctggtggggcgagcaaatttattagaggtgaatggtttctggacatgtttagagaatttttgagcgtggtctggccaaaaggtgaataagctcaaaacgtctattttctttagtaaaaacacccgttaagcttacgggggaaattaaggaggctttgggaattgattaccctgaaggttgatttaaatatttggggttgcccctgtttagatgtaggcagaaagatgctgatttcaatttcattcttgacaacctcacgacaaagcttcagggatggaaaagcaaaaaactttatccaaaagctggtcgagctactctcataaaagtcagtgggcttgtctatgcctatgtatgctatgc

SEQ ID NO: 263990 - DNA, 503 bp, Cannabis indica
tgtatttttcctattttttggattattttattcccatttaataggtacctcattcctctataaaaagagaggtagtcgtaaggtcagagcatatctttctagtttctctctagaaatggagcatccaaacttactattttttttgaatccatctcatgagaaataaaacttgaagtagacatagcttcattaatgtcacaatatagggagtgaactactataaatttcttatgtctatcttatatatacgtaatttattctcgccaatctagcaagtgagaagttataaaatatttaaagaatcaaattaaaatatacacatcagatccttaaacttcttcctcattttttaaaatttcactattcatgctttatatttatagaatactattcatttatataaatattattcattgctctaaacatattttattaattgttttagacatattatcaaattaaaaatatacatataactcctttaaactttttcttcattttaa

SEQ ID NO: 263991 - DNA, 633 bp, Cannabis indica
aaattggtgtttacggtcaaattcaatcaagatggaacaattgttcgcttaaaggcccatcttgttgccaagagttatgctcaaacttatggagtggactattgtgatactttttctcttgttgctaaactcacatttgttcgactgttcatttccatgacagctgctcaatattggcctttgcatcaactaaatattaaaaatatttttcttcatggagatcttgaggaagaagtgtatatggagaaacctcctgggtttgttgctcaaggggattcaggacaagtttgtcgtcttcgcaaatctttatatgaattgaaacaaagtgcttgtgcttggttaggtaaatttagtgatgctattgagaaattcgatttgttgaaaagtaaatcagatcattttgtgttctataaaagatcaactgctggtatcattttgttagtggtgtatgttgatgacatcattattactggaaatgatacttaaaggcatctcatccatcaagtctttcattcatactcattttcacacgaaggatttaggggtgctcaagtattttttaggtgttgaagttgctcagagtaaattaatgtatttttctgtctctaagggaagtatgtacttgatttgtta

SEQ ID NO: 263992 - DNA, 925 bp, Cannabis indica
gaaacttagtaaacatagaataagtcaccgagcgatttatagacgaaaatgatgattaggtaactacctggacgaataatttaggagtatacgttgtttggtttgttcagtttatagtacattttattcaaaggaatatattatattaggaaactttttacaaaaataacgttaaatatatatcaaacacataatgacgtgacatatcatcatcttcttcacgggaaccttcaaactaaaatcaactgctaatcctaaaaacaggaatcaagcgcgtgattcacagtctacatcgaaacatataaattcctcaattttcattttaaagctcattcgaaaaaaaaaaaaaaaaaacctagaaaattctccgacagtcgcaaatctccatcgccaaaatgcagaaaattctattatcgataacctccattgatgagatcttcttagcttgaaccttcagcgaattagcaacgattagtaatcagaacataatcaaacaaaaaaaaaaacacgatacagctatttgcgattctcagtcgactgatcgcagagcaactccttcgtcaaaatcctccattgatgaaaaatattcagaccttagagcttgcacaaaatagcaactgctaatgcatcactgcaatcactaatatcaacaagagaagatctatcaagaagaataagcaagaacagatgataaccaagaagttgtgaagaataaagaatttggaaattgaaattgaacagaaaagatatgtaataccaatcaatatatcttgcacattcataatctaaaaaaattcttatttaatattcaattattttgatatattaaacagataacaaataattccaagctacaattacatcttacaaacaagaatcctagaccaatcatatatttatccaagaaatttactcttgaaaagtt

SEQ ID NO: 263993 - DNA, 1450 bp, Cannabis indica
ataatattctattttttgggatgttatttttcattttttttttcctgtgattgtaatttttatgacttgtaatttattttcctaatggtatataatttttcaactactatctatgtataatgccacattattaatttaacagtcaactttagtcaattttaacagaattagatagaaggattatactattccaactgatatattttagggggtatttttaactacacttataaattaaggggcatcatagtatagtgtcataagtacatggactaaaaaagctaattattcttttatttttgttaggatggtatttttgtaaatacaaacttttattttctatttatattcatttttcctttatagggtataaatgtaaaatactgtctttattagcttattatagaaaaaatttcttaaaaaaaaaaaacagaaaatctaaaaaaaaattagtatttatttattctgagcatgtgttttcttcacatatttagtaataatttttttttttttttatttttttgtaggtacgatggcgatcaatcaatttgtaatataataacaccgaaagaaagcatgtttgtaacgagcgaggaacaagcaagaacgtgataccataaatagtaaattaatatatcttttttttgtataaaatattatagaaatacagccatactatggagtatattaaaagcaccaaacacaatcattgacattatcaactttttaaaataaaaatgtttaatttaaaaaaaaaaaaaatcaaacattatcatatttgttttcttagaaaaaaaaaaataaattaaaaaatccataagaaagtcgtctacctagagaaagaagcaaaccatggagggaggaggaggagagagaaggcctttgcttgatgaggatgatgggtcgaaacccaattatgaggatgaaagctcatcagcaacacccgtcgttgtttttagcactttggttgctctatgtggcgctctctgtgctggttgcattgtaagtaacaacactcaataatcatgatcaacatctaaaatgtaatttggatatttgaatgtgttcttcattgtttaagctttgttcaattgggtatattgatcttgtattctatgaagtaacaattttcatgttcactcacaagtcaaaagtaactgttccttttccaggttggatactcttcacctgctcaatccggaatcatggaagacttggacatctctgttaaagatgtaagagatcgagtcatgattactatatagaggtcgaaagaacttcaatatgagtatacaacttttacttatttttttaattttagaagattggccttaataatatataaagattaggagactggccacatagtcttcctagcttcctagcttcctagcttggatgtatgtagtattcattttcttcaaaaaacttgaactgatttgatgattgg

SEQ ID NO: 263994 - DNA, 744 bp, Cannabis indica
agattttattatgtctaattaataaatatattaaatggaaaaatatttgataattaattttaattattaaataaatagttttggcatttaagtggttagaattgaaaaaatggtatttttgagaaaataagggaaaatttgtcaaaagtgaaaaaagtttaaagtggggcacattaccatggccgaccactgatatgggattttccacttaatttttccattattttaatgcctaaaaaatcctaacctaaacctagcagttaattataaaaattatttatagatatttaaataattatgtatggtgttacttttgaattctgaaatgcattttatgtcatatagtgaaatttcataattttgcatttcctgtgcccggcaacatggaactcggtgtttggctcagtagaatcacaacttagcatgttagtatattggggcagtttattagacattgggaatgtcaggattggtcaggaatttagaattttccaaaataccctttagtacccttgtatgttattttagtgtggaggggcaaaatggtcattttgccccaatgatattttgtcctttagtggacttagtgtaatgtgaatatgtgatttatgtaatacctttttggctgaaataaggattagttttatgcatttactcttcattttattcaaagttagaaaaattggaaaatttgagaaattcaaagctctcttcctctctctctctctctcgtcgtcgttggtg

SEQ ID NO: 263995 - DNA, 2754 bp, Cannabis indica
tgaaggtacagattgtggtggaaatgtcggggtttcattggatgaagccattggtgcaagtgaagctgaaaaagagaaagaaaaggaaaaagcttttgatgatgaggtagaaagaaatgaggatgtgaagaaaggggcttctgttgtggaccttcctagttctaatgttgatgaaaattcgagtgtttatgaatgtgttgaggctgctgattctgtttctgatgttgttaagcctcaatctcctggaactactgaatctgcagggcatttaatagaggatactgtggttgggatggagaagaaagctgagcttttgccccaaatagacagtgggaaagaactacctgatgtggttcaaaaggaggagctgaattttgaagttcatttagaggcacagagcaaggaagacatgacaaaggcttccaagagtagtgagaatgaatctaaatcttcaaatatcgtcaatgatttaagcccactggtgtattctagaggaaatgttaagtcagaagctgcctttaaaccggaatttgctgttggtgatttggtatgggggaaagtgaggagtcatccatggtggcctggccagatttgtgacccttcagctgcatcacgaaaggcgaagaagcattcgaaaagagatggttatttgatagcctattatggagattatacatttgcgtggaatgatgtttctaggatgaaaccgtttcttacacatttctcacaaatggagaagctaagcagtactgaagatttccatgatgccctcgattgtattttggaagaggtttcaagacgggttgagtttggactggcttgttcttgcatacctgaagaagtatatgccaaccttaaaactcaaataattatcaatgctggtttagaagaagataaatgtagggtagatggtggagataggcttttaactgtagattcatttgaacctattaagcttgttgagtatgttaaagaattggcccaagttccttgtggtgtaactgagaagctagaactcactattgctcggtcacggttattggccttcaatcgcagtaagggctattcccagctgccggaattcaatatgcttggtgggctcttggagaatgatgctgacattttgttatctggagggacacaacattgcagtgaagtgattggggctgttgatttgcaacaaaagggtgataatgttgatgcatcaatatctgataaagaaaaaccaaaaagtcaaggcgaatcatcccttaaaagaaagcaagtgtatggcaatagcgcatttccaagtaaaaaggagaaaatagtgaaggattttgctgatgagaagcatttgacaactcctgtcaaaataagtggtttggaaagcaagcttggtagtaagaaacgtaaagtgggcgaagtgatgtctgaagatttggctgtaaataaaaagaaaaccatggctagtgtggatgataacaatgctccacagctcccaaaaccaactttcagggtaggagagagcatccgcagggttgccagccaactgaacgggtccagtccaattcttaagaatggagatggaatctgtaaaagtaaagcgaacattttgcctgaagaatcaaaacccgaaaagctagaaaccgaggagtgtcctgatgataagctgtctcagctctttttggctgccagggatcccaagagggtaaacaactcttccatgatcactttcttttcagagtttaggagtactgtttccttaggattgcccagttcagaaattgaggccttaggattgcccagttcagaaattgaggagtctctggagaaagtgtttggtactaagactgtgaaaaaattaaccaagcgtggaagaaaatctaacatgcctggattcactgaactaccttcaccagagatgatgaaagagtcctactggtctgatagaatagttcgaagcattcctgagcctgaagatcgaaatgaaattgaggaccttttagctgcaaaatgtagagagaaaaagattgacaactctgccataaaaccgccacaaaatccccttgaacagcaaactgatgatgagaatatcgaaatggaagtggagaagagtgatagttttatcgatgataactatccaacagcgctgattttgaacttcacaaacttggattcggttcctacagaaaccaacttgaacaagatatttagccaatatgattctttgaaagaatcagagacccaaatcttcaagaagagcagccgtgccaaggtggtttttggtaaacgttctgatgctgaaacagctttcagtagtgcaggaaaatacagtacatttggaccctcacttgtgagctaccgcctcaagtatttaaaatcaacacaacaaagtaaagcttctccaagtccgaagaagaggagcaaaaaagggactgaatctgttgaggagggtgcaaatttgatccaacaaactcagaaagttgatgaagattgaacaataataagtcatgctacttatggtttcatgggtttatagaaccgaagagtgtcttagagagtggagatgaattcttttctagaacagttccccctgttagtttagttcagccactcaagtctacaacatgtttatttctttagttgtatggcttactgctttttattttattttatttcactttgttactacggttttcctccgccataagtgaggctccctaattaatttggtaggagatcaagcaccttcttgacctttgtctctttttcaaa

SEQ ID NO: 263996 - DNA, 838 bp, Cannabis indica
ttttttcaacacttgtggaagaagtgattttaaaagatactaaaatttgaaatgtttgcaggttggagaggagtatcaacaatgtagagaggacaagagaaagtactagcaagaggtataaggatctcaagatcccttgggattggatgcttgacacaggactcattggcgaggttggtagataaaccatagatcacaaaaattcatgtcaattcatcaacactacactaccccaaaaaattttaagtaacccattattcaaaatatccttatttttcttataaaaatatacttcaaatgatggcaacttcattaaagaaaatgttcatcaaaacctaatgcttttcttgtagacattagtcacttgtttgctttggtaaaattcaacacctaatctaattacatttatttgccaaccaacccttatacttgcagatgaaactaagctcactaagactggccaaagaatacatgaagagaataaccaaagaattgcaatgtaatgaatgcacaagagaagaaaatcttcttcttcaaggagttagattcgcttatcgcatccaccaggtatatataataatctagtttccaaagcttgcatgttagcgtttgctaattgctgacacccaaataaacattccagtttgcaggtggattcgatggagagaccatatatgcgtttcaagaactaaagagagtaggactagtatgatcttggtaaatccatattgaaacacaacaaaagctattgaaatcaaagagcaaatacagtgtgtattgagggaacggattgctttcttctcttttttttttttttttttttttgaaacacattatc

SEQ ID NO: 263997 - DNA, 525 bp, Cannabis indica
cggtatttttcacttttttactgtatttttttataagtttcatactgcagtatattgtgttaagttttcactgtgttaagttattttgctttgtgttttactagtgttttataaaaacacagtatttttgaaaacttttccgtgtgacagtatttttgtaaaagttaatccaaattccagtatttttgtaaatttccctaatactaatgctatgataaaattgaggaaattacattgtagacctattttattttgtttgttttaattttaatttttattttcatattttttaagatgtacacatttttatagatgatatccctattatacttcttaagttaatgtaagttacatgctatacttaagtggaaggcaaaagtatattaagtaacctactcataaaaattagtaaattttaataaaatataatatgaggatattttttattaataaatacaaatatctcgacttatcctaaaataatttaaaaatagtaacacttgttataaaataatataaagtaga

SEQ ID NO: 263998 - DNA, 578 bp, Cannabis indica
tagatctatcatttggagttctttttttctctttttacttttagtttatgttaatttcatgtttatagatttctaagtgttgaacatgaactaatttctatttagagtttataattgaaacttaaaaaatggatctaattggatgctactaatctaaacaataagattcaatcacacaatataaactgagttgtttttacaacgaatttgtaaggattattaaaagctaaaatacagaaaataaatcaagataaacatcacaaatttacaagattcacctgccttagaaacatattcttggattccttgaaccaaggtaaataacctccaatgagaatcaatgccaagatacaaactccagtttgtaatacaaatgtatgtaaaataatacaacaaagattcttacaataattaaccctaagatcttgattaatcaaccaatatttaaatttatgtcctcttagattcgaagacaagatcccttgcttcaattgagctgagtatcttttcagttaagaatctgaactctcttcaagtgaaacaaccccccgattactcatcatcatataagcttgtaa
